United States Patent Application Publication US 2008/0050393 A1 - sequence listing, part 12

SEQ ID NO: 47709 - DNA, 1974 bp, Homo sapiens
  misc_feature (1)...(1974): n = a,t,c or g
tttttttttttagatgttgtctgtatttattttctacctttatgaaacaagaacctgctaacaggtaaatcgtaaagtaacatatttttgccctgatgccattagtcacaatgccatggggtaactgctatgtgatttcccatttgcaaggaagcatattaattcagtttctgctcaatatacaattaggttgtagggatatagatatctcatttgagttatctgagtttttcatctttatatctaaaaatctaatctgaaaatagtaaaacacatttaaaaccttagatgctactgtagtaaaagttatgtttataaacatttcagtatattccttcaacttcaagaatcttgaatttccttgctagaaggcttttttcctcaaagattccttttaggcttactttggtgttcaggatctccaattataaatgtagtctctcagcaccacattccgtaaagatgatttcccaagtaacggtatttgactaagttgctccagagtgttagggtgcaaaccacagttagtaagctccttatgaacaacctccatatcaagtactttgtccatttgcaggcagatgttaaatacagcagttggctcgtgtggatacagtactgcagagaaagatccactctgtgaagatttgagcagcatggtcagtgaatgcagagaatgaggcatgataggacctgtaatctccaaactaaattggtctctgtatccagaaagagcttgtgtcttcacattcacactccgtgccttaagcatttgcattgtggcacctcggaaagcaacaggggacaagagggttggaggaagtcctgcctgtggacctgaggtagcaactaaactcttagagttaatcaaaaaattgagcaatgtaaaggtgttgattccttttaccaacacaacagattcaggtctgtgatccatttgtacttcatgtttctctttacgcagcttgatagaaagtatgtctggctttttaattttatcttgcacacccatctcttccagccaggaaaaactttcctcttcatcctcatcactgatggcttgctcccagtcactcattaaaacatgctgcagggttgcatcatttgaccaaggacttgtctttccagccatttttctatcagctccaatacgagggaacagtggtagccaagacaaagcagggtggagccaatagataaggctctgctggaaggtacaacggagctcagaggagagtttgggatcctgtatacttttaggcaaagtaacttctgttgccctacaatgntggacaagaccttgagcttcttcctgtgctttcacctcttctcaaccctttacctgggcagatcatttgaaagcacaggaagaagctcaaggtcttgtccagcattgtagggcaacagaagttactttgcctaaaagtatacaggatcccaaactctcctctgagctccgttgtaccttccagcagagccttatctattggctccaccctgctttgtcttggctaccactgttccctcgtattggagctgatagaaaaatggctggaaagacaagtccttggtcaaatgatgcaaccctgcagcatgttttaatgagtgactggtctgtgagctttacttctctatataatttgctgaagacaaaactttgcccctatttctacgtttgtacctatcagtttactgtcctgttccgagcagcaggattagctggaagtgacttaatcacagctctcatatctccaacaactcgaggtttaagagaagctatgagaaatgaaggtattgaattttctctgcctttaataaaagaaagtggccataagaaggagacagcatctggaacaagcttgggatatggggaggagcaagccatcagtgatgaggatnaagaggaaagtttttcctggctggaagagatgggtgtgcaagataaaattttaaaagccagacatactttctatc

SEQ ID NO: 47710 - DNA, 1881 bp, Homo sapiens
gtgagccaccgcccccagcctggcctggcatttctttgagttcaggaagtgtgacaaggatttggacacccagaaataagcgtgtcgagaagagcacaagcagaggatccagcgctcggcatggcggagccagatctggagtgcgagcagatccgtctgaagtgtattcgtaaggagggcttcttcacggtgcctccggaacacaggctgggacgatgccggagtgtgaaggagtttgagaagctgaaccgcattggagagggtacctacggcattgtgtatcgggcccgggacacccagacagatgagattgtcgcactgaagaaggtgcggatggacaaggagaaggatggcatccccatcagcagcttgcgggagatcacgctgctgctccgcctgcgtcatccgaacatcgtggagctgaaggaggtggttgtggggaaccacctggagagcatcttcctggtgatgggttactgtgagcaggacctggccagcctcctggagaatatgccaacacccttctcggaggctcaggtcaagtgcatcgtgctgcaggtgctccggggcctccagtatctgcacaggaacttcattatccacagggacctgaaggtttccaacttgctcatgaccgacaagggttgtgtgaagacagcggatttcggcctggcccgggcctatggtgtcccagtaaagccaatgacccccaaggtggtcactctctggtaccgagcccctcgaactgctgttgggaaccaccacgcagagccaccagcatcgacatgtgggctgtgggctgcatactggccgagctgctggcgcacaggcctcttctccccggcacttccgagatccaccagatcgacttgatcgtgcagctgctgggcacgcccagtgagaacatctggccgggcttttccaagctgccactggtcggccagtacagcctccggaagcagccctacaacaacctgaagcacaagttcccatggctgtcggaggccgggctgcgcctgctgcacttcctgttcatgtacggaccctaaaggaaaagggcgacggccggggactgcctgggagagctcctattttaaaggagaagcccctgaccctgtgaagccggagttcattgccgacctttccccaccaccgcaacaagcgggccgccccagccacctccgagggccagagcaagcgctgtaaaccctgacggtgggcctggcacacgcctgtattcccacaccaggtcttccgatcagtggtgtctgtgaagggtgccgcgagccaggctgaccaggcgcccgggatccagctcatccccttggctgggaacatcctccactgacttcctcccactgtctgccctgaacccactgctgcccccagaaaaaggccgggttgacaccgggggctcccagcccgtgcaccctggaagggcaggtctggcggctccatccgtggctgcaggggtctcatgtggtcctcctcgctatgttggaaatgtgcaaccactgcttcttgggaggagtggtgggtgcagtccccccgctgtctttgagttgtggtggacgctggcctgggatgagagggcccagaagaccttcgtatcccctctcagtcgcccggggctgtcccgtgcatgggttggctgtggggaccccaggtgggcctggcaggactccagatgaggacaagagggacaaggtatggggtgggagccacaattgaggataccccgagactaccaggagagccctgggctggaggctgagctgcatccctgctccccacatggaggacccaacaggaggccgtggctctgatgctgagcgaagctataggctcttgttggataaaagcttttttaacagaaaaaaa

SEQ ID NO: 47711 - DNA, 1252 bp, Homo sapiens
tttttttttttttttttttacagaacaaacgtgttctttactgtgaagttcattatgaacctgaatccctgatcatttaaagcctattatccaacttatgcctcaagcagcaacatttttgtgttcaacaatttaacttactacacacaccttgtgcaaaatcacaaaccttctcatacatttatgagcttcagaatgtaactgggaagtgtagcacagccctttgtccctctgcattgcatggtgagaaacggctaaagcaaccatcgccgcattctgttttatgagcacaaaggaacacctattcttatctgggccacgcgccccggtccttaggaggatgccagatccccctgggatggcaatggcagaggctgcacagcttcctgaagatgtaggtaccacagcaccagccccgggcagggagccaggccaagggcaacgacagaatcttccggagacagcacagcaacccactcatttgtgtgcacccgcacccacaaccgtcttgactgggtgcatgtcacgcccagggtgagggaagttgaggcctggcctcacagtgtggaccggctgcgggacaagaacacagtcaactttggctttgcttggaaagctgcttcagatacataactcccggcccctcctgaaaatgatcgttttcttagccggggccctgtgctttaggagaggtttactgtcagagcttgctgttcttttgaaactgggccactaggctgaggacctgctcagaggctttgatgatcttggagccgaggtaggaggtgctgttggggcccgtctcctccaggaagtagcggtagttggccatcaggccgcaggagccggtgatgcctctgaggctcacatccgccatccagttgatgcgccacagcaccgccccgttctgcaggtggaagttggccacggggttcagcgcgtagccgcggtgcttctctccatacaggtaccaggcgcacagcctcatcagcggagtctgcagcgcccgcaccagcttctccgactgcacccactcgctgctgctgaggaggagcttgagggtctcgttaatggggccacctgtgatctccgagatttccttacattccgaatctgtaaagagttcattcctcccatgctccttcgtttgcgagttcagaagccccagaagccatttggtgaaaccaggtataggtgacagacttgaaaacaccccaaggtgaggaaactctctctgcaactccttgacgac

SEQ ID NO: 47712 - DNA, 422 bp, Homo sapiens; identical to SEQ ID NO: 3625
  misc_feature (1)...(422): n = a,t,c or g

SEQ ID NO: 47713 - DNA, 1963 bp, Homo sapiens
tttttttttagtttagatcattgctttatttcactaattgttcaacaacaaagttcattcctctcaaggtggatcttgaatcattccttgtgttctcttcctcgttctgaataaaaaaggtaatgaagaaaaagcctgtacttttggagacctagaatcttgattgatgctaataagcttttgacagcaatttcgtgttacggtatatcctgctggcatcttggtggtcacacggagctccccaccctccagtgaagatggctgtccacaactaccaccattgaaaccaaaagtaagtgttgaaaaatgcaccttttacaataaaaaagtagaaaccaattcaatttcctctttttttttttacgaatataaagtttcttgtaaatatgtacagtcttttgagctagttctatatagcagaaagcagttcacagatgagacacacaatatacattttcagggctcaagaagcccatttctcatggagatcctaaatgaaatgccaagactgaaagacccattttcagtgacctttccaaatactgtggaccaagagacaaaacttcagcaaacattcaatcaaatctgccctggggacgggaggggagggagtacgaccccacagactccaagcaacacataaaacgccacagcaggacatttgccaaaggagctaccacatggaggtttgtaggcgtttcaaacaagaaagcactttaggttaagacacgagcaggaaggagctgggatgccagggccaggttgcaatctggaaagggatctgaactgtggacacagttgaaaacacggtcatgttcacctgctgcggtggaaacgggtctacctttgagcctacctaggaggtgcctgggttgttgaggcgggcctaagagtcgtggaggacccaaagcaacagatgccttgtgggagattaaaggcagaaataaggccgcgagttagcttgccaactgcaaagcctctaggttggttctataccagttgccaggaatttcgtactctaataggagggtccgcagacccagtgggagccgcactgcacctaaggacttcccaaccctggcggagctggaagagttgagctgcggctgctttctcaaacttcctggtcttaggtctagccctagggaaaggctcatttggaaagtcacagtttcgtggggtagaaccgcgctggattgggtgtgaacagagtcatcctctgcaggcagggaagtgtgaagtttggaggggacactgagtgggaggtggtggtttgctgaaatccttctctggtcgtaaggcttgagcgttttgttttttgtttgttcagtgctacagactgcagcttgtggtggccagttagtcggcaagtcgtcagagggtctcgatttggcaggagctatgggatggtattaatacattggcagagcaacccaagggggcagcacatgcagtgaactgccatgcagaactcccgacgggcctcttccccatcccagagtggggaacaacacgccgtcacagacaaggaagtgggtgcccccgtcccctccccgaccccgagacccaggagtgctgggctccgagcaagtctattgcatgctttcctggccaaagctatatggaaagcgggaacagcaggctggggagatgacgctggggggtggggaaggaaagcgtctcgaggtcccttggccccaagtcactgcctccgagctgaggccccgatgacctccatacattctcagctggtgggaggggaagtcgtcaaggccataaaaggcaatgaaaacagtaaacatttggctacgatgtcaccctggggaaagcagggccatctatgagaatgaacaggaacaaggatgaacctacttggctgcgggaggttggccaactgaccgggactgttctacactatgcctcggtggcaaagacctgatgatgtggtcgagctaaaaatgac

SEQ ID NO: 47714 - DNA, 1003 bp, Homo sapiens
  misc_feature (1)...(1003): n = a,t,c or g
ttttttgtatgaaacttggaggcttacaggtatagacagctttcagctacagcacattctaattttttattttgtttagttcttttgtattcacttctggtctctttaagactgttttaaaagaaatcaatttagggaaccccagttatataatataaactttgtaatctgagagaaaaaatgtatagtaaatctaagtcttgatttttaactttctattgtaaaaaataataatatacagagtttaatagaaggtgatgttttggttttgttttcccagaggctggccatatgggtctttgagtacgggggatgtccccaaactgggcccaccaattgagccatgggcggcatccggccaggaatgccagagttagcctcccaggctttgcgggtggacatgcctgctccctgccagcctccagtggcctggccaggccctcccgagcctgtctgccctccccaggggtggaggagtctctgggccccaggaggattccctcccggagactcgcacggtgctccctgctcacgcgttgtcacagttagtccggaaatgactgaaaccaggcattctcccggacctcagcgtgggggagcctccaggcagacgctgggtatggagctgtggtgtggtctgtcctgtatggtggccagtgctttctgccagcatttctggatggatatagggactatcattagtatcctaatacacggtgattttaaaacaaccataaaattgattcagagtccactgacccttacagatgtaggtatacccttactggagagggaactctgatgaggagatgctggtaaattatcattttttaaattgctggtgagtctgacacttggtgagttttcagccagtttgttaaacttttaattaagtttgttataataaaatataatggatttgaagttccatttttaagtaccncgtttcaagnattctaacagatttaatggctattaccgattaagattccccgcnttcagc

SEQ ID NO: 47715 - DNA, 1015 bp, Homo sapiens
tttttttttttttttttttcaattttaatagaaaagaatttattgcaaatacagtgactttttatattacagtagtacattccaatcagccatatggcataatttgcatacatttcaaatataaaactatacttttttttttttttacatatagtacaatttccagtgtgatgacatttcaatgggaaaaagattgtgcatttgcaataaacaccatcattcctgagtccacagataaggtccccggagaaggggcttcccctcctttctcgctgggttgacgttcccagcgagtgaagccttttctggaatgtgtgtacgcaccctccaccaagagttctaataagctaagcttaaagcagaacagtgaaatggcaaaactgtacagagccctgactttacatttcactctgacagccagggtccggaagcaccacatggaaagtgctgtccataactgctcacttacctgctccttgctgacagctcccaggatctggctccagagagtggcaaaactgggaattttgccaagggaaattactcaggaccgctaataaaaacgccggcttctgcaacatgcatattcccccagcccccacctccatcttgcccagggcagaccattcattaactatctgcggggtgaacaaagaatcccaatcctcagatgtcccaggactcatggctcatgacccacggaatctaaggcagcacagtggcttaatttaaaagatgtgctttcgaatgaatcctagaaaataatctgtctttacacagagagggctgcgggggcaatcctactgacgagtttgttgagagcgcgaactttttcttccaagaggcggctttgtttctcggcgcctcgctgcttctcctcggtggcctgaagtgctctcaccaggtgggcgttctccacgtacagctccttcagcagcaggtcggacttcgtgttcttttcaaactgctccttcagcttatccactttctcttggaggagcatttccatattctc

SEQ ID NO: 47716 - DNA, 1705 bp, Homo sapiens
ttttttttttttgaaatggatcaagatcattttttattgcacatctgcttacatgtctgctgcttttgggcagagttaaacctgacatattgagtcagtttccgtcattttacatcaactaaattatagcagtgaattgcttatgtgtctcccaggcttaccttccagaaactagaacattaacctttccaatttatctaggtactgaagcacaaatttaacatttgtttttgcaaaatttaaacactcagaaacaaaccaaacaacatcctatacagaaaacaatttttatgtctagatatacaattgaggttcagagaacttctgattatacagtattgtaaaggtaatgataatccaaccctcttccaaactatttaattcctgtatatgtaattaagcatttattttcagaaattttaacactttcagcaattgattctctcacaattaggcatttttaagatcctccatcccaccaaaaataacccacaatgactccaaatcttgtttttcttttttaaaacgctattctcttgggactaaactgttcagaataatcagtattcttattccctttccactgtactctactgctcaatgcaaaatggagaatatgtggtccaaatagaaatatggcatttgtgcaggtcaagctttgaagagacatggaccacatgattagcctgatttttaaaaagcaacaagaatggtgacacaactattacaccaaacacaaaattctggccattaatgaatcagaagtaataactgatgctcctactttaaattcatcaatgccatatttaagaagtcaagcaacaacacatacttggcaaaatcttctaaattctcaagttatcaaacaaaaaagttatttttaatactttaccccccttatatcttatgattcaatcacttatattttcctttgttagattattcagaagaaacaattctatttaaccttaataagtttttgtctcacacattttatataaagttactaaaatcacaattctgagaaatttatttttaatcatacaaacattatatgatttaactgcagtaaagaaattatatcttttcttaatctatttagaatgatattacaaaatctctaagactcttttccacagcttttctttatatgaacaaactcataattatgtaaaatgcatctcaactccacagtgaactagcatccatgcttattccacataggtactgccagtggtccctgcggtgtcctttcaacaatgacaaactcttcagggttgccaaatgcctcatagaaaaccaataaatcttgtatggcatgctcctcaatctgaatcagagccaacggtttttctcgacttctaataagagctgcttcttgttgtagttcttcttctacaatagatgcaaaagtgactggggctaccatggatggagcagtcactgaagaagatagccagggattgggactgtctagaagtggtaaatctgaaatatggttgccttctggtcctggggtaccatgggtagagcatctgacaatttttggtgcctgagaattttcaattcctttaaaagaaacttttttgacatgatcgcctgaactatggctagtaacagactttttttcttctagtaagaaatcccggaatgacttggatgaaactgaatgcagagaagatgcccatgcattcactggtttggg

SEQ ID NO: 47717 - DNA, 391 bp, Homo sapiens
aaatacaaagattggatcaaaggatggagaaattttaatgcagggcatgaacatcctgatcaaaactcatttacttttgctcccaatggtgtgcctttcattactgaggctctgtacgggccaaagtacaccttcttcaacaatgttttgatgttttccccagctgtgtcaaagagctgcttttctccctgggtgggtcaggtcacagaagactgctcatcaaaatggtctaaatacaagcatgacctggcagctagttgtcaggggagggtggttgcagcagaggaaaaaaatggggtggttttcatccgaggagaaggtgtgggagcttataacccccagctcaacctgaagaatgttcagaggaatctcatcctcctacatccacagc

SEQ ID NO: 47718 - DNA, 1070 bp, Homo sapiens
gctgaaagtatattctgattcggtgtgtgtataaggaaatatacaccagtatatgcattaaaacgtcaagaagagctgggcacagtgtcacatgcctgtaaacccagctattcaggaggctgaggtgggaggatcggttgaggccaggagtttgaggctgcagtgagctatgattgcacagctgcactccagcctgtgctgagacctcatctcttaaaaaataaaaaataaaaagtctaagaggatacacagaaatttttaagtggttacctccacggaatgggattaggggatcagaggtgagggaactcatggtttggctatttctcgttctttctgcactgtttcaaatttttacaagtgtatgttattgtacttttaaaaagattagcttggcaacaagtctagcctgaaatgggtgctattttgactagtctgagtgaaaagtgaggatttaaatgaaggtaacccctaaactcagccagtcccatgtttttttaacacttggaatatctaattcccatttacactgcattcttcaaatgtaattttcaaagatgccttttgcctcatcccttgcttttaagtattattatagacttttggagactcacgaaacaagcaatccctaaattctcgcccaggaaagtatcttggattaaatggtttttgagaaccttgagagtgtatattctatgaaatggaagaaacaagaactagacagagtcacaaatgctgttgatcacagacaatctctgccatccataaggtaaatgtaatacatctggcgacctgctgagtgtgaacttgcagcaggtgaggaaggaactctgaactctcacaatcttgtttcttcatttcccagagagaaactcggcaaagagaaaaaggacatttccctccaggttatctgaaagaatttcaatgcttacctttaatcatgtgacattgtttatcttggattaaaagaaaagaaaatgtatttattttgtgcatattttcaataaaatatataaaatcgagttggtatatagtgccaaataccattaattaaaaatattttaacctga

SEQ ID NO: 47719 - DNA, 395 bp, Homo sapiens
aattcggcacgatgacagggcagaaaggtctctctcctcctgggcgagccgttcttcactaccagcctgctgccgtggcacaacctctacttctggtacgtgcggaccgctgtggaccagcacctggggccaggtgccatggtgatgccccaggcagcctcgctgcacgctgtggttgtggagttcagggacctgtggcggatccggagcccctgtggtgactgcgaaggcttcgacgtgcacatcatggacgacatgattaagcgtgccctggacttcagggagagcagggaagctgagccccacccgctgtgggagtacccatgccgcagcctctccgagccctggcagatcctgacctttgacttcaacagccggtgcccctgcagccctgt

SEQ ID NO: 47720 - DNA, 1066 bp, Homo sapiens
cggctgttattttgtttgagacagggtctctctctgttgcctacgttgtagtgcagtggcacaaacaaggctcactgcagcctcaacctcctggactcaagtgatcctcccaccccagcctcccaaagtagccaggattataggtacatgataccacactcggctatttttttttaatttttatttttgtagagacaggggtctcgccctgttgcccaggctagaaactgagtttcaaacgtttaaaaagaccttgtgaaagtccccactgccagtaacatgttcaaggtggtttagaggtccatggggctgaccagcctgagcctactcaccttcaaagtctatgcagcaccaaaaaaggactcacctcccaaaaattccgtgaaggttgatgagctttcactctactcagttcctgagggtcaatcgaagtatgtggaggaggcaaggagccagcttgaagaaagcatctcacagctccgacactattgcgagccatacacaacctggtgtcaggaaacgtactcccaaactaagcccaagatgcaaagtttggttcaatgggggttagacagctatgactatctccaaaatgcacctcctggattttttccgagacttggtgttattggttttgctggccttattggactccttttggctagaggttcaaaaataaagaagctagtgtatccgcctggtttcatgggattagctgcctccctctattatccacaacaagccatcgtgtttgcccaggtcagtggggagagattatatgactggggtttacgaggatatatagtcatagaagatttgtggaaggagaacttttcaaaagccaggaaatgtgaagaattcacctggaactaagtagaaaacttcatgctctgccatcttaatcaggaaaaactagaccagacctctgttatcttctgtgaaatcatcctacaagcaaactaacctggaatcccttcacctagagataatgtacaagccttagaactcctcattctcatgttgctatttatgtacctaattaaaacccaagttaaaaaaaaaaaaa

SEQ ID NO: 47721 - DNA, 1673 bp, Homo sapiens
ttttttttttaaggaccagatatagcctttaattcctaatgttcaaaaacaatcctgtcttctaaatcacaacttttcgagttacaagatttatccacttcaaataaggataccttttataaagtactttcttgtggttttacagatttcaaggtgcttctacgtggcttcagcaattctcacaacaaaccctcagtgggtcagggtcttctaagattaaaatgttaacaccaatgcgtgtgaagtacagtgaagtacagtgaggttaaggctcagtggcaaacgttaaagaggcccacacaacacaccagggatcagagccaggtcaaattcttgctccccacctccaccccacctcaagaagaaatttattttttgtttttatttttagaaacagtctcactcggtcacccaggctgggaggccatgtcacgatcacagcttactgtaacctcaaactcctagactcaagcaatcctcctgcctcagcctcccaagtagctaggactacaagcatgtgccaccacacttgtttcatttttaaattttttgtagcaatgggggtctcgctatgttgcccaggctggtcctgaactcctggcctcaaggaggcactagattgaatgacaacagctacagcatttcttactgaacttaaccctgtgtgacccttgaaataataaaacccactgatcaaaatagatgctataatctttaccacaaatgaataattaaccctgtgctcaaactgctacaaaaatatgagattcaaatgttggagccaatgaagtttgtataaaggagagtttctgccagtgggatgtggcagtgccaccctccttatatcttggctgtcagtcttttggcttggtcccgcagctccattgttgcgattgctgaaagatgaacttcgtcaggtccatctgctaaacgcaaaactcgggttatagcatacatgttagccagagggtaatcctgggaaacaccagcacctccgcacacctggatggcccagtcaacgattttgctgacagcccgtggggcagccactttgatcattgcaatctctttcttagcgccagcactgcccagagtgtccatgctgtgagcagctttcagagtcaacaagcggatcttctcaatgggcaatgcggctttcagcaatccagtgagccacaacctcatgtgcatacaacttcttcttgaaagctatcctttgtgttgcccgctcacacatgatctgcaaagcgcgttccgccaaacctactgttctcatacagtggtggattctgccaggtccaaggcggccttgggaaatttcaaatcccctaccttcacctagtattagatttgtggcaggaactcgcacttgattaaaatggatctcaaaatgtcctccatgaaaattatctgtgtagccaaaaactgacaaaggccttattatttttactccaggtgtgttcatgggaacaagaatcatgctgtgctgtttgtgtctagtcaaaagaaaaattgtattagaaaaagtttgctaagaagaaaaataaaacagataataagcagaatcacaattgtctttttgatgttttcatgtagtcatgtaagcagtgatgactggaatgggaactgtgtaaaagacgtacaccaacatagtctgatgcaggctgtgatct

SEQ ID NO: 47722 - DNA, 1218 bp, Homo sapiens
tttttttttttggtgggaaaagccactttattaaagattctctatcacagtcccccatttctggaccagtcagattggctttgggttgaagtttctgattgtctttccttccagtttctctctttgtccatggcttcctgagattcagtgtcctcgatggcatctggggaaaggtaggtgaccttggggtcctggaccaatgcagggtgagctggcagctggcagagggccaaggagtggccagccccacagcccacaaggagtcctgacgatgacagcagagcctgcaccggctttggggcccagacgttggcttcagtgccatctccgcacatgccatgctcattccagccccaagagtaacacactccaccaattattgccaaattatgctctgagccacaagagacctgtctgagcaaccaggtgtgtccatccactccagatggcagtgaccttttcattctggaaacaatgtgcttctattttctggggcacaggaaggaaagcagcctcattagccagttgccccatgcttgttgctttccccaaacatacacctctcctggatctgttaatgaagctgaatggtctgagccagcaagaacacacattgctttagaattctctagacctgtcactctgcttggttcctttgctgtgaaaaacaatggaagagtctgcccagggcacaaccgtcgtccacatgatgccaaaccagtcccccactggaacacgatgccactcgctgtagcagctactgcatgcctcagtccagcagcaatacaaacaaccttctctttatggagctcaatggcctggggaaccacacatcttcgaggtccatgaggaactcctaactggccaaaggagttggatccacatgatagaacttgaccattttctgtgagcataatcgtaaaatcccagccacaggccacctgttggatgggacagccaaagagggatttgcagggggtaaaatatgggatatcctctgtgtgaccaagccccagttgcccatctttgttcaggccacaaacaaagaggtctcctccatctgtgacaactgcagagtggccccctcctcctgtgatcctcctgacactcctgggtttacagaagtcattccagttgctggggcaacagcacatcttccttatggccgaggccaagttgcccatagctatttgcaccccaggcgaagagcgcggtcgc

SEQ ID NO: 47723 - DNA, 1332 bp, Homo sapiens
attatttactgttatttacccctaaacaacagcataactcaaataataatgacacacacgtcccgcccatatacacaataccactagcctatctgtcaggctatctggcctttgcttggttcctgatggagctgtctggagacagtccctctgtaaaaatcccgactcaaataataatgacacacacgtcccgcccatatacacaataccactagcctatctgtcaggctatctggcctttgcttggttcctgatggagctgtctggagacagctcccctctgtaaaaatccccgacttaaacacaggggacagaagaaaggggggacctaggtcagatcataaactgacaggctcccagcgtccttagggagtgcctaatgtggaaacttttgagaacgtgctggacacatctgggcagagggcagaaggcactgtttgtttttatgtggttgatggataaattccatatggggatataagacctgtatatcacccattttaggccaggcatgtggaagcacagtggggttagctactgggtttcattaaccaaaccatgcggcatggtttgggagccatgggaatcgggagcccagagtaggaacctgggtgatgggggaggtcccccagagaaaagtaacccttgcattcactgcaagtaagatacaacgtgaaatgttaagtccccttttatgtgttttgcaactatagaatgtgcaacattttcatcaagatagaaaaggtaaagaaagcaaaactagtattttggcctaacacaaccaagcatgatttgccaattgcgctatcctgtggagaaatctaccactacactatccagggaatctgtggtcagtcctcacccccgcaccctctaacattttacttgcactaaatctgagttcagctaaagtaatgtatcctggaatcagagaagccctagggttggggacaaaacaaggatgggccagtactggcatctcaggtacaggtgacttcctggctgtcctggggaagctcgttgttgaaactgctctctccaaatgttgagtaaggagggacctggggagcttcgatgatcagcagaccctctggggaaagtgaggcaaatactgtcacaggatccacctctgcaggaagctggattttctttgtgaagttcttagaaacaatgccaccttcttgctgtttctcttcatgtttgccagacacctccacgtatccatctttggtcttcaccatcaactcctctggcttgaagctgtgcacattcacacacactttccagggaacctgggtgatgggggaggtccccagagaaaagtaacccttg

SEQ ID NO: 47724 - DNA, 852 bp, Homo sapiens
tttttttttaattaaaatatgtcactctgaaagctgtatggagaagggacagggagtgctaaaggagtgttccagggcaggatgaaagttacttgtactatgtcagatatggtgcaagaaacagagagacattgatggatttggagatagagtcaacatgagcttgtgaccagctcaggatggagggctgggaagagtcagaggtgcccctgcatttccagcatgtgtgagaacgactggggggcagtcacaggaagacaggaagaacagcccacctcattcatcgcttagtctacaaatagtcattagtatggaatggactgtggacacaggccctaaggatataggtttgcctcggaggcaaacgaagacatcccagggcttggggagctcacagcccagaggctgggggtggtgtgggggtcagatgtttgagaatcacctctcaaacaaatattaaattggacctacaacagcagctctagggaaaggttctcaaatgagtccgtacctatgcccgcatttctgttgggcaggtgacttgccattctgtgactggatgtgtatttcctgggctatcacagtctctttcagaggactggaagccccatggggccaggtcttgtttattgttgcactccccgtactttggatatagcaactgtcaatagatgttgagagaatgaatggagagcacagaagttgatttgtgtgagaagggctcaaatcctggctctacctctccaagcctcagtttcctcctctacaaccataaagttgtgaaggattaactgagacaatgtttagcccgatgcctgcaaggagtcaactctcaaaacggtgtgggccaac

SEQ ID NO: 47725 - DNA, 1396 bp, Homo sapiens
gttgtatttggtgtttttaattgtttttgttaatgtaaaaacagaaccatcacagccgctcagctctataacccatccagcccaagactgttctagtggtgaaaccaagagtagacaggtcttcctacctcagtgacctcaaaacacaaggacatctccatagggcatcaacatgcatctgtcatccaagaatctaagaacttcctgatccttccacattttctatcaataatattgccttctgaggttatggattccaggtcttctatgaaataggtaaagcttcctttcgcgttccaagaaatatagtttgcgaagggaactggaaaacgtgactctaggcctcagccacttcctctgttaccctgtgcaagttgtagaacaatccacgttctcacagctccccttcttcagttgtggagttcttcaaggtggacagatcacacctcaggaagtcatcccttgtaagcacactagaatttatcataaaggcaggtcggcttgttagtttttctttgtccccagcatacactgagccaacaacttaagtcatgaatgggttgtttagggctctgtctgtcctaaatgattcctaaaagcttcatatagctcatatagtcttattgtccactgctcttttggtgtggtatgatcctacctgtaaagctatcaaacccctgggtcctggatgcctcctccagatttcataccttcctcaagtttactaaatactttctgaatttaagaattttgagaaagtcacctaccagctaatgcaaaaacacagcctaattctgtgtgaatccctgttgagatcagcttttcaggtcagggagggaaggtatggggtttagggtaccctctcctatcacacacatcccccctgcccacagtaccctgacctaccttgcctgagactcctagacactatgagctcccttctggctgccactcagactggccaggaaggctcccagattgaacacaggtgacctggtatagatacacactgtactgtgggccagaaccatggactacattttaagccatgttgtgggcccttcctgcctacagaaaaggacacttgagtggagtcacacttgggttgcctaatttattaccttaactagaaacattctaagtatgggagcctgttctggaggatagcttctaaaccaaatctaaaactatctttgcacacaagtgttgtgaagaggtaagcaggggatcagagctccatcttctgtgaccacttctccagggactgccacctatagggctcaggttggtaccaacagccctgcatagtagagtcactgtcaatcatcttcccacttgtaagcaggaagacaaaaagtctcatgaaatagaaacgaaaacactgaaggcatggcct

SEQ ID NO: 47726 - DNA, 760 bp, Homo sapiens
ggaagccagaggattgcttgagcccaggaggtcgaggctgcagtgaaccgtgattgtgtcactgcactccagcctgggtgagagagcaagaccttgtctcaataaataaacccaagttacttcgatgactagatactggaggtctgaaggagaagctttaaaaatacagattgattgcttcagagaaatcctatttataattatgatctgaacttattctatgattagcaaatatatcatctgaaaataaaacaggagttctctccccagacttttgtttttcaggatggtgagttttggtctgggaccctcatggcacccattttgataaaaggaaaaagatagtaaaacaggaaataggaagtttccagagatttgggcatctcaggattccatgaaatgctgagactaacccactaaatccaaattttattggctatggtaaatctaaatctgttcagtgttctgaacagattttatgagtttatgtctaagagtttatgtcctaagagaggtacataattcacaaacactatcatgctggcagctgttttgtccacatcaattcccttgatttaatgctctgatttcaatttagaaagtactgagacatgtaaagtctcaaaataggaaaaacctatcctgtttataaggtgtggtcaataaatagaccacagataatcttagtctattaattaactctcagatcatcttagactattaattaacattctgcttgctgctgattaaaaaaaaaaaa

SEQ ID NO: 47727 - DNA, 768 bp, Homo sapiens; identical to SEQ ID NO: 3725
  misc_feature (1)...(768): n = a,t,c or g

SEQ ID NO: 47728 - DNA, 1951 bp, Homo sapiens
  misc_feature (1)...(1951): n = a,t,c or g
tcagcagcatttcacgctatttattccccaaaaccttctgccatagaagacagccaccatacagattggaaaatgtggacgaggagaaaaggggtgtatggtaagcaaaataaattgtatttttccatccttggggaggataaaggaactctttgcactgctataataaacagcccccaaatgccagtggtttaattcagtggagttcagacctcattcctatatcattgcagtgtggatgctcctggatgaaggctcttgtaggtaactctcctccagtcggtgattcagggacccagcctccttctgccttgcggctttgccttttaaaggtcctcagggtgctctccatgtatcttgccaatggggaacgagtgtggaggactcacaagcgggtctcacatcacgtcctccggggctaatacacatcccttctccccacactctgttggtcagaagtcactgcttggcgccctgctacctttccttctcctccaccacaggaggaggaggcacagcagtcccaaaatgacagttttgagcacagcgacagccaatgcaaccctgatggcagtgtccagacttaggtgccatgattctgagtgccctttgctttctgtgaccctgaggccgggctatggtggttgtgctgctgggcctccaggtggtggtggttgtgacagcctgggtgatggtgagtttggtccccttgatggactgcaactgctgcctccctgatctccgggtgtccagctcaactcggcagaaatacacagactggtcctccttccgcaggtttgagatcctgaggaagccgctctcctgaccctctgtccagttcagaaagagccggttcacataatccttgtgaatggaaggcggccttgtgctgtagaaggactgcccgtggaagtggccccgtctccaggatattctcacgttgggaactatggctaactcccaggggtaatagaaggagaaggggatttccacagagccacccatggaggctgagaggtgttttggttgagtgaccccataaaggtagcttggaccagatcctgtggagccaccaggctgcagaaatgctggcggctgcagcaggagcagcaggggcagcaggcaggggcccgacccatggccttgttcttctccaggggacggggagacccagcagagctgtccaggcaggagaggggccctgtggaggggctgcctgagggcctgggtgatggtgaggtgggtccccttgatggactgccacgacagcctccctgatctgtatgtccagctggacttggcagaagtacacagactggtcctccttccgcaggttcgagatcctgaggaagcctcccttgttcttgctttccccttgagatcaggaatgaggcacagatgtctgctctcactgcctcccttcacggtactggagtcctagccagcgcgctatgcctgaagggaaatacaagtgctctgtgtcttcttcaattctgtattgatctatttggcctccacccatcacagggcccatattatctatatttcctgcattcttggcctctttttagtgggggacatggtctcgctctgcctgtaggtgggactataggcacgcaccacagttctcccctaattttcttttttgcagagacgtggtgtcactgttacccaggctggcctcaatctcccaggctcaaggcatcctctcagtgtgctgggattacacatatgagccacagggctgagccccttgtacattgccaatgctctggcatctggtgcctcactgactaaggagagacccccctccangggtactgactgtaaaattttacatcaacttnttaatcaactgggncaatttgaccaaagccagctaaatttgnttaaaagcnctatcanggggggcacgtggtcaagtcgttanccaaactttggataaanggaa

SEQ ID NO: 47729 - DNA, 2268 bp, Homo sapiens
agaaaggaaaggagagcgtgggatagtaaaagagaagacgcggagaagaggagaggacctacaagaacggaggacaggggcgcacgatggtcccggggggagcggaaacaaaggcacgcaaaacggaaaagcgtgtgtaggggagcggaaaaggaagtcaccaccgtggcctgcgacgaaatggcgaaaagtcttttgaagacagcctctctgtctggaaggacaaaattgctacatcaaacaggattgtcactttatagtacatcccatggattttatgaggaagaagtgaaaaaaacacttcagcagtttcctggtggatccattgaccttcagaaggaagacaatggcattggcattcttactcctgaacaatccaagtagaatgaaatgcccttttcaggtggttatgatgctacaacttcctggaaaaaagtaattgaattggaaaattggacagaggggaaaaggcctccattgtcccgtgggggcaaaaaaatacctttctccttcagggatctgatctggaatgctggtgaaaatcactaggaactccagaggatggaatgggccgtatgcatggttcatgcaaaacaccttaacaagatttatgagacttcctttaataagtgttgcgctggttcaaggttgggcattggggttggaggagcagaatttactacagcatgtgatttcaggttaatgactccagagagtaagatcagattcgtccacaaagagatgggcataataccaagctgggggtggcaccacccggctagttgaaataatcggaagtagacaagctctcaaagtgttgagtggggcccttaaactggattcaaaaaatgctctaaacataggaatggttgaagaggtcttgcagtcttcagatgaaactaaatctctagaagaggcacaagaatggctaaagcaattcatccaagggccaccggaagtaattagagctttgaaaaaatctgtttgttcaggcagagagctatatttggaggaagcattacagaacgaaagagatcttttaggaacagtttggggtgggcctgcaaatttagaggctattgctaagaaaggaaaatttaataaataattggtttttcgtgtggatgtactccaagtaaagctccagtgactaatatgtataaatgttaaatgatattaaatatgaacatcagaattactttgaaggctactattaatatgcagacttacttttaatcatttgaatatctgaactcatttacctcatttcttgccaattactcacttgggtatttactgcgtaatctggaacatttagctaaaatatacacttttggcttaaaaattattgctgtcaattccaataataattcttagcttataaccaaagagcagtgtttaaaaggagagcttctatacaaaacctattcctggcgttacttttcatacaatttttgttctgttttacctggaaataatttaccaaaataactgagtgttgctgctaaagaacaaaagtggggaggtatcagggaacaagaaaacaagaaagggtatgatcaatcattttcttctgctccaaacagctggagtaaaattcatgggaaatggcccttcatttaaaaaaagatgtacctcactacccactacaaatttggaactttgttcttttcaataattagttttctattgtaaattacctactaaacagtggtagccatgacatggaaagtcaactgattctacaattggacattcatttgtgtgccctggaatttccaactagtaataaacaactactgttgatgtagttttaaaccacttgaagggactcatgaagcatcctgcaacataaatttgcatttttacatcagatttcttttttttcctgaaaaacaactaaccttctaacaactatctttcaaaagtaaatgtaataaaaatgcacaacataaaatgtttatgatcccagcaatacactttttaaaaaatgtgaaagtcaaagaattaagttctagttctgacttatcacaagaggtcaaaagtatttgctactgtaacattcaattcacatttgagaatcatggtaaaaataacttgcatttgccttaccatcatgatcctactgttgagttaggaaaatatggttagacagactcacattactttttttcagaggtaaactctagattactgtgtcaacccaatactatttggccatagatgtaaaaactaccaaataaaagtggattttgtggtctacaaaaa

SEQ ID NO: 47730 - DNA, 769 bp, Homo sapiens
  misc_feature (1)...(769): n = a,t,c or g
tctggcaaaagggtccacaatccccatccagttcccatcagcaggcatggacaaaggccgtggcttgccataagatggtgttttctctctcatttttgtgggcagaatgttggtttccaccgagtacccaggcaactgatccgagtctgcaatggtgaatcttcgtctccggctttcctggtccaagaaggaattcggggactctgaacccttaggaccaggcaatggttgtttgcacttactggaccctccataaacaaaactgccattctcatcccggggagagtagggaacagcaggcggaggaggaatataaagatccaggatggctgacttctccttcttcagtgaggtatccatagtgctttcaggggactgggttgtcgcgggtggaggtgaggtctgtacaagaggtggcttccaccgtaagttttttcaggggagcaggagtaaagttgaaagacccggtggggcgcttcttaagcagtaacacaactccggtggggattctctctcaatttcttcaccagatttttcagctgccatcccacagtttgctgattaacttgaaatgcttcgtcaccagcatgaatcttctgagatctgtctgcaggagaattttctgtggttccagtaatcacgtgtaacccatcataggttgatttgatgtacatgcccaggccttccccaggtttaatgtttggtaagtgaacttcctccanacatgcanactggctcatcacaggatctgtggtagatcggattgttt

SEQ ID NO: 47731 - DNA, 1122 bp, Homo sapiens
gctgatgcttgaaggggagaacatcgtgtctgctgcccggaaggccattgtgcgacacgacttctccacggtgctcaccgtcttccccatcctgcgacacctcaagcagaccaagcctgagtttgaccaggtgctccagggcacggctgccagcacaaagaacaagctgcctggctcatcacatccatggagaccatcggtgccaaagcgctggaggacttcgcagacaacatcaagaatgacccggacaaggagtacaacatgccgaaggacggcaccgtacacgagctcaccagcaatgccatcctcttcctgcagcagcttttggacttcaggagacggcaggcgccatgctggcctcccaagagaccagctcttcggccaccagctacagctctgagttcagcaagcggctgctaagcacctatatctgtaaagtgctgggcaacctgcagttgaacttgctgagcaagtccaaggtgtacgaggacccagctctgagcgccatcttcctgcacaacaactacaattacatcctcaagtccctggagaagtctgaactgatccagctggtggcagtgacacagaagactgctgagcgctcctaccgggagcacattgagcagcagatccagacctaccagcgcagctggttaaaggtgactgattacatcgcagagaagaatctacctgtgttccagccgggagtcaagctccgggacaaggagcggcagattatcaaggagcgttttaagggcttcaatgatggcctcgaagaactgtgcaaaatccagaaggcctgggctattccagacacagagcagagggacaggattcgccaggcccagaagaccattgtcaaggagacctacggggcctttctacagaagtttggcagcgtgcccttcaccaagaacccggagaagtacatcaagtacggggtggagcaggtgggcgacatgatcgatcgccttttcgacacctctgcctgagcctgctgctagccctgcctggttccaccagactggcgtgtcattggacagataaaccagtgttagcttgcaaaaaaaaagataatagtattaagtattaattagtgaaatgttaaaaaaaaaatttttg

SEQ ID NO: 47732 - DNA, 1291 bp, Homo sapiens
tgcctccctagcaggcgccacggtggaggctgagtcgcaggacacatgccggccagttaattcattctcagcaaatgaaggtttgtctaagctgcctgggtatccacgggacaaaaacagcaaactccctcagactttgtccatgtataaacttgaagtggttgtgttgtagggttgcaggttttttgttacgctgctgtcactttctgtccaggagctggcaccccaggtgttctgagaccttgagggacccagacctttgggtccaagagtttcccaaacagccacgcctctcaggaacccacctggcggttccgtgagctcaggcaggcctgacccggcggcacagcctggcagggacctcgtccccaagcctggcagaatgagaggggttgaggtcccgagcgccactcctagccttgccgccttcaatagagaagaaatccctttgctagatagggtcccccaggcagtccccagtggcgggacacaggggtcccgctgtggagctcccctgccagcccctggagctccaggagggcctgttggtcccctgttcagaatggagtgcagcccgccagcggaaagtgttcattctgcataggtgtgaggctttatctgcacacaggacatgaaaaccagcagaaaggccctgagctgctgcatagccccatctgatttctgcagttcccgccagcctccaacacggggactctgccgtaactggaatcttcataggtcatattgaaatcttcaaggtgaccatgccccaccgggtgactggggcagtagtcatggcagactcccggcctgggcccccaggattctaggacccccaggcagccccttggactggtcccgggtgccttccaagcacagtctccatgctcccagattctcgaccttcccccggcccgggaggtgcagcctgcgtctgcctctgtcgtgtgtgctgatttgagtggcttagcttgccacagcgcaacctcttctgtccctttcagtcatttgctgtacttccctgtggcacgttaccatggaagccgctccagggtgggtcagggtgcaagctgctggtgaggtttggaagcatcaggctcacgggtgttcatgtgtgttcgtgcgtgtgtgtgcgtacgtgtatataactgaagtgtctgtacggaatgccctttgctagccatgggctggtcaccagattgttttgtaatgcccgccccttgcctcgatattgccagtttcttgtgcaataaacaatcagcagctgtgaaaaaaaaaaaaaaaaaaaaaa

SEQ ID NO: 47733 - DNA, 851 bp, Homo sapiens
ttttttttttttttagacttcataacaaaaaacatttattaagtagccacaatctaacaagccctgctcacctgcctcttctccttcctgtctgggagggggctccttggtgtgcagagccacaaggtgggggtccaagttggggagctcccagttcttccccataggccttgctgtcagtcagccatgggtcccttttggtaccagagacttgtgaccctggactcgaacctcttctgcccaagcactcgcctgctggcaactctggctggagggcttggcccagcttctggccccacagccccctgaggtccatgcagccctgtgccagccaggcctacttgagcacgagcatggcctctgtgccatccttggcggtcaagtagaggccatgtgtgaggtagtactcccgccgcaggaaggcatagaagtaatcagagatgagcaggatctgcccaacgttgaaggtcagtgtgatggcataaaagaaattagagttggcacttcctgcataaatccagaggtgccacaggacagggaagagcagggaacagacgatgatgatgcaggtgaggacaaagatgtttctcaggaatctgtagagatggttccacacggggaagaaggccatgtagagcgccacgtcccccactgtcgggtaggacttaaagatggcgatgacagcgatctggataaacatgaagaagatggggtgctcctttagctttatggctaaggggatggtgtagaagaagacgttgatctgaaacacacatacaaagaagaggctgaagtgctcaaacatctctgcaaagaagtaccagaaaatgaccaatgtttggagtgagatc

SEQ ID NO: 47734 - DNA, 476 bp, Homo sapiens
  misc_feature (1)...(476): n = a,t,c or g
ttttttttgaattactttgtagtttaatgattactattgagcaaacaaatctttacagtaatataagtcagcaaaagttttttaaaaggtttaaatccctccttccttacatctatttcattgcttttttaggtttgggaagtaaagcaccagaggaagcatgtgtaaatccttgtataatcgcaggctgtaagtctttagcatctcaggaagttactaacttcaaactaaggtatatagggaggagtttcttacctaaatctagtgcttcttgaaccacaagtagaaagcatttaaaaacatgaatgttggtttggtggtttttggaaggttggtaaaataggaagacttgttggatggacccccatggccaggggaatttttcccccctggggatggaatttttggggtatttccccccggngaatgccctnaggtggaaaaggangtgggaaggttttccccaggaatggggc

SEQ ID NO: 47735 - DNA, 1313 bp, Homo sapiens
  misc_feature (1)...(1313): n = a,t,c or g
aagatgccaaagcagttctagaggaagacgaagaggtcacggaggaggcagaaatggagccagaagataagggacattaactgtgagagaagctgtgccgcggagtcgcttacagaacagtttctcattagatgagtgtttctcctgcagcactccaaaacccactctgcactgcagcacagtgaatgatatgcactcaccattagcttcgacacagggactgagggagacaggtggggagcagctgacaggcattagggtctttgctgacatctactaaccttgaagagtttgatgttcagtgcatacttattaacttaaaaaaatagcaaatttattgttaaagtgctccctttgtttccaaagtgttttgtccagggcttccagactacacgtgtggatttgcagggagccactgggagttgggtgttacattttttatactttagcagcactgataggcaccctggaatcctcacttggtatccgagggctactaagactctttccttaggttctttcctctgagcaaacactgactggcatcctgctttccagtgcctgccagcctccagaagagccaggtgcctgactagtacatggggagctacagagccaaggtcaatgtgagtcaacatccactagaaatatccatgttgtgtagacctgtgcatacaacatgctaactggaaaagaggaaaaaagaaaagccacagtcctctccacaaaaatacctggtccaaacaagaaaaacaaaaagacaagcaaaactaaagaactgcagtcttctgatctttatttctgaagagctagcctttaacatacatgtttatatagtttaaatttcttactactgttagatcccaggaattcattaataatcatccttggctttccttttaaaggctattttgaaatggtcttttcactttcattcagtcatcaccccccaaaatgctctgcagcctctctgctctttgagaaagggcacaccatgcgctcggcaaccattcaaatgcaggaattaagcagcaatggctgcaggtgtccttctcagttatggaggacatcgtctcattagggaacttttacagttcaaattaatttgcagaagttgccataaatgtttgcataatgacatagctttaagcactacatgattttaatctgctcacattataacagggaccaaatacacaaggggcgtaattcaaatcatncttgttaactttcttaaatttacagttttacctattttcttggacatggcaggcactggcccttcttctttcccgggcaccattcaggggttt

SEQ ID NO: 47736 - DNA, 1244 bp, Homo sapiens
gaagggcagtcctccttctctaggttacatgaggcaggaataataagtcagacagagacagcaagacagttaacaatgtaggtaaagaaatagggtgtggtcactctcaattcactggcaaatgcctgaatggtctgtctgaaggaagcaacagagaagtggggaatccagtctgctaggcaggaaagatgcctctaagttcttgtctctggccagaggtgtggtatagaaccagaaacccatatcaagggtgactaagcccggcttctggtatgagaaattaaacttgtatacaaaatggttgccaaggcaacataaaattataagaattcactataccttcccctccctggaactcaggatccaagtctagaaaatgaaaggactgggtttgaattgcttcaaaacctcttccatctcagaagaccagaccctgggaactgagattccagacacaattttggaagctctccaaccaaaataaggcccccctaccccagtatataattgaagacactagtaacacctgactgcatctcatctcagcagagccagaatatggggacaaggttcagggtgccctgctgaatggtgtgaacagcaggatctcaaggatgtaatggaaagaactaccacactgaccatccagaatctaagagaccatctgggtgtttgggaaaccatctgacgaggcctgactctattccagttagattgacaataattgagcagcaggcatttttcatttctggtcaggaaagcattgtgcctttagcaaacaatcagtgtgcaacagtgatgtggtcatctagccagggaatggctgctccatcccctgcataatatattcctgcttcaaacacctctcagaaaaccagttccgcgagggtttttatatccccacaaagttgttgagagacaatgatgaccctggaagtggggaggaggacttctgagaaacagcaacctctctcctgattggggtagccatgagatttctctagctatatccaacttggcatctgtacatcatctttggaggaacatcttatttgtggaaggaccttgacaagccgtttgagatggaatgtaggccctgatgttatgcttcagtaaaaaaagatggaagcttccctgctataccaaaacatggagcaaaatttgcatttttctcaagaaggagagaaaaggagtaggactccagcaaagtttgtcagaaggaaagctagaaaagatttaaaaga

SEQ ID NO: 47737 - DNA, 1351 bp, Homo sapiens
accataatgatactatatgtgtccaagctaaacaaaatcattcacttccctgattttgataagaaaattcctgtaaagctgtttcctctgcctctcctctacgttggaaaccacataagtggattatcaagcacaagtaaattaagcctaccgatgttcaccgtgctcaggaaattcaccattccacttaccttacttctggaaaccatcatacttgggaagcagtattcactcaacatcatcctcagtgtctttgccattattctcggggctttcatagcagctgggtctgaccttgcttttaacttagaaggctatatttttgtattcctgaatgatatcttcacagcagcaaatgggagtttataccaaacagaaaatggacccaaaggagctagggaaatacggagtacttttctacaatgcctgcttcatgattatcccaactcttattattagtgtctccactggagacctgcaacaggctactgaattcaaccaatggaagaatgttgtgtttatcctacagtttcttctttcctgttttttggggtttctgctgatgtactccacggttctgtgcagctattacaattcagccctgacgacagcagtggttggagccatcaagaatgtatccgttgcctacattgggatattaatcggtggagactacattttctctttgttaaactttgtagggttaaatatttgcatggcagggggcttgagatattcctttttaacactgagcagccagttaaaacctaaacctgtgggtgaagaaaacatctgtttggatttgaagagctaaagagtctgcagcaggattggagactgacttgtgactgcgggctgggggggcattcccagtaggaatgtgaagccagaggtttcggattcgtgacatccaccccctgggcaagtgagagcatctgcaaaatgcaaagagaactacctcatatgcaggatgagccaatggcagtctcaagaaatgtactcgggcgacaccttacctgtggaaagcaaatcttttcaaaataagccactgggactcggtaggtggagccccagctgctcttctagggacctatggggccttcgtggcatctctgtgctgtgtgctggggaggaggttgatgtaatggtgactcttttctgatcagcaccttggccgtgattcccaaggtcccagccaaagcaaagggccagttgtttcagtttaaacagacatgtctttagtctaataaaattagttaactgccagtaaagttatttgttagctttgatgaaagctatgttggtatctttccctaatcatcaaagtaaataaaaaatcatttctaaaaaa

SEQ ID NO: 47738 - DNA, 2096 bp, Homo sapiens
tccggccgcgtcgactttttttagaaatttattacaaaacttttaataaaaaatacaatgatattacaaatttggttttccaaagctttcaaatttttcttaacattatctttcgttttaagaacacttttgaagtcggcagttatttaaaatccttactagaaaaaaaccaaagcccaaggattttgcatttagtcatcatctaggtatacagcgtgttttcccgaaagcatcctttaagagtttggagatttgatgaaattgctcatgtaataagcagttagtgaatactattgaatcctaaacccagataagtcatcttgggctggctgtgtttttcatgtgaagaaactcatttatagcacaggcaccccaggccaatagagatgattacagatctctggtttcagaagttctgaccccttattcagctaccaaatacttaattgctaaaggaattactcccagcaggcacaaaacggtttctgaatatgacagaaaaggtacacaaagaatcatttaagacatcctggttacaacatactttatctttaaaagggtgtgagagtagttggggaacttagaaattctgtgacttaggtgtgggtggatcttatttaggaagactaaagctatggacacaacacgtgaaagaaccactcagaagcagccctaggaagccccaggtgcccacatcgaaagcactcccaggtgaaagcagccaggcaggcgtgggcattgtacaaccagcctcaggcctcagttcttgattgtggttgacggggcgtcaccatgaaggagcccatttagtataaagcttccaaccttttctcttaatcgtttctttaatcttttaaaccatcttcaagtgcataggggagtttccgatgccagaggatgaaagcaagtgctttctccaccctctcctcccagagtgaaaacaaatccttttgctgatacttgtttcaaaagcatccattgtaaagcttctcagtgacacaaaatactgagaggtaactttttatcaatcaaaccacataccccaatttaacacctttcagtgctctgaattcaactgacagactaaagggtgtttcctgtaacagtctgaaatattaagtgttttttttgttttgtttttaaatcttatttcagaaaacttcctcttggggtaggaaagtacacatgaagcagcaaagtaacgaagaaaaacttaaatagggccttcagagatcccacacactacaaagattctgccaagccataagataagtgtgaagcccagtatatgtccagcttttctcctcaggacatcttcagtgtttcttctcttttaaacaccacatcaggttctagccacagacttgtgttttgggtgtgcctgctttgaggggtccatgcccagtgtgtctgctggtgacccaggactcagcagtaatgactaacggccgcccttcaggatcacagatgtgcttggtggtggtggcaaagcatggcacttgtgtgcagtgatgagaagcagcacacggcaaggctgagccctttatcagcaggcctccgtagagcgtgtctgcgttgtcagctgccaatgggctgagtggctggccgtacccactcagtccaagagaggaaggaaacagcaggagaagctgtcagcttgccattcatgagctgctgctgcccaccaaagctgcttactggcaagaagagatgtggggaagacatgagctggtgaaacaccaacctggtgcacatgcctgccaagtctggcccctgaagaggagagggagtgcagagtccaaaattgaccggggctcctgctctggcatggagctgggtcagaggtgagagaggacctggatcctagggctcacgcaggtgtcgggcgggtgccagggtcttttcactccaactttttggctggcacccgtgtccgagcaacaaggatgggcacaagggccaggccggcaatgaggagggcccacaggggtcggtagaagagccagccagccgccacggtcagcagggtcagcgaggtggccacacagaaggcaaaggctttcaggccaatgttgaccaggtctcggaaaacaggc

SEQ ID NO: 47739 - DNA, 758 bp, Homo sapiens
  misc_feature (1)...(758): n = a,t,c or g
aagcagcttcacaacgacctcttagctcttcagcctcacatcaacttccagtgagagtgacacaggtcaggaagcagaatattccttatatgatttcctcgatagctgccgtgccagtactctattggctgagctcgatgatgatgaggacttacctgagccagatgaagaagatgatgagaatgaagatgacaatcaggaggaccaagaatacgaggagatctgagacgccatccctgcacgtcgagctggctcccgctttgatgtaacancgcntnnatgtttgtcacttnngcagtttccccacaggtacttgttggagcagggagccgacctattggggaccaggaagaagaagagtacgaaactaaaggaggacgccggagaacatgggatgatgattatgtgctaaagagacagttttctgcattggttcctgcttttgatcctagacctggtcgtactaatgtccagcagacaactgatctagaaataccacccccagggacccctcattcagagctcttggaagaagtcgaatctactccgtcacctcgattagctctcactttgaaagtaacaggtcttggaacgactcgtgaagttgaattaccactcaccaatttcagatcaaccatcttttactatgtacaaaaattgcttcaattgtcctgtaatggcaatgtgaaatcagataaacttaggcgtatttgggagcccacatacacaatcatgtacagagaaatgaaggattctga

SEQ ID NO: 47740 - DNA, 1519 bp, Homo sapiens
gaacattgtagtctccctgaggtcttaaatcacaacttgaagaaatcaggctatgaggtgccaactcccattcaaatgcagatgattcctgtgggacttctgggaagagacattctggccagtgcagatactggctcaggaaaaacagctgcttttcttcttcctgttatcatgcgagctttattcgagagcaaaactccatctgcgctcattcttacaccaaccagagagttagccattcagatagagagacaagctaaagaattgatgagtggcctgccacgcatgaaaactgtgcttcttgtagggggcttacccttacccccacagctttatcgtctgcaacaacatgttaaggttatcatagcaacccctgggcgacttctggatataataaagcagagctctgtagaactctgtggtgtaaagattgtggtagtagatgaagctgataccatgttaaagatgggttttcaacaacaagtgcttgacattttggaaaacattcctaatgattgtcagaccattttggtttcagccacaattccaactagcatagaacagctagcaagccagcttctgcataatcctgtgagaattatcactggagaaaagaacctaccttgtgccaatgtacgtcagattattttgtgggtagaagacccagccaaaaagaaaaaattatttgaaattttaaatgataagaaactctttaagcctccagtgttagtatttgtggactgcaaactaggagcagatcttttgagtgaagccgttcagaaaatcacagggctgaaaagcatatctatacattcggagaagtcgcaaatagaaaggaaaaacatattgaagggattacttgaaggagactatgaagttgtagtgagcacaggagtcttgggacgaggcctagacttgatcagtgtcaggctggttgtcaattttgatatgccttcaagtatggatgagtatgtccatcagctgaatattatttgggttgtgcccttctctggaattaatatcaacgcatctcttattgccttgttatacagtctactcaccacaatcaatatgaagtttactccataaacagaggtatggtacaagaggtaacgtgtcatccaaggtgactttcctggcagccaccagtaaactgactccggacagataggactcttttgttgccgccaaggtacttacaatgacctcagaggctctagggccacagtgtgaaaaccaaccaatggataatgagtaacacagtctcttgtctactgtagtgtagacctatgtaatttatatgtgtccgtggatgttagcaaatacatagctagcggtgagaaaaaaaagaagtctattacgcgcgtaccttgtagtaatctgcagccgttaacgtctgacatgggcaactcctggccctttcgggagagagacgggcgcctccgccgtgagcgccccgggcgggcacccctgttcttgcaacgggggttcacagggggcgggtgtcaccctgggcgac

SEQ ID NO: 47741 - DNA, 726 bp, Homo sapiens
ggaaaagagaaaagtaaagagcccagagaccctgaccagctttacagcacgctcaagagcatcctccagcaggtgaagagccatcaaagcgcttggcccttcatggaacctgtgaagagaacagaagctccaggatattatgaagttataaggttccccatgggtaataccattaacattttctaagtatagatttaaaactctggatggcggtgtgggggacaaatggttgctgaggttgatttgtactcctctgcttagggtaggaagtgtatgacgggtggtgggattccatgcaccgtggcgggtcagtgatggcagagaagtgggtggctgtgttcattagagacattctgcagctgtcgtttagagcccacatgagcttaacgacactagacgcagaaaatccacggtaactgcagacagcactagatttgaaagctggcactttagatataactttgcttatattctaactctttggtgcaaatagaaaaacatcagcttatcctcttgatatgctttgcgtctgtcgtaaataggtattcctttgaataattattcaggataataatgaaagaagttagattaaactacttgactgctgtactttcagagggagaaattctacttaccacaattcttgattttccatgcccttgatgggtactgttaatgtcactgtatatactctttattttacgctttgtctcatatccaaaatca

SEQ ID NO: 47742 - DNA, 434 bp, Homo sapiens
atagaaagcagcgaacccgtacgtcacgcccaataaccgctatggctaccagaatggcgccagctacacctggcagtttgaggcccgcaaggcgcagatcctcaagtgcatggagtgtggcagctcccacgacacgctgcagcagctcaccgcccacatgatggtcaccgggcacttcctgaaagtgaccacctcggcttctaagaagggcaagcagttggtgctggaccctgtggtggaagagaagatccagtccatcccactaccgcccaccacccacacgcggctgccggcctccagcatcaaaaagcagcccgactctcccgcggggtccacgacttctgaagaaaagaaagagccagagaaggagaagccgcccgtggctggcgacgcggagaagatcaaggaggagagtgaggacagcttggagaaat

SEQ ID NO: 47743 - DNA, 2187 bp, Homo sapiens
taaatggaagacagatatcaagaaatatcatcgtattcagtgtcctaaccagggctgtgagactgtctacagcagtgtatctggccttaaagctcacctgggctcttgtacattgggaaactttgtggctggaaaatacaaatgtcttctatgtcagaaagaatttgtgtcagagagtggtgtcaagtatcacatcaactccgtccatgctgaggactggttcgttgtaaacccaacaacaaccaaaagcttttgaaaagctgatggaagataaaggcagcggcaccaaggaaggaaggaaaagcgggaggccaggcagcacaggagcagaaggtctctaagaaggcggcagcagcctgggcattgagcttcccgagacagagctgagtcttagagtagggaaggatcagaggaggaataatgaggaactggtagtgtcagcctcctgtaaggaaccagagcaggagccagtgccagcacagttccagaaagtaaagcccccaaagactaatcataaacgaggaaggaaatagggcagtcagtgtaaaagtgctcctaggaaagcagatgtgatgctgttgtcacggggacctgtgctgggaggactgagtgaagattctttcagctgtttgtgttaaggctgtgactttctcagctccttcctcctgtgtaaatttcactgtcttcccttcttacattttgattcccccctccccttttagtaggttttcctgctattcctcgtcaagtcctcttgtttttttatcttggcccaaagagctccctttcaagggccaactataggctcctcttggccctgtaacaaaactaaggaaacctctttggttgtcctttccttcctggggtatagaatgttcttggaagctccattgatttagtagctgctccatcatctagcttgtgaaaaccattccaaactaattttttaaaaccataactgatttgtcattttgtatttgtgatataacaagtctagaagttagaactgttgtcattcacataataagattactctgtctccttgggaaaaaaactttatggaggctgtttgtcctctcaatatggttttaagattgaaagtaagaaaacggatttaggatgaaaactctagaactaccctatgctgtttatactgggaaatgctttgtaccaagtagcagtgactagacccacagacatgaaaagcaaccttaggagtaaagtgacccaaacattaaaatgacaggaaagagaaagtagaagcagcaataaatactgccccaactttcctgggagcccgaggcctcatccatagctatgatcacttgccctctgaagcttatttttgcttctttggttttaagaattgagaaatatcacattgcccctgatgttttgacagtctcctagtgctcctggtagtgccactaagggaaaaccaaggtgcgcattccttctccctggactttaccttacttgttagtctacgccccactgtttccacccatccccttagccaacctctgtctttttgaattttctgagaatattgtcctatcctcttttatatatggagttctctcctctttatatcctgagactttgacaccagatgtagatatttatctggagctggaaagaaaaattctttttctgtacctcatgcctatctggtaatgtttaatgggttatttctctttgagggtggctttctctggaacattggttagagcagctttgttgtcgtgtttctggattctcttccccattttgcgtaaatattggtcttatatattcttgcctattttgtggcatatgcccacataaaaaatgaacctgatatagacaagtactaccttttcaaattctgaaaggctattaccactttaactctttgtgctcctccaaatagctttaaaatgtgggcttttgtgaagacccactttcaaacaagggagcactgaaacctgaattggatactgcccagaataggtagttttgaaacaagttaaggacatggtatatgcactctgcattttcattggcagtgtgccctttaaagccctttcagtagatgagggttgtcagggaggagaaatgaagaagctatgttaatttctggtgagtaagacctggggaatgtttggcaatgacaaaagaaataaatgactctcagaaagacaaaaa

SEQ ID NO: 47744 - DNA, 1537 bp, Homo sapiens
agttttctgtcaattcttgcgtaaatcacattctgtattcatacaaaaactttgtttttctctgacaaactgtacacatagaaacaaatttccaaatggacaggaacttaaatttgtggagatgccccatgtcttgtgagacttaaaaaaaagaaaaagatcccagcttttatcttcacaaaacaacatgggagttggggcaatgagggtggacaggacagggccagccaggctggtagctggcagcagtctcttcatcttgaagacctcattgagggttcctgggattcaggtgcccagaaaagagttcagggctacaatggtgcaggcttccttttgtttctcttggtgagtccacaagaagttcttacatactgtccagagaggcctcagggtactcagttccagcttctaccgaccccttccaccaccccgtgaagctcctcgcctcggcgggcccaaaaattcatgttactccctctaccccagttactgccactccggccccctcgagaaggggtgccaactccctggagggcccccaaaaggttcatctctgtggtatccatcgtggtgctctccgtctaaggagctggaacgcccagatttgggcactctctgagcaggtccctgggccccctcggcctttgcctcctcggtcttcagaagggcctcctggggcctccatctctctgtgctcagaagtgcctgggccatcatgccaggggcgctttcggggaggtagggatgccatgtccatgccttggagagaagaggagcgttctctgctggctggggaatgaccgtcgtgagggggatgatcagggcggggagtatcacgaaaatgttcatgacctggcccaggctctctgtttccatcccaggaatctgcttccgccctccttcaaagcgagggaactcgtcaggagtgggaagtaaacccttccttcctcctcgtggggtaccccgacctcgacctctgagatctcgtcctcgggccggcttcctcagaagcatcaaaattctcctctggaccaaagtccttcaggaccaggaaaaccatcccttcctctggggggagcacggcccctcatgcctcggcggggctcctcttctgaaactttcttcttctgcgccctcgaaaacgtgggtcctcgggatcccgggggaaacgttcatctccgggcctgcggccttcccatgcccccggagggcctcgggctgcaccccggccatccccctcgctgaattccctgtgatcagggggaaacggaggcccagggccccctcgcctccacttctcttcttgcggtaaaggtcctcctcgcccctcaaattcacgtaaccggtggccaaagcgcttgtcagggtggaagtcatctggtctgctgaagtcatcggggaagtctgggtgagggccacgcctatcagggggacccctgcagtcctggccaccccggaaaggccccctctcgggcccatgctcaggcccgccgctctgctcatgccgcctctctgacatcgggcccatgtgatg

SEQ ID NO: 47745 - DNA, 531 bp, Homo sapiens
gacgcaagcagctggatctccggtaactgagacatagggtataactgttgtcgcggcggaggaagtgaggacggcgccaagggccttccgggccagtgttggatccctgtagtttgtgaagatggtgttgctaacaatgatcgcccgagtggcggacgggctcccgctggccgcctcgatgcaggaggacgaacagtctggccgggaccttcaacagtatcagagtcaggctaagcaactctttcgaaagttgaatgaacagtcccctaccagatgtaccttggaagcaggagccatgacttttcactacattattgagcagggggtgtgttatttggttttatgtgaagctgccttccctaagaagttggcttttgcctacctagaagatttgcactcagaatttgatgaacagcatggaaagaaggtgcccactgtgtcccgaccctattcctttattgaatttgatactttcattcagaaaaccaagaagctctacattgacagtcgtgctcgaagaaatctaggctc

SEQ ID NO: 47746 - DNA, 593 bp, Homo sapiens
cacagagctccggcagtcatgggcccgctatagcagcagttcatagcagccatcatcacccaacagcggtgcagccccacggaggccaggtggtccagagtcatgctcatccagccccaccagttgcaccagtgcagggacagcagcaatttcagaggctgaaggtggaggatgcgctatcttatcttgaccaggtgaagctgcagtttggtagtcagcctcaggtctacaatgatttccttgacatcatgaaggaatttaaatctcagagcatcgacaccccaggagtgattagtcgtgtgtcccagctattcaaaggccaccccgatctgataatgggattcaacaccttcttgccccctggctacaaaattgaggtgcaaaccaatgacatggtgaatgtgacaactcctggccaggttcatcagattcccacccatggcatccagccacagcctcaaccaccaccccaacatccttcccagccttcagcccagtcagccccagctcctgcccagccagctcctcagcccccacctgccaaagtcagcaagccctcccaactgcaagcacatactccggccagtcagcac

SEQ ID NO: 47747 - DNA, 1592 bp, Homo sapiens
  misc_feature (1)...(1592): n = a,t,c or g
tttttggaaagaggttttagtgcggccgcagggagcaccacctcagcctcaggcgctagtgaggacacaggccgtcctccggcggggagcacggtggggtcagggtgctgtgtggtcccgcaaagaggcagctgagcttgggcctcaggtcgttccacaccttgctcatctccttgtgcccttggatctgagagttgacgaaggcgcggaggatgtgggaggtgaggggcaggtagacgtggatgagctgcgtctcctggtgcaggcagtacagggagaagtagttccgcagctccatcgtctgaaatcgcgttctcctgctccacgatgcgggactccagctgctccacggactccggctcgcggttctgcgcggtggcgctcatcatctgcctcttcatcaggctgtacttgtgcagggcccgctggtgcttgtgcaacacgcccttctcatgccgctcgcacaggtccttaataggactgcagcagatccaagaagaggttcagcttctccaccacgtcgttctcttcctgcttaccctgttgtgcagccttgtcggcgagcagcgcgaattccacagacaggcctttcagagcctgcttcagggacccccacgtgcttgctattcagagcggcccaggagggcagcggggtcgtgtcagaccctattgcacttagctccttcccgaatatgagaagatctgccgcattgtcgatggccgcgatcgatccgctcggccctgttgcgaagcttgtgaaagctattgtagatgttccggatcagctcccggctgatggcaaactgagcctggatgtcagctgggaggaagtccttggccctggtagccagcttacagttcaggaattcgtccccgacgcactgtgctgactcctttaacttgttctgcacatccgagccgctgaaggacaggaagagcttgaggaccacatcctcggagaacagggggtgtcgcgccaccaggttgacgaagcgcttcagggctctcctcctggcctcgattgaactccctgtcagctcccagcattctcttgggtggcagggcaggcaccatacggtaggggaacttgtgcaggagcatctcctggaagaccacgaagtcattgtaccgtcttgtantaccgaggactttgaagcgcttggcttggaaacctcatacttccacatgctttcaggaagaggcccttcttctccggaatgagctccacctgcacggtgtccctggccagcagctcctgcagggtgtgggacagcagcaagcgggttccctcgcggcatctgcattcgactgggggctgggacctgctgcacgatggcctggggctcgatggcctggggtgtcggcagatctgcagcctccaagcttctaatcaccgcatggctcctctcagacacagcaggtcctgtgaaaccacccacgtccagccagcaccaccatcacccccggtctcttcccactaccccagcaaacaggatgggcaaacatctctttttgtgatgcttttctcaggaaagacaaaataataccaaaacagaattcccctacccggaacacatcactttcttgctaac

SEQ ID NO: 47748 - DNA, 1644 bp, Homo sapiens
  misc_feature (1)...(1644): n = a,t,c or g
aggccgccagtgcagccggccgcttccgctcccggcgcaggctgcagcttggccagagcggagggggctcgggagaggagtggacgccgctggccaggatggtgctggagagcgtggcccgtatcgtgaaggtgcagctccctgcatatctgaagcggctcccagtccctgaaagcattaccgggttcgctaggctcacagtttcagaatggcttcggttattgcctttccttggtgtactcgcacttcttggctaccttgcagttcgtccattcctcccgaagaagaaacaacagaaggatagcttgattaatcttaaaatacaaaaggaaaatccgaaagtagtgaatgaaataaacattgaagatttgtgtcttactaaagcagcttattgtaggtgttggcgttctaaaacgtttcctgcctgcgatggttcacataataaacacaatgaattgacaggagataatgtgggtccactaatactgaagaagaaagaagtataataataataacaatattttctcattctttgtgtatagaaaattttaaaatggtggtcttaattattactactggttgaacaattatttcttccaatttattttcttcctgcactactgtttgtatttgatcctttgtctattcagtcacttaattagaaattaaattgtcaagcctcttattctgacttcaaagaattaatgtatcttccaacaataaaatcacttctgattttaatctaggaaaacctaaattgtggctatggatccaaagctgtttgtttctttgaatatcaatattttcaacaggatcttgtatttaaaattcccacctacattgttaaatatgttattttttcatatctcttttggttttgataatctgaagtgtttttttctcgttttggccttccaaactgcatttggttaggtgaattaagaaaaatattgccatcaagaattacttgtgttttcacagagatagactctttgctttatagagattgttgtgtatttaatatgaatatcccagctttagaaaagaagtaaactggatacaaaaagttccattgaggaacagttatttacagtataaaagatttgtttactttacaaaaggcttgtgccgngtgtgtgtgtgtgtgtgtgtgtgtgtattttaaactgactcagtgacagctggggtggaatggcaagaacacttacaaccaaactcatgggctgctgcaatttgaagatcaattggtaataaacataagacattaattcatattaaaatagttcagtgttcaaaattgtgtttatgtggatatttttctctttttaacactataaaccattaaaatacagtcatcccttgtatacgctagggactggttccagggccacacatataccaaaatctgcccatactcaagtcccacagaaagtcttgcagaacccatatgtagaaaagttggccctccagttgaccctccgtacacatgagtttcacatcccatgcacaaatgctgatctgtgtgacctcacctgcannnnnnnnnnnnnnnnnnnnnnnnnnnnnnnnnnnnnnnnnnnnnnnnnnnnngtaagggtcaactgtacaaaaaagtttgtgaaataaacgtactggagaatcttt

SEQ ID NO: 47749 - DNA, 664 bp, Homo sapiens
ggtttttttttttttttttttgatgagtaggtgagtttattgggacttacacacaggtcaatcctgggcggcgacaagacagctctagagatctgagcttcctcccaatgctaaactgctttcatgctaattttctgactgtttacttaccgggtaagagcgatgggactgttttcattggttggttctcacatactctctgggaagtttgggttctcagggacacctgctcctcagctggggaccatggccatggcccaccacctgcccttcagtgttcaagcaggggacatgcaccctttagtaacctggaggggacccatcacatgacaaccaccccaacgaccatcatcaggaagccgctgcctgactgagatatgcccccaggaggacaagggagagtggatgctggaaagacagggcaggggaccatcaccagggaaagacttcattcttcggaggacattgaacctggggctgggtctgtagtggagccgctgtttcttctcctgtatccaactgttctaactcttgggctttctccattttcagctctttcttttcctggccttctcattgctggttccttcaagcctcctctctattcttccgtcaatatattcttttttttttttttttttcccttattgcaggctccaatgtt

SEQ ID NO: 47750 - DNA, 1168 bp, Homo sapiens
ttttttttggtgagtaggtgagtttattaggacttacacacagggcactcagcaggatggctctagagatccggcctcccccagtctctaaactgcttttcagttaattttctgtctctttgcctgctgtatatgagtaatgagactgtttttcttggtaggttctcgcatactctccaggatgtttgggtttttagagacacctggtcctcagctggggacaatggccatggctcattacctggccttcagggttcaagcaggggacatatacccctaaataacctaaaggggatccatcacactacaaccaccacctccaccgccatcatcaagaagccactggctgactgagatacacttccaggaggacaagacagagtggatgctggaaagacagggcaggggaccatcaccagggaaagacttcattcttggaaggacatcaaacctggggggggggtcggtagtggagctgctgtttcttctcctgtatccaacagttctaactcttcggctttctgcattttcagctctttcttttcctggccttctcattgctggttcctgcaagctccccctctattcttcgccccaatatattcgttagtctaaaggaaatttcttcttcctattccccacactctccagtcccctcacttcccttattgcaggctccagtgttcctgccttctccttggtgcacttgccatctgcattaacccctcccctgctgtgctcagctacagaaatgccaaagtcactaacactcagttccataagctttaccttgccctccttatccccctaataaaatgtctgcattttggccaggcgcggtggctcacgcctgtaatcccagcactttgggaggccgaggtgggcagatcacgaggtcaggagatggagaccatcgtggctaacacagtgaaaccccgtctccagtgaaaatacaaaaaaattagccgggcgtggtggcaggtgcctgtagtcccagcactttgagaggccgaggtgggtggattgctggagcccaggagtttcagaccagcctgggcaacagggcgaaaccccacctttacaaaaaaattagctttgcatggtggtgcatgcctgcagtcctagctactccggaggctgaggtgggaagatcacttgagcctggagc

SEQ ID NO: 47751 - DNA, 446 bp, Homo sapiens
ccttcttccactccccgcggcgcagcggctcgactcgcccgtagaggaaacgacattcggagctgcgctcccgcccacgccggccctgacgcgggctcgtcagccagtaacagggagcagaggtgggagttagcgaggcgaccacgaaaacggtgaaggtcggaaccgacagcctcctccgagaagggcaggagctgggaggaggcggcagcggccggcggcagaaacagcagcggcggcggcggcggcagctgggaggaggtggtgacggtggcaacggcagcgtcggggacgatggcgcgactcgtggcaagtgtgcaagggacggggaggaggagttccccttcgagaggaggcagattcccctctacatagacgacaccctgacggtgagcgggccgggccgggctgggcccgccgctcccctggactggttcccctcctcc

SEQ ID NO: 47752 - DNA, 466 bp, Homo sapiens; identical to SEQ ID NO: 3849

SEQ ID NO: 47753 - DNA, 647 bp, Homo sapiens; identical to SEQ ID NO: 3860

SEQ ID NO: 47754 - DNA, 691 bp, Homo sapiens; identical to SEQ ID NO: 3861
  misc_feature (1)...(691): n = a,t,c or g

SEQ ID NO: 47755 - DNA, 1075 bp, Homo sapiens
gtctttcccactggccccagtgactggaggatcttgtacccagagattccccgtaagctccgagagctggaagccgagggctacaagctggtgatcttcaccatccagatgagcatcgggcgcgggaagctgccagccgaggagttcaatggccaaggtggaggctgtggtggagaagctgggggtccccttccaggtgctggtggccacgcacgcaggcttgtaccggaagccggtgacgggcatgtgggaccatctgcaggagcaggccaacgacggcacgcccatatccatcggggacagcatctttgtgggagacgcagccggacgcccggccaactgggccccggggcggaagaagaaagacttctcctgcgccgatcgcctgtttgccctcaaccttggcctgcccttcgccacgcctgaggagttctttctcaagtggccagcagccggcttcgagctcccagcctttgatccgaggactgtctcccgctcagggcctctctgcctccccgagtccagggccctcctgagcgccacgccggagggtggttgtcgcagtgggattccctggggccgggaagtccacctttctcaagaagcacctcgtgtcggccggatatgtccacgtgaacagggacacgctaggctcctggcagcgctgtgtgaccacgtgtgagacagccctgaagcaagggaaacgggtcgccatcgacaacacaaacccagacgccgcgagccgcgccaggtacgtccagtgtgcccgagccgcgggcgtcccctgccgctgcttcctcttcaccgccactctggagcaggcgcgccacaacaaccggtttcgagagatgacggactcctctcatatccccgtgtcagacatggtcatgtatggctacaggaagcagttcgaggccccaacgctggctgaaggcttctctgccatcctggagatcccgttccggctatgggtggagccgaggctggggcggctgtactgccagttctccgagggctgagccacgcccagctcccctccacaataaacgctgtttctccttgaaaaaaaaacaaa

SEQ ID NO: 47756 - DNA, 1613 bp, Homo sapiens
  misc_feature (1)...(1613): n = a,t,c or g
atgtgggcaggcagccggagctagctgatgcggtcaggattccttgctgctttggtgggacatgaggcctcagtgggtggtgagagggggccatggcttngtgggaggatatcttttggccgtgtaccctcaggtccagtgcttggtcctgctctggtcactggggcttcccaggaggcagcagggtctggtcataatccagtgtgaagatgaggtgaggaaggaaggggttgctgtccagtgttggcctgggtcgctttgattcttcctgcacagctcagcccaccccatctgtactggaagggaccctggagccctggggaccaccccctttcaagtcccaaacactgagtcctctgtcatgtgtccttgtccctaggctacaatgctacacttggctcaggctgatcaccatgctagtcacaggagggagagagaggcagtgtacttgcccccatctcctggagggaggtgcgttggaaattctaggcccttcagcagagacccatttgtgcccagaccacaatatttcttcttcctcagggactacatgccacagacctgtatccccagtggcaactcctgttagctcccaaacttaaacagtgatctcttctaaatatacaaggcatctacccagccccaatagtgaataaaagtcacaaatttaagttcaacaccctaagcaatttctcaaagccagtctacctgactaggtctatccacgcacggttcccaaccccaagggggtatattaggggattagattaagagtaggtaaagacccttttgttctttcctgttgtaggggaggaagctgttctccccaccccagggtgcctttgggaggttaaggctaggttaggccctgcactccacctggggacggcccctcatcacctgaagtcctctgctgtgttgactggaccctcagttcccacactgctaattactatgaaagctgctctggcctcgtcttctagcttgtgcctagttgaaagtctcacctttacaggatcatttgtaatgctggtgtacatgcaggggaactcacaagctgtgtcaggtatgcaggacaaggaatgtctgctctggggggcacaggccaactatatggagggagggtcccaaattagcaaacccttcatttaaagcaaacccttgtcaagcctaccagagcagctgatacgtgtgcataacagtgaggcattgtgtcctggatcgtctgggagcccagtgtcaagtctgctggaatgcaggaagtagaacagaatcgccacaggactgttctggggccagcttcccttaactctgtagcctggcagtctgacccaaagttgccctcacccaaaggttctggctcttccctccctcacttttactttcccttcccccataagttggaggataaaatgggtatcaatgctaatatttccagggagaacatgaaaccagaggtttctttctttctctgtaatctgctatgaaagaaaataacaaatgaaaataaatgtgtactacactttgaaatattttaactaaagcctttattctatacaactgtgaaatacagatttccacccttttggcaaaaaaaaaaaaaaaaaaaaaaa

SEQ ID NO: 47757 - DNA, 2022 bp, Homo sapiens
ttttctcctaaaagaggcagtcgatgcataaaatctccagaaaaggtctgtgttttaaagagttcactgcagttctggaacaattttgatgatgtttgatatttcccagacaagcctcttttttccttaagtttttccaaatacaactctacttcttctgccttgaagttatagatttcattgtaacaatcagcgcttttcagataccaggttatattcaaagacaggtcacaaggttctccatcaaacttcaggaagatagtggtatttctgaagaggatctttccaaaactaaaataatttttccccgacggtatcggaatgtgccatttggaccggtcggcagcagctacggttgccggtcccgcactgaaaaacgacagtggtgacgggtgagctcccagaagcagaagaatgacaggcaacacctgaagccacgcagccgccgccatcttcacagccgtggagtgcctaccgaaagcatttcaccctcttccggactcattgcgtacacgccctcaccgccgcccagtttcggttcctaacaaaagcacgttcctcatcagccacccataatcaagacaaatttgccaaataaatcattgtagaaacgctagtttgggcctgaaaaattccaggagcaagagtcaagatttgtcactccatgagaatctggaggggactcccttcccagaaacttgacgatgaagtactggttgtaattttagaaagacacccaatcggcttttttaaaagatcgcccagggcccttgtcctgagagctgggagctggtcggagtgacagagaagccatggaagcagcagtgaaagaggaaataagtgttgaagatgaagctgtagataaaaacattttcagagactgtaacaagatcgcattttacaggcgtcagaaacagtggctttccaagaagtccacctatcgggcattattggattcagtcacaacagatgaagacagcaccaggttcccaaatcatgcaatggaaggcaagtaagcctgtttgcaaggtttcaccagagacaacacttccagcagcttctccgaggatgcaggaatatctctgagcacctctgtgaagttaccccttgcctcttcatctaagccttaatgaaaattgaagctttgcccaaccagccacctttctcagcagatgaggcacaactaccgcttattagccagtactgtgtctgcagaaatggccagggaacaggcagctaatttggggaactggcccagaccaatcagaaggcacacctgggacagggccagttgtccttgggggaacagggccagttgcccagcgtgaggttgccagtattctttgtagaaaatcagtgcttgcaataaaccaactggctgcaactgtagaagggacaattagtgtcctacagcaatttaatgaactattagaccatcctctggatcccgggaggtcttgatcacagctggtagaggtggccactcactgttctatgtcttttaggttaacagttctttacataacagtgaagagtcctggtgcctcaggaaaagcaagatcaacctaccaaggaagagttgatggagtcataattttcctacttaacacccactgcaaatttaaatatgtgttctagggctgtttgttaattctattatggtctttactaattgtgattcccagttctgggtgaataaaaagtttttgttttaatgtaattgtgatcaacactatgcttgaagacatagacaaagctatttctaccaccatgatgtttacaaaatatctggtatttacgcctatatggccattaaaaaaactagatttgtggataacaaaccaccaagttttaattgtttttatttaataagggagaaataagacagaaaaagagaattaatactctttttcccagactgagaggcgggcttctaagtaaaggtatgtgaaaaactgagtaggaggcttgtagtactaaaatgaacctcccaaaatttattcttttctctgagggatttat

SEQ ID NO: 47758 - DNA, 619 bp, Homo sapiens
  misc_feature (1)...(619): n = a,t,c or g
aaataaacaagaaatctttaagcatagataagccacaatggatagttaatcttgtacagacaatccagcattaaggctaatttgatcttttaaacattttatgggaaacagctgttgagttttctctagaaaagcccacaaggttccataaccccataggcatacagcctcgacaggcagggctccatcaggctcctcttgaactgggcactccttcacggaaggcaggaatgcacgtgtcttcacttcctgctgctctgcacgcacgtcacgatatctggcagaaggtggtttctgttttccttggtgacattcctcaagacgggtagtgccaactgctcaaaagaagtcaggtcgaccacatactgcccaactcggcattcacgttttccaggtggaggctctaacccaactctcgataaaggcccccgggtgccggacaacgtgacgacatcgaatcctattcttctccctccctgtctgacttcttcggtataaaatccatcaacaggcacaccagaggattttaaaacctcactggctttatggatcaatgttgtttttccaactcctgggggccccgttaggaacacgtgccgggccatgntggtgggcgggc

SEQ ID NO: 47759 - DNA, 448 bp, Homo sapiens
ggagaaaacctgaaaacactgctgagcttgagatcttccaagaaggcataaaggtcttagaaacactggttactgttgctgaagaacaccatcgcactcagctggtggcctgtcttttgcccatcctcatttccttccttttggatgaaaattctctgggatcagcaacttccataatgagaaatttacatgactttgctctacaaaatctcatgcaaattggacctcagtattcatctgtttttaaaagtttagtggcttcttctccagccctaaaagcccgccttgaggctgctataaagggcaatcaggaaagtgtcaaagtcaagataccaacatctaaatatactaagagtcctggaaaaaactcaagcatccaattaaagaccagtttcctctgattttttttttggaatagtaagcaccttaatataataaatacttgatc

SEQ ID NO: 47760 - DNA, 1329 bp, Homo sapiens
tgacattatggcgtggctcaaaatctttttactttgaaggccctgctagaaacttgctgctgctctaattcacgacttggagagacaaaactaaaaaagctgttgctgggttcaggtgctgtgggagaacccgcaaaaaatggtctgaactgaaaatctccatctccatcgccccgatttcgaacaggtgtattatccaaaggaaacttggagttgttacctaatgggaagccaagaacaccagactgtgcaatcatggatggttcaagggtgccttcatggttagcaatagtgatgtttcgtagcctaaggctatcatagaggccttggagcttttgatactgacgattgcgctccataagtttctcagagatgtcactgaactttttcttgtattcttctagtactttcttcatggaggtaacctcccctttcatagaggtcaattctacatccttgctttgtatttgctgagtatatatcttctccatctgtttcagatggccctcagccttgcctgaaattgtattcttgatagagacgttcctgatgtacctgatatgtcccaaaagcccaacgctcgggagcctaatgtcccaacacgatctctggtccgcagtcctgccaataccatagctttatattcctctgatggactgagttctgtgcggacaatatcctagcctttcccagaaagggtactgttgcaggccaggacagatagctggtgagcgactaaactcacccactgcccatgctgatcacagaagatgtgagagcaggcagtgacccatgcatagcccagagagtttgatgcgacactttcgataattacaaagcagcatgtcttcacacaaagacataataggatagtgaggtctccagaagctgaaagagaggccataaaagaaaaacgcagtactcatctacagtatatccaggatttacagcaccaaagaggtccagactggaacagcgaaactcagatctggtttcagtctcttgaaattttactcctctggcatcacatgaatccagcttctatctagaaatccagttgaaccacaggatctatcaattatctaggatcatttgtgtaatgaagagaacttaaggcagcttatcttgatcaaaattcaagtaccaggctttaggtaccatcagcctttaaccctttctgttgagaatatccaaatccaagcccatatgattttcagggggtctacagatgggccagttctggactggcacacagggtgctggacttccctcctcagtggatttcatcttcaaccagcccaccaaaacggagagggaaagaaagtggag

SEQ ID NO: 47761 - DNA, 1251 bp, Homo sapiens
tttttttttttccaagagatttacttcatctttattaacagtaccatagtattccactgtctagtatactataagtgatctatataccaataatgaatacttaaggttgtttcaaatcttttacttattagaaaagtgctgccagaaacatccttgccatgcgttctgtatgtactggtgctagtgtttctatcagataaatttttagacatgaagtgaattactaggcataggaaatataatttacacttttgatagatactgagtttttgctcatttgctacatgaagcagaggccagagtattctgtgtggggtttgggacaggaacactgacccctgaagtcgagcctgggggtctaacataagtggtcatttgtccagcctgttttatggaaggaactggactctgagctttggggaatttccctgcaagataaatgtatatcccacctatactggtaacaggtaagttatgcacaaagatgaaaagacaaagccctagctagatcagctcttgctctcagcactacaatggccagcggtaattctttcagttaaaatgacaattaatacagtttcattgaagcttcaaacagagcagccagatcctcttctgactggggacggggtgcaagcttggtgaccctttcctggggcagcgttcctttcactagtgcggggatatcagctttggagtaaccaacagctgctaggccatcatcaacatccagatcgaataagaatttccggagcgtgtctgccaacaccagccctgcatcttggatcctgggcagtgcgggtgtcggctcccagtatttctgccatctccaggtgtcgctctggaaacatctgggccgtgaaagtgaacaccgctggggacgtgagcaccacagaaaggcccatggggcaccagtgggtgatccacattgtaatccctttgcctttaatacatccttcacctaaaccctgaaattgggtaagacattcccatggcacagatgaacaccagcatttccaaagccgatgccagcaaaagcacttgccaagtgcatatgagaccttgcttcaagatcatcgggatttctgacagccctgtgaatgatataaatacctaacaataacacatcaacattggcaattcctacagaataaggagctgccttagggaaagatatggtgaaaaaaaaagaaatgctactcggtaggaagaaaaatcaggcaagttattcaaacgacgccttgtcttctc

SEQ ID NO: 47762 - DNA, 1236 bp, Homo sapiens
agaaatccttacctttaaaaaaagcttctagtctccataacccccaaagtactgcttatttgtttgaagaatccagccatcgtagtgctttagtcactatcgtaaacattcatgatagggcaaggattttaaaacaggattcttgcttctgttagtcatcaaggtgaacagaagcatcctacacaaccaataaggggctctatgtttgtgtcatgcctcttcaaacaccaaggagttgaacatgcttccagtgatttgtctccgtaatgccttcttcctttatttggcctttctttctttctgtaccttcaagttcttgatttttaaaattccaactctagagaaaaccaatatatggtggtgctgggctttgaagatagcatatcagacgccttggttctgtttgtacacttagccttacatttcaggaggaggcttttcattaggggcttaagctagctcctttggcttttaaaaacaattttttttcaaatttcttcattacctaagggagcctgcatctaaatttctcaactagttcagcctagctgaatttttctagtgtgtaatacactttgcttccttcttattgatgaaaaccagggggatgagtggcttccatggagagatttcctgatttctcagggaggaaaaaagtgatgacatttaccactacttttatgtttttcccctttttccaaattgataaggatttctggttcctagtgatccgggattgggcaacagtgcagaactgccagtcatgccgtagcgtgaagaaagaatgtgagtaactgttgttttgcaaggatttgtagggttatgggcagttgttgtttgaagcattgctatgacctaattcacaaggtatctttcctctcttggtgttctaggtaagccaatgagctttaatctctacttgctataaccgtgtgcttagaaaaagaggtgagagtagtggttttccttcaaactgtccacattcatgaagattatgaattgttaggacagccagggcaagatagaccctgtctctacaaaaatttttttctaaattaaccgggcatggtggtgcctgcctgtagtcccacctgtgtgggagaatcacttgagcctgggaggtcaaggctgcagtgagccatgattgcacccctgcactccagcctgggtgacagagtgagaccctggctcaataagagggggaaaaaaaattgttaggagctgggtgcggatgca

SEQ ID NO: 47763 - DNA, 522 bp, Homo sapiens
cacttagcttttattttaatagtacataatttaataccaaaaaaggcgcctggatccccaaaaaaccgaggctgggagctagtggcccttttgctttctaggacttggggggccggccctccctcctaagcataacaaaggtggtgttgctccagctcagccccaggggacacagatgcactttgggggtgagggcaggtaatgactccatcgcaccctcagttcagctggacagaggctcaggtgaccccagccttcactgtctcccgctctccaggagcttatcttcgccccatctcccaaataagtgggcccttgtgctgtgaggaagaccaaagcctcagggaagataagagatatggagatgggagggggaggacaaggggcagagagtagggtctagctggctatctctggccttactaacacccccctggaggcatgccccttttctccagcacacaagcacattggggcacctggaaatattggttccaggctcctgttctctggacttcagat

SEQ ID NO: 47764 - DNA, 475 bp, Homo sapiens
gaacatcttccagaccctaaaatacttctttgaaactgagagagaaactattgattatctagcccaaccttttatagctaaatgaccttgaataggtagccttttcttttatctgtacaagcttactgcagaatctcaatttgtgtgagtgacagcaggtgtagcagctccatctgtatttgtcagattatagtttactaactgaatgaactaaaaattgggatatttggggcttgaatttttattctgaatgtacagtctgactttatccccaccggtaaattagaaattataatctcagccctaattctactgcccaggttgttatgaggattaatcagttaattatagcttttaaggctttgtattctttggagaaagatgatttatcagataggctgttgtgctgtttgtgtagaactgcttcctttttttgtttttcgtttttttttcctttaaccctgagcttctctaa

SEQ ID NO: 47765 - DNA, 1584 bp, Homo sapiens
cggaagctcttacacagtgggaaattatacaagaccaagagcaacaaggaactgcacggattcctcttcaatgacttcctgcttcttacctacatggtcaagcagtttgctgtttcctctggctctgagaaacttttcagctcgaagtccaatgctcaattcaaaatgtataaaacgcccattttcctgaatgaagtcttggtgaaactgcccacagacccttccagcgatgagcctgtcttccacatttcccacattgatcgggtctacaccctccgaacagacaacattaatgagaggaccacctgggtgcagaagatcaaggcggcgtctgagcagtacatcgacaccgagaagaagaagcgtgagaaagcttaccaagcccgctcccaaaagacttcaggcattgggcgcctgatggtgcatgtcattgaagctacagaattaaaagcctgcaaaccaaatggaaagagcaacccatactgtgaaatcagcatgggctcccagagctacaccaccaggaccatccaggacacactcaatcccaagtggaattttaactgccagttctttattaaggatctctaccaagacgtgctgtgtctcaccctgtttgacagagaccagttttcaccagatgatttcctgggtcgtactgaaattccagtggcaaaaattcgaacagaacaggaaagcaaaggccctatgacccgccgactgctgctgcatgaggtccccaccggggaggtctgggtccgttttgacctgcagctttttgagcaaaaaactctcctgtaggggttctaaaggacagcaccagcgggacagcccacaaggctggggctggagaatgagagactgcgctctcttggggctgagggagcaccatgcagcttcacccctcacaaagccatgcacgctgggggctctgttttcctgcacactaaatagctagcaatctatgcaaacacctttcccataaagaaaccaaaccccatagtacagtgccttgtcctagtgttcacatgttcagctctgtttgtttagatgccaaggtttccattttcagggctataaaaagtattacttgggaaatgagggcatcagaccaccagatgttacccgttcggttgaatgtgttccaccgtggagtggtttgggtgacgctgtaaccattccacgccagtgacctctgctgggtcacagccactcaggaggggaagggtcaggatgaagaggctgcagccctcgacacttggcgcggcctgatactgaaatagcgtctactcgtgcactgaataaaaacagaaacttgatcattttattcctgattagattttatcactctctgctaagacaatatagtctggagtataagtgggaaagcttgatttaaatactgtgaactctaataatgtggaaaatatttttcaactttaattttctgaagtataaattatttatgtaaattcattgtttttgcatatttcttaggacatgcatctttaagctttatcattgcccatatgtacagaaagagaataaagacatatgtttatggatggaaaaaaaaaaaaaaaaaaa

SEQ ID NO: 47766 - DNA, 459 bp, Homo sapiens
  misc_feature (1)...(459): n = a,t,c or g
naacagttatgacatgattacgaatttaatacgactcactatagggaatttggccctcgaggccaagaattcggcacgaggggacctcctgggccctcaggctctttagctgagaataagggccctgagggaactacctgcttctcacatccccgggtctctgaccatctgctgtgtgccccgaccccccctaccctgctcctccaccaagcctgatgctaagggctataaaccactggcccaacagaagcttggttcccagagaactggtccctgcctgggacatgctccttgctacagccccttgtgggagctcagagggcatggctgctccccctacggtccctcgcccagtggttctggctctttatggcaggaagcaatgaggctccccaagaacacacctgaggaaaaggacaggcgcacggcggcctacaggagggtctgaggcggcagtct

SEQ ID NO: 47767 - DNA, 622 bp, Homo sapiens
gtcggggaaaaagggtgtttattaaccaacggcagggggaggagctgagcccaggctccccactctgtcacatgcctgttccacccacctggttgtaagtgggggcattcctaaagaagtgtagccattctcacaataaatacattcattgtggggtggaggtgggagaggttgggtgaagggcagtaaaaacccgtgggattccacgttctcagctacaaaaataacagtcatcctcacccgaggggaatgggggagctcagtcagaattgattgtcccatataggcctagagacttcagaggcccctggggcccttgaaagtgccccggtgaggtaggacaggggtaggagctaagcgtccaaactcccagcctctgccctttgcatagttccaagaatgggcttcatgtgccagttgagacatcagatttctcctccctttccctgctgtagtctagaggaagcaaatgcttgattcccccaaaagagaggctggctcattgagtgcagtgttggtcatccatcctaggcaagggcctgtgaggacagttaaatgggagggggatctccctctgaaatgtccacggactaaacccaacagacaggtccactcgtgccgc

SEQ ID NO: 47768 - DNA, 1140 bp, Homo sapiens
ttttttttttttttgagacagagtctctgtcacccaggctggagtgcagtggtgcaatctcagctcccgggttcaagcaattctcctgcctcagccttctgagtagctaagattacaggtgtgcgccaacacgtctggcttatttttttgtatttttagtagagatggagtttcaccatgttggtcaggtgggtctcaaactcctgacctcaagtgatccgcccatctcctcccaaagtgctggattgcaggcatgagcgcctagccaggaagctatcttttcttgagttatgaaactttgcaacagttgttcaaattggtgtttgtccttcctatagctttcatattttcaaattaattctgtatggctatataatttatgttttaaaaggcaattctcttgactttggaaatatggaagtctctcctttaacctattcttgttcccattcccagtctcatttgaaatcattccttttattgttagtgtgtgtatttttgttgggtgtgcttttaatgcatcccaagtatgcatcattttggataaaaaatacatccaaattaagatgttttaacacataggacaaacttgtgcactttttatgccaaaaaaaaaaaaaattgggttttccttcatgggatttctagaaacactgcctacactttatgaaaactacatagtattcacctgtgacaggtagagtttatcactattaattttatgaggctatttattactttccaatgcatccacttagaacaagctaagagtaaggctgctaactttaattccttgcctgattttattgtacagtgtgcacaagcacaatggtatgcttgtatatagaaactaaaaatactatgaagtacataagttccctatggcttatggagagttatttattaattaactttatggtagggctagtatgaatacctttttaacaattgtgtgctattacaacaatgaagattcaaatgactccgctttgaaggatgttttctctatatggtaaaatatatatgaagaagtcttgattacgtgaagatcacttgactcagaatacttcaatgtattttgttcacattaccactaagcatattatcagtaaactattaactgactgcacattatgtaat

SEQ ID NO: 47769 - DNA, 1651 bp, Homo sapiens
atggctgcggggatgtatttggaacattatctggacagtattgaaaaccttccctttgaattacagagaaactttcagctcatgagggacctagaccaaagaacagaggaagcattagataccatctccagcctggaacattgagcaaatttggctgcattggggcattcactttggtttcttcaaagatgtctgttggagctattcccatacccactgaaggatctgtagtcttgtcttcattctatgtagccatgttcaaggatgtaaccagactgggttttgagatacatgaagctgtgtcttaagttactcctgagtttacacatgaaaaggtgaacatcatccaaaaaccctgggacatagttccctggaggaactggcctgccgaatggacctggaagggctggaaatttgacaagttggccactgagtatatgagtagtgcccgcagcctgagctccgaggaaaaattggcccttctcaaacagatccagggaagcctatggcaagtgcaaggaatttggtgacgacaaggtgcagcttgccatgcagacctatgagatggtggacaaacacattcggcggctggacacagacctggcccgttttgaggctgattctcaagggaggaaacagattgagtcaagtgactatgacagctctttccagcaaaggcaaaaagaaaggccggactcaaaaggagaagaaagctgctccgtgctcgttccaaaaggggaaaaactccggatgaagaagcccccaagacttgcccagaaggaagtttaaagctccgtgcgcacaagtcctgagtatgggatgccctcagtgacctttggcagtgtccacccctctgatgtgttggatatgcctgtggatcccaacgaacccacctattgcctttgtcaccaggtctcctatggagagatgattggctgtgacaaccctgattgttccattgagtggttccattttgcctgtgtggggctgacaaccaagcctcgggggaaattggttttgcccacgctgctcccaagaacggaagaagaaatagataagggccttggattccaacacagtttcttccacatcccctgacttgggctagtgggcagaggaatgcctgtgctggggccaggggttcagggaggagtggatggcacagtgctgtcatcccttctcctcccctctccccactcccggtgctgaggctgcatcagaccctggtagggaggggtgccgcagccactaacggtatgtgctctccttcagccctctcccttcggagggacgtggtcttgcccactgtccttttgcctccatgctgaggtcggtgctgtatttcagagggagggtccttttcattctccttgctttgtatttaaggactggggcatagcatgggggcagtcccccagacctcttcattccccctcctgtggtgagggctaggtgtgatcaacacttttcttctccattcccttcctgcttttttcatggtgggggatccaccaggtcatctaggctctggccctagttgaaggggcaccccttcctctgtgccaagaggattcatcctgggagagggggcaaggtggaatgcagataactcacatgtaaaaggaacttgggtaggtaaataaaagctata

SEQ ID NO: 47770 - DNA, 944 bp, Homo sapiens
ttttttttttttttttctggtttcgggttttattttagaatttataaaattccagtgtcatccatattcatgagcctttacacatgtttgcatataatctccaaattccaaagttaaggccaagggatggattgtagctatggaaacagatgatatggaagacatccaacaaggaggaaaagcacacgcacgcctcacccctgcctcatctctgcccagggctgtcctgacagcacagacgcttcagggagacaggcctggggacagtcatgtcatcacccttgcaacaaccacccaaaggaaaagagagcgctgaacagtttaggaaagggctcgcgtctaagacatcaagcgacatacagagatgtgcaaaacttggtgagaattaaaattgacctttgggagagggtaggggcaggatgttttatgacactgtagaaaagacaggaggaacccgctgcgatggagattggggggagctggaagcaagcagccaacaggacagagttccagaactcatgcagatggggaagaggtgacagcccttccccactggcctcccccgtggaggtggagtagacagatcccgggaaaggcaggaaaagggccttgctttctttccctgtttcctaagccgtggtcaccctagcctatgaagctggaagctatattccttccaatcccaatttaccattcctgtaaacaggcccattcagggctgcctgagcaaatggggacttgccgaggcagctgcaactagacttgggctaagccgtctgggtctactcaagaattcgagtctgaagatgaccaagcttgagttattcaactgagagtgaggtgtcaaggcggaagcgactgtccccagggaagggctgtgagatggatgggcgtgagtcagcttttccaaaactcaagtacctgggacaggacaactcgctagc

SEQ ID NO: 47771 - DNA, 1899 bp, Homo sapiens
tttccctccatcatgaagtggtgcaaagtacatttatttttacaatgaaagctcatctatgaatctgataaaggccttccttcaactggagacaatttgggatgttgcaaaacaaggtttgggaagcccttctatggatcggttttgtgtccaagtctgtccctgccaaaagccatcaaaagtctccatcacccctgggctccagtctgctacccccagacttggcagctgggatctctccttcctggttcatagttctcattcccacccctcagcgatggagttagagttccaggcccacgtggtgaacgagattgtgagtgtcaagagggaatacgtagtttatgatctgaagacccaagtcccaccccagcagctggtgccctgcttccaggtgacggtgagtcaagtcgggaggaggccgacagagggctgctggaggcgggtgggagtgaggatgcacggccagaggccaggccccatgcccccgatgcccacctccttcccccccgccgggaaggccctgacttttccccttccagctgaggctgaagaacacggcgctcaagtccatcatcgctctcttggtgcctgcagaggcactgctgttggctgacgtgtgcggggggttgctgcccctccgggccattgagcgcataggctacaaggtgacattgctgctgagttacctcgtcctccactcctccctggtgcaggccctgcccagctcctcctcctgcaacccactgctcagtaagccctgctcccttacccagtctgccctgtttctccccggtcacccactggtgctcagctcgctgggcaccagagacacagggactggcccctgagcatctccctgtgccctgcctcccccagtttactacttcaccatcctgctgctgctgctcttcctcagcaccatagagactgtgctgctggctgggctgctggcccggggcaaccttggggccaagagcggccccagcccagcaccgagaggggaacagcgagagcacggcaacccagggcctcatcctgctgaaggtgggcaggggctggggggtaaggaatgaggccctaggtgcacacctagggctggggtgagggcacggaggtcccaggtgtgggtagaggccccttgcatccaccctgctggctctcctgtcccctggtctccaccatgtcctcctcccttagaagaaacaggtctggggcagggagcaagctgagcctccctgaagtcgcaggtgacctcaatcccctgataacccatgccttgcacagcctaagagggtgtttcttcaactgaagatggcctgaaatgggccagacccaaattttcatcagctgagaatctaagaaaggaagcgatacaggctgatgacccctggggttcgctcttccgctcatgttgaggggaccttgaagaacagctcctttccctgtatctctccccacagagccctccagaggagtaaaggggtcacagagaagctggcctgagactgctgaccgcatcttcttcctcgtgtatgtggtttcggtgctgtgcacccaattcgtctttgcaggaatctggatgtgggcagcgtgcaagtctgacgcagcccctggagaggctgcaccccatggcaggcggcctagactgtaaaggggcagggcctgggctgcacaccttaggatgaagtttgctttcccatggctgggggcgggccatgacagggcctctggattaagccaccctgagctctccctccgctagcacacaagcacagagcgtgaaataaacccatctccagtgcaagtgtgcctcaagggtcagtcttcaatctcgtcctaaataggtggggccctattttttgcttccaacccccattttgctccttaacttttccc

SEQ ID NO: 47772 - DNA, 923 bp, Homo sapiens
taaaagcatctttttctttaacgcagaggttatgttgtattattagcataaatgtttttttctgggaatgcttatttcacacagcacaatactgaatcttctctggaatgtggatcgatttcagatggatgactattaaaatgtgtatatttgcagattatccttaaagggccacctcatgccttctaatttatgtcttacggataaaaaatcaaaatgaagcataaagtaaaaactgtgtccagctttacaagtggacgcttagtaatggctgaggcaatatgtttaatgtagcaaattttacttatttgtcatgatcagttttcacagtgcttgtaagtgctggtaatagaagatggacatggtttaggtcaaaacttggaccagaaaccaacttcctttgaaacagctctaccagttataagagcaatatgctgttaggtgaagaactgtttaacagaaatatattatgtttttgcaaacaggcagctgatccaaaattgtgttgaaacacctcagaaacataaatgacatcaatactctataaattaatgctgttaacaaatttaaaaaataaaacatacaattttcaaattgaaggcacacatcccagttggtactggcaagtttaaattgtttctaatactggtggactcttcatttgtaacctactgagcagttacagagggtactcccattgatacaaaatgctcaggtaccggcatttctccacatccagagttctttctatattcccttctgatttccatcccttatctgttccctgcttttgtccttccccagtctcacccccatctctagccatggtaagtgagatggcggaagcaggtgcctagaagcaagcagcaggaagcagcattttcccactcctcccagagctctgggctcccagactgtgttcc

SEQ ID NO: 47773 - DNA, 1097 bp, Homo sapiens
  misc_feature (1)...(1097): n = a,t,c or g
tttttttttttgagatggcacagaataagcaatttattgcaattgaattatccaatgtggttgactgaatataaatatttttattacaaaatattccaggtaaaaattcggagctgcttacaagcttctttagctttaagctcattgcatttcttcatgtctagagcatgggtgacgggctcaggtgtgcctggcctgccccgccagggtcctccttctccgtctgcagtgggtcccactcagtgaggacctctgaggacacctcagtgaacagatggtcccagtcccagccgacatcatcctcccggacttcgtgctccggcgcgagcactttggtgaggagtttcaggtcgatctccccatccagtgtctgaatggctgagtacttcatgaggtcattgtccaggtcacggtaggtcatcacccgctttatctggatgctgggaggggctgccacctgcaaaacaaagtcttcttcctgtacttcctccagatccggaatgataggaatatctcctccataatctgatccattcaggctctgtggtctgaggcggaaatcttctatttcttcagaagccttcctcctaaacttcgaagccttcacggaatcacctgcccagcctccctgtcggcagcgaggtaatttagcagaggaagtctctccagtcagagtcaaagaggaattcttgccattgaggtgattctcggcctgcgctgactcctgttgagctcggcgacccatcttggccctcggaagaaagccgtccctgcctgcctcccttccatgcataaaacagtgcggcttttgcaggaacttctgcgangangtntnccaaaggnaaaantntnggatnggancgaatncgaacccggncggggnttccctatnaccctgtgatcgatctgttctggggaaattcgcactcggggctctagaaaacggagaaaggctcggaaatttcccacggtcctagacgccggcggggacagggtgttttctactttctgaggattttaaagaaagcaaaccccaggccagcagcgcggagcccacagtggcctgggggcggggcggtgaggctgcctccttctgg

SEQ ID NO: 47774 - DNA, 865 bp, Homo sapiens
gttaacagtagaaggctcagtttctctgctcatcacacggccttcggcactgtagctttgggtggtgggctgcagattaattttgtaaccaccttaagaaaaatacggaactctaactccttgccactcaagaaatgtcctccctttcagaatatgccttccgcatgtctcgtctcagtgcccggctatttggtgaagtcaccaggcctactaattccaagtctatgaaagtggtgaaactgtttagtgaactgcccttggccaagaagaaggagacttatgatttggataccaatcataagtctccttcttcttggtatccaaatcaccacacttacgctgaactcatgcagaccgctccgatttcttgggactctacagagatgagcatccaggattttatgggatgagcaaaaacggactaaagaagcttcgtggaaaggagaaaccaaagaaaggagaagggaaaagagcagcaaaaaggaaatagtgttgggtccctcaagagggagactttcttcctcagtggcggagagaagaaagtgcatttattgtctttccacatattggaggaatgtcatcttcctaaatgaagtttatttggaggaacacagtcatctccttggtgaaatctaatccggttacattgtggctggtttcttgaacacattctaactgtgcaaaattatcttggccttggccgtgtaatgtgaggtttacctgattctctaatgaaataaatacctaagttattgtttgatgatttgtttggggtgggatgggatgctgggggaatggaggggaaacctcattaagtgagcatcctatagtgcctcatttctcccttcttgcttactgactcacc

SEQ ID NO: 47775 - DNA, 496 bp, Homo sapiens; identical to SEQ ID NO: 3947

SEQ ID NO: 47776 - DNA, 5435 bp, Homo sapiens
  misc_feature (1)...(5435): n = a,t,c or g
ggttaactagaaaagaggagaattaaatgcataaccagtgcagagtaactgcaaggcaccaagaccacatccaaccagcccattttcctcctctccaccactgaatggatctgggagaaagcattagtaacagcactcatcaactgcttccctggaacaaaacatgacaaaacacacggaaggttttttcattatggttctcggtgtactttattctcctgctgtctagctaagcagcccacacaggacagaaatgggtagcactgaggaatgatcagattttttttctatccccaatatttctgccccctccctaagccctgacccaaccctatcttaataatcacgaatggttagtacatcattctgtctctcaaagaacaactgaaatggaaacaaggcattagaggaccaggcctcttcttaatagggcttaggagctggtatgagctctttattcacaatggagcgtctctccttcaaatacctggatttttttttttttgtacactggttcatagatcggcacttgactttgaacctggcaccaaaaggcacaatatctgataccctgtacaagagctattagagatgctgccatatggatgggcaaaactgagccaatcccacttaggaatggaaggcttggacatggaagggaggatataaacgaggagttggagaaaaacgcaagcccagtttttgctagagtggaaatgaaagtgggaatgagggtcttgtttttagtcctctaaggaccaggaagcaattttaaaacttccttggtttttctgaaagcagcatattcaaaatgccagcaaaaactcctaacaactgcaaaaccaaaagaggatcaaagctcaccaacatcccttcttattgctgaaaggctctaaaattcaggatgccctgttcccttgtaaaagggaaaataattaagtctgatttatggtaatcataccacatcacacttctaaaaaaatattcaagtgtgtgaccaggggacgtttgacaccattttattaaccttcaacttcagtggaaaaataaaaccttttccaagtgccattttcatcacaagacttctagttagtgtgtgtgtgtattcacacacacacacttttttttgtttttgttttgttggttgcttttgaagtgcagcaagagaccaataccgcattgtagtcaatcaaataaaagaacagaaggccaagcagtttccaaatggttattttatcagattgtttgaacatttaatttatcctgtttgcaatccaaaatagttacctgaagtttgctgttttgtgtgtatgtgtttacttttattgtatatttatttttctaaactctttggcacaattttctgggggcgttcagactgccacaatacaagtcaggagagggcgttttctttgtgctgccaattctgatcatttaaattttggtttgtttgggttgtgatttttttgtttttgaagtctgcgttatttgtaacaattgtacttatatttttctatatcctctaacgccagagttttctttttctcccccctcccccccacttctacattcacagttgaaccatattattaggaaaggcgccttgatgaaaagatcaggataggagctctgaccattcgtcagtgttttccctagagtnnnnnnnnnnnnnnnnnnnnnnnnnnnnnnnnnnnnnnnnnnnnnnnnnntaaagagcgtctttcctctgtgtgtgtnnnnnnnnnnnnnnnnnnnnnnnnnnnnnnnnnnnnnnnnnnnnncatctcttgtgctgcatcagtagacagaacttcggttagttttatgaaatgcaacatctaaccccttgttttctgggaaaaagaaactgcaatgacttgaagttgagaatgtggataccgcctcactcacacacactcattctcagactgtaaaaaatccctgaccctccttctagctggcaagcatacagtaccatgtggcaaaggtacagcgaaggtgggcttgagacccaggctccatctttctcctcagtagcaaaggccaggctgccttttacaacaaagcaccacagctgaacccagtccctcctcctcccccaaaccaggcattccactcggcactggccaaaagacagaaaagctacttctagcctctcctgggaagagataactttctttctttttttttaaataagtaactccattgtttttctcttttccaagatggccgatgttatggttttctacgaagtcagtgcttacttagctcactaacagcgctgctgttggcggctgcggctgctgctgtggcaggattttcaatgtggtgtgttttcaagcctcactcactcatcctctcattcccaaacattcagcatccgtgcacactcctcacttccaggtttttcaaaagatgggagatttccagtgggggtcctcaggttatcatcccaatggtaacagatcaagcttggttcttcagtttcctcagttcttttgttgcccatgtagcaagggtttttgctttgttagtcttcgatctccgcccttcagttaacaattcatggatcattggcctagcttctactaatttcagtacatccttcccaaatgctgtacataagtcccctattagtccagcagcacaagctactactccatctgtgtgatcctcatctccagcaatgtggtcaatgaaagacagaataaattctactctgggttgtaccagcatcacatccgggtgtacgttctcctgatccccctttaatccctggacgattccagtataggcttccaagcagctttcccttagctcattcagataatccaccatgtcatagtctgacttgtccacctgggcttgggaggcctgctgaagagtattcaatacaacctctaagtattttttaaactctcctccaatagcaagggcaatatcaccaaacactgacagaatctgcggcttcacagacctgtggacgttctcattccccaaattttccagaagcagctgcatcacctcgtcacagaaaggtatgatgttggattgcagggcacggcacaagtctcccactaagcccacagctgccaaacaaacctggtattcagcataattttttaatccaatgcccaggaagggtttaaaggcctccatgtacttgaggaattcaccacccaacacttccaccagtgtgctaactgccatcagggcatcctcttgtactcccccagacccagctgtgctttggaacatccttaacagggaggccataaccacatcagagatctgcaaagcatcttgatgttgcactttccgaagaacattctgaagagttgcacagagtaaagactgaaggtcattgaactggattctatcggatgtgctctggatatgtgactccatctgaagaacctgttgcagtcgttccatgatgaccaaagtcgttttctggacagcagggtaacaatccttggcactgtttttcacaatttccatcagagattcatatgcagaactcctcaggttgttctggtgtccatcaggtctgtctgtagtctctaggagcttctgaactatgagttcaaatgaagaagataagcagtaagtagctggttcttcctgatcatcagcaacgtctgcagcttcataagcagcttcagccagactggagaaagcccagcacacatttgaagccactctgggttcagcactgagaccctcaatcagacactgtagcaggggagccaagtagacatcattgatggcagcttcaggaagcagctcacaaattctgcctacagtccatgcagctgtatctcgaacaactacactggggtctttcattaattctattagggtgggcatagcctgtataactagtggtttgagctgactgggctctggtccttccaagatacaaccaaaagccatcactgctgcatcccggtaccgcccaatctgggttcttgatgtgttctttaatgaaggggaggacatgtgggacaatgtcatcttcacagcaggtggccagaagcatgaggcacacccctgctgctttgcaggggttccagtcatcgtcatcatcattttcgtcctgtttagttagtgtctgtgtgaggattggaaccagatactgtagtgctcccttcgcataaaacttgctggtgtgctcagggggccgtccttgttctgctgcctctgaagcttcaatggccaaatccatttcctcatcacagacattggaccagaattctatcccttgtaaagccacctcatcaatgtcacttttcattgcttcgattgtgattgcaaaaagagcaggacccatatatgtctccatgtactgataatataaggacattatcttcaccagattctgtaaagcagccactcgtaccctcgtatctggacactgtgtggcttcacagaccacctgcataataaagtgcctttcagactctttatcaaagtttgctttggtgaactccaatgagttcaggagtgcatttgtagcagctagcttcacattattactaggctcttctttcctcatcccctggattatggcagtcagaatctcattggatttatcttgtagctgctctgggtctatatcttggcaaatataaccgatggcttccaatgtcgactccttcatgtgctctgtgctgttggggtttgtgacattggccaccagctgaggaatgagttctggccactggtttactgggatctctgcacaagcaataccagccacacactgtgaggcagaactaggccggtaagtttctgtacccaatgtctgcaaaacatagttcttgacttctcgtcgagcattagcatcaatagcaagccacctctgctgatattgtgccttgatatctggatctttagatgtcaaagagttcttgatttgtagaccagctgcaactctggcaacctgactgtttcctggatttgccagcactctggacagttccacaaggaaagtgggcaggttctccacggccgcacgctccaggaacttctgcgccgcttccagctccagccgatcgggagacacggtcttctcgagaatggtgatcagctccatggcggaggtggcggcggcggcgactcctcctaagacgacggcccggcctttcgggcggcggctcgaactggggatgggggttgggggtcgggtgggaagggagggtggggtggggggcgggggtcaccacaaacccattcaccggctctgtctgggtagtcggtccggctccccttcctctcctcttcccttacttcctccctccaaatgggctgctggcggcgggggaggggaccctgggggcagctcagagcgcgctggtgctcgggaggcggagggagaaagaaggaagggaggctgtgagtgagaggcggcgcgcagggagggagcgagggag

SEQ ID NO: 47777 - DNA, 456 bp, Homo sapiens
  misc_feature (1)...(456): n = a,t,c or g
ggtgtggatggggcgctggccgcccgctgtgaccttgacctgcaggccgactgcaactgtgccctggagtcctggcacgacatccgccgagacaactgctctggccagaagcctctgctctgctgggacacaaccagctcccagcacaacctctctgccttcctggaggtcagctgcgcccctggcctggcctctgcaactatcggggcagtggtggtcagcgggtgcctgcttcttggacttgccatcgctggccctgtgctggcctggagactctggcgatgccgattggccagaagccgggagctgaacaaaccctgggctgctcaggatgggcccaagccggatttaggcttgcagccacggtacggcagccnttagcgcccccaagccccaagttggcgntgcattcctgcccctncacttcccnactattgagnacatgtttgtgggcca

SEQ ID NO: 47778 - DNA, 472 bp, Homo sapiens
  misc_feature (1)...(472): n = a,t,c or g
gaccatccctaggtttcacaactagtaagctgagattcggactccaacgtgcatgttcctttcccagtagcacactgcttctcctgaagccgaagttccccttcagagaattatgtagatctcataattccctaggcaaaactggagctctttgaatcccagcctagccatccacactataccagtttaaggtgcaatcttgtgattattgccgctgatcacgattcttgataaggcatccacaactgataagtctgacgcttctgttttacaccaattgccagttgttttcagagttcactgtggaaagggaggggaaaagcttattctctttattaaagttggttagcttcaaaatacagtgatgtatttttggggtatttctgtggggaaagggtttacaaggggttcaaatgcatcattaatgtgggaacttattattacccanctggtggggttggtttccgtgggg

SEQ ID NO: 47779 - DNA, 1011 bp, Homo sapiens; identical to SEQ ID NO: 3959

SEQ ID NO: 47780 - DNA, 1106 bp, Homo sapiens
ggcacaagcctcttgatgcataaaaacagctgggctcccttggagacagagcgccatgggaaaccgggtctgctgcggaggaagctggagctgcccatcaactttccagaagaaaaagaaaacaggaagccaaacaagacggacactgaagccgcagccacaacagctgcagcagaatctcccaaagggccatgaaacaacaggacatacgtatgaacgggtgttacagcagcaagggtctcaagagaggagtccaggcctcatgtcggaagacagcaacttacattatgctgacattcaagtgtgcagccgtccccatgcccgggaagtgaaacacgtgcatttagaaaacgctacagagtatgcgacccttcgcttcccccaggccacacctcgctatgacagcaagaacgggaccctggtgtgagcgcttgggaggaaggcccagtccatcgttaaccactacacctgtgggggagaacctactgctttggggaattgggtggaaccagggatgttgtccacgttttaagcttaaagaactccaaagcccctggaattgtgggcgtcccattttctcccctggcctcttacttgccactgttaggttggagttaatagttggtttagctatgggtggatagctaaacttagctatccacatgaggttaggtggagtgtgcagggaggtaggtcttcgaccccaccattgttgctcctgctcttgcaaagtgcagaaagagcaggtaaaaagttagcccataagcacgtgggctgatcttgttggactttaattaatggtatcctttttcacacaccttaaactccaaagctgaaggggaggtgctccggaaaagcattctgagcttttacattcagacactagggctggcttgggccatttcctcagtggctgagtcaggttccagaccttaacagacaaatgggggaagggggctgaggcgtggaggaaacgctttcaggacctcaagtcagtgataaccgacagcacagtgaggcctggaaacttccctcggagggactgttgagtctcgcaggtgcggggccgctaggatcaataaacggcctgagaaacaaaaaaaaaa

SEQ ID NO: 47781 - DNA, 1005 bp, Homo sapiens
gcgaagggcgcggggctggaggcccgcggcgccatggctcacgtcggctcccgcaagcgctcgaggagtcgcagccggtcccggggacgggggtcggaaaagagaaagaagaagagcaggaaagacacctcgaggaactgctcggcctccacatcccaaggtcgcaaggccagcacggcccctggggcggaggcctcaccttctccctgcatcacagagagaagcaagcagaaggcccggaggagaacaagatccagctcctcctcctcttcttccagttcttctagctcctcttcttcctcctcgtcctcctcctcttcctccagtgatggccggaagaagcgggggaagtacaaggacaagaggaggaagaagaagaagaagaggaagaagctgaagaagaagggcaaggagaaggcggaagcacagcaggtggaggctctgccgggcccctcgctggaccagtggcaccgatcagctggggaggaagaggatggcccagtcctgacggatgagcagaagtcccgaatccaggccatgaagcccatgaccaaggaggagtgggatgcccggcagagcatcatccgcaaggtggtggaccctgagacggggcgcaccaggcttattaagggagatggcgaggtcctagaggaaatcgtaaccaaagaacgacacagagagatcaacaagcaagccacccgaggggactgcctggccttccagatgcgagctgggttgcttccctgagggcccccgctggccaaggcctgtggacgacgctggcggcccagcctgggcaggtttcagggtgccagtgggaagcctgatgggtgctggtggcctttcccccgtggattggtctctggcccagcccagtctcttctcaggggcagggggtggaggttggggtcaccggcctgcttggcacccccatctgaaagagcagcacttctcagctattaaaggccccctggatagacaaaaaaaaaaaaaaaaaaaagcatt

SEQ ID NO: 47782 - DNA, 1251 bp, Homo sapiens
  misc_feature (1)...(1251): n = a,t,c or g
tctgaaataaatagataaataaacaaaataaaaacaaataagtaaatgaaattaaaacaaaacccaaaatacggtcttaaaaaaaggacatttagtaaaataatagggaaatctaaggacattaacaagtgagtcttctttattttctaccttagttgatttaatggaaatccagtgatttccatattctccccatttgcacaaaacaaaaattcatagatactttgangagttggaagggaactgagaaggcctgtatcccaagcaactatacagtacagaatcttgggaaaagcttgccttagagatgaccatttcgggttttgcttgaattggaaatcttctacctgtctcaccttttagacatccttaattgttccctaaattgttcctaaatttgcttccttgtaatgtctttctggacctgccatctcttgctacaaagaacataaaaaaccaaaaaccatttcttgatgagattctgcccttcatctcctatctctctaagtctttcatttgccacatttaccatcactttgtttaaggaggaggcactgtagtccgagtgaggagggatgaagaggtgaagagatgggtctctacttctacctcttgcattgaccatactggtgactttgggtgagccacctttccattagggcctctgtttctttcttgtcaggtgagggagatggacttagatgacttggatgatttttttttttttgagacgaaatcctacttnnnnnnnnnnnnnnnnnnnnnnnnnnnnnnnnnnnnnnnnnnnnnnnnnnnnnnnnnnnnnnnnnnnnnnnnnnnnnnnnnnnnnnnnnnnnnnnnnnnnnnnnnnnnnnnnnnnntactgaccccagcctagatgacctttaagcttgctttcaacctgcattctggagttattagcttttcagctgaggtttttattaaatggttttatttgtcatcttctgtctgcccccttgtggacattgttttgggaagaaaataaaatatttaattgctcgaagaacaatataatgaccatctcaccctccaaaaattcacttgcatcacactgtttgttttcagttattcatgttcacttctagtcgtcgttcataaatgtacatcattttacatggttgaatcatatcagggacataattttgtactttcccccctccctgataaagatgatgtttttacagtaaaataaaaaaatgcttgtgattcaataagcttttaaaatattaa

SEQ ID NO: 47783 - DNA, 1522 bp, Homo sapiens
ttttaaaacacaaattttacttgtttttatttaaaaagtccggatccagcagtgagaaggagccacccccaccagggtccctcggctggaggagagcaggatgggcaaagccggcccccacccatctggggtacaggcatgcgggggacaccccaggtaagtccccacaaggcagcttcctgtgtggcctatggcacagccccccgtagtgagtaatttggggggtcctgccgtgtgctgggggtgggtttcgtctgccctgtgtcctgggggtggcccggagagccagtgtagcgcgtggctgtcctccgaggaggggcaccctcggctgtgaggttcttctgggtgtatcgcgcagcgagtgctttttccgggttcagggggctggggagattgaaagctaaagggatgctgcagaaatttaattttaggggggctggagccaaagggtgcaggatgggaccaggccccaaagggtggacccccagcctctcgtccacggggtggggtgtggcaggcgcgcccacagcttctcctctgcatcgtgggcccgcccactcctcacaggtgctcgctggcgacctgggccaaggatttccttgatgcggacgatgagcttctcgtgctgggcggggtcgcgctcgatggctccgtgaagccgggccatgtagaagtccagagtgcccagcgtgggcgtttcgcccgtgcccggcaccggcagtgaagccgaaagctggcggttgaagccctggcgaacggcctggaagtgctgctgcagcgccagcgtcctccgctcctccagcgccagctcctgctcccaggacctcgcggcgctgctcatgctctgcgtgttccttctgcaagtaccggcgttcttcttcctcgaaggccaacattcattcttccgcaagcgccggaaagtccggcttaaggcgctttgttttggtccaagaactcttcaagtgaaagatgggaacatcgaaaggtggagaagccatcgcagtccccacccttgtgtccaattcaggagagtgttcatgagcccagaagcttcgaagtcttcttttcttgaatcttcttctcctggaatctttctccgtgcaacatctttaataggctttcaagactgcttggtaaggcccggcaagcttcctttcaatgtactgctgcttctctctctcggcctcatccaggtaccgctgcttttccgttggctgcagcttgctccactcggcgcccagcatcttggtgatctcgggaaagggcagatccgggtggcgcgtgcggatgctgctcgcgccgctcgttcaggaagcgcacgtagccagtgaccaggtgccttgggcccattcggcagaatcttcttccgcttcttgcccttgggccagccgcgtttcttcaccggctcctcctcgtgggaccccttctcgcgccgcgcgtggacccttgccgcgctcttgcttgacagtcaccacgaagcccccatgctggcccggaagctcttacccccgccggcggacgc

SEQ ID NO: 47784 - DNA, 1473 bp, Homo sapiens
tgagaccttatgacatgactacgaatttaatacgactcactatagggaatttggccctcgaggccaagaattcggcacgagggtgcagcttcaagcttaggaccacccaccatgcctatccaggtgctgaagggcctgaccatcactcattaagaacagaggaggctgcctgttactcctggtgttggtgagaaggcagatgtagacagcatccctccagacactctgctgtttcctgcctaggcgtggctgcagccatgggctaggaaagcgctgccacccacccacctgggccagagctggttctgctcctgctgcagggacactgagctggctatctcggcgcttcgggcaagaactgcaacaggctctcctgggtcctgcaggtgtacagccgggcccctgccttgtgcctcagctctcgagagctgctgctgccgggtgacctgatccaacctgataaggtgccatcttcagctaccacttgcaaggccctgagggcaacagcagcacggcacttgcccacccggctgctgatggcctggtgccagctgggagtcctcccggcacttcgaggccactgagccacccttccagccccagcccaccatggacaggggtatccagcttcctcctcaacctcgtcctctgcccctgagccagtgacgcccaaggacatgcctgttacccaggtcctgtaccagcactagctggtcaagggcatgacagtgctggaggccgtcttggagatccaggccatcactggcagcaggctgctctccatggtgccagggcccgccaggccaccaggctcatgctgggacccaacccagtgcacaaggacttggctgctgagccacacacccaggagaaggtggataagtgggctaccaagggcttcctgcaggctaggggaggagccacccccgcttccctattgtgaccaggcctatggggaggagctgtccatacgccaccgtgagacctgggcctggctctcaaggacagacaccgcctggcctggtgctccaggggtgaagcaggccagaatcctgggggagctgctcctggtttgagctgcattcaggaagtgcgggacatggtaggggaggcaaaaagccttgggcactaccctccctgtggagctgttcggtgtccgtcgagctagccacaccctgacaccatgttcaagggtaccggaagagaagggtgtctgcccccaacctcccctgtgggtgtcactggccagatgtcatgagggaagcaggccttgtgagtggacactgaccatgagtccctggggggagtgatcccccaggcatcgtgtgccatgttgcacttctgcccaggcagcagggtgggtgggtaccatgggtgcccacccctccaccacatggggccccaaagcactgcaggccaagcagggcaaccccacacccttgacataaaagcatcttgaagcttttaaaaaaa

SEQ ID NO: 47785 - DNA, 1004 bp, Homo sapiens
  misc_feature (1)...(1004): n = a,t,c or g
tgccaatgatgttgagctttattaatggcccctctccagaggctgctcagttgtccccagggaactcctcagagatcctctgccttcccacatatgagcccgaggacacctcgggagcagagaagtgaaagggtttccgggtcagacgctgcactccacgcctgcgtcctcctcgtggctgcagtcatgatggccccagctattcttggtgcagctccacagggtactctccgtgccccgacactgaacattatccagccagatctgcccagtgccagctcccactttgtacagggcccttcctttggagtaacccagcatgcggcagaagacaatggcatcagaattttgccactcgtcatcgcaaattgtcccccaggtaccactgtagtaaacttcagcccggcctcggttactactgccgacaatcctgacggacactgagttttcacctctttcacctttttctccctttactccttgctccccagaagatcctttcactccctggtctcccttctggccagcttgtccaggggctcccttgggacctgccagccctgggctcccctgttctcccttcacacctgcagggcctggaactcctgattctccttttcttccttgctgtccttgaagtcctgtgtcccctttgcttcctttcaggcctgtggctcctggactcccggggctccctggaagtcctgctcgcccaggggagccagcactgccaggctcacccttggcacctgggtgtcccactgcaccaggagggcccggaacaccctgcagtccaggttgtccttgatctcctttagctccagggaaaaccagccaaacctggtgggcctgggcttcccgaagtcacctttactcccctgggctccaggaggccccatgacccctgcatctcctttcatgcccctgtcccctttgcttcctgggagaaccaagtctcctttctctcccttaattccagtttcccttttggggcaatganaccc

SEQ ID NO: 47786 - DNA, 612 bp, Homo sapiens
  misc_feature (1)...(612): n = a,t,c or g
tggattgttgtcaaataataatttattttaaaaaaatctcaaaacatgttcaaacacattcagtagcaaagatccaccattggcacacacattaagaaagcacacacactaggcttctagttgggctaattaaaatctctatggctggaaaggtggttggttgtacttaattaagcttttttgaagtgcaaagctatgcataacagatgagcttgaaagctgcagagtttaagatagacttaatttttcatgattttcccaaagccagtcatgatatttatttaatttgtggtcttcagggtgcacctgcttccactcattgacacaaaaaattcggtaagagtcgttgccatatttaccaatcccatgaagctcaattggatacttccactgctttgtcaggtattcatctgagaacttgacaatggtttttgcccgaagatcgtagagaccaagaggtttaagaagttctgacacatctctccagtctgcggttctgctacctcgctgangatactctcngaacntccaagcccggtatgcatttgccgnggccgttggaattgngcgtggagctcctggtccgaaanggttctgacggttnaagggccg

SEQ ID NO: 47787 - DNA, 1490 bp, Homo sapiens
  misc_feature (1)...(1490): n = a,t,c or g
tttttttttcaatttagtcactatttattatattgacatatttacaaaataatacaaagtgaaataccactctaattcaccatattacacaagggctgcatacaggcaagacaaagtatatggaaaacatttacttctgtctttggtattagaactctacacaaatctgcagcatttaaattttccaaaacaaagtattaaacgtggacaaagatgtaattggtaatgtcacaaaaaggggctccaatatcctctgctaggaaacccccaggcccatgaaatgcaacaggaagactaaacaccatttataaggagagggtctattgactaaaataaacaatacatgctacaataccatccacaggagtgtttctgcttgtgtgaggctgctccctccataacaaagttcggctgacggcaacagacaaaacattcccgagacagagtcgcagataagactttacaggaaagaanccattccaagagtacactttgaggtgtaactttattgtacagaacattttataaaatacatttttgtgatcatttacacatatacaaagacttaaatggttttagcaaataataatttttctaaaacacaatcacagtttacataattctgaggtaaaggtcttgaatctatcctagatgaaaagtcctagcccatgagggtctctaacagggggatgtgtccactgaaccttgagttctggcacccagacggattgatgagagggcaggctacacctgccttcatttcagagatgattcaaaatttcagaacttaatgctcctggttcagttctactaagttaatgcttcttttttttcccaacatgtaactctctcagtcttgtcagaacacaacttctgctatggaggaaatatttccatcaggaaagggccaagttagtgtcttaacttgactgccttgaatggggactctggaccccaggaagaatgtatttaggctcctcacaaaaaagagtgatggctgggcaaaacaaatgtactgcaagacccatcttccctccagttaatacactcccaggatgggctgcagagggggagactctgagagaagctggaggcccacaaaagtccactgaccctctttctgtcccagaaatgaataaaggacccagttgtgctttccttccaaaatcctcaacaaagttgtttgtgctccaagaaaatgtgggaataaaaaaatcatgtcccaggtcatctttgtgtgtgttgcgggggaggtggatgggaggaaaaggcatgtattaatagatactgctgctataaaatgacgataaattatagcccttgatctgtttctgtaaactatgccagcttcttcaggttattggcaactacccctaatatacctagcccagatcctttcataaagtcaagtgctatatttccaaaataatcctatgaaatcatgaaggttgtgaaggtttaatatgaagacaccctctcttttgtgtgct

SEQ ID NO: 47788 - DNA, 766 bp, Homo sapiens
gaaaggagacatgacccatgagctggtcaggcattttctgatagagactggccccagaggagtcaagctcaagggctgccccaatgagccaaacttcggatcgctgtctgccctggtctaccagcactccatcatcccattggccctgccttgcaagctggtcattccaaaccgagaccccacagatgaatcgaaagatagctccggccctgccaactcaactgcagacctgctgaaacaaggggcagcctgcaatgtgctcttcatcaactctgtggacatggagtcactcactgggccacaggccatctctaaagccacatctgagacgttggctgcagaccccacgccagctgccaccatcgttcacttcaaagtctctgcccagggaatcactctgactgacaaccagagaaagctctttttcagacgccactaccctctcaacactgtcaccttctgtgacctggatccacaggaaagaaagtggatgaaaacagagggtggtgcccctgctaagctcttcggcttcgtggcccggaagcagggcagcaccacggacaacgcctgccacctctttgctgagcttgaccccaaccagccggcctctgccatcgtcaacttcgtctccaaggtcatgctgaatgccggccaaaagagatgaaccctgccccttgcccagggccagtgccatggggaaggggcttgtggggaggggacccatgaatcctgaccactcttgaacccagaaggaggacttttgggt

SEQ ID NO: 47789 - DNA, 420 bp, Homo sapiens
aagcagaaacacgacgggcgggtgaagatcggccactacattctgggtgacacgctgggggtcggcaccttcggcaaagtgaaggttggcaaacatgaattgactgggcataaagtagctgtgaagatactcaatcgacagaagattcggagccttgatgtggtaggaaaaatccgcagagaaattcagaacctcaagcttttcaggcatcctcatataattaaactgtaccaggtcatcagtacaccatctgatattttcatggtgatggaatatgtctcaggaggagagctatttgattatatctgtaagaatggaaggctggatgaaaaagaaagtcggcgtctgttccaacagatcctttctggtgtggattattgtcacaggcatatggtggtccatagagatttgaaacctgaa

SEQ ID NO: 47790 - DNA, 2193 bp, Homo sapiens
  misc_feature (1)...(2193): n = a,t,c or g
ttttttttttttttgcataaaggaatataaaactatttattaaccactgttcaccagtatttacaataaagtaaacaatatacagttggataacattttgattactacaaagttgttcttcctgggcttttgctgaaccagtaaagcaaactcaagattgagcctccatgtaatgaattggggtaaagaaaaaacatgcaggtcaataggttaggttacaaaaggttgttcacacatttatgacagcaggtcctaaactgccaacacctctaaccatctgattaggtttctatgagccaagtcttacatattccattcatcatgaccttttagtcaaatgtagcaacagggattcccaacattttgctaaggaatggcccgctagggaaacttttaaatgttcatttaacttagttttgtttagctagttaaaaacacactagcatttgtctagtttcctcatctggatgaggaaacctgctgtgatggcagtgataaaatttttccttttaggaattttgcaaataaaccactgcaattatagacactttaaaattatccaatttaaattgtcctatctagaattacttatttcacttgaaatgtatggtttcaggaaaattttcaatttaacttgaagggattatctcttattttgcttggaataatggcatctcagaaacatgggtttacctgtgatttttttgtttgggtgaatgcttaaaaacaaaaaaaaaatttacatatgcattttatggtnnnnnnnnnnnnnnnnnnnnnnnnnnnnnnnnncacgtaataaatctagaatggtccttaggctcatgagaacacaagttttgactgagtaatgactatggacatttcccccaacatttagaaaagctgttctttaatgaagaggaaatgatataccatggtatcaaatgttcttttctgataaaggaagcaactacagaaagcttttatttatttgttcaaagtaaccagtgctatggatgcaaaaaacccccaacaactcttccaacgctactttcaaaacaaacatatcaaacttgattttcattaggatgtagttattttgtcacactagtaaatcaaaatctaagacccaatttttatatatatatataaatatatataaaagaacaatgtgaacaattattgagcttcatcttctggacaagaatgccaagttagtctctcttcataaaaagcaattacaatttgaggacacttcatatttgcctctttcgccagcaccaagtctgcctcatctgaatctttccatttcatgagaaacatcaattctccactgctgtctgtggcaccaattattctttcaggatcaagacctctggcaaatcctcttggtttgtcagcagcatctcttttcttctttgatttgctgtcatcagattcactgtcagataaagattttctttttgtaccatctttttctttgccagctttctgagagttaagaaacgcttcaatcaattctggacaatctaaattttcttcaggttcccaagtattgtcagcatctgtaaatcccttccacttcaggaaatattccactttcccattcactacacgtcgatctagtactttttccacgacaaattcttcaggctctgcctgcttcaacttttttactctttccattctgtttttttcccattttttgcaatgtagttttgttggaggccattttttattgcagacttgaagagctattactagaaaaatgcatgacagttaaggtaagtttgcatgacacaaaaaaggtaactaaatacaaattctgtttggattccaacccccaagtagagagcgcacatttcaaacgtgaatacaaatccagagtagatctgcgctcctacctacattgcttatgatgtacttaagtacgtgtcctaaccatgtgagtctagaaagactttactggggatcctggtacctaaaacagcttcacatggcttaaaataggggaccaatgtcttttccaatctaagtcccatttataataaagtccatgttccgatttttaaaggacaatcctttcggtttaaaaccaggcaccgattaccccaaacaactcacaacggtaaagcactgtgaatcttctctgttctgcaatcccaacttggtttctgctcagaaaccctccctctttccaatcggtaatta

SEQ ID NO: 47791 - DNA, 918 bp, Homo sapiens
acaacaacctggatggactttgggaacatctaagcaatgtaagagagaggtgcactgagagtacgtcttggtcccctccaccctgagagcatctgacggtcctcagtactgaactcccggaagctgctctgagcccggtgacctcatctgggccaggtgtggtgcctgagctgaatgctcaggtgcttacagtgttgcaatccctaagagagtagagtctggaggagaaaccgtgaaaaagaccttacacaccaccaagaacttccgaatgggcgtgaatccaccgtttcttctctttgcaaaaagaaccaccacagctgctcaaagaacacagtgaactcatcactttggttcatcaaaaaatcatcgcccatgcgttattcctgagtgcattttcttacaactttttgactgcttccttttcttcttctcttaagagttgtgggcttaagaatgggatagagtcataatggcaacctccaagccctctcaattcttgattaagaacacaggtagacatgaatcccaattgtctattgctatcttatttatatgattcgggaaaatacagcatgtaaaaatattgctgaggagcctcagtgattggggtacaagaagcaagagtacagaaattatttttgccaaatttattttgtaaatatgagggtctgtaccctaaatttaaaaaaaaaaacacgtaggaactaggtattttgttctcttcttagtaaatttgtagtggttgtatactacactagctgcaattttcacatttttctaattcagaaaggtttttcttatattaggggaaaaagtatttattttaatatataaaatcactctgaaaatcactctcataaaaaatggagcgcatgtaaatttttatcaaagaaaaataaacaggtgaatggggaaaaa

SEQ ID NO: 47792 - DNA, 504 bp, Homo sapiens; identical to SEQ ID NO: 4035

SEQ ID NO: 47793 - DNA, 1808 bp, Homo sapiens
ttttttaatcttgcactttgaaaccgcgggaccgaggcagggtgcgcgcgtgtggttggtgccttttttttttttcttcccctccctaaactcctcatgtcagtctgtaaacattacctgagaattccccagccgaaacggctgctggggcaagaaacttcttgttagaactttccacctccggcttccccctccacctcttttaccgtcccaaccttaggagacgctttttctcccccagaggagaatttatctttttttttttttttttttctttttctcacccggtgctttgcatttgggaagaggtgatttcaagagtggccaggtgggacgcctctctcctccttattcggtttactatttattgttcggggtgttttttaattcctgtattgctcggcccggggagtttcgccccctagcccggctccgcggcggagcaatggcgtggaaacggctggggcgcgctgggtgatgttccctctacagatgatctatctggtggtgaaagcagccgtcgggactgggtgctgcccgccaagctgcgggacctgtcgcgggagaacgtcctcatcaccggcggctgggagaaggcatcgggcttcagttcgcccgcgagttcgcggagccggcgccaagaaaagaattgttcctctgggggccggactgagaaatgcctgaaggagacgacggaggagatccggcagatgggcactgagtgcaattacttcatctgtgatgtgggcaaccgggaggaggtgtaccagacggccaaggccgcccgggagaaggtgggtgacatcaccatcctggtgaacaatgccgccgtggtccatgggaagagcctaatggacagtgatgatgatgccctcctcaagtcccaacacatcaacaccctgggccagttctggaccaccaaggccttcctgccgcgtatgctggagctgcaagaatggccacatcgtgtgcctcaactccgtgctggcactgtctgccatccccggtgccatcgactactgcacatccaaagcgtcagccttcgccttcatggagagcctgaccctggggctgctggactgtccgggagtcagcgccaccacagtgctgcccttccacaccagcaccgagatgttccagggcatgagagtcaggtttcccaacctctttcccccactgaagccggagacggtggcccggaggacagtggaagctgtgcagctcaaccaggccctcctcctcctcccatggacaatgcatgccctcgttatcttgaaaagcatacttccacaggctgcactcgaggagatccacaaattctcaggaacctacacctgcatgaacactttcaaagggcggacatagagacaggatgaagacatgcttgaggagccacggagtttgggggccacagcacctgggcacacacccgagcacctgtccattggcatgcttctgctgggtgagcaggacagctcctgtccccagcgaagaatccggctgcccctgggccagtcccaggacctttgcacaggactgatgggtataactgacccccacagggaggcaggaaaacagccagaagccaccttgacacttttgaacatttccagttctgtagagtttattgtcaattgcttctcaagtctaaccagcctcagcagtgtgcatagaccatttccaggagggtctgtccccagatgctctgcctcccgttccaaaacccactcatcctcagcttgcacaaactggttgaacggcaggaatgaaaaataaagagagatggcttttgtgaaaaaaaaaaaaaa

SEQ ID NO: 47794 - DNA, 892 bp, Homo sapiens
caagatccaaagaaaaaattttatttacaatagagaattttatttgaaacatgcatttcttgtttttttaaaaacaaatcagcaaatgcagatcaagtttacactccttaaggcaagagtccctatgcacgctgtacatgttcatattaaatccaaaagctgagttaggttgtccaaacaaactcaccagacaggttacataagatagtgtaccacaacaaatttaaattttgaacaaaacacatctctcctcctttggtctcacacagaaattaaagtctccaaatacagacaatactatccattctccagctcttctccagattcacgagtcccagccaggtcggcccatccacactccccgttgaagtctggtcctttcttcagtagttgctgcatggagtcgtcttccagaattaatgcagctccttcagcacctccagagctggagaactccaactgtgagtctcatgtgtcacacacagacccaaagttccagggagctatcaggtcacacaagaaatagcaaaggcacctcaaaaatttagaaataaccaccaaagcccgggaacaaatgtgactgctgcaagagcttacaatctaggccctaattcctgtatgtgagagcattttcaaacaaaattacttcccaaacaaaaacacgttaacaatcgaaactcatattgaggtcatcaaccacagaccatagcagaaaacgtagtgttaagtgagacagagcatagacaggaaaaaagagaaaacaaaaggctctctggtttcggcttctccagggtgtcagccaatctccacaagttgaccaagaatccattggctggaaaccgccgaccgcgctcacgacgactcgctcttctctatcgccgaccagctccac

SEQ ID NO: 47795 - DNA, 560 bp, Homo sapiens
  misc_feature (1)...(560): n = a,t,c or g
cngntatgactgattacgaatttaatacgactcactatagggaatttggccctcgaggccaagaattcggcacgagtcaggggtaacaataaaatgtgactatttatttccacaaaactgaacctatcaattcaagataacttttgctttaaaactcacgactccttgaatcaatagtcaatttctggatctttctcctcctcctaggtcctcttctccctgaaggctgtcacagttcctgtgcagagagagagggcactgcagcacccaggcgctgactgccttttgtcagtctcatttgcaggcccccagctggagaacccaggaggaagaggaaaaaagttttttcctcctctacactccccatgcatgactaaagagtaagaggagtcagcaaggcagacatatatagtacccaggaggtggacaaacaactgccttggtggaaactctgcctttctggacttatcctggtgccactgagactgtgcaggaagaataagtggatcctcctattaaaggngattcatgaagctgcctgagtggactgagtggtcatt

SEQ ID NO: 47796 - DNA, 3291 bp, Homo sapiens
ttttttttttaaggtcttacgcttttaatcgattttaatgattattgctcatctgcaaggattaatattgcattcattaaaaatcattcaatacaaaatgaacttgttcttcccaagttgctctccacatgctccctctgatgccagactttttttttttttttaacagtgtcctttgttacatggcttgacagagacagagcccttacctattattcctatggacacggtaatagatatgggatcaaggggcaggtcagagggcaggtgaatgtgggtcccttccctccagcagggctaacgtgatggatacactgttggccaggttacctcccctaacagatgtggtgttctgattggttggttaagtgcccgaggaaaataggccttaactgttaacatctacagagaagaaagcatggtcacactggcaaggagtaagaagggattgggtaaaagaaaatgggagagaaaagggaaaaaagttttggcaagacaattgttccctgctaagaagctgcagggtgaaagctttcctttcttctatttttgtttttaatgtctgtctctctgatcagtggaaaagtgaaaatttctagtatctagcactaacgtatgacccaactttgagggatcacaagctagaacaagttgaggatttaaaatcctggataattatatacttaaagctcatgagcataaagctcacttgaccatgcagaaatgctgggaagcagggtgcatggcatgggaatacatctccctgatctttgagagagcctctctggatattctttcagagcatgagccaggatgtactgactactttcttcacacatcagttgccctttatgatctcagttcataaactctttgtggtatgtagcaatcaaaagtcatattacttctgtaaaactaacattatatagggtgtatagtcccagacaaattatatgaagctagatttttcttgccctggcccaatttatcattcctcctcctgcccacacctacctccctttaaatattttaggttgcagaagcacagctgaccagaaatttgctcttaaagataaatcctaaagatagaactcagtgctttatactgagtaatggctcaagaaattcgccttcaggaacaagctgtatggtacacagctgatagaatttgctgttgtggctccagttcactgatgctatgaactacgggctagaaacagagggacttaacagggcttgagactagcatttctctagactcagcatccttagctccaaaggttcaaaagagaaattggtaacaactaaccactcaagcaattcctcagcattaacaccaaaaattctccttaatttttcttttcttttttttttttttttggacaacagaaataaatcctagaggacaaaattaaactcaatagagtgtagtctagttaaaaactcgaaaaatgagcaagtctggtgggagtggaggaagggctatactataaatccaagtgggcctcctgatcttaacaagccatgctcattatacacatctctgaactggacataccacctttacgcaggaaacagggcttggaacttctaagggaaattaacatgcaccacccacatctaacctacctgccgggtaggtaccatccctgcttctctgaagaagtgaaagagcactgatttcagcagctaagaaatgggctcttttaaggcgatttagacattgcagattgttccacagagaaggtaccttagcatttcctgttaataagggtacctaattaagactaaagtccccagaaatggtaaagaaagaatcacctttctgggctgggagagtaaaatccttctttagtgactagagtgaggaaccctgaacttctatttcatctaaagagccatgaagcaagttcctgtgtgggtctgcagaacttggataatggagatggaaaaaacaagaatgaaattataggaaaaaaatccaagaggaaaggagtaagaagaaaataaaagttatcttaaaaaatatttctttagagtgtgtggttcaggtggactggtccttggtagtatggtccattagtatctgtaataattaggtttgaatggcccatttttgttgagtcccagatattttgcttggtcatctgtcagctctgtaaggtgggccatcaaatgatggcagatgcaaggctggcaacgtattcatccattttcttaggaagcaagtacacatcctgcttgtatcgcccctcgggtgcattatagagttctatcagtgccaaagcctgtgttgtggctgtgatggacagaacaaaggtgggaactgtggagcagctcaaattgagtagacgaccctctgccaggaggacaactcgtttgccatctggccagatgacatggtccacctgagaacgtactcgctcccacgtcagctccggagtgcggaggctggtcacatcgatttctgtgttggagtggcccatattgcatacgatacaactgtttttcatgcgatccaagtgctcccgtgtcactacattcttatttcctgtgcaagttattacgacatcgacttgccggatgacttcatttagctttaccaccctgaacccatccatgcaggcctgcagagcacagatggggtcgatttcggtaatgtagacaattgctccaagagctttgagagcagcacagcagcccttgcctacctcaccatagccacacaccaccacttgtttcccaccaaacatcacatctgtggtcctcttcaggccatccaaaatggattctcggcagcagtacaagttatcaaacttctgtttggtaacagaatcattgacgttcatggccggaacacagagcttcccagctttggagagctgatacagcctgtgaacaccagtcacgctctcttccacaatgcctcggatcttcttaaacacgtttggatacttcttataaacccagtgggttaagtctcccccatcatccaggatcatgttggcctgccacccatccatgttcacacagcggtcaatacaccaccagaagtcatcttctgactcgcccttccaagcgaacactgcaactccagcctcagccagtgctgcagctacttcattctgagttgagtagatgttacaagcagaccagcggcactgagcccccagggcacagagtgtctcaatcaacaccgctgtctgggctgtgatgtgtgtacagcccactattttagcaccagccaagggcttctccccctgagcacgtttcctgagtgaaatcagagca

SEQ ID NO: 47797 - DNA, 2259 bp, Homo sapiens
  misc_feature (1)...(2259): n = a,t,c or g
aggtgggggactaggagaggcaggtgctactagctccgcactactagttttgtgaccttgggcaagctagttaatctctgcaatggacctcatcatgaccgttgctgtacttacaatgaaaacaacttggtggatggccaccaagccatgcattattcaagcccatcttgagtgctggaccatcaataatggagagacatgatccttgctctcatggaacttatgctgtagtggaagacaacatgtaaacagctgcaatacagttaaatatttgctgtaatgaagttatatatgtagtgtaaaaagggacaggaaaaatctttaattcaaggaaatctttatgaggacgtagaacttgaacagaaatgtgaagccatctttttctcaggacatttgggaaagggaattcaaggcagccactttcatctctttaagttcataatttgctacttaacttcagatccagggaccaaaggcctgaattccagttgtgcctcaagatggtgctttccctcatttttgtagctcaagacgtacattcaactcaagagtccagctctacagcagctatatttggaaatacacatattttatgaattctaccaaatatctggctgggtagctgccctcgtcaggtggaacatgtaaccatcaaactgaagcatgaattggggattacagctgtaatgaatttccagactgaatgggatattgtacagaattcctcaggctgtaaccgctacccagagcccatgactccagacactatgattaaactatatagggaagaaggcttggcctacatctggatgccaacaccagatatgagcaccgaagccgagtacagatgctgccccaggcggtgtgcctgctgcatgcgctgctggagaagggacacatcgtgtacgtgcactgcaacgctggggtgggccgctccaccgcggctgtctgcggctggctccagtatgtgatgggctggaatctgaggaaggtgcagtatttcctcatggccaagaggcccggctgtctacattgacgaagaggccttggccgggcacaagaagattttttccagaaatttgggaaggttcgttcttctgtgtgtagcctgtagctggtcagcctgcttctgccccctcctgatttccctaaggagcctgggatgatgttggtcaaatgacctagaaacaaggattctacctgaactgaaaggactgtgtgacctcccccaagccaaccactttcacctgggatgactttcgattatgctttgttttggggctgtatttttgaaatactctacaagaaagctgtggctcaacacatgagaagaagcacgaagcagttaggctgtacatcagacagaagggtaatgcgtgcagttcctgctgcctgcaggcagacgaggcctttgctttacagcactgtatgtgttgcacgatggatccgtgacagcactttcctgttgcactgaaactcttggccatgtagaggaaaagatatggagttatgtggatttcatcactagtatgtgtgcgtgagctggtcagttgccaaaggaggaaataaggttagaagcctgaaccgttacaaaagaagagctcactatggtcaaaaagtgatggctttcaggacttgttttttatcctgcctcacagttgttaaagtctgttccaaggcatcaccttccttctctacccaacaaccctgtgtaacaactaaagtagaattatctctcatatgttgttgtttttcctcaaaattaccaaacaaagcaaaaaataccttgttttttatagttgagatgtcaagaagttaaattgaggcttaatgagcataggtagcttgtccaaggtctcatgaccagtcaagggcaagctggagttaataatctatatttatttgactcagcactgttttcatcacaacttgttttcccagcatcatgtagtgcatttagttttgtctttctcagggtatagtcaatatgcctgcaggagtttctatagcgagacatagaatagtattctgatcagttgccaaagaatctaggaaattagttgtattttgtgcaagctaatttaaaaacatgatggggctgttttaagaccagagtgggaaattcatggagaggaacttatactaccaaaagagcccaaatggacccaaatccatggggttaattggctttcacagcctttgggccntcccggggttcagcttctccantttagttttatttggcnggttcccgtggcc

SEQ ID NO: 47798 - DNA, 1576 bp, Homo sapiens
gcgaatggagagactgacatttcatctatcaagtatttttactggaattaaggaattcaagatgaatattgaagctcttcgggagaatctttattttcagtccaaagagaacctttctgtgacattggaagtcatcttggagcgtatggaggactttactgattctgcctacaccagccatgagcacagagaacgcatcttggaactgtcaactcaggcgagaatggaactgcagcagttaatttctgtgtggattcaagctcaaagcaagaaaacaaaaagcatcgctgaagaactggaactcagtattttgaaaatcagtcacagtcttaatgaacttaagaaagaacttcatagtacagcgacacagctggcagcagatctattaaaataccatgctgatcatgtggttctaaaagcattaaaacttactggagtagaaggaaatttagaagctttggctgaatatgcctgtaaactctctgaacagaaagagcagcttgttgagacctgtcgattgttacgacacatatctgggacagaacctctggaaataacctgtatacatgcagaggagacatttcaggtgactggccaacagataatttctgctgctgaaacattgacattgcatccatctagtaaaattgctaaagaaaacctagatgtattttgtgaagcttgggaatcccaaattagtgacatgtcaacactgctgagagaaatcaatgacgtgtttgaaggaagacgaggagagaagtatggctacctttcacttccaaagccaatgaagaataatgcaaacctgaaatcattaaagccagacaagcctgactctgaggagcaagccaagatagcaaagcttggacttaagctgggtttgctcacctctgacgctgactgcgaaattgagaagtgggaagatcaggagaatgagattgttcaatatggacggaacatgtccagtatggcctattctctgtatttatttactagaggagaggggccactgaaaacttcccaggatttaattcatcaactagaggtttttgctgcagagggtttaaagcttacttccagtgttcaagctttttcaaaacagctgaaagacgatgacaagcttatgcttctcctggaaataaacaagctaattcctctatgccaccagctccagacagtaactaagacttctttgcagaataaagtatttctaaagggttgacaagtgtattacgaagacaagatccatgatggctctcttagtccaacttctttcactttgttataaactgctgaagaagcttcagatggaaaataacggatgggtctcagttacaaataaggacactatggatagtaaaacttgagaagcttttggggtcagatctctggaacatcatgtgatgaagctgacatttttaaaaatcaaatgatcctttatcttttcagaaattcatcaattttataaagaaaacaatattgaaattttgctctattttctgatcatgaaactgattgtaaagctttttgacaactaataaatgtccttggtaattgctagattctaaaaaaaaaa

SEQ ID NO: 47799 - DNA, 1839 bp, Homo sapiens
tttttttttttttcatttccatcaacaggtttcaagcagtctttacttgggtttaaaaacagtgcttcatgcatttacaataagttattacagaactctaagtcactgatgcacacacaaaagctaaacccaacttactaactatgcagacctctcctgatctcccccagggctgggcagtaattagtaccttacaggtgtgatccatggcccagagaaggcagccactgtcagttacagttggactgctgcatcacagtggaggcagcagagttgaagatccacagagggctgtaatacagcccagaaaagacaatggagagtgaaggctagaaacattgaggaaggggtcaagaagcacttgtacttcctgttatcttttccaatagaatattcctgcaagttacccatcagaaaaaggtgttcagagggtttgaaaaagaagtggttagcccatgccagtgaaggtgacaaaaaacaaaacaacttgatttttggtcatatcagaaaggatggagggaaacacccaagtacatgcatggacacaagtgctccagccaaaggagtgctgttttcaccagccacaaattttctaacagcaacaacaaaaacccacagatgtaagtaacatggaagtggatcagtcctaagccaaataaggattcccaccctggggcaaaagctgacttcctaggacatgaactgaacacatcacagtaaaagcccagtagaggctgctgccagttccagctattagtaattatgaggggggacaggatgacacctcacacggaccacccctagcaagaggggtttgtttcagttctagctgtgagaggaatgtctgcagttcccacatgtgtgcccatgctgtgaagcccatggcccctgctcctctctctgcctcccacacacttaacagtacacacagactttgctggcaagtgctgtttgttcctgcactgctatactatacgactgcaggacaatgccatccgctccatggttcattcagcgcccttgtcccaaggtagttggtggagagcaggaccacgttgtgcagcaagagagacagctcagcttctttcaggctgcaggaaatctgcagccattctcccagccaagttcgacacctatcgattttacttcctgagcagtcagctggcccaaatcccccagctttgccaaagccttgtccaagttggtgaaatccacagttgtatgagtccttcaaaacgatgtcctcaacaagggaggaggccaggtaagatgtgaagaaagcatggcccggctcaaggctttcacgtgcaaagcctggagttggttcatgcccagaggatggttagagaaacactctctcagagccaagatatcatgtattgctgggtgggtaccacgctgtatcttggtgcacagatctgtcagacgccaccggagtcctgcatcagaaatgagagggatgaccttttctaaataactaataatttctgggtgggactgcttccggaaagcatgatagatatctaagaaatcagtttgttgttttggggtccagaaatgcctgatcagtagttgcctgggaaacaggtacattagcaagaagaccaggtagttggcaaaaggtggaatggaaataatacctaggaaaagacacttggtgacgtcttggcggaactttcatgaagattgtgtacaggacatagaagcgggggaaatgacgacccaagaaacgatggtatttcccattaatcgcttttgtcttggttaccacataagacatcaagttcttcacatctgcctttggagaaaggtgaagctttgaagaccctggagagcgcc

SEQ ID NO: 47800 - DNA, 502 bp, Homo sapiens
  misc_feature (1)...(502): n = a,t,c or g
tnnnnnnnnnnnnttggnnccctaacttgtatgncatgattacgaatttaatacgactcactatagggaatttggccctcgaggccaagaattcggcacgaggaatattgtgcaacatggttatgggtactacagtggatggcaagtagagctgcagctgtctggcgccactgtaatgctgtctcctcctctgagtgagttcatcctggaaacattttctcccataagacatgcacaggtcttacgtttacatgtttcactgaaagaaatttgattccactgctgggatgacaaggaagactgaagaaacctaatcctaggtgctgccactgggacaaacaagaagcaccagacacagtgctgttttagggtggggcagaattatgctgagggaaaagttattatcactctttaaggccaaggaaaccacaatttttaaagaagcttctagaaattctacccagtagaaaataaagataaacttctgtaaaaaaaaaaaaaa

SEQ ID NO: 47801 - DNA, 1435 bp, Homo sapiens
  misc_feature (1)...(1435): n = a,t,c or g
tatttttttttttactgatatattgtagtttaataaaacatagtttatacagttcattgaaaaagtattttaatacaaacaccacttatacacaaaaccaaatgttgatattcttgtttttaaaaattcttgatttctctaaaacactaagatgctatctcaatagagattgcttcacattttccagtttcttgatctgtgcatgtcacatgtaaagatccatcccttttcatagtaagaacagctaatatatcacgtaatccattttcttttttatctaaatcctggagtacaacctgtgcaaacttggtttcctctttggcagagttcttcccatcagactcatagagttcaaggcacactgaagatatgcttccaggggcttgcaatgtgtgttgtcttcgagctggcaaaggagtccctgatggaaacagcactgtgaatctactggctcctgattcgtccacacccttaactaaaatatctctggctgaacactctatcataagagagtcttccaccaacaggttttctttcccaataagaattcctgcttctatagctgcaccaatagggatcacttcatcaggagggatagaattgagaagctcaacagctgggaaaagatctttaatcagttgctgtagctttgggattcgagaagaccctccacaaaggacaaccttgttgatatcatctgctgtaaatccattttgatctaagagtcctctgattgcttctatacacttattaaaaagtggagaacaaagaagttcaaatcttgctctggacacattgcaatcaaaatcttgaccttcatataatgagtcaagaaaacagttggcacttcccaaggttgacaaagaatgtttcgctacttcagcactgttcgttaatttcatcatgntcgcgcatttcctctcacatcatgtttgaaggatctttggaactcagaagctagatactgtgctaaggtttctgtgaaatgtgcaccaccgatgttatcatcagtgtttgttgaaagaacccgatatattccactgttaacttccatgacgctgagagataaggatgttcctccaagcttaaacaccaaaatattgctttttccagtaggggagtcttgtccaattccataagcaagaagagctgcagacggttcgtgaattaatcgcaaaacattaaatccagcagctctagctgcttctccaagagcatttttttgcttttctccaaaatcaaacgggacagtaataactacatcatttgcatctgagcccaatacagaatgtgccgtttctttcattttactaaatatcagtctggcaacatcttctgggttaacaaattttgtttcttctccagtatctatttcatatcgtaatttcccattttttttcaatgactaaacatttactttccgcccacgcgtccg

SEQ ID NO: 47802 - DNA, 696 bp, Homo sapiens
cttcatccatgagcccaccgatagcagagcaaatcatcagatcactaaaacttatcatgggactggatgggaccactcaagggctgcagagagtacagcaacttgcgaaaaacacaagatacttcagacaaagactgcaggaaatgggattcattatctatggcaatgagaatgcttctgttggtcctctgcttctttatatgcctggaaaagtagcggcttttgcaaggcatatgctagagaaaaaaattggagtggtggtcgtgggatttccagccactcccctcgcagaagctcgggctcggttttgtgtttcagcggcacatacccgggagatgttagacacggttttagaagctcttgatgaaatgggtgatctcttgcaactgaaatattcccggcacaagaagtcagcacgtcctgagctctatgatgagacgagctttgaactcgaagattaagtttcctggtctgaatgacacataaagactttgcgagaaagacctccctccttgcctcacaaggaatataaatggatttctcccccttcctcaggacaattttggttcccagaccagcttgattgaactgagggagacgttgttgtttttaatgtctccagcttggactgcagagacccaaacatgattccagatttaagtctctcttcttccaagtattctactagaaatacac

SEQ ID NO: 47803 - DNA, 550 bp, Homo sapiens
agatatgcaaagcaggagataataaggagaaagcccttccctttcgagaagcccttccctttcacagcccttccctgcgattctgcagtgaaaagtgatgcccagagatccacacacagaacccttctaaccagccaggtcaagacttatcatcttatctcctctggcaggtcccctgtaatcaaaagagaggaagtgtctatctaaacaagacccttttgggtccttaggattcatgggcaaaaatcatcatgggcccccatcaggaaaaggaaaatcaggcaattaaaccaaggccaaggcaacttaaaatgtataatgtggggacctggacttcatgttgggaggcagaattcagacactcacagatcaatcttgcaagttttctcttctttaagttgagctgctcaactttatgaactgtgaaatttacttacattctttcaacccacatatatcattgcagtttatgaagttgcagtgaacttgcccattcagctaaattgcagtgtttattcttgtctcatgtcgaaatacaacaatcttatgg

SEQ ID NO: 47804 - DNA, 1120 bp, Homo sapiens
cccctgtaaatcactatgagaagtgaatggttttaaaggctgtaatgctatgttggaaattggtttgttttgccttttattgaaaaggtaagatcatgtgattggaagaacacaactgttggcttgggaagaggactttgctgctgaagtgttttctaccttctgagtgtgtttaaggcaggatttggagggaaggaccagcttagggagagtgtctgagccacagcgtcaggatgggggaaaccacatgggatccatcaagttccagttgaacaggagcaagatcagaacttaggagggcagtgtcagctcccttgttggctgtcaaggaacaccgatctagtagaaacccacttggttgtgacccaggtagaggtagatgccatacatttgagatatgcgtccttaaggaacctgacaagcagactgaagggatggtaagtgtgacagcctgataagttttctcaaagcccaggatacagagccagtgttttctgtaactggagacctcagttaggccaacttcgaattccagagcaacgtaggaagtctattcagcagaaactcgacattgttcagtgtgtattgctgtgcagggtgcctattgtgacaggacacaaatgttactatgttttaatttgctatatttttgaatgggtaaagcattactttacttctcttggttacttgtaccaccattccacccctatccctagcctgccccacaaatctaatattaggaagcctcttaactgaaaccaaatgaacatttgggtcaggtgccagatgtctgctgcctagaatagctttttctaggtgtctaccaccttgaaatttatctctttaactgtgtgttcaagtcctttgtcattgaaactagtttttcatatcttagattcagttgtgtatgatttaatgtcccttattaggagtctttaggcagggagggaagaaaaaacagatttgttcatagcaatgtcagtatccattttggcacataaagatttttgatgagccctgtttgcatagagccagatgttttcccctcccccaagagtatctacatcagggatgtgacttggtgcgaagagtcaggggaaagaggaaaaacccaatttct

SEQ ID NO: 47805 - DNA, 1176 bp, Homo sapiens
ccctcgaggccaagaattcggcacgagcttaaggaagataatagctgggagaataacacactgtctcacttcagtagcaacgtcaaactacctcctcagataccccatttggagttgggaaatgaccaggagcttgctgactctgttctccatcttggatcatccctgcctaggcaaacaaaacattttttaggaaacttgccatctagtaatgggaacattgtcttaccttcagaagaatgtgtaaccgaacaatcacttctacctaaagtgggctcactggcttcatttgcagaaggaaatgctgatgaacagagcagcggcttagaaggtgcgtgcaaacgtgaatctggagttgctactcactaatgctgacaaagggttgaaagctccagagcagcatctcaagcatgttgcaggagtgctgaatggggaatcagtagagacttcagttcttaactaccgggaattaagtcctcacaagaatagactcttgtcacctcttcgctgttctgcaccaatgtcgctacataattctctggtgaaaccagagagacagtccaaatgttttgagtttgggaagctacagccttcttcttctcagtcactggatgttcaaaacataactgattcttctttctctaggactacttgctttcaaggtgttaaagttgattcacttgggaaaagatctgatgttatttccaaagttgaggctcgggatatcacagaaatgactaacaaggcttccaaagagcctgttggttgtgtaaataatatcagttttcttgcctcactggccgggagcacaagcagaaatagattacagagcacacgtggggcaggcaggcttcagaactctggaactgggctgtctacaaacctccagcattttcaggaagaaaactttaggaaaagttctccccagttagaacatacaggagtttttttggagaatgtactactcatcacctcccacctgtgaaagcccctcttcagacaaagaagaaaacaacaaatcattgttttctttgtggaaagaaaacaggactggctagtagctacgaatgcaggcaggttggcgagctggagaagctcagatgctttctctgtgataacccagcttggggattatgcaaaataaaatatttaaattgcctgtttataacatcatta

SEQ ID NO: 47806 - DNA, 1147 bp, Homo sapiens
  misc_feature (1)...(1147): n = a,t,c or g
cactgctgggccctgaggctgcaccaagtggcgaaggagccggctccaagggcgaaactgtgctcaggcccgggctggacgcagagccagagctgtccccagaggagcagagggtcctggaaaggaagctgaaaaaggaacggaagaaagaggagaggcagcgtctgcgggaggcaggccttgtggcccaacacccgcctgccaggcgctcgggggccgaactggccctggactacctctgcagatgggcccaaaagcacaagaactggaggtttcagaagacgaggcagacgtggctcctgctgcacatgtatgacagtgacaaggttcccgatgagcacttctccaccctgctggcctacctggaggggctgcagggccgggccgaagnagctgacggtgcagaaggcggaagccctgatgcgggagctggatgaggagggctctgatccccccctgccggggagggcccagcgcatccgacaggtgctgcagctgctctcctagtgggttcagcgcggggcggggccgctgcccagtgcagggctgcctcagaccacacagggtgcagctcctccggcggtgggggccgggttcaccagcagggcagcggctgagcaagggctttcagctcctccggtggtgggggccgggatcaccagcaccagagcctcgcaagggccccttccctcctccagaccctccttggccggtgacggctgtgacagtgatggcaggttcagtgccttcagcgcagagcgtggatgctctggaatcacccggacccctggccttggagggaccctccagccccaggaatctgctttggagggaaatgtctatttttctaccgggaatattttagagattggggcatgctggctcctcccgccagctgcaaacctgcaccttccgcctgattcccgatccccctgcgtgggccgcattcctggtcccctgcctgcgtccatcgaggggcctggctgtggcctgttttcctttgaccccacacagcgtcattgcgggtcatggggagcccctggtgggagcttgtggagtcggatcacgtacctgtgcagaaaccgcctctgtggctgcatttgaaataaaacccgacccagcagcagccgtgggtcctgctctgtga

SEQ ID NO: 47807 - DNA, 1057 bp, Homo sapiens
tcataaagaaatgtctcgcacacaccaaacctctttgcggcaaacacacagcagggctgggtcagaattgcgctgcagccctgctttgcaggtctggaggatcttcccctaataagtgctagcacctcacttaatccacaccaccactgagacagactgtgtgtggtaaagatgaagaaacagatttagggaggttcaggaactgtccaagcccacccttttagtgggcagcgggaatgctgttgaatccagacccaagctgaaaactatgcacctaatttggctggcagggttgggggcacttagtatgggttaagcactgtgctaactgcttcatctcatctaactcttccacactgcccaatactgcctccctaaacccttgattcctctgctcacaatggccaggggtcaagagtcagccatgtggacatcataggtctgccttgcgggtgccagaaagttagagcccaatgtaatagcacaatctgccaaagtcctcaaaggcaagcatttgaccacagcaacagagccaggcttttgagttgtattttctaagtttatttttagttatttgtttttacagtcctctgcagcagggtttgctaaagtggatcaacagcaaagcccccaagtcagttcagcttctgacagtgaagacaagagactcaacaagtaacagaggaaactctggccccaggagccaggggaactgaccgcatctgcaggtgggaaccaaggccccaaactgcacagagcctcgggggcatgtttttcagagcaggcgaaattttggacacatgcggaacatcttatggtgtaaacagaggcactgctaaacaagccaagatgagcgctgccaggttcacacagtgtgctgctccaccagcctccattcacaatggcttacccatggaagaaaaacaccatcgccacttggcagagggtcaaagttggcttgttatcctctccaaattcataatacaaaaagttagaagtggctaaaatgcaggcaacaataccaaaatatttttataaaaacaatggaaatgagaaa

SEQ ID NO: 47808 - DNA, 1016 bp, Homo sapiens
gggcggagggcaggagcatccagttggagttgacaacaggaggcagaggcatcatggagggtccccggggatggctggtgctctgtgtgctggccatatcgctggcctctatggtgaccgaggacttgtgccgagcaccagacgggaagaaaggggaggcaggaagacctggcagacgggggcggccaggcctcaagggggagcaaggggagccgggggcccctggcatccggacaggcatccaaggccttaaaggagaccagggggaacctgggccctctggaaaccccggcaaggtgggctacccagggcccagcggccccctcggagcccgtggcatcccgggaattaaaggcaccaagggcagcccaggaaacatcaaggaccagccgaggccagccttctccgccattcggcggaaccccccaatggggggcaacgtggtcatcttcgacacggtcatcaccaaccaggaagaaccgtaccagaaccactccggccgattcgtctgcactgtacccggctactactacttcaccttccaggtgctgtcccagtgggaaatctgcctgtccatcgtctcctcctcaaggggccaggtccgacgctccctgggcttctgtgacaccaccaacaaggggctcttccaggtggtgtcagggggcatggtgcttcagctgcagcagggtgaccaggtctgggttgaaaaagaccccaaaaagggtcacatttaccagggctctgaggccgacagcgtcttcagcggcttcctcatcttcccatctgcctgagccagggaaggaccccctcccccacccacctctctggcttccatgctccgcctgtaaaatgggggcgctattgcttcagctgctgaagggagggggctggctctgagagccccaggactggctgccccgtgacacatgctctaagaagctcgtttcttagacctcttcctggaataaacatctgtgtctgtgtctgctgaaaaaaaaaaaaaaaaaaagtcgacg

SEQ ID NO: 47809 - DNA, 1387 bp, Homo sapiens
gagggaggtttaatggtgtcaccttgtcttgctaatgagccaacaaaaaaaaaaaaaaaaaaaaaatgcaagtaaaaaaaagtttaatcacacagcactttatacagatatcgtaagcagtaggcattcacatctccacatgtacaatgcactgggaagcacagccccaccagtcactccgggtgtttctcaaacaagataccgactcggttccaaatgccacggtgtgtggtccggctccatcctcccgcagctctgctggctgggcggtcacagcacagcacaggtgtggagcccacttaaggctgacaagacgcatcatgctttggctttttttttgtctttttttctaataagagttaatatctttgcttttgagttttttttccaaccttaaatattacatacatacaccaaaaattacatagctgcaatgtgctcaacagcatcctctcggcctggagcttcacattatcaaaagcttaggaaaacttgtaaacctctgggcctgtctctgggcactaggagagcccccgccggccgtccccttcggattgagcctgcagtttgtaagcgaagggctgacagtaggccttctagtccaagagagggctggctcgcttggagttcagtgagctgcacgcctgtcccagtgtgaccatgtgatgggggagggggccctagcacttgccctggccttgtgcagctgctcttgcccccagcagcctccgacagaagagcaaggcacctatagctgttgctttccctgcagctccctggtcctcaactccatgtgcatgtgtgaaggccaccacctctcctgggcgtcacccggaacctagcctggtcccaacctctcttagagagcaagttcaacaggcctgagggctataacgtggtcgacaggccatgtatagccgggagtcagtgacagcagctacaactcccaagggatagtgttgacgctggaggactagggaggacctgggtggtggtggcagcaggagggtctgggacacagggaggcttgagttgaactaaacaggttgaaagggaccaggggaattgttggcgcaaccccacacttcatgcaaggcacatgtgcctctcctgcgggtctgcagggaaccggcccagagagcccccgcggcaggccctggaacacccgcctctgacctgagaaggggcagcaagggagcaagtgccggacattctgctggggtgacaaatggaaaatcggcaacagggttccgattttctttgccacaggggacccgcctgttgaaagctcgcttcaaaatagaaacggcagcatctcaacacacttcttgcacttcagcatcaaactcaccttggggagaagagggcagtggcgagctgtgccgaa

SEQ ID NO: 47810 - DNA, 418 bp, Homo sapiens
  misc_feature (1)...(418): n = a,t,c or g
ttgaaaacngcttgactgattacgaatttaatacgactcactatagggaatttggccctcgaggccaagaattcggcacgaggggttttcttttgaggtaaatttgatagtacattttgatagtacaggaggcgatacggcatggtgacagaaaagcgccggcttggttagcgggaccacctggcagggctgcaggctgtgccacttaccaggcaggggaccttgggccagctgcttggcctcactcaccctgtttcctcagctgcaattgggatgaacagactgcctgcttcggggttgcctaaaactcacattgcttaatgatgtgaaatgcttaacgcagtgcctggnatanagagaattctcattanatgatacctcncctgggctttangagctcanannaanctgcntctcc

SEQ ID NO: 47811 - DNA, 560 bp, Homo sapiens
ggccacatgtggcctgtgactactgtattggacagttcagtactagacaaaaactagcataattaacttagttctagccatgatttctatttggattaaaattaaactctaatcacagttaactccacagtgcattcatgcagctgacagttatatttgttttattggagtcatgatattaaaatcagcgtttgtcaacctcaggggatatttagcaattgtcgggagacatttttgatgtcatgactagggcagttattgacatttagtgagtagaggccagggaatcctgctaaataacctgcattggacagcgccccacaacaaagaattatcctggcccgaaatgggtagtcgtgccaaggctggagtaaccttgtgtttaaaagtaacctgtggcagactaggtttccagaatttcctggttctgctcacgtatcatgtttgaaaaaattttggctattaaagatatgtattagatggtcttatcctgattattacctggatacaacttgatcttttctaatattttcagaaagtgatgggataacccctagaag

SEQ ID NO: 47812 - DNA, 472 bp, Homo sapiens
  misc_feature (1)...(472): n = a,t,c or g
cgggaggggtggcgggagcggtcctggaaataatctgtcctctgtcgccgggaactggcgaggtagttccttcgcggtggagagacctggaatggccaaatatcaaggtgaagttcaaagtttgaaactggatgatgattcagttatagaaggagtaagcgaccaagtacttgtggcagttgtggtcagtttcgctttgattgctaccctggtatatgcacttttcagaaatgtacatcaaaacattcacccagaaaaccaggagctagtaagggtacttcgagaacagcttcaaacagaacaggatgcacctgctgccactcgacagcagttctacactgacatgtactgtcccatctgctgcaccaagcctccttcccggtggnnacaactgtggacatcttttttgtggtgcctgcattantgcttactgggcgatatggttcatggcttggggcaancattttccatc

SEQ ID NO: 47813 - DNA, 723 bp, Homo sapiens
atcacagactgcggagtgggtcaggggctgcgagggctgccccaagtcctaccgggtttgcacgggcgcgcccggctccgcccgcaagtgcgccttcctgacttactgctgggtgcgcggggctgggggtgcgagtaccacccctgaagtctcttcctgggcgacctccggggcctcattctaggcctccttaaagagaaggatctaaattaggaaaaggaagtgcccttatccacgaccaagctcttccacctgcggagctcgcttagtctgcacctcaacccgtgcggaaagtgactgccctgtttactgaggaaaaactggggctcagaaagataccatggagtagtttgaaacaggaacaaaatcttctgaaagctcggagcagaagcctttttggtcaacatggaggaaaaaagacggcgagcccgagttcagggagcctgggctgcccctgttaaaagccaggccattgctcagccagctaccactgctaagagccatctccaccagaaagcctggccagacctggaagaacaaagagcatcatctctctgacagagagtttgtgttcaaagaacctcagcaggtagtacgtagagctcctgagccacgagtgattgacagagagggtgtgtatgaaatcagcctgtcacccacaggtgtatctagggtctgtttgtatcctggctttgttgacgtgaaagaagctgactggatatt

SEQ ID NO: 47814 - DNA, 2913 bp, Homo sapiens
ttttttttttcaaggctcatagaaattccataataaatgttcatttttttattattataatgacaagacaaagtttttcatatcaccattacactcatgctagggataacaatacttcctctattataaatgctacttgacctttatttactatgcttggcataactgggcatgcttaataaaataaaataaaaaaacattcaaatttttttcttttactaatcgaagtacctaattttatacaatttgcacacttttaatgttagtaacagaaacaatgaaattattttacttcttgatacttaagagtttaactccaagacatgcactacaaccacataatagacttttgtcatcaatatgatggtcctggcatcttatatattaagttcacactttaaattaagtactacttgctaaaacgaaaacaggtaaaaacaatgaacagacggttcacgttaagaggaatacgaaaagccaataacaatactgacataacaatcttatttgtaatgaaagaaatacaaattttaaaaatgacataccattttttaattacattggcaaaaattaaaccaaaaagaatacctacaattgaccaaggagtattctggcagggggagggaagtcacatacatatagtactaattagaggggtaaattgtataattaaagccctatgaaccagtcaaaccaatcattccacttttagaaactttctcaaggacataattaagcatgtaactcaaaatgtacaaggacattcactcagccactgcttgtagtaataaactgcagataatcaaaatgtctaacacagaaaaaagtgagtaaattatggtaaacctttcttatgggaaggcagtgggcttccaattccattcttcacacctagcttagcttctttcttttcaacagagtctacttctaacagagaccaaaaatgtcagacattgcctttctctgtaacctgatctaagtcaatggaaactgaggggaaatcttctggaggcttttgttaaaaatcttcctcatggataaaacaaatgagagacgaaatggccttttctgcctttgagatacaattttacaaagatgtaaaactggaagttatagcagcagctcttgtgatcgagaggtggaatagcctaaggcaaaacaaaccaactgaggtcaaggcaaaaaaagtgtgtctttaatgacacccctgaaccctgtgttatgtcaaacaatttcctaggttacttaggccaattatatttggacactgttacctctggccaaaagcatcctaacttgtattagctatacaacagagtacattagaaccacaaaaagttatgttacagaggtatatttatgaacagtagatgtgcagttaaaaagaatttacaaaacagtacgtttccatgtttttaaaaaaatcaaatatgtcaatatggattcatttgccaagaaaaaggtctgaaaagatactcaaggttttaagagtagttatctttgaaagatagcatttaaatgtttccttttgcttatgtgcattttctatttttttctacagttagcatgtatcactttaagattccgccatccttcctatcaattcaatgcaatttaggaaagaaagaggtaaacatgtattccagtgagctatcttgaaccagaagtctgctttttttttttaattggaaaagtttctgttctttaaaaaaactttcgtgaaataaaatttgatactaaacaagcatttatttttcagtgaatacggaagatcacaaacagttttcatttccctttgttactcagggaatcatcatgactttgtaccatttcgtattggaatttcttctgtgaagcaaaaacagtccccaaaatgaaggatcttcaggtgtcatgggaacggcagatgacattaaatcattaaagttgagaatagtaaattgcctctgggttggtttggaatcatcctgaggatggaacatcctgatgtctagatccatcgggtttcctaagagcaactgcaacaaaatggtgctcatctattttgctttcctcaaatgcccattctttttcttcctctccatccaggaataaacgtgtttctttataaacttggcctatatccaagtttaatggagatagatcaaattcaagccgctgcaattcaaatcctagtccaacaccaatggcttttatgaagctttccttaagtgcccaattcctataaaacatatccagctgagtccactcatccttaaagcttctgattgtttcccattctttgttggtaaactttcttttcataatatgaaagaattctggaattgaaccacgacctggaaaactagtcttcattatatcaattccaacttgcagctcaggttcagcagcaagcactgccatagtctccttgatgagagatgttaaagttgaaattcgggtaaggattcgatgagtcctttgcaagaactggttttccttttgcagttctttgcaaacgaatatgattccaagggatattcaatttctctgcaactaatttccttatcatcagacgaaccagccatggctgccttagcgtcccgggcaaagacgaactggccaatgcgctccttctcctcgggctgaatcgatcgcactgccagcagccattcggctcggctcggcagccaagtgccgcaggaaaaggcccagcgcacgccctccatggatggcaccaagcagaaccgtttggcagggaaaaccatacactgaaagcggacctcgccgctatctcgggcctgatggcgcggacgcaaacgtggccccacccccttcttccaggcgtccgtgcgcaggggacgggccgtcgtacgcagacgggcccaccgacagccctccgggcccgccccccattacagatttttcctgaag

SEQ ID NO: 47815 - DNA, 595 bp, Homo sapiens
ttttttttgtataaaggcactttattttaaaatcaacacatcctgcttttataaatcagttactcttcatttccaacttccatcacctgagtttgagagcagagtgcatggtatttttctgggcttaaggtataaacttgacatggcattcaagaacatgtccagccgggcagagccattcaaggggaacctctcggcacctgctccttcccgtggtaatagagctgcacaaaccactccttagattccaggtgctggtaaagttccatggtcaggtcaacagcaaacggtggccatttgtggtcaaaaatccccagggtcattaagagcggtatgaaggtcacatcatgagccgcatagagatacagctttctgatcttgtcgggggcagtggcagagtccatggctttcagcaggttgctctctaggatgtggaggaatgggcctactgccatctgaagactttccctgtccttccttgggcagtatgtacaaggatgttgtccacagctctctgttcgatcatccggggcaaattttttcagcattggggcaacctttggaagttttttgcctgctccggaagccacgtttt

SEQ ID NO: 47816 - DNA, 1673 bp, Homo sapiens
ttttttttttgcattttgtgatcaaatttattttttgtttaaatttcatttactttgttttactgtaatttacacaagagactggcaagtaaactaggtattttacattcaccacacattccctcaaatctccacagttgttagaaaaacattaaaatccatgcgccgggctctcatttccatgtgcgcctaagctcccaatgatactacagatgccagcgagagttaagttcattaaaaggagagggctagactctttatttcacaaaattagcaataatcttcctcgcaccaaacactttgcagacaatgattatgctctgacaaaacctatcttacaacagtgcccagagagtaaacatcagtctttatcctgagtacacaaaggatgtatgaaatgtgggttttgttgctgaggataacagggtattgcaatgcagtagtgatcctacacatccttccttgtctgattcactgaaatcactccagtgggggagggatgcaggacatgtgggaaaacgaggagcaggcagggcaggactgtcagcaaatcagattactaatgtgatttgactgcaggggttggcgtgttttaggagggacaggaggttacaaaagacagtttgtgacctgaaggcttcaacaatataattctattcaagcttccaggactgacagaggaaaaactggattcagacagagaaagctgataaaaatcttacctagctattgttccttcctttaaataaaaaataaaattaaattaaaaaaagtggcagccgtttctgaccagcactctcatgatgcctattcagaatctgtcctgatgacgtcctacttgagagcacatcccacagtcagatgtccaccagtctcttggcggggcctcctcaccgcacgcaggccagactcacactgcatcttaaactgttcctatctcaaagtcactatctcctccttgaagtgtgtgttcccacaagaagagcaaaatgtcatcactaactatatcctatcatgtgagctctgggggaatctagacccattggcatagtttccaagctgtagttacagaaaactgtcatcttcaaaacaagactccatgaagtgctatatttccaacttttctacacagcctacaatcctattaagactaatttcttcatcaatgtgtttgtctaacaggagcctgaaaattgtctagtatttattataaatcagaaaccgtcatctccatttttgctaggtttgatgtagaaaaatatttgaaatttaaaatacaaaaatccaataaaaaccagaaattttttttaaaaggatttttccctcagggcaaacaagtaaaaactggcctgtaactttgctccttactttatattgtcaaatttggctacaagataatgaccatccagaaataaatagttataaatacattcagagtttacatcccagattcattggaacaccaaaaaattttgaagaaattttctgtgggagtctactgcttatgggactaaaaaaaaatttataacagactgacttaaaagaagagaaaaataataaaaggctatatatgttggtccacagcttgacatttatgaaacataccagctagtattacattgcagtcaatttgtccattaatggtattactctgataattattaaaatctgtt

SEQ ID NO: 47817 - DNA, 553 bp, Homo sapiens
ggaagcagaaagccacagaggccagtgctgtggagcagacggcagagagctgcgaagttcaagaaatgttgaaagtagcccgagcagagaaagatctactggaactgtcttgcaatgagctcagacaagaattactaaaggcaaacggtgaaattaaacatgtttccagtctgctggccaaggtggaaaaggattattcatacctgaaggagatatgtgatcaccaagccgaacagctgagcagaaccagcctaaagctgcaagaaaaagcatcagagagtgatgcagagatcaaagacatgaaagaaaccatatttgaattggaagatcaggtggaacagcaccgggctgtcaagttacacaataatcaactcatcagtgagctagaaagtagtgtgatcaagctggaggaacagaagtcagacctggagaggcagctgaagactctgaccaagcagatgaaggaggagaccgaggaatggaggcggttccaggcggatctgcagaccgcagtggtggtggccaatgcatcaagtgtgaggcccagcaggag

SEQ ID NO: 47818 - DNA, 1903 bp, Homo sapiens
  misc_feature (1)...(1903): n = a,t,c or g
aagatttccaatgtaaattttactattttatttgtgaaaaaactacaagcagaattcataaatagacatttctatttaaagcaggaaaatgataaagtggcttctaataacatagtcgtgcacatgccagtaacaggaatatattaacatcttttatttgctagacaaagagcagtgtccaatataaatttcccccaaaacatttaagacctgtgaatttttgaccagttcacaaaacccaccaactgacactttagcatgaagaaaaaaacaaacctaacagactgtcagctctaaagacattacagagcagaaacttccaaaagcgttatacaagctgtctttctgggcaaatgaaaaatatagctcgtataatacattaacaaaaattcacaagataagattgttttgacatacttaacaagcattctctatttgtctccaacaaacaaagctaaggaaataatgtaaccatctttacacagtaaattaaggttacaagtcatacacaagaacagaactgcttgcgcattaaaaactgttcagctcccattgtccatactctaaatgttggctcttaaaccattttcggttacatacaagcaaaggttattatatattcagcaattaataaattttcaataatttaagatacggtagcttaaaaaagtagactgagaatggtcttgataaggcaggtgaaacatcttagtggaactaaactcacagaggcttctgccaatgtttttaaatatccagattgaaactgaaaggttttgattagaatattgtgtgggtgtcaagatgtctttttttttgtaactgcatgactcaagcagagcaagtcaggtaagctctgtgtgcgcgcacacgcacgagtgtgaaagattgcgtggtattaaaacaaatggaaacttgcaagcgtaacactgtgctttttgtttgtttaacctgctttctgtgccactgaataccaagtatttctggtcctcttttaatgtatatctttataatctacactagtgtttttacacgctgcctactaattgtagggcatactgcagacacaggaagttacaggaattccatttccagaatacatgcctgagggatgtcatcaatttccaaaattaaaagtctataaagtacctactacctcactacccaacagaatacaccacagcagctaaagggctggccctgtaacatctgattgcttagataactcccactgttagctgcggtttctacaaagatggtaatttcatgccacttgttctaaagcaatcttcttccccttccttcacccctccccattctttaatttatcacggaggcaaaactgaaaaaccaaaacattggcatgaatgaattagcagcctatgagtagctggttaatcagctttttccactaatctatggggtccaatcactttacatgaaactagtttttgaaaaagtacacagtgtgtctgaacaaagtgcataccaacagttattggttcaataagcagtgccaacctacatgagtttggtggcatttaagttttttcaaaaagttaaaaacagcaatttcttaaacctctggaaaataaatatggctgactaatttaccctccctgagacccttaataaaaggaatattaaaactttagaaggaatgtctttgcaatatcccaccaatattaaaatgtggatttaaaattcatagtcaaatcactatgtattatatattctgatgcttatagaaagcatctgatttcctttggttcattaataaatactttaaaaatgtatttaaaaagataagcaaagcttgcatcccagacacaagcattattttaaaaaggggggaacattgtccatgcatttgagaataggaccacagcaacgcanatgactg

SEQ ID NO: 47819 - DNA, 509 bp, Homo sapiens
  misc_feature (1)...(509): n = a,t,c or g
ttggnnncctttgannccctaacagctatgacatgattacgaatttaatacgactcactatagggaatttggccctcgaggccaagaattcggcacgaggcttctggaactattagtcttgatggccatgacatccgtcagctaaacccagtgtggctgagatccaaaattgggacagtgagtcaggaacccattttgttttcttgctctattgctgagaacattgcttatggtgctgatgacccttcctctgtgaccgctgaggaaatccagagagtggctgaagtggccaatgcagtggccttcatccggaatttcccccaagggttcaacactgtggttggagaaaagggtgttctcctctcaggtgggcagaaacagcggattgcgattgcccgtgctctgctaaagaatcccaaaattcttctcctagatgaagcaaccagtgcgctggatgccgaaaatgagtaccttgtcaagaagctctagatcgctgatggatggaagaa

SEQ ID NO: 47820 - DNA, 617 bp, Homo sapiens
  misc_feature (1)...(617): n = a,t,c or g
gataatgtcaatctgctggaccaagttaatttagaaaataatttttaatcctcagattttcaaaacttggactactgcaagactgatatgtactttntatgcccaaatcatatttttcaaagataggacatcataaggcatcattatttctaatgtatcttttaactagatagaaaaagctttactgtctaaacaggacttctgctcaaaacctaatgggaaagctatttctggggtaagatttgtaacagtgcttctaggtcatttcatgttttatagggaaaaagatctttgtacacctcctcaacctgttagtagaaatgttgacttcgattttttgcaccctcttcacaggacctcaaaagttgcctctgttcttggaaagcaatggggaataaaaatatgctgttgaaaatagtgcatggggcatgcattttagtttaggaaacccccctcccttcccagttccagagggagaaattataagctatactgtgccaaaagtgagtggggctgcagagagaatggtgccttttctcaccttctgagttaatgcccgacatctgccattgggttcattgaccaaaggaagtcatttctactgtataactcaaggg

SEQ ID NO: 47821 - DNA, 1189 bp, Homo sapiens
agtccctgagagctgttttctcccgttcctttttcgcatgcttggcctcctctctgtttctatgaaccacagaccacctaagcaagctgctgagtaagggctcactggaaacttgcagtcacaggatgtccaatctttggcagtccgagcttggctctaggacagagctgtccaatagaaatataatgtgagccccatatacaatttttacatttctaatatattttaaacaagtgaagttaatatgcatccaaaatatttcaacctgtaatcaacataaaattttaatgagatattttatattattttttggtactgaatcttcaaaatccagagtgtattttacacttaccgcacatctccattcagactagtcacatttttaagtgctcagtacgacatgtggctggtggctactggattagacagcacgagtctggaagatggaagctagtgcagaaacctcttgtttaaaaaacaaaaaaggcaagatgggcttgagcgattcaagaggcaactaaaaataaaattaggacccagcaccttgtttgacacacagtttgaccttcgattttcctcccttaacttccctcttcccttaatatctgtatacaagtgttgcttcaaagtaccaaggtcagaaattgattcagtacggtttactaaagtcatgtggaataaagccattggaaacaaatggaaagcctgtcgggacttctgggctcagaaccagctggctcacgcactccacttgtcagctggacttctgccttgtgaaatggaagcagcctttgttcctttctggctgagcaagcttcctgaggctggggagagactagggaaggctttgtaggaggggaaaaaagtcaggaaaagatatcaaatcagaaacatggaagaagaagggaaccgatttgagttggtgggcaaaactctaaaaatctaaatctgatgcttatgtaagggttgagcgaattagggagattgctagtggaaattggagggaatttgttttgcatcatttgtctaggatctatgcaaatatagctccactaaaggaccatagggaagagccagccttgccttttcttatatgattttgtttacaaaattttactgggacttttaaatctagctatagagttgggaaaaaatatttccacttagatattttacatggttttgttta

SEQ ID NO: 47822 - DNA, 1283 bp, Homo sapiens
tccttcgtatgccacctttattgtgtttccccaactcctgggccccatggtagactggccacatggctactgggctcctggccttcctagggctagcagctggtgggcaaacactctgccctgctggagagctgccaggccatgcccgggcacaggctagtggggctcctggctcagtcctgatagcagtgccagggaggcgtagagtgcacacatgcggccctgggcctgcggctcccagcacacgtggggagtgtcctcccccagctctaggccacactcgtccagcaagacccaggccggtgctccttcgccccagctgttccccaggagcccggggggcagggacatggtgctgcgctcctgccacggggcactctgctccaagaggctgcccaccagctcgagcggccccaacagggtctgcgactccagcgcctccgccagcagcttgtgctggttttcactcagcatggtcagtgcccccagcaggtagacaacagggatagcgagttccggcaccagcattccggaggacaacaccaggcactccaggacagcacctgctggaccgtccaggggctccaccggcccaaggctctggccctgctccagcgcctcctccaaggctcgcagggccagctggtcccgcagcaccccctccaggccctccagcagcagctggcacagctctctgtccaaaagctccagttccttggagatggtctccacctctgcccgtaggccctggaagtcttcagtgaacgccccctccgcagggaccccatctgtcaggaagttgtggaggcacctcatcatggagaggccagagggcagctgtggccaggcgccttcgctcgtggaacgcttgtggcctgtcgcgggtggctggaaggtcctctgcttcttatccgggaagagaaggacgtccaagtcagagtcaataaccagctgggccacccggaatgcgagggtgctgcctgaggggatggtgaccgtcttcttctggctcagatggccctggccctcaccctgcaagcacgtggctccgggcagggaaaaccggcccgagccctcccgcttgtgggtgcgcgtgacttccacctccttctgtgtctgcagcacctcagtcaccacgtacacgttgtccccgcggctgcgcagctgctgcaggactttgtgttctggctgccgcaggtgcctctcatggagcagagtctgccaggtgttagggtccacactcagcgagtacacattcattgaggtgctggagctgtcagaca

SEQ ID NO: 47823 - DNA, 707 bp, Homo sapiens
attcggcacgagaaaatgtccccactgattcttaaacatttggaatcccagtctgcaactattaatctggaggctatatctattttgttttgctttttggttggggggtggttgatctggttcttacacatcttggaagcaagaacaatcaggaccaaagtcactttgatcccactttttccaggagaaaaaccacctgtttggccagtgagaactacttgtatgaaataatttggccaaatcttcagtgtgaccaaatgtgagactgggagtttgtgtttttcacaggaaccctaagtatagacctctgctgctcatcaggaaacttactggagatgaaggccccagctgttgtcaccgggtttggaaagcaccttaactgaatcatgtaagcatcaggacataagcagcactttgtggtcaaatgtggaagccggagacttcaaagcacctctgggacccactggttgaagtttgcaatagaaacttaagttttcccaaatccataaagccttagccctggttctcaatagaatcagggacctagcaggaaatgattttactcaacctaaaatgctggatcccaggcccgtgtagctataagaattctggcctggatcccaggtgtacaactatggacaagatatgggcctctactttctcctctataaaatgaggctggatgaaatgtcagctagggccatttt

SEQ ID NO: 47824 - DNA, 1264 bp, Homo sapiens
gtgctgagatagcagtacagtgttttgagccatcaccagtgcagtttcatggtgggtgcctccaggtgatgtggactggacaggggattttgtctggaatctggggacatggggtttggctttagcaacctgtcttggccctaatgagaaaccctttgtaagtgggctctggatttttggttttgttttctttttatctgttttgttttatttttggttttggttgaacagagggacagaagaataagtaacactcccaaacacagacatacttttgtagaagtggaccaacttcaaagctctggacaggagacacctgctccaggcccctgtgatcccagttctgttctcttgccctctggacctaagcgttcccactcgcagaaagagtaaggtggactgacttttcaatttgtgcacatgcctacacttcaatggcctggtcaacaatcaacaacccctccctctgatcatttccagttgattgtcatatccagaaaaaaatggaacagtgcactcttctccctgttgacccatgtccacctattggttccccaaaatccacattctccctgggcccagatgactttgtctccctgggcccagattctttgtctctcttcaaccttcatctcaaattgtctctaagcactaccttccccagagcttgccaggttgggttttgagattagggtcaggtcatgggtatgtggagaatggtttggaggttgaggacaaccacaggtgtctcattgctgccatttctcctgaggacataatcacttggtcaccttggaccctgtcacttcctaaaattactcgttctgtcatgccatagaggtcagttttcctctttcttggcttctacccacaaacattcaccaatcatttattcgttcatttagcaaatatgcagcctccgcaagatgagctctcctgcagacaagcatggtctgaaacattctttgagcaatatttattgagtgcctactatgtgttaggtactgtgccaggcactgataagccagtggtaagggaaacacagctctaacctcacctcattctccaggttacaaaggccatgtgcccctttgaatctggcagagaaagtttcctcgttgtaagtatttgcatctacttcaagccagattcttctgcctctttctcctttccagacccctactctgtgcagtgctgaccacagctagagccaccgccccattgctcaaccagtatttatttccctaaacgacccttccttcac

SEQ ID NO: 47825 - DNA, 938 bp, Homo sapiens
  misc_feature (1)...(938): n = a,t,c or g
tttttttttttttttaaataaacgtcctctttattttaccaaatataatttatcagttaagttgacatttgtcaattcagttatagtaactataaataattctcttaagacacagttctgtaactttttaaggatacgagagtaaaccaatattgctccttgcagccaggccaaaagtacatgcagttggtacaatcggggaaaagaaatgaaacttccatgaaagtcaccttcattttctttccctctcaccctacagtcctcctctgctcactcagggcctggggcatgcctatctgtctgctttttaggcaaaggaggtcactccagagtcttctgggactgcctggccaaattccagagatgaggaaggggcgagtgactggggtaggggtggctggagaccacagggacacagccttaggggcagaggagttggttttgatgcctgtacaagaagaatctgtgtgtaagtattttttgaggtggaggaaaagatgaaaaaagtccagagggaggaggaaaaacaagcccaggctggtgttaatgaattctgttggacacaactccaactagaaaacctctaaaattccttccaattctacggttctatgattccagaaggaggcctggaggtctgggtagaaatggagggagagaaaatatggtctctggaggtctagggcaggttcctgggataaggtgcagtgttggtagaaacaggatcattgcctaagccttcccttggaggtgggcccttgaggctacagatggaagggtttctgtagaagcttctgagagagaagttagaaaaagcctacatccaaatccccagatctgtacacgtgtgactgcggatggaggctccagttttctcccaattttgtgctaggcagagaaaagtagaaacaaccagatgatgtccaccctgntagttc

SEQ ID NO: 47826 - DNA, 2552 bp, Homo sapiens
acgagacgaagacggaaccggagccggttgcgggcagtggacgcggttctgccgagagccgaagatggcagtgaacgtatactcaacgtcagtgaccagtgataacctaagtcgacatgacatgctggcctggttcaatgagtctctgcagttgaatctgacaaagatcgaacagttgtgctcaggggctgcgtattgtcagtttatggacatgctgttccctggctccattgccttgaagaaagtgaaattccaagctaagctagaacacgagtacatccagaacttcaaaatactacaagcaggttttaagagaatgggtgttgacaaaataattcctgtggacaaattagtaaaaggaaagtttcaggacaattttgaattcgttcagtggttcaagaagtttttcgatgcaaactatgatggaaaagactatgaccctgtggctgccagacaaggtcaagaaactgcagtggctccttcccttgttgctccagctctgaataaaccgaaggaaacctctcacttctagcagtgcagctccccagaggcccatctcaacacagagaaccgctgcggctcctaaggctgggccctggtgtggtgcgaaagaaccctggtgtgggcaacggagacgacgaggcagctgagttgatgcagcaggtcaacgtattgaaacttactgttgaagacttggagaaagagagggatttctacttcggaaagctacggaacattgaattgatttgccaggagaacgagggggaaaacgaccctgtattgcagaggattgtagacattctgtatgccacagatgaaggctttgtgatacctgatgaagggggcccacaggaggagcaagaagagtattaacagcctggaccagcagagcaacatcggaattcttcactccaaatcatgtgcttaactgtaaaatactcccttttgttatccttagaggactcactggtttcttttcataagcaaaaagtacctcttcttaaagtgcactttgcagacgtttcactccttttccaataagtttgagttaggagcttttaccttgtagcagagcagtattaacatctagttggttcacctggaaaacagagaggctgaccgtggggctcaccatgcggatgcgggtcacactgaatgctggagagatgttatgtaatatgctgaggtggcgacctcagtggagaaatgtaaagactgaattgaattttaagctaatgtgaaatcagagaatgttgtaataagtaaatgccttaagagtatttaaaatatgcttccacatttcaaaatataaaatgtaacatgacaagagattttgcgtttgacattgtgtctgggaaggaagggccagaccttggaacctttggaacctgctgtcaacaggtcttacagggctgcttgaaccctcataggcctaggctttggtctaaaaggaacatttaaaaagttgccctgtaaagttatttggtgtcattgaccaattgcatcccagctaaaaagcaagaggcatcgttgcctggataatagaggatgtgtttcagccctgagatgttacagttgaagagcttggttttcattgagcatttctctatttttccagttatccccgaaatttctatgtattatattttttggggaagtgaggtgtgcccagttttttaatctaacaactacttttggggacttgcccacatctctgggatttgaatgggggattgtatcccattttactgtcttttaggtttacatttaccacgtttctcttctctgctccccttgcccactggggactcctctttggctccttgaagtttgctgcttagagttggaagtgcagcaggcaggtgatcatgctgcaagttctttctggacctctggcaaagggagtggtcagtgaaggccatcgttaccttgggatctgccaggctggggtgttttcggtatctgctgttcacagctctccactgtaatccgaatactttgccagtgcactaatctctttggagataaaattcattagtgtgttactaaatgttaattttcttttgcggaaaatacagtaccgtgtctgaattaattattaatatttaaaatacttcattccttaactctccctcatttggctttgccccacagcctattcagttcctttgtttggcaggattctgcaaaatgtgtctcacccactactgagattgttcagcccctgatgtatttgtattgatttgtttctggtggtagcttgtcctgaaatgtgtgtagaaagcaagtattttatgataaaaatgttgtgtagtgcatgctctgtgtggaattcagaggaaaacccagattcagtgattaacaatgccaaaaaatgcaagtaactagccattgttcaaatgacagtggtgctatttctcttttgtggccttttagacttttgttgccctaaaattccattttattgggaacccattttccacctggtctttcttgacagggtttttttctactttaaacagtttctaaataaaattctgtatttcaagagt

SEQ ID NO: 47827 - DNA, 596 bp, Homo sapiens
tttaaaaatatcttaacacctttacttagatctcatctcatacttgtagcatttcttcaaatttactttgaaaaaagagcttcactgtgtgtggttgtcatacacattcttctacccaaccatggacctctttcttcctctcaggcgcacttcatctaatttttttagcactggcctggcctttttggaggaggtggagtagctcttcagaaaggcttcaaacacagtttcagtgttgggatgggtactgaggaaggccttctccaggacatagaggtctactcccttatcctctggaagtgctgaaatgaaactcagcccaaagtctatgagcacaatgttcagctgttccagggggggtttcaggagcatgttggaggtggtgagatcaccatgaatgaggtcttcatcgtgcattcgagccaaaacctgcccaattgtcttggctaagttggagagaccctggggagttttttcagtctccatagcggactgaatataatctcgaacagtcactgagccttcaatttcttccatatataagcagttggaagcatagtccacaaaaaagacaactggggcagatattccagcgc

SEQ ID NO: 47828 - DNA, 1127 bp, Homo sapiens
  misc_feature (1)...(1127): n = a,t,c or g
ttttttttttttttgcatttcaatagaactagctttatttacttatttatttatttaaacaaaagaaatggtttaaaagcaaatgcatatatgtaccaagggatggacatgacctggtacttacaaaggagctgctgtgtcataatggaaacagcatattaggagaaaaatagtatttcgtgtgctgtctgcttgagtaatcaatctgggagatgcaagttaaccgaaggtgctctgccaagccatcagcgtgagaaaaaaaaaccaccagaagttgcctccagataacgatgtagtggcagcatgataactggcatcaactcacggtcttctcattttccccattttctataattttcctcttcttttcatctatttttttcttgaagatgttatttcggtaaaactgaagctctttgatgctttcactaatgtcatcaagtgccctatgagaagcagccttctttggtgcaaattcatattcttctggataccagcgtctgcacagttctttaacagtgctcacatcaattattctataatgaagatgtttcatgaactggggcatgtatttgtcaagaaacttcttatcttcatgaactgaatttcctgcaagtggacagagccctggaggagtctgctgtcgtacaaaggacagaaattcatactctgcctgctgcaatgtaattgtactctccttcactgccttggtaaggccagacttcccgtgatgctccttacaccaatctgacatgctgtccagcaactcatctggttgttttataatcaggttaggaccttcagccaaaatgttgagatcagagtcagttatcagacaggccatctcaataatctggtccttctcaatgtccaatcctgtcatctccaggtccacccagaccatccgctgagccatgctctcccctgccgccatggctgcgccaccttcgcggacacctcgggccccgaaccgtccgtgactcccacctacaccccgcaacatgcctggagcccagggagccgcctagcatatcccgggaccagcaancacggccccagtctcgcagccggccntngcaggcgcaatagtcgctanacgtcgcaagaccacggggaggcnacgagct

SEQ ID NO: 47829 - DNA, 863 bp, Homo sapiens
gcggccgctggcagcgctggccctggtcctggcgctggccccggggctgcccacagcccgggccggcgagacacctcgccctgccgagcgggggcccccagtgcggcttttcaccgaggaggagctggcccgctatggcggggaggaggaagatcagcccatctacttggcagtgaagggagtggtgtttgatgtcacctccggaaaggagttttatggacgaggagccccctacaatgccttgacggggaaggactccacttagaggggtagccaagatgtccttggatcctgcagacctcacccatgacactacgggtctcacggccaaggaactggaggccctggatgaggtcttcaccaaagtgtacaaagccaaataccccatcgtcggctacactgcccggagaattctcaatgaggatggcagccctaacctggacttcaagcctgaagaccagccccattttgacatcaaggatgagttctgatgttccccctgcaggagcaggttcttgggagcgtgaggcaggaagacactaggtgctgaatctcctgcaaaactggctgcctggaggccctgagccacccagatctgaataaaacagatgcttaccctggaagagcaaatgcctcctgttgtccttggtcaggggttctgtctacctggggacccctgtctgcacaccagggatcaataagagccaaagtgggacacctcctagatgtcagtatcagctggctgggcagtggaattttgagcgacctttactttatacttttctgtgcttgacagattttcagccatgaccatgttcactttataatcaaaacaaaaataaaggtcccatttttacaaaagg

SEQ ID NO: 47830 - DNA, 1264 bp, Homo sapiens
ttttatgtttttcctttatgtttaatagttctgtgaacattgacaatatattacttttagtggtacacagttcttgagaaaatgtcttgatttttacattgccatttgtgatatttttagcagtccaccacaatatcatttttataataaaaataaaatatactcattgatgatagagaaaatattgttaaagacctcttgggacaggaaaaggctcagtcataaaatcagatgcttattcattttcagctgtgtcattttgactcattactttcaagaataactataatattgctagacagttcattacactgagaagaactttccttgaacttcacatggagattgagtaaagctcttctatttgttttttgaagtactctctcagctcaggtctcttagcttttagtgttggtgtcagcaagccattttgaactgagaacatgtcagaatggatgtgaatggctttaacctgctcaaaagaatggagtccactttcttttcctaacctcaccatatcttccaaaatggctttcttcagatccttatttgtgcagagatctgcatatgttccttcaattcctctcttcctgggcccaggagggcataacttcagggtcaggcacaacaatgcctaccaaaaaggcctttaaagctgtccccatggacatagatttgcgccacaggttggctccggatgtagatgttctcaatcttctcgggtgcaacatattctccctgagcaagtttaaatatatgctttttccgatcaataattttaagagttcctgccggcagccattttccgatgtctccagtgtgaagccagccatcgctgtccagggcctccttcgtcctgtctggatctttcaagtagcctttgaacacatttggtcctctcacacatatctctccctctcctttgcaggcccagtagttcagttcctcaacatcaacgagcttgatatgattgcagggaagtggcgcccctacgtgccctgaggtccagtcgccaggagtggtgaaggtacatcccagctgtggcactcagtttggccataaccttcataaacctggcaccctagagctgcccggagaaatcccagaactgttggtgatgctggggctgctccagtaacaatcatccgcacacacccaccaagactggcctgaatcttattaaagaagagttcatcccagatactatcattcctgatgattccactccggacctcggccttctttacgctttgctgcaaactcc

SEQ ID NO: 47831 - DNA, 1890 bp, Homo sapiens
  misc_feature (1)...(1890): n = a,t,c or g
tttttttttcctttcacaaaatggatttttattgtggtcatacatggtttctcagtgccacagaaaattgctatgtagggacaaaaaatttttggatggctctgtaaagaaacatggtaggttttcagaaatgagttgtgcaggaatgtggttaatgaaaagcagaaagggttaagggaagagaaaggaagccaaggagtgtggtatgtacatcaaatgattactttttaagcccctctaggctctgataaccctttccccaagtcagatcccaacaaaattcatcagtaactgaagtgattgtgctaacagatacataaagactaccggagaaaagtgggttgagatgggctcagacttattgttaggacaactctggggagtcttggtgtctgtgccaaccacgtatccgtgggctacctggaagatgagttctaacaaccagcacagaacccaaagctgctctccaacacctttgtttagtagggaaaacctgtagtggggacaagagaggaagctgtgcccttcccccaaccaccgtttcatcttctgctcgctgaccttgatgtgacttgagagctctccttgcttcggctgtgcagtccagaagccagaacttcctctaggaaacttttcgtgttgtgcactgtggtgcctcccaggacaatcctcactccaggagtggtgcggttcaggttataaactgttagagcctcttcataggtggctcctccaattacaaacacaatgatatcctgaggtctgtctctgagtgtgctggggcctaaataaggatataggttttccttaagccttcctttgatgagatgatccagggtttcatgtaggaaaggttgatgctgtgtatatacattttctactcccttcagtcctttgaggaattgtttggtgatagccacagcatctttggggctgaagaggtcacttcctctgactcgtttaccaccatattcaacaactgcagacacgagctttcgatacttctcagaaacacctttattcctgaggtccatcattagtcctggcaggctattgctgctgtgtcgctcataatgtaaagcataaagcatcaccaggcgggcagcatcaaactctgtcactttggggttctgcagaagcctttttatattctggagagcactagaatggtcattttgacaggccagttcttgctcaacctctgaaacctccagcagattccgttcactgaccaatcgagacagttctccaaccactgtcacatgctttgaaacagtcccagacattttcttgaactgtggataattctcaacaaacgccttcatgtctgctattgattctagtttttgctgttcttttggtttcttcttctgaaaatcttccatgagattctttatattgctaccaatctcagcaaagttcaggtacatattattagcatagaattcatcattttcagcagataggaccacttctcttaagtctttactgattcccggcactctggaaagatcaatccgattgttgtttatgcctagtagttcgtggaccatggcctgatatgtccactggtttagcaatggggtgatggcatcatcacagcgatctaaaataaggagcaatggaggaacctctgtccgacggaatttcaaacagttcatattctttagttatnacttgcttaacgcactctgcaagtctctttgctgcctctgatgagagctgataacgaatcatgggacacttcttcagagataaaaggagagctgtaagcccttgagttgttctagatagctgggctggatcccaatttcgaccctggcagcaacccaaaatattgagggaaaacaaatgtgggttcacagcaatgtaatcaccataaaattcctg

SEQ ID NO: 47832 - DNA, 4519 bp, Homo sapiens
  misc_feature (1)...(4519): n = a,t,c or g
agatctcccaggtggcagctgctccccaagacaggctcactcaccatgaccaagctgagcgcccaagtcaaaggctctctcaacatcaccaccccggggctgcagatatggaggatcgaggccatgcagatggtgcctgttccttccagcacctttggaagcttcttcgatggtgactgctacatcatcctggctatccacaagacagccagcagcctgtcctatgacatccactactggattggccaggactcatccctggatgagcagggggcagctgccatctacaccacacagatggatgacttcctgaagggccgggctgtgcagcaccgcgaggtccaagggcaacgagagcgaggccttccgaggctacttcaagcaaggccttgtgatccggaaagggggcgtggcttctggcatgaagcacgtggagaccaactcctatgacgtccagaggctgctgcatgtcaagggcaagaggaacgtggtagctggagaggtagagatgtcctggaagagtttcaaccgaggggatgttttcctcctggaccttgggaagcttatcatccagtggaatggaccggaaagcacccgtatggagagactcaggggcatgactctggccaaggagatccgagaccaggagcggggagggcgcacctatgtaggcgtggtggacggagagaatgaattggcatccccgaagctgatggaggtgatgaaccacgtgctgggcaagcgcagggagctgaaggcggccgtgcccgacacggtggtggagccggcactcaaggctgcactcaaactgtaccatgtgtctgactccgaggggaatctggtggtgagggaagtcgccacacggccactgacacaggacctgctcagtcacgaggactgttacatcctggaccaggggggcctgaagatctacgtgtggaaagggaagaaagccaatgagcaggagaagaagggagccatgagccatgcgctgaacttcatcaaagccaagcagtacccaccaagcacacaggtggaggtgcagaatgatggggctgagtcggccgtctttcagcagctcttccagaagtggacagcgtccaaccggacctcaggcctaggcaaaacccacactgtgggctccgtggccaaagtggaacaggtgaagttcgatgccacatccatgcatgtcaagcctcaggtggctgcccagcagaagatggtagatgatgggagtggggaagtgcaggtgtggcgcattgagaacctagagctggtacctgtggattccaagtggctaggccacttctatgggggcgactgctacctgctgctctacacctacctcatcggcgagaagcagcattacctgctctacgtttggcagggcagccaggccagccaagatgaaattacagcatcagcttatcaagccgtcatcctggaccagaagtacaatggtgaaccagtccagatccgggtcccaatgggcaaggagccacctcatcttatgtccatcttcaagggacgcatggtggtctaccagggaggcacctcccgaactaacaacttggagaccgggccctccacacggctgttccaggtccagggaactggcgccaacaacaccaaggcctttgaggtcccagcgcgggccaatttcctcaattccaatgatgtctttgtcctcaagacccagtcttgctgctatctatggtgtgggaagggttgtagcggggacgagcgggagatggccaagatggttgctgacaccatctcccggacggagaagcaagtggtggtggaagggcaggagccagccaacttctggatggccctgggtgggaaggccccctatgccaacaccaagagactacaggaagaaaacctggtcatcaccccccggctctttgagtgttccaacaagactgggcgcttcctggccacagagatccctgacttcaatcaggatgacttggaagaggatgatgtgttcctactagatgtctgggaccaggtcttcttctggattgggaaacatgccaacgaggaggagaagaaggccgcagcaaccactgcacaggaatacctcaagacccatcccagcgggcgtgaccctgagacccccatcattgtggtgaagcagggacacgagccccccaccttcacaggctggttcctggcttgggatcccttcaagtggagtaacaccaaatcctatgaggacctgaaggcggagtctggcaaccttagggactggagccagatcactgctgaggtcacaagccccaaagtggacgtgttcaatgctaacagcaacctcagttctgggcctctgcccatcttccccctggagcagctagtgaacaagcctgtagaggagctccccgagggtgtggaccccagcaggaaggaggaacacctgtccattgaagatttcactcaggcctttgggatgactccagctgccttctctgctctgcctcgatggaagcaacaaaacctcaagaaagaaaaaggactattttgagaagagtagctgtggttgtaaagcagtaccctaccctgattgtagggtctcattttctcaccgatattagtcctacaccaattgaagtgaaattttgcagatgtgcctatgagcacaaacttctgtggcaaatgccagttttgtttaataatgtacctattccttcagaaagatgataccccaaaagggagcctatgggtcctcatttcaacttctaaggtcgctagattgtttctatcctgaggtattgcatcaattttaatactcctatagttttctcttcttagaagagcacaaacactccatggaacattagagttctgaggcactaccctagcttgtcctctatcatgactcatttttatctatggcaggtagggctgaagcactttgcaggtttacatcttccccagagtaacagcttttccttttcacatatactttccttactgccttactcagtgggtaagttaaagggctgaaggagagttgaatggtccacaagactaccctcttaagaggtttcacaaattccaaacagtaccagtgagagcagcactttccactggggctaggcttgagacctaaaggcaagtatgaaatgcatatgctacttcactccctctcccaacccttaataatgaggcaaagcaagagcctagtgaaggccaatgctaggtttacaaacttacccagaagcctctgcaaagcttcacaggctcctcagatgaaaataacaggaatcaatggggactacggccagacactggtttgccattctgttccttttaagaagtaacagtgctgcaaggaagtccatgtcagaaagccaacagaaggtgatttccacaactttgaacaggttgttacaagtatcagcaagaatgtgtccttttcagaaataacagtcaaatcaaagaaggttaataaaggctttaatttcatacacacaaaaaaactctatgcataatttaaaaaggaaacaaaaacaaagaaaaaccgtaaaggatacagaggaacagttctgctaaaacacagataaaagtgccgctccatacaaaacataaagaatcagaatcaaaagtcactctgaacataaagaaaaaaaatcatctcacaaataatgtggccacagctgccagaaaacctggtagtggctcaattaggcaaagtgtaggaatctcatttttgtttttctctccttaagtttaaagaaacaacaatgacaataggccagagaagttagggagggaaagaaaagctcaaagggagggaaacctggggacaagaggtgtgcacacccacatgtggtctcactcttcacacaggcccactatttttgaagtagaccagtttagttgactgttcttctttgttctggcatctgactggaccaacctggaacctggtccagaccctcacccactctattcttatgccaatggacatacctatactttgaacctctgtacttttaagaaaagtccaatgttacaaaatcaaatgcttatattcagactggcacactttttaaataaaaactccatacacctcagacatatagcacacatggagacaacttactaattgtgtgtaagtatgatacaatgaatgagactgcctgaagtctagtaatcaaagcatgccataaggtgaatgattgtggttaaacacagcaaaataattgtcacaaaactttcaaggcctaacaaattagaattttccaataaaaaatatatattttttcagatgttaataagacatatcagtagagacaaaattaggattttgaagtaatgcaataaaaagatgttggagggcagaagtctatttagtttttgtatacacttgcaagagtgcattactcagtataaagcaaaatggggaggaaaaagacatccatccattttattggaacacttttatgtgacttgaatctggtgttaggttgttgatttttctaaaaatctnctatatatacaaaatcca

SEQ ID NO: 47833 - DNA, 488 bp, Homo sapiens
gtgcaccatgtggcagtccatgtgtcctctgcgccagttccggaaactccctgaggaagtagtgaagaagattgagaagaagaatttcccctttgagcgtctgtacgacctgaatcataatgagattggggagcttatccgcatgccaaagatggggaagaccatccacaaatatgtccatctgtttcccaagttgggagttgtcagtgcacctgcagcctatcacacgctccaccctgaaggtggagctgaccatcacgccagacttccagtggggatggaaaagttgggcaggttgcatggttcatccgaggctttttggattctggtggaggatgtggacagcgaggtgattctgcaccatgagtattttctcctcaaggccaagtacgcccaggacgagcacctcattacattcttcgtgcctgtctttgaaccgctgccccctcagtacttcatccgagtggtgtctgaccgctggctctctt

SEQ ID NO: 47834 - DNA, 558 bp, Homo sapiens
  misc_feature (1)...(558): n = a,t,c or g
ggtgatgcaccaccctgctcacaagagcctcaaagccgcctactcattctacaacatccacacagagacgcccctgctggacctcatgagcgacgcgctcatcctggctaaatcgaaaggatttgatgtattcaatgcactggatttgatggaaaataagacattcttggaaaaactcaagtttggtataggagatggcaatttgcagtattacctgtacaattggaggtgtccaggtacagattctgaaaagaaagtttgttgaccttggtcactacgaaggagttggaactctcctttctataggttgccgtgattctaaagaccaacccacagctgtgacatccctgagactaccaccagagggcgactgggccccacagtagtacataatataggacctctcttggagataatggaagacttggaatttcagatggttccaccctaattgcattagcgttctttcttaacaggagaaaggcttcaagaaacaaaacagtcctcattcactggaacagggtntgagataccagcattaagtaaatgagattttga

SEQ ID NO: 47835 - DNA, 1257 bp, Homo sapiens
tgataggtactgcagcaaagccatgttgatgtgtagatgcatgacttcctcactaagctgctgcacaccagctttgcctgcatgattcaaatttgtgcctcagtaaaattataaattattgcatgtcataccttgaataatggaaacggcaaacattaaacctgtgattacccataatgtactttaataataaaaaacatggcagccaggtgcagtagagtgcacctgtggtcaggaggctgaagtgggaagattgcttcaacctgtgagtttgagtcccgcctggtcaacaagcgaagaccccatgtgtctgtctgtctctctctttttttaaaggacagaggctaagctgtaaggttagcatggttctgcctgggctttgcttctgtgcttctgtgcaggctgagctgtaaggttagcatggttctgcctgggctttgcttctgcgcttctgtgcaggctgagctgtaaggttagcatggttctgcctgggctttgcttctgcgcttctgtgcaggctgagctgtaaggttagcatggttctgcctgggctttgcttctgcgcttctgtgctagcaggtgcccacaaaatgtctttttgaatttcttaatttttgggttctggatgcaattcgtgcacgccaagaaactacttgcttgtcagtattttaattctgtagtacatgtgtgtgaatatcagccagtacttacagtaggaggatgaacagaaaaactgagaagacctgtctttcaaaagatgggtttatccactttttaagggaaaaagtgacagtttggcatgggatttgaaaagtggaaattgtggaaaaattgagctgttgaagtcccacatataaccagatttaataaagcttcacatgtgaattagctccatatgtgtgtagaaggttgcttttatagcaggtccttaagtactccttttgaaattcctcctttttttttaagtcataccattacttctttggatatgaatgtcccaagtggtatctcctactgtagtatgaggaagaatggctgttaatgtattttttgaattttggtcttgtcttggcctggatcatatccagtcaccactatgcaacaaatgatgtgcactgggcaaggatatgatgggttatgaaagctgtatcttgtttgttttttcttttgcagtactccaagtggtctaaacaggaatgtcttgtaaaacctcaagactccctattgattattcccttacatatttatttacaattt

SEQ ID NO: 47836 - DNA, 448 bp, Homo sapiens
gggggactgaagctgagcggcggggagaagcagcgcgtcgccattgcccgcaccatcctcaaggctccgggcatcattctgctggatgagttctcaagcccaaacaaggctcttgtgtattcttgaggcctcagccagcagcctgcctccttccattgagggttttgagtggcaggagcagttttacctggaccctctctataggcaacgtcagcgctggatacatctaatgagagggccatccaggcttctctggccaaagtctgtgccaaccgcaccaccatcgtagtggcacacaggctctcaactgtggtcaatgctgaccagatcctcgtcatcaaggatggctgcatcgtggagaggggacgacacgaggctctgttgtcccgaggtggggtgtatgctgacatgtggcagctgcagcagggacaggaagaaacctctgaag

SEQ ID NO: 47837 - DNA, 1650 bp, Homo sapiens
ggaagcgtgcggtgccgcagcaatggcggcgctcacaattgccacgggtactggcaattggggtttcggctttggcgctcggggtgactcttctcaaatgccttctcatccccacatagtaagggactcgcacggccagccattccacagattttgaagtacaccgaaactggcttgctatcactcacagtttgccaatatcacagtggtattatgaggcaacttcagagtggacgttggattacccccctttctttgcatggtttgagtatatcctgtcacatgttgccaaatattttgatcaagaaatgctgaatgtccataatttgaattactccagctcaaggaccttacttttccagagattttccgtcatctttatggatgtactctttgtgtatgctgtccgtgagtgctgtaaatgcattgatggaaaaaaagtgggtaaagaacttacaggaaaagccaaaatttattctgtcggtattacttctgtgggacttcgggttattaattgtggaccatattcattttcagtacaatggctttttatttggattaatgctactctccattgcacgattatttcagaaaaggcatatggaaggagcatttctctttgctgttctcctacatttcaagcatatctacctctatgtagcaccagcttatggtgtatatctgctgcgatcctactgtttcactgcaaataaaccagatgggtctattcgatggaagagtttcagctttgttcgtgttatttccctgggactggttgttttcttagtttctgctctttcattgggtcctttcctggccttgaatcagctgcctcaagtcttttcccgactctttcctttcaagaggggcctctgtcatgcatattgggctccaaacttctgggctttgtacaatgctttggacaaagtgctgtctgtcatcggtttgaaattgaaatttcttgatcccaacaatattcccaaggcctcaatgacaagtggtttggttcagcagttccaacacacagtccttccctcagtgactcccttggcaaccctcatctgcacactgattgccatattgccctctattttctgtctttggtttaaaccccaagggcccagaggctttctccgatgtctaactctttgtgccttgagctcctttatgtttgggtggcatgttcatgaaaaagccatacttctagcaattctcccaatgagccttttgtctgtgggaaaagcaggagacgcttcgatttttctgattctgaccacaacaggacattattccctctttcctctgctcttcactgcaccagaacttcccattaaaatcttactcatgttactattcaccatatatagtatttcgtcactgaagactttattcagaaaagaaaaacctctttttaattggatggaaactttctacctgcttggcctggggcctctggaagtctgctgtgaatttgtattccctttcacctcctggaaggtgaagtaccccttcatccctttgttactaacctcagtgtattgtgcagtaggcatcacatatgcttggttcaaactgtatgtttcagtattgattgactctgctattggcaagacaaagaaacaatgaataaaggaactgcttagaaaaaaa

SEQ ID NO: 47838 - DNA, 686 bp, Homo sapiens
tgatgaaagtgttccatatattttttatagtgatttttcgatctagagacccttcatattgtttacttactattacgataactttgagaggtaaccagagaaagcatttttgccatttccagatgaggaagcaggaccagaaagctcttcataaagctttaacaccatacaagtatccagcagtgatcaattgctctttataggaaaccacctttcctctggggaagaacagtctgaattaataaaacatcagagtggttgagtagtaaaaataaacacagatgtattgttttcaagtcttagagtgacataaagtagtcttaaataaatagttcttagtttattttaagcagttgattgtactaacgagatgtaattatctgaagtatttatgattagcatattggtttttataagtatttctgagttattgagggtgcttaaaaatgctgaagaaactttaaaacatgattcttcttataattttatgtgattcttatagcacaatcatttttgaaaaaggaaaactaggctgggtgtagtggctcatgcctataatcccagcactttgggaggccaaagtgggtggatcacccgagttcaggagttcgggaccaggcctggccaacatggtgaaacctcgtctctactaaaaattcccaaaattatccggtgtggtgacaggc

SEQ ID NO: 47839 - DNA, 451 bp, Homo sapiens
ttttttttatgatttttttaacccttttattcaatacaacattttgtttgcaatgtaaaagatcttatatttggtccaagcctaagtcatgccactttgaatctctcaaggccttaagtagaaagatatttcctgaaaagcacacataagactgctagtgaatcttctccagcaccaaaaagtctgccactgtcaaagcagaatgcattttaaaggcacaaagtcagcagtctgaccattttccagcgtcagcaaagaagcattacagtatagaagaatcaattgtgcatttaagaaacaaaacacatttagagttatcttaaaaagttcaaattgcatttgttgatccatatcattattagaaagaagaaaaaaacggagtgttatatttaacttcccctgataaagctgtttcctttcaaaaatttcttttttaaatttacttttggtc

SEQ ID NO: 47840 - DNA, 829 bp, Homo sapiens
  misc_feature (1)...(829): n = a,t,c or g
gacagcactcaaaacgtatttattgaatgacaatttcttagtacagtgtatactatccccaccaaaggaaaaaaacattaagagcaaaacaagttttggggggtgggaatattgctaaagaaaattctaataagagttatctataattatagcttttatttattatatcttcattcaatcatttattcacaattagtctaattgcattcttgatgaataactgacttcagcaaaggagtcaatccactaagcaaagttcatttatttttcatgatgttcttctttcgatcttgagtctttactctcctggattcccaagagaactgcattagcctctagtacagttgtatctgttgttgctcccaggaacctagacgtaagttcaagatctaatagccgcaaccggaccctggttcctttctggtatttctctccatccacttctggtcttctacatacacaatgaaactttccaccaaaatctatgtacagatcattctccacaatatgaaagatccgtccaatgaccagtttatcctttgcaggtcccatctgtgtaagaggagaatgtctcagcatagatgcaaaggattccacattttttggagaacccttctgtaggggctccaccttctgtagaagctccgagtgccgctccatacgcgctcgcgaaaccgcctgcgcgcgtcttaggctccttggcattggaactaccactttcggatccactctcagtgcctacaccccgaaagggcctgaagaagagaaacactcgcagaaaatggctctcggcagccacagcacgggtccgacacagngccgccatgac

SEQ ID NO: 47841 - DNA, 1981 bp, Homo sapiens
gtgtgttgcaccaggcactgctgcacaacaagatacgctcgccacagtccttctttgacaccacaccatcaggccgcatcctgaactgcttctccaaggacatctatgtcgttgatgaggttctggcccctgtcatcctcatgctgctcaattccttcttcaacgccatctccactcttgtggtcatcatggccagcacgccgctcttcactgtggtcatcctgcccctggctgtgctctacaccttagtgcagcgcttctatgcagccacatcacggcaactgaagcggctggaatcagtcagccgctcacctatctactcccacttttcggagacagtgactggtgccagtgtcatccgggcctacaaccgcagccgggattttgagatcatcagtgatactaaggtggatgccaaccagagaagctgctacccctacatcatctccaaccggtggctgagcatcggagtggagttcgtggggaactgcgtggtgctctttgctgcactatttgccgtcatcgggaggagcagcctgaacccggggctggtgggcctttctgtgtcctactccttgcaggtgacatttgctctgaactggatgatacgaatgatgtcagatttggaatctaacatcgtggctgtggagagggtcaaggagtactccaagacagagacagaggcgccctgggtggtggaaggcagccgccctcccgaaggttggcccccacgtggggaggtggagttccggaattattctgtgcgctaccggccgggcctagacctggtgctgagagacctgagtctgcatgtgcacggtggcgagaaggtggggatcgtgggccgcactggggctggcaagtcttccatgaccctttgcctgttccgcatcctggaggcggcaaagggtgaaatccgcattgatggcctcaatgtggcagacatcggcctccatgacctgcgctctcagctgaccatcatcccgcaggaccccatcctgttctcggggaccctgcgcatgaacctggaccccttcggcagctactcagaggaggacatttggtgggctttggagctgtcccacctgcacacgtttgtgagctcccagccggcagctgggagcttccagtgctcagagggcggggagaatctcagcgtgggccagaggcagctcgtgtgcctggcccgagccctgctccgcaagagccgcatcctggttttagacgaggccacagctgccatcgacctggagactgacaacctcatccaggctaccatccgcacccagtttgatacctgcactgtcctgaccatcgcacaccggcttaacactatcatggactacaccagggtcctggtcctggacaaaggagtagtagctgagtttgattctccagccaacctcattgcagctagaggcatcttctacgggatggccagagatgctggacttgcctaaaatatattcctgagatttcctcctggcctttcctggttttcatcaggaaggaaatgacaccaaatatgtccgcagaatggacttgatagcaaacactgggggcaccttaagattttgcacctgtaaagtgccttacagggtaactgtgctgaatgctttagatgaggaaatgatccccaagtggtgaatgacacgcctaaggtcacagctagtttgagccagttagactagtccccggtctcccgattcccaactgagtgttatttgcacactgcactgttttcaaataacgattttatgaaatgacctctgtcctccctctgatttttcatattttctaaagtttcgtttctgttttttaataaaaagctttttccccctggaacagaagacagctgctgggtcaggccacccctaggaactcagtcctgtactctggggtgctgcctgaatccattaaaaatgggagtactgatgaaataaaactacatggtcaacagtaaaaaaaaataaaaaaaaaa

SEQ ID NO: 47842 - DNA, 2190 bp, Homo sapiens
ttttttttttttttaagatgtaagaaaatatatttattttttccatgacaatactatgataaaattgttaaatacatgcatgttttaaaaacagacataagtaacatctttagagttaacagccaagcatactagttttacatttatggtgttttagtaatagattattttctatgtttttgctataatcatgttttccaaaagatacagaaactaaattctgaaattatacaatgatataaagtgtccaaatttcccattctaacaggcaatttaaaatccaaattttcacaagggcagggaaatgcttcagttatcatctaaggtggggggttgttttattccatattactctcagggattctgtggaatcaggactggaatcacacacatggtacttcatctataggttttcttcccggtatagggggtatttggaatgtttcccttaatacgattaaacatgattttagggtacagcacatcacaactgtttattcaccttaaaaaaatgtctgtagtggtaacatttcaagaaatgaaaaagggaacagtttggggatcccgcagtttctccctatcttctttcagctacatttacaagcatttgaccaaacaaaaattagtaaacagttactagtatttataaaaaacttaaaatatttaacatataatactcactttaaaaaaacattcattcctacaaaccttataaaagacagaaacttatatctgttcacagtatgtgtattttgtaaacagtaattcactataatgcaattttgaaagtaaaaaaaggtaatttcctagtgttataaggaccttgacttatggccagctaatgaaagagaagaaaacctaacatccttattaggaaagttaagtattttgaaatgatttattttacctttcaacatacttttaagatggtactatcttaaatctaggatgtctatctatccaggccaatcttttgcaagcaattctgaatttaaatgtatttaagaaaaagccgtgctcttttttgagaaaataacaggataaaacaaacgccaggaagggcatcaatcacataacacctacccctccacaacaatgaaaggtttctttttcgtgttgtctcccgctactcacaatgttattcatatttttcctaaatattgtgttggaaggaaaaattaaatacaaggaaacactagcttatgatatattagacaatttggggaaaagcatttggaatcaaactgggagaagaatgttttacaaaaattgtatgaaaaccattattcagtgttcttttctatgagcaattgcaaaaacactaatactaatgttaaacctaacagttaacttttccacgttataaatgaaaattgtactaccacctagagatattttgatcttttataatacacaactggaatgtttaggaaaatagttcggaagctgaaagttacccatttaaaatggaataattcttaacggaagtacactttaaatgtataaggaaattcaacaacttaagtgagccattcaatcacgtgtgcaaagtattttagtcttaagggcaacacataggatctatgttgttagcttttttttttttaaagttctgattggctactgtaaaggcaatcttagaagatgcatgtaaatataatataaatcaactttcttatcaattagacattttccccactcacatctcttagtttttagggtattcagtcccagcaaccaaaaaaaaaaaatgtaaatcatattttgtttctggctaatgttcaatcagtttttcttttataagagcttttgatgtactgtttctacgggttctttagggcacttacacataaaaacattcagaggggttttccccttaacacacaacttttaattctcatggaaaatgttggcacagttagggaatttgtcttgcataggggtaaattctgtttataacatggactctgataatccaaatattaacattccctaatatagggaaaaataagcaccattcatagctaaaaataatagaatcctgtcataacccaatatcataattacaaggatctggatatattctagaccaaatcacactccctgaaacattaccatgtacaataaagcctgaaatagccaactaattgaatgttattcttaatcctttacactggcactaaaaatagt

SEQ ID NO: 47843 - DNA, 201 bp, Homo sapiens
gcggcacgagcggcacgaggaaaccagttctgatcacctatccctacatatccttcttcactctgccctggcatatcatggttgatgtacatagcaatgatcatcccttctgtaatcccacttgacagtttaaaagtggattgataatactcttctggcttaaaacccttcttctctgggcaggtgtggtggctcctgcat

SEQ ID NO: 47844 - DNA, 9680 bp, Homo sapiens
  misc_feature (1)...(9680): n = a,t,c or g
tccacacccctggcggttccaggcaggctacgccacgcgacccctcccgtttccctgctttggccaatggaggagctacgaatggcacgacctgctcgagcttggcagtctccagttgggctgtgcatggaagcttgggaagactttgttggaaggggaggcggggagagagtgctggaggctctggggcgatggcttccgcacctcttccaaccaccctctttccctggagtcggcggaccacagctcagccaattggcttggagatgtggcgggttgccacttccctgtgggtctctgcggcactcttctgcctggtgactgacaccttggaaatgaagtttatgacgtcatcgttgcggctggccaatagaaaaagctcccgcggagaggtgttccttccccttcgactcagcttcttcacccgcgtgagcgagcgcgcgcgcgcggagggggtggggaaaatctcaagcagggtggcgcgcatgagcggcgaagctcctcctccccgcctatatataaagggctggcgcggggctcggcggcgccatttcgtgctggagtggagcagcctctagaacgagctggaggattctgcctaccgatacagagccttcgagtcgtccggggccgccattacaatccacctccatccgcttggaaatggccttcgtcccggcctatgactggtcccagcgggcagtacagaccccctagaagcccctggagctcccctttttcgggccccgcccaatcctcggagtctgtccaccccctctactccgccctcaagaggatttcaaagatggaggcggcggctccctaaaccacttttcgtgttcatccgcctccatccgagatcgaaacgggacctcgtcggccccgtaggggcccgacaagaagagggaatccctgcagaccaacagcgggctatattgacgacggtgtctgagatcggggaccgtcttttgaagagtcagtccctccttagttgcccgcctcagctgaggccgccgccattttcttgctgtccgccgtctgcagagcgcgccaagctgcccggagctctccgagaggccccaaagagactgctttcgtgccggccaggcagggggtttgtcgcctggaggcccaagaggaacggcctccccccaacttagcgggttatgctggaccgggcggtgaggggaaccgaggccacccggactttccgcggctgagggcagcgccggttccttgcggtcaagatgctgcaaaacgtgactccccacaataagtacgtttccgcgagccgcgtgtgggaaggggatgttgcagggcggcggcacaggggtgtggggcgccgtgttgggagtactgagcggccccggcgcgctgctgttgcggcgcagctgtcgactcggtcgcgcggagggaattgagcgacggttttggaacggtggtggcggctcggctactgctcgtggaggggaatacaggttgtcaatttatacgctattaatgccgccgtggcccagtcttaaccgagtcaggcagagctagtttgacggtggagtggagtgaggttgaacagcaggtttggcgtttggtgggtctggtatctagcggcggtctgttagccttttaggggggattcacggacacctctagcgccctgtagggttgccatggtgacggagcgcttaagggactggcaacggggattcccagagaagggtaaagggatcactctcccgtgtgtgcaggttcctaatgcccagggcatgtcattaaatcttttgctttctttgggtgggtgggttgtgtgtggtgtttgttggtgcagggattgttttttcctaacattaaaagtttgattcagggcaggagggtagagctaaggttcctagttcagctctgcgatgtaaacaatgagattcccatatgatgttttaattcttaggtggtaggaaagactgatcggaggagcaccagagggactgtaaatgaaccactgttagcgtttggtgtccggagttggtgctacagggggaactggtagtggaatcgtgttgtgtagtgggtgggtggaagggggctatcacttggtgaccttgactgttttgtacggctttttgacttccttggagtgaggagactctgatttggtgcgaataattttgagggcctggaagttacgggctgtgaagtctgacaaattcttccttgtctgaatttgtttttaagttgatatggttcttcctctgggtttctagtctatgttctgttgtggcgtgaactacccagaccttgtggaagatggtgctctctcttctatctaggtggattattctgtgtcttatcagcattttatggaattttttatagccataatttgttcttttcctccttaccggcgctcaaccaccatggcaaccaccaaacccctagtgaggaggaagcttggggtttgagtttcttaactccacccattttgcttaatccccatccccatagggctgtagttctgagatgtcgtgccttgtcagaaacaatttgggagttttttaaaatatgaaaaagaacagatagagcctatcagacttaagaaggtgggatctagatagtatactaaaaatattaataaaaggaaggcggggccagcaataaaagctccacagattgtttggatattgtttctgcttaagaagcacttggcataagcttaaccacctcactagggccagcacctggattcatcagactattgtgcagatgcactttttcctcatttggacgatattgccctaattttgttcccatctttacaggctccctggggaagggaatgcagggttgctggggctgggcccagaagcagcagcaccagggaaaaggattcgaaaaccctctctcttgtatgagggctttgagagccccacaatggcttcggtgcctgctttgcaacttacccctgccaacccaccacccccggaggtgtccaatcccaaaaagccaggacgagttaccaaccagctgcaatacctacacaaggtagtgatgaaggctctgtggaaacatcagttcgcatggccattccggcagcctgtggatgctgtcaaactgggtctaccggtgagtagagacattggagccggggaggtgtgggatgagcaagaatgcgtgtgaatgggggtggtctgcctagtgtagatgctgcggcccctagggagttcccatttctcccctgtagggcagttagctaccagatttctgggtatcttggtcctttgtgattgatccgaccgcttgctgtaactatcttggcatctttccttgtgccctccatgtgtccttccttaacttttgtgccctggctccattttacagattcccacctcgggttgggagaggaccacggtggccaaaattcttagcttcttcctttccctcatgcagcccatggatagccagccccagaggtaatgtcacaggatgggaagtttccagagtgggtgggaggtgggtggttagagaaaggcagcaggggcctccctgtggatgtcaagaatcttttttatttatttatttattttgtcccacagtttaattggggccgcagtttaactgttcctttgatgcatagnnnnnnnnnnnnnnnnnnnnnnnnnnnnnnnnnnnnnnggatcggtagtctccctataagcatttatttttctgtggttctgacctaacatttctttatttaggattatcacaaaattataaaacagcctatggacatgggtactattaagaggagacttgaaaacaattattattgggctgcttcagagtgtatgcaagattttaataccatgttcaccaactgttacatttacaacaaggtgagtttttctgtgtgttcatttagtaggtggggagaaacagtaatttctattattgctggatatgttgtctacataaagtttaaatcctttgctactgaaggtgttatccaggtagggtagtcggagtcttaaaaacctgactctagatggtactattgaacacagtgatgtgacttcagagctctagttgaaggttatttagaacacttcatacttgggggtggtggtcctgtttcttagaaatcaccagagacctgagtagaccagggatctgttttcttgtcagctctcaagttttttcttctttcgaattttgggagacagttaggagaaagtggaaattagtagtggcctggagtagaaattttctttaagatttgatgacaagatgactggtgggggtatggtaatggcctagggcctgaatgcctctgagaaagatggtgtgtatctatcttctgttggcattttttaactttctttattgctgtctgtgttctcatagcccactgatgatattgtcctaatggcacaaacgctggaaaagatattcctacagaaggttgcatcaatgccacaagaagaacaagagctggtagtgaccatccctaagaacagccacaagaagggggccaagttggcaggtaggaagagtgggagttttgcaaatggacaacttaaagatggggaagagaatcaaactacacttttttccttttttctagcgctccagggcagtgttaccagtgcccatcaggtgcctgccgtctcttctgtgtcacacacagccctgtatactcctccacctgagatacctaccactgtcttcaacattccccacccatcagtcatttcctctccacttctcaagtccttgcactctgctggacccccgctccttgctgttactgcagctcctccagcccagccccttgccaaggtatgatctgtggatttcctctgggcagcagggaggcaagggtcttaagtaaagtgggcttggagtgacaggttccctatcttgtttctttctgcagaaaaaaggcgtaaagcggaaagcagatactaccacccctacacctacagccatcttggctcctggttctccagctagccctcctgggagtcttgagcctaaggcagcacggcttccccctatgcgtagagagagtggtcgccccatcaagcccccacgcaaagacttgcctgactctcagcaacaacaccagagctctaagaaaggaaagctttcagaacagttaaaacattgcaatggcattttgaaggagttactctctaagaagcatgctgcctatgcttggcctttctataaaccagtggatgcttctgcacttggcctgcatgactaccatgacatcattaagcaccccatggacctcagcactgtcaaggtacccactgcatggggcagatgggatgctcaagcagtgatgggagcctaggtgcaaaacaataagtctccttatgtgggcacacagcagtctttggttcttggcattttacttttataaaataatagtggaacagaaggtctggtgttttgagaatttgtatttcttggagtttgaaacagtagggtggggtttctttgtcttgagaaaaatactgtctataattaagtactaatgtggcagtgttgggttaaggaagttatagggtggaaagacaggcataggccacctctctgtcacttagaaatgatttctttttctagacataaatatttcttcaacccacccaaattcctttgacttcaaacttgaaccccaggggcacagatccttaaggtcatccccactgtgctctcaagagagggctcttcttgtggtgtctggggttggcagggaaaggtgagtcttcctgcctgtgcagcttctgatgctgcctccttctgcagcggaagatggagaaccgtgattaccgggatgcacaggagtttgctgctgatgtacggcttatgttctccaactgctataagtacaatcccccagatcacgatgttgtggcaatggcacgaaagctacaggtgagtggaaaggttggagtttgaaaaataaatggtatggggagttattttgtcatgtgtgctgcatagcctcaacgtgagggtctcactgttctgtacagttgtaaattggagctatatcacttggtggctgggtatgtagggcactgtttatcagcatagttttgagtttgtgcctctttctaggatgtatttgagttccgttatgccaagatgccagatgaaccactagaaccagggcctttaccagtctctactgccatgccccctggcttggccaaatcgtcttcagagtcctccagtgaggaaagtagcagtgagagctcctctgaggaagaggaggaggaagatgaggaggacgaggaggaagaagagagtgaaagctcagactcagaggaagaaagggctcatcgcttagcagaactacaggaacaggtattttgtcactcttgaaagtttttattgggtaagaggttcatgccctttgtcctcattttttcttcttgttattttatctttatttactttttccacttcatgttttttttcctttagcttcgggcagtacatgaacaactggctgctctgtcccagggtccaatatccaagcccaagaggaaaagagagaaaaaagagaaaaagaagaaacggaaggcagagaagcatcgaggccgagctggggccgatgaagatgacaaggggcctagggcaccccgcccacctcaacctaagaagtccaagaaagcaagtggcagtgggggtggcagtgctgctttaggcccttccggctttggaccttctggaggaagtggcaccaagtgagttagagtaggaagcagagactagtttggctatttctgtctctctgggggatgccatctctctttgcaaagataattctaaatggccagttaacagatacaataggctttgagnnnnnnnnnnnnnnnnnnnnnnnnnnnnnnnnnnnnnnnnnnnnnnnnngattttaccacagacagggtttgaggggatggtnnnnnnnnnnnnnnnnnnnnnnnnnnnnnnnntgggcnnnnnnnnnnnnnnnnnnnnnnnnnnnnnnnnnnnnnnnnnnnnnnnnnnnnnnnnnnnnnnnnnnnnnnnnnnnnnnnnnnnnnnnnnnnnnnnnnnnnnnnnncagtgatgcccacatgccggctgttcacctcctgcgtagcccagtaacaggccacggactggtactggtctgggggttgggacccctggctttgggagtcagggtgtttcacagctactctgacagtgaactcaaagtagccataaactagaaacatgaagatggctgtgttccaaaaagactttatttgcaaagacacgtggcgatcagatttgttctctgggccatatagtttgcctgttgctctaaatcaatgagtctagacttgtttttcatggcgtagtagttttgggttttttgnnnnnnnnnnnnnnnnnnnnnnnnnnnnnnnnnnnnnnnnnnnnnnnnnnnnnnnnncnnnnnnnnnnnnnnnnnnnnnnnnnnnnnnnnnnnnnnnnnnnnnnnnnnnnnnnnnnnnnnnnnnnnnnnnnnnnnnnnnnnnnnnnnnnnnnnnnnnnnnnnnnnnnnnnnnnnnnnnnnnnnnnnnnnnnnnnnnnnnnnnnnnnnnnnnnnnnnnnnnnnnnnnnnnnnnnnnnnnnnnnnnnnnnnnnnnnnnnnnnnnnnnnnnnnnnnnnnnnnnnnnnnnnnnnnnnnnnnnnnnnnnnnnnnnnnnnnnnnnnnnnnnnnnnnnnnnnnnnnnnnnncatggtgtagtttggtagtgtttaagggagcagaaagacccatgtcagtatacctaaacaggtataccttgttttattgtgcttcactttacggagttttttttagatactacttttttttttagttgaagatttgtgacaaccctgtgtggagcaagtctttcaacagtttttccaacatgtttgtgtgtcacatttttagtaatattttttcattaaggtatgtacgtacattgtctttttaaagacatgttattgcctacttacagtcaagagcaaaatgctctgtttcactatacagtgtcccagtagcccacctcttacttggccattgaatggaaaaacagaagctccactctgggcaggaaataggatcactgaattataacagtgggaacatactggaagaggttaatgaagcttcttttgctgacaactctttttgcccttaggctccccaaaaaggccacaaagacagccccacctgccctgcctacaggttatgattcagaggaggaggaagagagcaggcccatgagttacgatgagaagcggcagctgagcctggacatcaacaaattacctggggagaagctgggccgagttgtgcatataatccaagccagggagccctctttacgtgattcaaacccagaagagattgagattgattttgaaacactcaagccatccacacttagagagcttgagcgctatgtcctttcctgcctacgtaagaaaccccggaagccctacagtacgtatgaaatgaggttcatctcatggttctgaggacagttgaggaaagatggtggggtctgtttgcattcaggattgtcagctcccaggataatgggatgtgttggttggcagctgacgttcaagaagggaacttgggaaccttaggggcccataataagatgcttggggcaatcttaatgtatcctgataaatttctttcattagccattaagaagcctgtgggaaagacaaaggaggaactggctttggagaaaaagcgggaattagaaaagcggttacaagatgtcagcggacagctcaattctactaaaaagccccccaagaaaggtgagtatatactttcatgccactacagattgactccatcctgccttcttgactgtcttttattgacaaatgaagattcagacttgaacgtctttaactttcgaatttgttctgcagcgaatgagaaaacagagtcatcctctggcacagcaagtagcagtgtcacgccttagcgcttccagctccagctcagattccagctcctcctcttcctcgtcgtcgtctttcagacaccagtgattcagactcaggctaaggggtcaggccagatggggcaggaaggctccgcaggaccggacccctagaccaccctgccccacctgccccttccccctttgctgtgacacttcttcatctcacccccccctgcccccctctaggagagctggctctgcagtgggggagggatgcagggacatttactgaaggagggacatggacaaaacaacattgaattcccagccccattggggagtgatctcttggacacagagcccccattcaaaatggggcagggcaagggtgggagtgtgcaaagccctgatctggagttacctgaggccatagctgccctattcacttctaagggccctgttttgagattgtttgttctaatttattttaagctaggtaaggctggggggagggtggggccgtggtcccctcagcctccatggggagggaagaagggggagctctttttttacgttgatttttttttttctactctgttttccctttttccttccgctccatttggggccctgggggtttcagtcatctccccatttggtcccctggactgtctttgttgattctaacttgtaaataaagaaaatattattcaagttttgagttaccttaaaaaaaaa

SEQ ID NO: 47845 - DNA, 545 bp, Homo sapiens
  misc_feature (1)...(545): n = a,t,c or g
ggtcattcatgacttttcataagaagtttactgtttaggtaagcaaaacaacacttagttcagcttgatactcaagcatcgggttaaaaagcatcagacttctgttaccagacaacttataagtgccaactattggtagaactgtggacatgaagatagtggaaacagcttctctaggatgctatactcatctccaccaaatgcactttgaacaaaaacaacttgtagaaataggtcttaattttttttgtttgtttgtttggtttttttacaacatgctgtactgctctccattggtaagtgctagggaaaatcacttagccactagagggagctataacacaaaattaagcaggaaataatccccattatagatacatagaacaaagtagagaccagctaactaccttgatcctctgtatgcagctcttaaagttaggatggtttgggtaagttttcttggcaacttttacccttgtctttcccatctttttgtgtaaaaattgcttcccccttttgnggctttttgcatccctttaggggtt

SEQ ID NO: 47846 - DNA, 682 bp, Homo sapiens
agagaaagatgtcactgtctctaatctccctgtcatttttatttccagcaggcgcggggcgaaggagctgctagaacaatgctgaggcgggtgaggtgaggagcagcccctcgcggcagccccgacagagtgtctggaacaggtgattggaggagccggagacccaggcacctgggcatccttcccctcgcctctgccaggccccgcgcccctaaaaggtgggaaaaccatggcgaccaatttcagtgacatcgtcaagcaaggctacgtgaagatgaagagcaggaagctcgggatcttaccggaggtgctggctggtgttccggaaatcctccagcaaggggccccagcggctggagaagtatccagatgagaagtcggtgtgcctccggggctgccccaaggtgactgagatcagcaacgtcaagtgtgttacgcggctccccaaggagaccaagcggcaggcggtggccatcatattcactgatgactcggcacgtaccttcacctgcgactcagagctagaggcagaggagtggtacaagacactatctgtggagtgtctggggtcccgcctcaacgacatcagtctgggagaacctgacctcctggccccaggggtgcaagtgtgaacagacagatcgcttcaatgtcttcctgctgccctgccccacctggacgg

SEQ ID NO: 47847 - DNA, 1618 bp, Homo sapiens
ttttttttttttaggtttgaaatatctttttgcaatagataatcttatttacattaatacagaatcattttacattcctaaatcagacactaatagatgctttattttagtgaattataaaggaaaacaaaaaggaaactgttgagaagtgttcttcattaacctgtctaacgacagcccgaagatcctgaaacacatggaaactgcgacatgctaccagcagaggctggggaatgggggttctgctctcactgaatggtggggaaccttcaactgcttagcctgtgctttccttttctgaatcaacatttacaaaggaaaaaacaatgattagcactgaataatttaaacacacttcagaaaatagatgtcaacagtgtaagtgggagaaccaagcccctgactagcaacagtggcagggcttcagttcccaaggcagctgaagtctggccagcacagtgctgcaatgggctgtgggctcagccggagggcaggagccctccatgcccggttacaacaacaggactcaataggcaggggcagggggccatcctggatggggtgggagcaaggactgtcatctgacaaggatcaccacccacacggtcagagcagaacccccagggactctctgggcctctacgtgcctcccaggcaccgtactgtgcagctgcttggtaccccgggaataaaaactaactgagcagagcagctgatgcctcggcagggcccctcattaggggaggacggtgctggtggggcctgggggccccacgctcccagtgaagacaacctgtcaggaagaactcattctggaacctcccggaggtttgctgagaaggaaattaatcacttcgtaacttgatgcagcttaaggcttcatttctaagctgtaagcatggcctttaactaagatatccacaatattcaattccaaattagagttttagccctgcaagagtctaaccatctccctctgcctgagccaggggccgtcacctaccaatggacaggaaactgccaccagcctctggggctgcatcctactgcccgggctgtccactgtgacctttccgtggagagaggtgttgtcccatgattttgctgttgccaaggccgtccagaggctctgcgggtgggagctcagtgctgctgttctggaatcctcccgtctcccaggtgccctggcccttggaggggctgctgcttcccggcctagtttccagtggatctttttccagagctggtgagggtgacgccgttcaccgtcccctccacatctgtctcgtcctcggcgtagctcaggatcaggctctgctgccggctcgttagcctctttggaactcgtatcttgatgtggatgtagtggtctccgtagccgtagctgttaatccgggggatgcctttcccacccatccgaatcttctggtctgtctgagtcccaggggggatcgtcacgttgatcgtctcgtacaggccctgggctctggctgttcccccaagaagagcctgagctatagaaataaagaggtcggagtggatgtctgcgccgtcctccggaaacacagggcttttctgcaccctgaacgtaatgaaaatttccctttttcccacaggc

SEQ ID NO: 47848 - DNA, 430 bp, Homo sapiens
  misc_feature (1)...(430): n = a,t,c or g
annttgaanacancttgactgattacgaatttaatacgactcactatagggaatttggccctcgaggccaagaattcggcacgagggattccatccacgtggtagaagtgcaggagaaatccagcggtcgcaccgcccattacaagttgacctccacggtgatgctgtggctgcagaccaacaaatctggctctggcaccatgaacctcggaggcagccttaccagacagatggagaaggatgaaactgtgagtgactgctccccacacatagccaacatcgggcgcctggtagaggacatggaaaataaaatcagaagtacgctgaacgagatctactttggaaaaacaaaggatatcgtcaatgggctgaggtctgtgcagacttttgcagacaaatcaaaacaagaagctctgaagaatgacctggt

SEQ ID NO: 47849 - DNA, 1061 bp, Homo sapiens
tttttttttttccttttagtaagaaaaactttatcaaaaatttaaatatataaaataaggccagagcgtgacactggaggcccacttcccagtggtgcactgctgcgctgggtgtccctatgcagctagatacatgttaactgcatagagtaccataaaggagcccactggtgagcttcactgtcacctggccctgctggctggggcttccattgtctactgggtctgtccacaccccagattgccttgtggtcctttcccctggccaagaagataacagttttttaaaaatccccttctgatatggatgtgagcaagcagtggggttcagtttgggaccaagcagtgccatttacaaagagcatgggaagcacctccttaggaggggaagcagggccatctccacgttgtcaggggccgcgccgttgcctgccagaccctgggcccacttgtgcaggcggctgtagagtgggaggccctgggttctcacggtacaagtagacgccggtgatggcattccactgtggccgtggctgcgtgccttccactgggaagttggcaatcagttcctcatcatccttgttgagcgccacaaagccaaagaagcggcgcacattgttggcaacgaacaccccaaaaatgcaacctcggccgtgcgctggaacagctggtcctcaattgcgcggtactgcgcccaattaggcctcctggcggtaagctgagtggtgagcagtaatgcttgaggcacttggtcaggaacacccaggatggccaccacgccgatgagcagccatccaaagagctgggactcataccctgactgcggctgacctcctcccggaagtctgacaggttgtcagggttctccttgcaggggaacctggccaggatttcagtggcgtgggctgatgggaagtgctcttccctggccgtgagtgaggaagggtccacgaactcactgagagcacagacataagcctcaccacgcagcagggagatgacagaccaggtgacaggggccacagccgcacgtcccaggatggagcttagaaaggaggaag

SEQ ID NO: 47850 - DNA, 1567 bp, Homo sapiens
tttttttttttttcaaaaaccgaaacatttaattttttctccccaaaccaagacgctgacactagcctgagttcccctaacaatgttattttctacaacagaagctgggacagaggaacaaacacagcccactcaagcagtggtggcaacattctgttagaaaggaggggagtcaaagaaaaaaacacccctccgcccatctccttatcacctccctaaagacagaggagaacatggacaccctccatcctgatagacatgccatgtggtcagtttgtgcggtaaacaggaaaaaaaaaaaacctaaagatattgtagacctttattttctttaaatctcctaataaaaacattaaactttcaagaagattccaaactgacattgcatagaccaactcctttccaaaaatatctctgatatactctccaactctctcaatatatagaatttgaagtccaggagctgtgggcacctggtgggaattcactgagctcaaggggacaagagggctgaggacagggctcccacatggggacaaggccaggctttctggcctctggttccagccagcatcaatttggttgtggccaaattctcagtccaatcaccctgggcccagggcctggcgtgggaggatgtggcaggctctgtctccttctggggttcctggtctggaggagtctccccaacagcgccaaagctggctgttttccgcccaaagccccagaactttgaatgagaggcaaatctaccctgaatgcacctccctcctaggctgggtgaggtcacgcagacacagaagggcaggacagaactccccatcttctgggggccaattcgtctggacactgtgcggtcagcttcctttttaaagtgccagtatcggtggggcaggaagggactctcagggctgagcagagccttctccagcgcgagcaaacactctgtcccgcctcggcaggcaccttctaacattcattttctaagggttaggtgagtaaaacaacaacaacaaatgctggaaatgctctgttcccaatgccagggagttccaagaccaagaagcccaactctcaccagcgggggcagatggggagctagggaaggaaccctcccagcctggggagggcacctgcacccctcccagagagagaagcccccatcccggccccccagctgggccccagcgctgctggaaccagccggcaggtggggcagaaaagcagcacctcccctcaccagggcgaggaggcaatattgaaccgtgaactcaagaagaaagacggaaagaaaaaatgaaaaaagctacagggctaagtaaacaccagcctgctgggtttatacaaaatgagtgaaatttaaaaggggcaggagagtttgtccagggactggctggcagccagaacccaccttcaagcaagttacaaggacttgggggaaagtgctgagagcagaggctttagtagggggcagggccagactgctccccactgggaaagcacaccccttaaaggagcccttcccccttgccaggaacgggggatgcttccagaggaaggctgaggc

SEQ ID NO: 47851 - DNA, 605 bp, Homo sapiens
tgattattcaggtctggaatatggctcaggattcttaattttcaaccaacacaatatagaatcctgtcagttatccttggatcatttgctaagtgatcttgcaaaatcaaaactcctttgagactatttcattttcagaaatattttaaaacttgttcagaaacatcttaaaacttgttagcatataggaaaagtacaatgcttggtgtaggtaggttattatttggtcatttccctcaaaccatccagacaagccactcttctaccacaagctggtagaaatccttaggcacctttctgcttctgcactgctatcactttcaggtgtctaaggcttctggaaggctgttgttcataaccgggagccatacacctaatgtacgtctgggggaaaggacaccaattaaagaatctagagctaggatgatgttacataagacagggcacaatggagatggactctggatccctgcatctgaaagaaaaaggcaagaaaatgcagggcagggaaaatcctgaaggtcttcactgaccatgaattaaaatcctaattgacagttttacaaacaaaaaccctcgttttagtacttgtgttgtttttgttt

SEQ ID NO: 47852 - DNA, 1308 bp, Homo sapiens
tcgagtttttttttttttttttttttttaaactatttaattcactcctttattctgggatgtatattacagataacacaactcacaaatataccatcagacattgaaaactaaggccattctgtgacttatttttaaaacttggtgttttgcacataatgatcttaaaaaaaaatgaattaccaaaaccaagattctcttctaaaatgaaaatttaatgcaggtacaggataactttagggctatatctaatctgaagcttatcaggtagcaaaaccattttcgttttctacagcataaataacagctctaaggcaaccactacctcagcatgaagctcatttctccacgttagagtagtgtttacctgctacagtgaccagtgtttagagaccatttccctttcagtagcaaaaagagactttacctaagaaacacactacatactacagaatccttggaacaagaaacagaaaggggagctgtaactaaggcactggaaagcacattatttggtataaagaaatgtaaacaatttaacaccaacaggctccctccgttggagtctttattgtaaatgcacacaggggcatcatagtcagggctagagtttgaagtctgggtgaaacaaatgtttctgcagagttcagagtcttggctgccaatatatttctaacatggtgctgttgaattaactatttcaaagtgactcaagtggaagctggtatttcccttgaatctgagttttaatagcattaacaaacaaggaagaattttataggagtcctaaaattatgggccccttccctaaacatttatttggagtcctttttatcaagttcttctaatgaattttaggattattttggcttatttcatcaaggaagtttggtgtaagaacttgttacctaatgagtgcccctccttgtaagttcatatttcaagttacatggttcatgccataaataaaccacacttgctttaacatcgttcagaatggtacatttaacaattggacatacagcactgtaaacaattcaaagtccattgagcttaccatgaaagaactgaaacgtatgtaggaactgtgtcctgctgcagacaagcagctgctctggctctggtgcggtgcggtgcggtgcggtgcggtgcggtgaggtgaggtgaggtgaggtgggcaggtgtggaagggagaattcctgaggccagtcacaattattgaagctaaattaatttcttcctgacactttagcattaattctaagtagttctaagttctaaaccattaactgtatagttaattttttta

SEQ ID NO: 47853 - DNA, 616 bp, Homo sapiens
aacaagtgcaaaacaaaggagtaatggcacctgaaattttggtgtcttccgagtgctctcttgacatacactgagatcagcgaattttcctaacagacagcttaggggcagccagaggctctttttccccctcctttcttccactcatcctctgaatatctcctcatctttccagaaaccactcaatgtccattgtattcttctgctgcccaactaggaggaaatttctacttctttctctgagctcctttagttctttgcatccttgattctgctcatatctggtccagagcctaccaggtgctcaggtgctcctggggctgacccagaggttgttgggaggtcagtggggacagatttagggacagtgtcacattccgctctgccatcccatcacctcagaaagactccagctacccagttggagtctaataaatgctggatgtatccagctggaagcctgggacagtggacccagttccagctgtggggaagatgactgcttgcccgtggccagctggggccatgcacaaaactgggaggccgcatctgtgcagggagcttgtgtctgagggtgttgacagctgttttctgcctcaggagaaactgaaaccag

SEQ ID NO: 47854 - DNA, 1394 bp, Homo sapiens
gcttggcacgaggcggacttgctggcagatgcttgctgggccctttcttatctgtctgatggccccaatgagaagatccaggcagtcatagactccggagtctgccggagattggtagagctgctgatgcacaatgattacaaagtggcttctcctgccctgagagccgtgggtaacatcgtcactggggatgacatccagacccaggtcattcttaactgttcagccctaccttgccttctccacttgttgagcagtcccaaggagtcaatccggaaggaagcttgctggactatttcaaatattactgctggcaacagggctcaaatacaggctgttatagatgcaaatatcttccctgtgttgatcgaaatccttcagaaagcagagtttcgtacaaggaaagaggcagcctgggccatcaccaatgccacatcaggagggaacccctgagcagatcaggtacctggtctcactgggctgcatcaaacccctatgtgacttgctgactgtaatggattcgaagattgtgcaagtggccctcaatggactggagaacatcctgcggcttggagagcaagagggcaagcgcagtggctcaggggtcaatccttattgtggcctcatagaggaagcctatggcttggataaaattgagtttctccagagccacgagaaccaggagatctaccagaaggccttcgacctcattgagcactactttggtgtagaagacgatgatagcagcctggctccccaagtcgatgaaacgcaacagcagttcatcttccagcagcctgaggcccccatggagggcttccagctataatatctgcctccagggaggggaggggatgggaagcaccaccagccagcggaagagcagccctctggtgggcgggaaaccagtgtccccaccatcagccaccacacacctctgctgccctggagactgtgctcttgacctgctccgcccccttccctggagggagcaccctctggacagacagaaccatctgaggctcacctttgggttttgtgacaagaaggggacgtgttgggtttttcttccttacactatattttggctgcacacatgtctttaacccaggagcccaggggtagacaaaggaggactaaggtaatcaatttgcacctttttttatttttattttttttctttttttcttcagtggtgacttccttccctttatcttttttcattcttcccggtcctctgccctgatctgtgtaactcttatcttgggtacttgagcagacggtatattccagaggtgggaggtgggaggggaagggagaaatccaaaacaaagtgttcttgctctgacagaatattaatcttgtacgcttgaaaaaaaaaaaaaaaaaaaaat

SEQ ID NO: 47855 - DNA, 649 bp, Homo sapiens; identical to SEQ ID NO: 4343

SEQ ID NO: 47856 - DNA, 1900 bp, Homo sapiens
tttttttcacaagttatattttattttaacacgagattaacatatagttacaaggtcaatacaagcctccagtggaagctctttatttggtttaattccatctccagagacaaacaggcaactctaggacctttacagtggcgatcggcctcacacagcaaaatgcctccaaagtttagaattagtgcaacacacatacgaacgttttaaaggtgctcaacatcaggttaaaatagaattctggacctttttaaaaagtttttggatgatataagcacaggaggcagagccaataagaaacatgaaaccaatatttctggaaaaacacttagcatgaacgtcactttttgacgtcgtgtaaactttcttctgcaatgacggatgttaccaaaaggcattgagacctttgcgctgcgctggttagacaagccgcagcttatctccacggtgagcaggataaaaacccccaaggaacagcccatgacaaccttctgtgcctttttatactttcccatcctacaaaggaaaaactgggtaaaggacaagttcctccctttcattgcgtttctaagaacttttcagggcaggttcttttaaaattagtcatcttacaacacaacagtattctagcacggtggcgaagtgacaggcggcagatacgggggaggaaggagacgttcacgggaaattccacattctactctatgtgaactgctccagaaaaatacagacatgatttcacagtaggattcccagagtaaatgatgatacataggacaactgacctcctctaagaagcccggctggggcagcagtgagcttttcatggagccacgcagactggcccggaagcaacacccaggttcaacatttaagagcactcgctataacattctttttggacgcaggtggtggaaaagtttaaaaaacaggcggaggagtgacggggggatacaagcatatcctatactgggggtgacggtcattcaaagagcaaattactgcagcttatatcttttccactatgttgcaagaaatgaatctatcctgacccataatatgaaagatgcgacgcacatgcattcccgaggctctaaaatcccattttaaagaaccgtttcaacatcctcgtggagtggagagtggtccacttgacttggtgaggtcagaagttcctgaagatccctgtcgtccccgttggcgggggagcccattgtggagctgtggggactgccacactcaccatgcacctgttggtttgcagggacagaggtgcggccctgactcttctcaccctgtgtcatccgggcttgtctttcgtctgtcaagtcagtcctcctgcgtgactgatgggtgcaccacgcttaggtcacccgttgcagggaccggaagtccatggctctgccgcaaccctgagcggtttgcagtcccccccggggaagaagcagtcagagaggctcacgctcacctactttaaaaacccaaagccacttcctcttcacctgcctgggcctcagcgtctctgcgcttgtggtttctcgtccccgagggctgactgatctgcatctggaagggtggtgtgtggtcaaccttggttggctgagaggagcaatttcctggtttccacaagtaaagacagccccatcccttgggacctgtcctttccgtccctgtccctttggcttctataggacttccttgtcttagattcataaacagcaagaggaactgaggatgcttgaggggaccacctagttaccaaagccaagcaaagaataaagctgcccgacatcatccccaggcttccgtggcgctctcggtcacaggagctctaggccaatggttcctcttgactgtttctgcaccaaatgagaggaggggctgctctgctctaaggcgc

SEQ ID NO: 47857 - DNA, 1251 bp, Homo sapiens
tggccaagcagcagagcagacctcaggacctaacgaggatggttgtgattaggtcaaatagaaaactagcaggccattgctgacaatttttactatataattagaggacttcctaaaatgctttaaaaaaaaatgtgtatggatggaaaatacaaaggaatttttcaaatactcaatttttattggtagtagttatcaagaacaaagtcctcggacttctgatgggaaatctgaactgctgtttctcttttagcgtacaagaagaaatagatccctctcattagcactttaatatcagtgtcacgtgtctggaaggaaattgtattcatttaggtaagcaacacactacataaatatcatagctgttagacccaggggactctcaggtgccagaattggggactcctttaattggaagggagctaaagggtctacctcctacctagaagtcctttctatgtggatatgaattaaattctcttgtctgttttgctctgatggggtctgtgtgggctagctggctctggtgtgtgcctgacgacagactgaactccttaaccatttcagacagcttgaagatgtatgatcattatttgaaaagggagagagggaggactcttgttttctccaccagtttggctcctgaggtttcttccagcgttaggttctgtagggcccagctttctccagtgtttggctactgcaactctgtgttctgccagtctcttaactcagacagaaacaatgcaaaccagcagacagagcatcaccttgaaagtactaaaacagctgtcaatctagaaatctctgccccgcaaaaactgtcataaatactgcaagacccatgttcagatttccccccttttacaaataatgttttgttttatttcccagctactacaagtgatccaaatgttctttatagcagactttttcctgcagtctaggatccagtcagagatcttgcattaagttatatctctgtaatctttaatttcacgctatctgcaatgttttgtgtttttcatgacattgatgtttttgatgaggtcaggccatttattctgcagaatatctgtcaatttggattttttctaattgttctttcatgattagaatcaggcaaacattttttgacaagaatacatcagagacgactccgtggtgcatcagactgggggcatgtgatgtctgtgtgtcccattattggcgatgttcaattctgtcacttctgttgaggctgcatttgcc

SEQ ID NO: 47858 - DNA, 620 bp, Homo sapiens
ttagagatgctctgagacattttatttaaactttttttttttaaaaaaagacagcaataattaatgccaagaacagaaaagaatgttgacgtgttgcccggcccgccaagcggccatgcccaggcccccaagctctgccaccactggggtgccgtcccctcccgcagcggggcacagtcagctttgaaggtgacagcgggccaaggccaggactctgggtggaggaggccccttctctgccggccccgcctctgctgggagcagccacagcctgtggctggggtgctgggatttcttcctggtcatcaaagagaaacgtacaaacctcaaggacccagacacacagtgggtggccagggcagaccccacagcagaccccatggctcgcctgagctctggcagctgccccactgctccttccatccttgccccaatcccccaatgcttgttttgattgttttcttaaaaaatataattttgtaaatgttccataaaaatactattattcctagtcaaacacagatattgcaatatgaagagtaactgctctgtctttgctctataaaacgtgaaaagattatcacactggataatatagaaaagatgccagggttcctaag

SEQ ID NO: 47859 - DNA, 1074 bp, Homo sapiens
tgaagagcaactgggaactcggatctgaagccctgctggggtcgcgcggctttggaaaaacaaatcctggccctggactcggtttcccagcgcggtcaacgcatctggaggggactggaggaaacccccttgttggaagagattccaagagaagcacggttttctctttcccttgccctgactgttggagtaaaaaacctcttaaatccattgtatcagaggtccttacctctctgacagttacaatgatctttgtatctgaactttgcacgtctgccgaaaaatccgaacctgttgactgggatttttaagaatccgtttctcccttttgtgtattccatattggccggccccaaggatgctcgcagaagccagcccccaaccccagcccttccgtatctttcccctccatcgcggctttgcgatgaaagattagcccgcgaacagaggcattgattacaaacatgtccttggcagtggactctgggcctggcattcttcaggtttctgtcaatccagaaacgcgactttcctggacccctgcggctctgtccttcccgcccacatccagccctccaaggccagtccagaggtgaagtttgaggccctccccccacccaccccacacgcacgcaggcacgctagaccgtttgctgcactaggaattcgagcttgggccccactcgcccaggtgtgaacagtggctgattagtgggcggtctagtctctaaaatgacccctccccagactggcccttctcgcatcgggacccgcgcttgcacgctgcaggagccgcaaacgtcagctgttctggaaaccgagagggtcccagagagaggagatacgggcgcatttgagagcaagggcctacttggccgggactgaagcttgcgagttgagctccagttcggccggcagttccatcccgcttcaggaacaggaatccaagggcccacgctctgtctgcaagggccattcctgccggagcaccctcctttcccttgcgcttgctctccggtacctgttccgcacctgagctcaagggcagggagaggccgggcctctggcagtccc

SEQ ID NO: 47860 - DNA, 803 bp, Homo sapiens
  misc_feature (1)...(803): n = a,t,c or g
acgctggcaaccgggccttggagctgagcggtgtcatggagagtntgattgctctgtntgcctctaagcaggaggaggagcagctggtggccgtggaggctctgatccatgcagccggcaaggctaagcgggcctcattcatcactgccaatggtgtctcgctgctgaaggacctatataagtgcaacgagaaggacagcatccgcatccgggcgctagtggtccagctacttgggaggctgaggcangaggatcacttgagctcaggaggttgaggctgtggtgagtcacgcatgtcactgcactcctgcctgggcaacacagcaagaccctctctaaaataantggatgaatgaacgagattctgggctttcttgtgggactctgtaagcncggttcggctggagggactgacttcancatgaatcattttgctgaaggctccactctcaaactggctaagcagtgtcgaaagtggctgtgcaatgaccagatcgacgcaggcactcggcgctgggcagtggagggcctggcttacctgacctttgatgccgacgtgaaggaagagtttgtggaggatgcggctgctctgaaagctctgttccagctcagcaggttggaggagaggtcagtgctctttgcggtggcctcagcgctggtgaactgcaccaacagctatgactacgatgagcccgaccccaagatggtggagctggccaagtatgccaagcagcatgtgcccgagcagcaccccaaggacaagccaagcttcgtgcgggctcgggtgaagaactgctggcagc

SEQ ID NO: 47861 - DNA, 722 bp, Homo sapiens
gggggattccgagaatgatcccaggacctagatcctatagattccggcagctcttcctgcaaacacaagcccttgttgtgtgcctgagccttgctctccggcctggagacatccatctgcccactctcctaggaactgctgattaccaggaagcaccatcggctctgctgccctccccctggcagagaggcacaatgaccacattatttctcttccagcttcacgttacagcatggaagctgttgccaagtttgatttcactgcttcaggtgaggatgaactgagctttcacactggagatgttttgaaggtaggtgacctggggccccaggggagcagtagggagtttcagttactcagtaatctgacagtccctgcctttgtctcttaagaactgcatgtggttccttttaaaaagagaagttcaccttgattccctttgtgcacccttataccagacaccaaccaggccgggtgatggaaatacagtcggcataagccaccatccttgtcctgggaggttcgtagtctggagaggggaacacatccacccaaagggctgttacagatgttcttggctaagttctcagggagcacaggtgagggaacaagtgattccatcttgaaagatgggggttgtaggagtgtgtgcaatgtgaacgtcaggaatgcactgaaagtgacttgggcttttagctaaagctcacagatgtgcaagccca

SEQ ID NO: 47862 - DNA, 1293 bp, Homo sapiens
  misc_feature (1)...(1293): n = a,t,c or g
gctgggagggtggaggtgaaggatggggcctagagccgtgtggtgaaggtcacagtgtcctgagctagaaccacctgtggtatatggtctcacatcagaggcctgtctgatgcctcccactcaaccgctctcagagagtttgcaactccagagaaggagagtggggccacttagtgggcacaggctgggcatccagagatggggcagaggtgggcctcccactcctgtgctctcttctgagcaggaactgggcccttgacagtgtcctttgacattccctcgccctaccaaagatcgtcttttctcctcccacctctgtcaccaccaaagacgggcggaggtggggctgggccctcctgcccccgcccatcccccttccatgagcccagacctccctgggtggtgctaggctctgagctgggggctcagaccagggatcgctcaggcccctgtcacctgtgggcccggggaccacttgggggaggtcagaggatgtatgtggccggaccagcttccccaccttcattaggacaagaaactgcccagcactttgccttcagttcaacgcacaaacgctccttgggccttatgggggcanagcctcccctgggcctcgagagtcctgtttgcaagcgcgttcccccgccgcggggtcctgtcagcccggcagtgtcttctcagtgtcttcacctgagcgagtgtctgtggccccaacgcgttctgctgtggctctgccatttccaggttgagaggcctgcaggagaaacacactcccctcctgggtttccacactcaggaggtcagaggactggctcctgtgaccagggcccctctcccctgaatgggaaaggggtctggggatgggagggcgcaccacagagaggagatgatgctgggtgtggcccatcttctgtgggccccttcccagacaccggatccatgggcactaacccgcctcccaggctgatgcccggaggcagcttcctgggcaggagggttccatgggcactaacccacctcccaggctgatgcctggaggcagcctccagggcaggaaggaccctgtgctccccgccccccatcctgacatcctgttcttttgcacttaccctgtgctgtgaatgtaacagtgggccttggccccgcccactctgatttgcattttcatttgtgtttgtttacacatccatgcactgcctgtagcagtcgattgtcacagcttcgacttttggatggtagagtgtgtgcactgactgtgagtcgaataaacaattgagacgatttccttccaaa

SEQ ID NO: 47863 - DNA, 583 bp, Homo sapiens
gggaaactgaggctcaaggaatgaaagtcactccctgaaacccagggctgatagagtgctagccaccaccctctgtccctcccacagcccaggtgtcaaagtcttttctcagctcccaagagtcgaatgaaggaagagcctgtctccacctttcagagaggactgaggcctgtccccagccccacccagggtcttctgggaagaccagcccttccaactaccaacccgttccttttcccagtctgagccacaggaagagcctagcggggaatgtcatgaatcgacctccatcctgagctctccaggcctgggacaatggaaagtggatagggggctgtcttcccagaaggaagctgggtcagaggttggtgccccatgggctccacccagagccccatggcagtctccatccattggtgccaggacctgctgggaacaggctgagagggtggttggcccagtgcacagtgcctggcactaacaacctgatcgtgggccaggtgtctgcctcgaaactgcctgaaggcaggcagggtaggacaatgtctggaggctcacggttttatagactaggggtccccaa

SEQ ID NO: 47864 - DNA, 1079 bp, Homo sapiens
  misc_feature (1)...(1079): n = a,t,c or g
gttgcttccagctccagcgttctatgagcgccggtcttgtctcccccagctaaattgtgagcgcccccatggcagggacctggactcccccttcttcggcattcggcggcctttatgtgctatgtgcccagcccggtgctggcttccgtgggagacacagatgacagatttgaagatctggaagaggcaaatccattctcttttagagagtttctgaagaccaagaacctcggcctctcgaaagaggatccggccagcagaatttatgcaaaggaagcctcgaggcattccctgggacttgaccacaactccccaccctcccaagaccgggcagggtttaattgtggccctgggngaaggtaaattccaaggcaagggaccatttttatatcgaggatccgacaggggctggtgacctcctggatgaggaggaggatgaggacaccggatggaggtggggcctacctgccgtccgccatcgagcagactcaccccgagagggtccctgccggcacgtcgccctgcagcacatacctttcctttttctccaccccgtcggagctggcagggcctgagtctctgccctcgtgggcgttgagtgacactgattctcgcgtgtctccggcctctccggcagggagtcctagcgcagactttgcggttcatggagagtctctgggagacaggcacctgcggacgctgcagataagttacgacgcagtaagtgacgtcgcggcgccctctggcacagcgcctgtccgagcggcttctcccggggagaacctggagccatcctacctcttgggtggcctggtttgatttccaggacaaggcgatttgcgtgacagcctgctatccactttccctttgactttgcttctggttacacgtgggaatagaaccggctaaagaggactggtgagctagaagctgtgaattggatgcagttgggcacttacagggctgtaccctcagtaaaggcaggctgcagtcgccagcttgctaagtattccaagaggaggaaaatttttaaaaaattataatcacctaaaaggttataagctctgaataaaaaaaaa

SEQ ID NO: 47865 - DNA, 2231 bp, Homo sapiens
tttttttttttttttttcatttgtaaagattactttactgtcctagaaaaatacatgttgcaaatttgagggctacaacttaagcactttagaggcttcctgagggaaaggggataacctttgaatatcagactctgtggtaatgtgtgggagaggcatattaaatatagttgggtcaggtggatttaaaaaaaatcccttttccccattttttttttttttttctaaaaaaggaagatcaaattgccatctgtctggcttattttgtgtgtgcatgtatatataggaacagcttgaggggaagggttatgtcatgcaatgaagcaaaaacaagacgacctcctctgacagaggagccttagtgttgtagaagagaagcaaggctgaggtcactggaaaggcttagaatgaagctgctcttgcctgttcctcctgagaacccagagcagcagtggtccagggcacaaagcataatgatctctcatgaggattcctatctgaacacatcagaagtcctatgaacatagataggtctgttttagaatataaatggtagtgacttcctgcgctcctgaggcggggcaaaataatccataaacacataatccttctgggcaataatgtttctggactcgccagcagagggctctaggaacagaggtgggggtagagtcggggagaaaaaaggttctagagatggcatgtcttcaggggaactttgagaaatgtcctttgttccagcattcctaagtgacggcaccggtgagcctggtctgaattgtcatcagtgtcactgccgaggccaagggccaagggtcaagatgccactttaggttgagaagaaagtgcatctcaaggccagtgagggctgcaaaatggtttgcggctggcccagaaggagcaaatgtagaaaggctcccctttttagatgccgatggtctgtagaactcgcctctcattgtcattaaggtggcctgaaaacattatgtagcagggctgctgagcaaactggcagaggaaatctgtgagatatgcctgcagatccatcctgatagagaggatccttcagggcatcagggtcatcttcctcatcatcctcgtagtaatcctcctcatatttacttgtagcaagaatgtcagataaaagttggccagctaaaccatcctcctcctcctcctcttcctcctcctggtcctcccacatatcattggagtcatcttgactccactctgcaggagtggcctggcgagcggcattagccctccatgacgttggagagctcgttgatgatcagctttaggatcttgaccagcaaaggaatgtttgtccagcgttctgggtttttggctgacttagagcgggtgcggatgccctcatccatgctgtagatctcctctcccttcacacggatatcctgtagccgtttgtcatctgcattgatgccatgctggagcagcttacagagtgccacagagctgactttgccttcatactgtccatagaacaggtgctgtcggcttgtccactcagccatcacaaactctagagcaggtttgccagtaggtcctgggaggctacacaggaactccaagagaggttctagctgagtgtgcaccagatgagcgaacaccatgatcagggactgcatgacactgagcgtctctgcctgctgcatcttactgaggatggcacgaagaatctggtctagattctccccgagttcccgccctgccttggagatgagggtggaaacaaggcggcccacaaaggccgcagtgaactctgaggtgcgggggtcccaggagctggctcaccacttgcatcacataccacagtccattgtggccctgctcatcatgccactgggctacttgttccagggtcactgacacataggcccgcaagcactctccgccattctgcatggtggcattgtcatctgtgtgaagggtacactgtgccacagcagggaaagcttggcagatgagaagctgggaaaggggaggctttgtatttcgtactactgttgtcaggatatcaatgctgtcgcacaaagccctgcaggaatcttgtctgctggggcctgcattatgctgaccagagtgggaatcagcctcatttgcattgggccctgacaggcttcaatctgggacagctccttgaagatgtcctgagccagtgaggcgacgacgggatcattactgtactttaggaaaatggcgatggtgaa

SEQ ID NO: 47866 - DNA, 584 bp, Homo sapiens
ttttttttttttgaagatcaacattttatgtaaagtcatcttttaaggagggcgcatcccaccatggccctctctgggactgttgctccaacccaaggaaatgtgagtaggggccgagtaacagacccagaaggggcagcctgaaagcaatggggtctcaaaacaatagagaacgtgggcaggttgggctggggtgtgggcagaatagacgccagctcatccgaactggcctagagtcaaggtgctgaactcctggctccatcgaagcacaacgtcctcacttttgccagggctcagcgcactgtaagtctcattctgcagacatctcatgcgggacaccttccgattgcggtttctcatcagacactgctggcttttgaaggaacagtagtttgggtactggatatagtctgtgtcacaaatcttggtagggaaatccccatcctggaagctaaggaactcagtctggagccacccagagactcggacatcttcacagcctttcgtgcaagccggcacaccagaagtccatgtgagcccaccgtacaaatccagcccgtaaaagcggcctgattctggggacc

SEQ ID NO: 47867 - DNA, 496 bp, Homo sapiens; identical to SEQ ID NO: 4391

SEQ ID NO: 47868 - DNA, 477 bp, Homo sapiens
  misc_feature (1)...(477): n = a,t,c or g
ggggnnnnnntnnntntnnnnnggaactttttgactgatnacgaatttaatacgactcactatagggaatttggccctcgaggccaagaattcggcacgagagggcctgggggcgtttgtcattgacagtgaccacctgggtcatcgggcctatgccccaggtggccctgcctaccagcctgtggtggaggcctttggaacagatattctccataaagatggcatcatcaacaggaaggtcctaggcagccgggtgtttgggaataagaagcagctgaagatactcacggacattatgtggccaattatcgcaaagctggcccgagaggagatggatcgggctgtggctgagggaaagcgtgtgtgtgtgattgatgccgctgtgttgcttgaagccggctggcagaacctggtccatgaggtgtggactgctgtcatcccagagactgaggctgtaagacgcattgtggagaggga

SEQ ID NO: 47869 - DNA, 601 bp, Homo sapiens
  misc_feature (1)...(601): n = a,t,c or g
ggtagctgggaagctggatgagaaccactgtcgccaccaggtcgcatacctggggctgctggagaatgtgagggtccgcagggctggcttcgcttcccgccagccctactctcgattcctgctcaggtacaagatgacctgtgaatacacatggcccaaccacctgctgggctccgacaaggcagccgtgagcgctctcctggagcagcacgggctgcagggggacgtggcctttggccacagcaagctgttcatccgctcaccccggacactggtcacactggagcagagccgagcccgcctcatccccatcattgtgctgctattgcagaaggcatggcggggcaccttggcgaggtggcgctgccggaggctgagggctatctacaccatcatgcgctggttccggagacacaaggtgcgggctcacctggctgagctgcagcggcgattccaggctgcaagggnagccgccactctacgggcgtgaccttgtgtggccgctgcccctgctgtgctgaacccttcaggacacctgcacgcactcttctgaggtggcggcccggcagtggngaagacatcccccttnnacatgcccaga

SEQ ID NO: 47870 - DNA, 528 bp, Homo sapiens
ggtgagtccgcgtgtggaagtctgtgaggcgcagaggtggggcaggccgtctggctagctaggcggctgggagcgttttcgtggcggggaacggaggttgaattgccctgcctgggctcatagggaaggaggatgtgaaggagcttgtgaaggcagaggaagattattgaataataaaatacagttttgaaaaaaatggatgaagaacctgaaagaactaagcgatgggaaggaggctatgaaagaacatgggagattcttaaagaagatgaatctggatcacttaaagctacaatagaagacattctattcaaggcaaagagaaaaagagtatttgagcaccatggacaagttcgacttggaatgatgcgccacctttatgtggtagtagatggatcaagaacaatggaagaccaagatttaaagcctaatagactgacgtgtactttaaagttgttggaatactttgtagaggaatattttgatcaaaatcctattagtcagattggaataattgtaactaagagt

SEQ ID NO: 47871 - DNA, 662 bp, Homo sapiens; identical to SEQ ID NO: 4420
  misc_feature (1)...(662): n = a,t,c or g

SEQ ID NO: 47872 - DNA, 406 bp, Homo sapiens; identical to SEQ ID NO: 4423
  misc_feature (1)...(406): n = a,t,c or g

SEQ ID NO: 47873 - DNA, 1047 bp, Homo sapiens
gccaaaaacggaagaatagacgaaaaaataagtgtgtgtgtgatattcctactcccttacaaacagcagatgaaaaggaagtaagccaagagaaggaaacagacttcatagaaaatagcagctgcaaaacctgtggcagcactgaagatggtaatacttgtgtagaagtaattgttaccaatgaaaatacatcatgtacctgtcctagcagtggcaatcttttggggtcccctaaaataaagaaaggcttatctccacactgtaatggtagtgattgtggatattcatctagcatggaagggagtgaaacaggttctcgggagggttcggatgttgcctgcactgaaggcatttgtaatcatgatgaacacggtgatgactcttgtgttcatcactgtgaagacaaagaggatgatggtgatagttgtgttgaatgttgggcaaattctgaagagaacgacacaaaaggaaaaaataaaaagaagaaaaagaaaagcaagatactgaaatgtgatgaacatatccagaagcttggaagctgtattacagatccaggtaatcgagagacctcaggaaataccatgcacacagtgtttcaccgtgacaagaccaaagatacacatcctgaaagctgttgcagctctgaaaagggtgggcagccattgccttggtttgagcataggaaaaatgtaccacagtttgcagaacctacagaaacgttgtttggtcccgattccggaaaaggtgccaagagcttagttgaactccttgatgagtctgaatgtacttcagatgaggaaatctttatctcacaagatgaaatacagtcatttatggctaataaccagtctttctacagcaatagagaacaataccgacagcatctgaaggagaaatttaataaatactgccggttaaatgatcacaagaggcccatttgtagtggctggttgacaacggctggagcaaattaaataaataaaatagctctgtctttcaatgaaacactccacgatgactactggcgccttctcctttcgaaaaact

SEQ ID NO: 47874 - DNA, 421 bp, Homo sapiens
  misc_feature (1)...(421): n = a,t,c or g
ggagaaaaagtctgcttacaacttttaagaaacagtggacctcaaaatacattgttattgaagatccctttgatttgaatcataatcttggagctggattatcaaggaaaatgacaaattttataatgaaggcttttatcaatggtagaagagtatttggtattcctgtcaagggatttccaaaggactacccctcaaaaatggaatacttttttgatccagatgtgttaactgaaggagagctggccccaaatgatagatgttgtcgaatttgtggaaaaatcggacacttcatgaaggactgtcctatgaggagaaaagtaagacggcggcgagatcaggaagatgccctgaaccaaagataccctgagaacaaggaaaaaagaagcanagaggacaaagaaattcacaacaagtacac

SEQ ID NO: 47875 - DNA, 953 bp, Homo sapiens
ttttcaacttttttttttggattagctaagaaaattttattttgctccgtgcgttcaaggagctcacacacatgcacatgcatatgcatgcacacacacacatacacacacactcacatgcatacacacacggctaatactgctcaaggcatggctcctgggcacagagttctggggccagaattctgctctgggccctcctcactctgtcatctcctgcactgcagtccagggtccagatagatttccgggatacagcaccttcacacctccaggccaggacccttgcttagtcccagtgcctgcaccaggtcatctccgagcccactcttcaacgtccttctcaaagacttgcggttgccgcgggaacgcttgcgttccctagcagctaaggcacgaggactgctcttggtcactgactgcaccagaaggtccatgatctcatctgatgtatcactgggtaaactggagcctggggggttcttctggggatgcagtggagggccccactgtgggcatgattggggagctgctctggaccatgcctctgctgcggcgattgtgtgtggtgtcctcaggcctgctggtcagcagactcttcatactagcatgactgtcagcatctccccggcctggcccgctgctcactgctactgggacagaggggttgctgggggcttccccagccacacctgagaacttctctgtctcggtgatcatgcgtccccgggtcttgttgcgctcacggtatgtggccctgcttctgctgctgctgtagcactcgttcccggcaagtccgatactcaagcgcaaattcccgcagcgtgtggcagaactgcatgatgcgcacttcacgggccgcttgcggggtgtagcccaggtagagcaggaaggcatggaacctattgcagacacggcggtgcactatccttagcatggcaacacggcgggca

SEQ ID NO: 47876 - DNA, 2241 bp, Homo sapiens
atgaacaggatgagagagaccagaaagaggagggaaatgattatgacactcgaagtgaggccagtgactctggttctgaatctgtttccttcacagatgggtctgtcagatctggttcaggcacagatggatcagatgagaaaaagaaggaaaggaagagagctagaggcatatctccaattgtttttgatagaagtggaagctctgcatcagagtcatatgcaggttcagaaaagaagcatgagaaattatcatcttccgttcgtgctgtccgaaaagatcaaaccagtaaactcaaatatgtgcttcaagatgcaagatttttcctcataaagagtaaacaaccatgagaatgtgtctcttgccaaagcgaagggtgtatggtccacgctccctggtaaatgagaagaaattaaatcttgcatttagatctgcaaggagtgttatcttaatattttctgtcagagagagtggaaaatttcaagggtttgcaagactttcttcagaatcacatcacggaggatctcctatacactgggtgcttccagcaggaatgagtgctaaaatgctgggaggtgtctttaaaattgactggatttgcaggcgtgaattacccttcactaagtcggctcatctcaccaatccttggaatgaacataaaccagtaaagatcggacgtgatggacaggaaattgaacttgaatgtggaacccagctttgtcttctgtttccccccgatgaaagtattgacttgtatcaggtcattcataaaatgcgtcacaagagaagaatgcattctcagccccgatcacgaggacgtccatcccgtcgagaaccagtccgggatgtgggaaggcgtcgaccagaagattatgatattcataacagcagaaagaaaccaaggattgactatccccctgagtttcaccagagaccagggtatttaaaggatccacgataccaggaagtggacagacgattttcaggagttcgccgagatgtgtttttaaatgggtcctacaatgattatgtgagggaatttcataacatgggaccaccaccaccttggcaaggaatgcccccttacccaggaatggaacaacctccacaccatccttactatcagcaccatgctccacctcctcaagctcatcccccttactcaggacatcatccagtaccacatgaagcaagatacagagataaacgagtacatgattatgatatgagggtggatgatttccttcgtcgcacacaagctgttgtcagtggccggagaagtagaccccgtgaaagagaccgggaacgagagcgagaccgccctagagataacagacgagacagagagcgagatagaggacgtgatagagaaagagaaagagagcgattatgtgatcgagacagagaccgaggggagagaggtcgatatagaagataatgggcttttggaagcactgattgtttaaagatacaaaaaatcttgtattttttttttgtgtgtgtttacaagtagtaaatttattttcagctgtctgcctatgaagttcattgtgtagaaggatttattatgaccccctttgttccaagcatgcagtatcataagaactggaaaaactcaaatccgccaaaaatccacagctgacagttgaattgacacttttattggggcagaatggaacagtccaagaatgtagatactgattctttctccataaatgttcttatagtgtgttcatcctagagttatttttttgtttgtttttttcctttttggatcttgattgataactgccatgatattttgctttgatgtgtttctacatgtagttgcacacggttcagtaaaaataatgctgctatcgagtatgcaaatattgaagtatgatggtttgactgtatggcagtgttgtagcagcctcttgtttttttccccattgcctctttttttaaaaaacttataaagtcactttttatttttcctcagtcttcaatgacgagagcaatattaagaagacattgctatctaatttttaatctttttaaatgaaaaattcctatgttcagtagcgtggttgatgctattgtttagccttcccctccaaattgtatacattggcttggaatgttcacaacttgcgtgcgtggcagcggaagacgattcccatattctacattgctactgttttgtataaaataaattggtaaagattgacggttaaaaaaaaaaagaaaaaagtcgac

SEQ ID NO: 47877 - DNA, 788 bp, Homo sapiens
tatttatgatcaaatagagtagtgcttaaatatctctgtcctttgaatgaatttgtggtagatttttatgactcctggaaatccctatcttctggatatgctagttttgattacgaagatgcaggctaccagactgcagaacttgtaaaaatggatattctactgaatggaaatactgtagaggagctagtaactgttgtacacaaagacaaagctcattcaattggcaaagccatatgtgaacggctgaaggattctcttcctaggcaactgtttgagatagcaattcaagctgctattggaagtaaaatcattgcaagagaaactgtgaaagcctataggaaaaacgttttggcaaaatgttatggtggtgatattacccgaaaaatgaagcttttgaagagacaagcagaagggaaaaaaaagctgaggaaaattggcaacgttgaagttccaaaagatgcttttataaaagttctgaaaacacaatcttctaaataattggtgggaaaacaaagaattttcattgcaatttgtaatatgctgacaacagaaagaaaattataaaatttgcttgttactttcagggtattcaggttcaaataacctactagtctttcgttgaaagggagtagttagtggggtaggccaagagcttaggttttgaagccatgttgcctgttctcaaatatctgttccaaccactcactagtaaggtgaccgtggccagattaacctttgtttcctcttcagtaaaatagagattatactactacctaaaaaaaaaa

SEQ ID NO: 47878 - DNA, 1380 bp, Homo sapiens
cttcccgaagtccccttctccagtgcttccctgggagaggccagctgtgttcgagtcctctgtgcctgccctggcgttctcacagcctcccccttcccctcagcaggcggctctctttgccttacccattcagaaggctcgccctcggcgtctgtctgcctctgcctgccagctcatcacgatctgcagggcattgaccctttgctttccctttctgctccctctctttccatctgtttggctttttccctcagggaacttggtctagaaggcactgggaagctcatcagagaaaatgggtgctgggcctgagtactcccgtcggaggggatggacagtcacccctcccgttggtttccagccccgccccccttcccaaggcaactctggagggtaccctaggtatgctgctgagccctgccccccgtcctgctccagcctgcccgtgtgtaacctgtaagatgtactgtgtgcctccggaagacaccacctttcccttcagcattccctttcatgacctgaggcactctgcgatgtgtgccccaaagcagaacttacagggcctgcaggaagctggtgtcagggagagaaacccaaccccactgtcaacatagggagcatcaccaactccagactggctcctgtgggtatggtgtttccgctgggctgggtcctcaacattgccaaggtgctagtgggtccctaagagggcccatgttggggggtgaagtcatgaggtcctgaaggcttaggcccctgtcattcccaccctcactcttgctgcacagttgtgtttactttttctgggtagaggatgctgaactgactcagcaccctcctgcaggacggggttagggaatttggtgctcaattgctctcccttgctcttccccaaactgaaaatacctactgcaggatccctcggggcacactgaagcttggctgccaaccctcttacttcctttgttacagggaggggttggcttggggtgaaaagttctgccctccgcagggacgagctccagctgcctggcagtgctcccagtttgtagggaagccacaccagatctgggtgccttgggagaaccagtccttccttttgacccaccccaggaagatggagtgctcttttctaggcccatgttctgccagcaaccgggatgcgtgggcaactggactctgcacgggggtctacaggttgagggaggttggtcacaatgagaacctcggggtttgaggtggccatgggcagacagccgaaagggagggagggtgtgggtgtgcgtgtgtgcatgtgctggtgtgtaagggggaaagggtctttcctggttttatttaaataaagtagtttatgtaacagttaaaaaaaaaaaaaaaaaa

SEQ ID NO: 47879 - DNA, 1843 bp, Homo sapiens
gaaagatgtagccaaagccctgggagacctcatcagtgcaacgaaggctgcagctggcaaagttggagatgaccctgctgtgtggcagctaaagaactctgccaaggtgatggtgaccaatgtgacatcattgcttaagacagtaaaagccgtggaagatgaggccaccaaaggcactcgggccctggaggcaaccacagaacacatacggcaggagctggcggttttctgttccccagagccacctgccaagacctctaccccagaagacttcatccgaatgaccaagggtatcaccatggcaaccgccaaggccgttgctgctggcaattcctgtcgccaggaagatgtcattgccacagccaatctgagccgccgtgctattgcagatatgcttcgggcttgcaaggaagcagcttaccacccagaagtggcccctgatgtgcggcttcgagccctgcactatggccgggagtgtgccaatggctacctggaactgctggaccatgtactgctgaccctgcagaagccaagcccagaactgaagcagcagttgacaggacattcaaagcgtgtggctggttccgtcactgagctcatccaggctgctgaagccatgaagggaacagaatgggtagacccagaggaccccacagtcattgctgagaatgagctcctgggagctgcagccgccattgaggctgcagccaaaaagctagagcagctgaagccccgggccaaacccaaggaggcagatgagtccttgaactttgaggagcagatactagaagctgccaagtccattgcagcagccaccagttgcactggtaaaggctgcgtcggctgcccagagagaactagtggcccaagggaaggtgggtgccattccagccaatgcactggacgatgggcagtggtcccagggcctcatttctgctgcccggatggtggctgcggccaccaacaatctgtgtgaggcagccaatgcagctgtacaaggccatgccagccaggagaagctcatctcatcagccaagcaggtagctgcctccacagcccagctccttgtggcctgcaaggtcaaggctgaccaggactcggaggcaatgaaacgacttcaggctgctggcaacgcagtgaagcgagcctcagataatctggtgaaagcagcacagaaggctgcagcctttgaagagcaggagaatgagacagtggtggtgaaagagaagatggttggcggcattgcccagatcatcgcagcacaggaagaaatgcttcggaaggaacgagagctggaagaggcgcggaagaaactggcccagatccggcagcagcagtacaagtttctgccttcagagcttcgagatgagcactaaagaagcctcttctatttaatgcagacccggcccagagactgtgcgtgccactaccaaagccttctgggctgtcggggcccaacctgcccaaccccagcactccccaaagtgcctgccaaaccccagggcctggccccgcccagtcccgcagtacatcccctgtcccctccccaaccccaagtgccttcatgccctagggccccccaagtgcctgcccctccccagagtattaacgctccaagagtattattaacgctgctgtacctcgatcttgaatctgccggggccccagcccactccaccctgccagcagcttccagccagtccccacagcctcatcagctctcttcaccgttttttgatactatcttcccccacccccagctacccataggggctgcagagttataagccccaaacaggtcatgctccaataaaaatgattctacctacaaaaaaaaaaaaaa

SEQ ID NO: 47880 - DNA, 1708 bp, Homo sapiens
cggacgcgtgggtcagtccccattttgagtcagagtatggaccatgctgtcccaggttcaaggataaaaaccatcaggcccaagtgccatccatagtccatctccagagtcttcctccacaaactgggattcatccccgctgaaaaagcacaatctaacagcaagggaacaaaaaaaccatgctatcacataatactatgatgaagcagagaaaacagcaagcaacagccatcatgaagggaggtccatggaaatgatgttgatggcatggacctgggcaaaaaggtcagcatccccagagacatcatgttgggaggaattatcccatctcagtaaccgtggtgccaggctattttaagatgcgtcaaagaagatctgacaaatacacatttgaaaatttccacgtatcaatctagagcacaaataaatcacagtattgctatgcagaatgggaaagtggatggaagtaacttggaaggtggttcgcagcaagcccccttggactcctcccaacaccccagatccacgaagccctccaaatccagacaacattgctccaggatattctgggaccactgaaggaaattcctcctgaaaaattcaacaccacagctgtccctaagtactatcaatctccctggggaacaagccattagcaatgatccggagcttttagaggctttatatcctaaacttttcaagcctgaaggaaaggcagaactgcctgattacaggagctttaacagggttgccacaccatttggaggttttgaaaaagcatcaagaatggttaaatttaaagttccagattttgagctactattgctaacagatcccaggtttatgtcctttgtcaatcccctttctggcagacggtcctttaataggactcctaagggatggatatctgagaatattcctatagtgataacaaccgaacctacagatgataccactgtaccagaatcagaagacctatgaaaagaaagttgtatgtgccacataaaactctgaatataaaagttgctgttctactattttaactactggcaaagccacttgcatttttcattagtagcaacaatagcaatttagtgattttccttttctgacattcaatttcaatctcagatcaaatactaataaacaattagaaatcttactttaaaaaacttataactcacttgtcttcattcataattttgttttcacctggtttaaagaatccagatattttactgcaaaagttcagatggaaaagtaattgacagtttcacctttgtctcattttatatgatttattacagtgtaagtttttcaagtggaatctagaatcaaaatacagggagagatatgaagacctattcagagtttcatctggggatgaaagctatggaagatgatgtacaaatgttattgatggagaaaatggttgggtgtgtcctttctggtgaccatgagaaaataatatgtcttgatgaagtcttttcattagtcactcttagaattctaaagtgctttgcacttttcaatatgttttgaatcattaggtaatttattctggatgatattctccaaaattcaattcagttattatattcatttaggcattaagtcaaggagactgagaatgactcaagggacgtcatagtaccatagttttaaggaccaaggtgtgcccagaattcaagtttcacaaatcccaatg

SEQ ID NO: 47881 - DNA, 561 bp, Homo sapiens
gttttcagctactttccccagagctatggaggctttggctcgcaggatcctcagtaaacctattgaagtacaagttggaggcaggagtgtggtttgctcagatgtggagcaacaagtgattgtgattgaagaagaaaagaaattcttgaagttacttgagcttctaggccattatcaagagtcaggatctgtcattatatttgtggataagcaggaacatgctgatggtcttcttaaggatttaatgagagcatcttatccttgcatgtctcttcatggaggcattgatcaatatgacagagatagcatcataaatgactttaagaatgggacctgcaaacttcttgtggctacctctgttgctgcccgaggtctagatgtgaaacatctgattcttgtagtaaattatagctgccccaaccattatgaggattatgtacacagagcagggcggactggaagagcaggaaacaagggttatgcttatacttttatcacagaggatcaagctcgctatgctggtgacataatttaaagctccttgaattgtccaggggctgc

SEQ ID NO: 47882 - DNA, 2827 bp, Homo sapiens
tttttttttttttttttttgaaaattcaagctactcatgtttattaactgatctacatttgacaaaacaaagataggggcacaaagagctgtttgacaaagtcaaatcccaggtatcgaacaatagtattcccctggctgccctagaggcacttgtgccccactctgagggggatgtcctctgccatgcgaccgctcagttatcacactgcactgctgttgggttgcatgtggagtacaggtctgcatgcatctgacatcagagaagtggcccactaaacactaagagccctagttctagatgtcacaagttgatgttagtaaccaccaagtactaattctgtactaaaatggtcagaaaagataacaagctttgagtactgtgtaaaattatacgctttatagggaataggctcttgtaagctgccttttaacttatttcctcccttgccaaagtctattcatttatgtcaaatcaagaacatacagcacaacattttctaaaaaagcactttaacaatggtcattaacttctccctaaggactcatgcctaaggttatttacataagatttggggatcctcataatttaggagaacttttaattcctgagctccgggaagatatttctcctattagacaataggacactcagaaatacctgaggtataatcactgaaaaccttcttaaaggcgaaaaaaaaaaaaagattgaggtttcctatactggcatgaaagtacacatacaatttttatcgtagaaaagactaaaatgtgaatagtgacaaaacataacagataaattgggaggaatcagctattaggctccaattcttcttactatattttgcagacaattctagtattatagagattatcaggatataccaaaaatgattttaggtagaaacttcaaaaaacagcaaaaccccagttttaagacaggattcctttctagagaccattaccacaacagtatacacttaaggtgtttctggtggaaccatcaacatcaatgtacttaaaaaaaatctaagcctggttctttttgatcagatgtgcttatttggctgctaatacacccccaccaccctgcctccaaagtgatcatttagtcattaattataaaaaagtatacaaattatactcaatacagagcacggcaagatctagttcaatttatagctttaagtaatacacataaatcgggacaatttcaacgttgtactactctctggccctacagtttcctacttcctgatgtttcctggaaactgtaactgtccaggcaacagaaacagtaattactttcttagggaacaaataaaaaattttaagaattgactaaagtaagcaccccagagtcactttatgaaatacaaattcaaatggtattttttaaaagtgaattggaatatgcgggaaatttaaacagcagggattcttctatttaatgcctgccccattcagggacacttatattcacatataaacctgctggaatcctttctgaaactctacactctattgacctcagcacaactgagtgaaggggaaccgaaagggagagaccatcttcaccctttgtttttgtggaatttatttagaaaaattttattgagagattctaaaaagtataagaaactaacaaatttttaccactgcattcatgttggctttttgagcacatagctctaagtggggggatggcggggatgcctcaaaaggggagaggaaggactctccttggcctgggaataggtgtgcctatgggaaccataggagcaagagtcaagagttcttcagaaaactgcctttaagtcaggacaaaggaacaaaacatttgcaaattaagcaccaaaaagatcaagtaatttacttgccattttcataaacaaaataattagtcccctctctcatcttttctctatcatgtcttttgtataaagacatttctttctgaactgcgtgctgtctagacaaagccacgtcatctgatgagaagcagactttgctcagcaacattgagaaaaaacagatctacttctttccatttcttagcctgtgtcaactgctgaatgctgaaatctaaccccagagcctcactttgccatttcatacagtttgaataaaaaaaaagaaccttagagaaaaagaaaaagctttgactcccccattaaaaagtttattctctaattctataaatatcaagaaggcagatgtgttttattttattttacattaggaagaaaaaaccacaatctcaaagcaagcacccgggttttacttcagtttacaataatttaatgtgcctgagaatttttgtgcaaatacatgtcatctttcattaaaaatatgcatagcgcactttggaaaaagttggtttagttgtcaccaacttttcttacaaaaaaagtttacatatataaatatacaacattccctaattcctattgattgcacttctggcttaaccccttccagcctccaaggaatttttaaaaacatgcaattatgtttgtattccttggctactgtacttattcagacgaaatattctaaaaacaagttttcttggtttcaatttaccgacaagggaggacttactgtgttgtagaattgaggagatatgttaataacgagctgattttaacatgtatgtttctttataaattaaacttttctcatttagttggttgggtcagtagcaatcagtaagtatgtagaataatacacttcttctgctggcctcattcccacaatatccccacatatggattgtgaaattcccagtctgatacttgaatctgatctgatgtatgaataag

SEQ ID NO: 47883 - DNA, 10850 bp, Homo sapiens
cacgggaagccttgctgaagagagaggatccgcagaagctgggaaattcctcccgcagcctaggcggagactgagccgcggctcaggttgagacagtgggcaggggcagggggcgcgctcccggcccatcccttagcacccgcggcggccgtgtggtccggaggctgcctgcaccgcgtcagggaggccggcctagaaaccctccctcccagaagaaagccgatcccagttcaggtggggtcttcctcggttgcgtacctggctggagccgagctggtgggcggccggcagccggcgtttctggtgatgacagccccgaaatgaaagcagcgcggccgccgcctccgagggctgcagggagatcagcgtccagcaaataagaagcaagtcctggacccggaggaggaggagcggccgagcatctctctctgctccgccgtgtcctttagatgagcactcccggccggagccggaggtggatccgcagagctgcctctgggcgcctgaccccgcgctgacatcacaacctgtgacaggcgcatcacgcccggtacctgctcccggccgctgtccgtcctcccagcctctttgtatgccgcagacatggccagccagcaggattcgggcttctttgagatcagtatcaaatatttactgaaatcctggagtaatacttctcccgttggcaacggttacatcaagcctccggttccacctgcttctggcacgcacagggagaaagggccgccaaccatgctacccatcaatgtggacccagacagtaaaccaggagaatatgtcctcaaaagtttatttgtcaacttcaccactcaggctgaacgcaagattcgtatcattatggcagagcccctggaaaagccattgacaaaatctctgcaacgtggagaagagccccaatttgatcaggtcatcagctcaatgagctccctttctgagtactgcctgccttccattctacgtacattatttgactggtataaaaggcaaaatggcattgaggatgaatcacatgaatacagaccaagaacaagcaataaatcaaaaagcgatgaacaacagcgagattatttaatggaaagacgggacctcgccattgattttattttttctttagtattaatagaagttttgaaacagattccacttcatcctgtaatagacagtttaatacatgatgttattaacttggctttcaagcactttaaatacaaagaagggtaccttggtcccaacactggcaatatgcatattgtggcagacctgtatgcagaagtcattggagtgttggcacaagccaaattccctgctgtaaagaagaaatttatggcggagctaaaagaattacggcacaaagagcagaacccatatgtggttcaaagcattatcagcttaataatgggcatgaaattctttcgaattaagatgtatccagtggaggattttgaggcctctcttcagtttatgcaggaatgtgcacattacttcctcgaggtcaaagacaaagatatcaagcatgccttggctgggctttttgttgaaatacttgttccagttgctgctgctgttaaaaatgaagtaaatgttccctgccttagaaattttgtggaaagcctgtatgacaccacgctggaactttcttctcgaaagaagcattccctggccttgttccccctggtgacctgtttgctctgtgtcagtcagaagcagctgttcctgaacaggtggcacattttcctcaacaactgcttgtccaaccttaaaaacaaagatcccaagatggctcgagttgcactggaatctctctacagattactttgggtttacatgattcgaattaaatgtgaaagcaacacagctactcagagccgacttataaccatcatcacaacacttttccccaaagggtcccgcggtgtggtaccaagggacatgcctctgaacatctttgtgaaaatcatccagttcattgcccaggaacgtttagattttgcaatgaaagaaatcattttcgattttctttgtgtgggaaaaccagcaaaagcattcagtctcaacccagagagaatgaacattggtttacgggcattcttggtcatagctgatagcttgcagcagaaagatggggaacctcccatgccggttacaggagccgttcttccttcaggaaacacgttaagagtaaagaaaacatatttgagtaaaacactaactgaagaggaagccaaaatgataggcatgtccttatattactctcaagtacgaaaagctgtagacaacattttaaggcaccttgataaagaagtaggaaggtgtatgatgctgactaatgtacagatgttaaacaaagaaccggaagacatgatcacgggtgagagaaagccaaaaatagatcttttcaggacctgtgttgctgctattcctcgactgcttcctgatgggatgtcaaaacttgaacttattgacttactggctaggctctctattcatatggatgatgaattgcgacatattgcacaaaattctcttcagggtttacttgttgacttctcagattggagggaagatgtactattcggctttaccaacttcctgctccgggaagtaaatgatgtgcatcacacactccttgattcgtccctgaagttgctgctgcagctgctcacccagtggaaactagtcatccagacacaaggaaaagtctatgaacaagccaacaaaatcagaaattcagagctcatcgcaaatggctccagccacagaattcagccggaacgaggtccccactgcagtgtactccacgctgtagaaggttttgctctggtttcactctgtagtttccaggtggccacacgcaaactgtccgtcttaatactcaaggaaattcgagcgttgtttattgccctggggcagcctgaggatgacgacaggccgatgattgatgtcatggatcagctaagttcttccattctagaaagttttattcatgtagcagtttcggattcagcaacattaccactcacccacaatgtggatctgcagtggttggtggaatggaacgcagtcctggtcaatagccattatgatgtgaaaagcccttcccatgtctggatatttgcacagtctgtcaaagacccctgggtcctctgcctcttcagcttcctccggcaggagaacttacccaagcactgtcccacagccctcagctatgcctggccttatgccttcactcggctccagtcggtgatgcctctggtggacccaaatagcccaattaatgccaagaaaaccagcactgccggcagcggagacaactatgttactttgtggagaaattacctaattctttgttttggagttgcaaaacccagtattatgagcccaggacacttaagagcttccactccagaaataatggcgaccacacctgatggtacagtgagctacgataacaaggccataggcaccccatcggtgggagttctgttaaagcagttggtgcctttgatgagactagagagcattgagatcacagagtccttagttttaggatttggaagaacaaattcccttgttttcagagaattggtagaagaacttcatccattaatgaaagaagctctggaaagaagaccagagaacaagaaacgccgagaacggcgagacttgttaaggctacaactacttcgaatttttgaacttttggctgatgctggtgtaataagtgacagcacaaatggagccctagagcgggatactttagccctgggagctttgttcttagaatatgtggacttgacccgcatgctcctagaagctgaaaatgacaaagaagttgaaattcttaaagatatccgggcacattttagtgcaatggtggccaacttgattcagtgtgttccagttcaccaccgaagatttctcttcccccagcaaagtctgaggcaccaccttttcatcttattcagccagtgggcaggacccttcagcattatgttcactcctctggatcgttacagtgacagaaatcatcagattacaagatatcagtattgtgcattagaagcaatgtcagcagtactgtgctgtggccctgtctttgacaatgtgggcctttccccagatggctacctatataaatggcttgacaacattctggcttgtcaagatttacgagttcatcaacttggctgcgaagttgttgtcttgctactggaacttaatcctgaccaaataaatctttttaactgggcaattgaccgatgctacacaggttcctaccaacttgcatctggctgcttcaaagccatagcaactgtgtgtggaagcaggaactatcccttcgacatagtgacattgttaaaccttgttctattcaagacctctgacaccaacagagagatttatgtaatctccatgcagctcatacagatccttgaagcacagctttttgtatactcagagaaagtctctgagcaaagaccgggaagtattctctatggaacacacgagccgctgccacccctctacagcgtgtcacttgccctcttgtcatgtgagctggccaggatgtaccctgagctcacactccccctcttctcagaggtaaaccagcgattcgccacaacacaccccaacgggcgccagatcatgcttacctacctgctgccctggctgcacaacatcgagctggtggacagcagactcctcctcccggggtcgagccccagcagcccagaggacgaagtcaaggaccgggaaggtgacgtgactgcttctcacgggctgagaggaaatggctggggctctccagaagccacgtcactggtcctgaacaacctcatgtacatgacggccaagtatggagatgaagttcctgggacagaaatggaaaatgcttggaatgctttagccaacaatgagaaatggagcaacaacctgaggatcaccttgcagttcctgattagcctctgtggggtcagcagcgacacagttctcctaccctatattaaaaaagtggcaatatacttgtgccgtaacaacaccattcaaaccatggaagagcttctctttgagctgcagcagacagagcccgtgaaccccatcgtccagcattgtgacaacccgcccttctaccgcttcacggccagtagcaaggcttccgcagcagcctcaggaaccacctctagcagcaatacagtggttgctggccaggaaaatttcccagatgctgaggagaacaagatattgaaagaatctgatgaaaggtttagtaatgtcatcagagcccacactcgcctcgagtcaagatacagcaatagctctggaggatcctacgatgaagataaaaatgatccaatttctccctacacgggctggttgctgactattacagagaccaagcagccgcagcccttaccgatgccttgtactggaggatgctgggcccccctggttgactatctcccggagaccatcactccccgggggccactccacaggtgcaatattgctgtaatttttatgactgaaatggtggtggatcacagtgtacgagaagactgggcgcttcatctaccattattacttcatgctgtcttcttaggtttagaccactaccggcctgaagtctttgaacacagcaaaaaactgcttcttcacctcttgattgccctctcttgcaacagcaatttccattccattgcttccgtgctcctgcagacccgagagatgggtgaagctaagactctaaccgtgcagccagcctaccaacctgaatatctctatacaggtggctttgacttcctgagagaggaccagtcatccccggtgcctgactcagggcttagttcaagctccacctcctctagcatcagtctgggaggcagcagtggaaacctcccacagatgacccaggaggtagaagatgtggacacagctgctgaaacagatgagaaggcaaacaagctcattgagtttctcacgaccagggcatttggtccactttggtgccatgaagacatcacacctaaaaatcaaaattcaaagagtgctgaacagctcactaattttctacgtcacgttgtatctgtatttaaagattccaaatcaggcttccatctggagcaccagttgagtgaagttgcattgcagacagccctcgcaagctcttcaaggcactatgctggtcggtccttccagatattccgggccctcaagcaacctctgtcagcacatgccttatctgaccttctctcaagattggtggaggtgataggagaacatggagatgagattcagggttatgtaatggaagcgctcctaaccttggaggcggctgtggataacttgtctgactgcttgaagaacagtgacctcctaactgtattgtcccgctcttcctcaccagatttaagctccagcagtaaactaacagcaagcagaaagagcacaggacaactaaacatgaacccgggaaccaccagcggcaacaccgcaactgccgaacggagccggcatcaacgaagcttctctgtgcccaagaagtttggtgtcatcgaccgatcctctgacccacctcgaagtgccacactggacagaattcaggcttgtacccaacaaggcctctcctcaaaaaccagaagctcatcctccttgaaggacagtctcacggacccatcccacataaaccatcccaccaacctgctggccaccatattctgggtcacagtggccttgatggagtctgattttgagtttgaatacttaatggccttaaggctgttgagcagactactggcacatatgccactcgataaggctgagaaccgagaaaagcttgagaaactccaggcacagctgaagtgggccgacttctccgggctgcagcagctgctgctgaaaggattcacatccctcaccaccacagacctgaccctgcagctcttcagtctgctgacaccagtgtccaaaatatccatggtggatgcatcccacgctattgggtttccactgaatgtcttgtgtctcctgcctcagctgattcagcattttgaaaatcccaatcagttctgtaaggatatagccgaaaggattgctcaggtttgtttagaagagaagaaccccaaactttcaaatcttgcacatgtcatgactctttataaaacgcacagctacacgagggactgtgccacgtgggtcaatgtggtctgtcgataccttcatgaagcatatgctgacattaccttgaatatggttacctacctggcagagctgctggagaagggcctccctagtgtgcagcagcccctgctccaggtgatctacagtcttctcagctacatggacctttctgtcgttcctgtcaaccagttcaatgtggaagttctgaagacaattgaaaaatatgtgcaaagtgttcactggagagaagctctgaatatcttgaagctggtagtttctcggtcagccagccttgttttaccttcataccagcacagtgacctctcaaaaatagaaatacatcgagtgtggactagtgcttccaaggaattacctgggaaaaccctggacttccacttcgatatttcggagactccaatcatcgggaggcggtatgatgagctgcagaattcttctgggcgtgatgggaagcccagggccatggccgtcacccggagcacatcttccacttcctcaggctccaactccaacgtccttgttccagtgagctggaaaaggccccagtattctcagaagagaacaaaagagaagttggtacatgtcctttctctgtgtggccaagaagtaggattgagcaaaaatccatcagtgattttttcatcgtgtggggatctggatctgcttgagcaccagacaagcttggtatcttctgaggacggtgcccgagagcaggagaacatggatgacacaaacagcgagcagcagtttagagtcttcagagacttcgacttcctagatgtggagctggaggatggagaggaacttcagggtgagagtatggacaatttcaactggggagtgcgcagacgttctctggacagcctggataagtgtgatatgcagattctggaggagcgccaactgtcaggaagcactcctagcctgaataaaatgcaccatgaggactccgatgaatcatccgaggaggaggacctcacagccagccagatcctggagcactcagacctaatcatgactctctccccctctgaagagacgaatcccatggagctgctcaccacagcctgtgactcgacccctgcagaacctcattcctttaacaccagaatgtccagctttgatgcttccttgcctgatatgaataatctgcagatttctgagggttcaaaggctgaagctgttcgtgaggaggaggacaccaccgtgcatgaggatgatctttctagttccatcaatgaactcccagcagcttttgaatgcagcgacagctttagccctggacatgactgagggggaagaaaaaggcaatcgggcactggaccagtttaccctggcgagctttggagaaggtgacaggggagtctctccccctccctcgcccttcttctcagccatccttgccgcctttcagcccgcagcctgtgacgatgccgaggaggcctggcgcagccacatcaaccagcttatgtgtgactcagatggctcctgtgctgtgtatacatttcatgtgttctcctccttgtttaagaatattcagaaaaggttctgcttcctaacctgtgatgcagccagttaccttggagataacctccggggaatcggatccaaatttgtcagctcttcccagatgctcacctcctgctctgaatgtcctacactttttgtggatgccgagactctcctttcatgtggacttctggacaagctcaagttcagtgtgttagaactgcaagaatatttggatacctacaacaacaggaaagaggccacactctcttggcttgcaaattgtaaggcaacatttgcagggggatcaagagatggagtaattacctgtcaaccaggggactccgaagaaaagcaaatggaatctcttgcacaattggaactgtgtcagagattatataagctacacttccagctgctattgctttttcagtcctactgtaagctcatcggccaggtgcacgaagttagctccatgccagagctgctgaatatgtccagggaactgagtgacctaaagaaacacctgaaggaagccagtgcagtcattgcagctgaccctctctattcagacggcgcgtggtccgagcccaccttcacgtccactgaagcagccatccagtccatgctggagtgcctgaagaacaacgaactcggcaaagctttgcggcagatcagggagtgcagaagtctgtggcccaatgacatctttggaagcagttctgatgatgaggtccagacactactgaatatttatttccgtcaccaaactctgggacagacgggtacttatgccctggtggggtctaaccagagcctgaccgagatcttgcaccaagctgatggagctgaacatggagatccgggacatgatccgcagggcccagagttaccgagtcctcactacttttcttccagactccagtgtttctggcactagtctctgacaggagcctcctgtccccactgggttccaaactggcagtgctgccatgctggggcaacgtcattcagtgtcttctcggccttcaaaaggcttggacagactgttctccctcttgttacctgtagggctttttctaaagaggatggcagaacttccaacgtgtagcaatactataagaaccaaggtagcttagaacgtcctggacagactccactcatcatgctgtgtggcacaaatgtgttacatttgaccgagcatatgcaactcgctactgaagaagtgacttccgttgcataccaaagccgactacactgaacagtaccttcctttctagaaacaattttagattggcaaaagtgcaatgttttcttcactcaaaaaattttatattctcaaacatgtatattctttccctgtcttgttccattttcttttcttttttcttttttctttttcctttctttcgtgggctgagaaaggggcaggcaaaatgaagctggccactgaaaactgtaagatggtcaaaagctgacagcctgtgtatgtgaaaagggaattgtaaatggactgcaatgtaatgtacactgtaatttgaatacaattactgtatctaaaaggagctgctatgaagtacctttcttatgttgctaggctactgtttctgaaagccctggatctctttgcaccaaaaatggtccagatagactctttttaaggatcttggctgctttttactagaaggttgcttttatgagcatatttatactgctgaaggatgagtgttaattttaattaactttgccgttttgtagagaaaactattcacaagataaattccaagtcttttcacctgtcaggcatgcatattttaatatctgtttggatagtcagaagtagaatcataaaggtaaaatatgagttgttactttgtttcttcgatgtcatattttatgtgtaatatatatgtaaagggccattcttaagttctctccttaaacttaatgctgtcaagtgttagatgtgtgcatgtgaacttgttgcactgcagaaacatattcagagtttatctatgtaacttattcactctgtaaatacatttaaagtttttgtgatgtaagcttaattgatattctgttcagaactttctttagactaaaaaaaaaaaaaaagacaaaat

SEQ ID NO: 47884 - DNA, 741 bp, Homo sapiens
gcgatggtgtctcgctctgtcaaaacaaaacaaaacaaaaaaggagggactcagagagccagggaccagggaaggacatgaagcagtgttcggaggacagagagagagaagaatggggaggggaaggagcggcacatggggttgagcagaggagaaaatcagaaggaaagatggcttagagaagccagcagtctgcgaggctggggaggatggagagtggtttggggttttgggtcggggtctaaggtgatcagatgcagaagcattacacggtggcctggtttctttactcagcccctggggtagatcccagccccccatgtaggtcccttggctggaaaaggaagagggagtggtcagatgaatctgaggagtcgttggaggaggagccggagaaggagctcgcccctgagcctgaggagacctgggtagtggagatgctgtgtgggctcaagatgaagctgaagcaacagcgagtgtcacccatcctccctgagcaccacaaggacttcaacagtcagcttggtaggaggacaccccagagagcacctccaatcctgttctttctaaaaagaggaaacttccaataaccacacttttccaatgggaaagatacgcccccagtgggtgagctctccatgtgggaggaatgtgaagtgatcactcatgagggacacttaggagatgataaaggactaggctagacttgataaaggttggcgcttgggataagaaagcttg

SEQ ID NO: 47885 - DNA, 1991 bp, Homo sapiens
gcggctgacgggcccgcggtctgggcgtgagtgcagggaagtggagtatttgctgggccgggtaccatggacgtgggcgaacttctgagctaccaggagggtcattgcgaggagcagtagagctgcactgccgaatgtcgtagccactagccacataggctgttgattgcttgaaatgtgactagtctgaattgagaaatactcccaataggggcacaaaacgtccccgggattgatgaagaggaggagcagaagatgcgtcggaaacaaactggtactcgagaacgcggccgctatcgggaagaagaaatgacttgttggttggaggaagccggattgatgacaaaaaaaggcttgcttgcagattattgacagagatggggaagaggaagaggaagaggaggagccattggatgaaagctcagtgaagaaaatgatcctcacatttgaaaagagatcatataaaaaccaagaattgcggattaagtttccagacaatccagagaagttcatggaatccgagctggacctaaatgacatcattcaggagatgcacgtggtggccaccatgccagacctgtaccaccttctggtggagctgaatgctgtacagtcgcttctcggcttgctcggacacgataatacagatgtgtccatagctgtggtcgatttgcttcaggaattaacagatatagacaccctccatgagagtgaagagggagcagaagtgctcatcgatgctctggtggatgggcaggtggtagcactgctggtacagaatctggagcgcctggatgagtctgtgaaagaggaggcagatggcgtccacaacactctggctattgtggaaacatggctgagttccggcctgagatgtgtacagagggtgcccagcagggtcttctacagtggctgttgaagaggctgaaggcaaagatgccttttgatgccaacaaactgtattgcagtgaagtgctggccatattgctccaggacaatgatgaaaacagggaattgcttggggagctggatggaatcgatgtgcttcttcagcagttatccgtgtttaaaagacacaatcccagcacggctgaggagcaggagatgatggagaatctgtttgattccctctgctcctgtctaatgcttagttccaatcgtgagcgcttcctgaagggcgagggtcttcagctgatgaatctcatgctcagggaaaagaagatctcccggagcagtgccctgaaagtgctggaccatgccatgattggccccgaaggcacagacaactgccataagtttgttgacattcttggcttacgaaccatctttcccctctttatgaaatctcccaggaagatcaagaaagtgggaaccactgagaaggaacatgaagacatgtctgttcgatcctggcttcccctctgcggaacctgagagggcagcagcggacccggcttctgaataaattcactgaaaatgacagtgagaaggttgacagactaatggagttgcattttaaatatctgggtgcaatgcaggtggcggacaagaagattgaaggggaaaaacacgacatggtccggcgaggagagatcatcgacaatgacaccgaggaggagttctacctccggcgcctggatgcggggctctttgttctccagcacatctgctacatcatggccgagatctgcaatgccaatgtcccccagattcgccagagggttcaccagatcctaaacatgcgaggaagctccatcaaaattgtcaggcatatcatcaaggagtatgcagagaacatcggggacggccggagcccggagttccgggagaacgagcaaaagcgcatcctgggcttgctggagaacttctagaggcaccttggccctgcgcatcatggactctctcagcttccctcccaggatcagtttctacacaactctgtgtggcttttggacaaattaaagctagttttggtaaaaaaaaaaaaaaaa

SEQ ID NO: 47886 - DNA, 2256 bp, Homo sapiens
gtggctgcccgcgcggggaccacaaccaaagtcgcggccgccgcagccatgcgctgggtgtgggcgctgctgaagaatgcgtccctgggcaggggcgcccaagtacatagagcacttcagcaagttctccccgtccccgctgtccatgaagcagtttctggacttcggatccagcaatgcctgtgagaaaacctccttcaccttcctcaggcaggagctgcctgtgcgcctggccaacatcatgaaagagatcaacctgcttcccgaccgagtgctgagcacaccctccgtgcagctggtgcagagctggtatgtccagagcctcctggacatcatggagttcctggacaaggatcccgaggaccatcgcaccctgagccagttcactgacgccctggtcaccatccggaaccggcacaacgacgtggtgcccaccatggcacaaggcgtgctttgagtacaaggacacctacggcgatgaccccgtctccaaccagaacatccagtacttcctggaccgcttctacctcagccgcatctccatccgcatgctcatcaaccagcacaccctcatctttgatggcagcaccaacccagcccatcccaaacacatcggcagcatcgaccccaactgcaacgtctctgaggtggtcaaagatgcctacgacatggctaagctcctgtgtgacaagtattacatggcctcacctgacctggagatccaggagatcaatgcagccaactccaaacagccgattcacatggtctacgtcccctcccacctctaccacatgctctttgagctcttcaagaatgccatgagggcgactgtggaaagccatgagtccagcctcattctcccacccatcaaggtcatggtggccttgggtgaggaagatctgtccatcaagatgagtgaccgaggtgggggtgttcccttgaggaagattgagcgactcttcagctacatgtactccacagcacccaccccccagcctggcaccgggggaacgccgctggctggctttggttatggggctccccatttcccgcctctacgccaagtacttccagggagacctgcagctcttctccatggaaggctttgggaccgatgctgtcatctatctcaaggccctgttccacgggactcggtggaagcgcctgcctgtctacaacaagtcagcctggcgccactaccagaccatccagggaggccggcgactggtgtgtgcccagcacggagcccaagaacacgtccacgtaccgcgtcacgtaagggccgccgtgcatctgcacctgagaggacggactgccgcctctgggtccccccaccgtggtgcccctcaccatcctcctgggggagcagggggtgggttctccctgatgaccaggttctgtctctatggaagtcactgcggtgataggtctgtgatggtccctaagtgccagtccatctctgtggagacccctcggtggcctccctatctctgtgggcgatgcctgagggttagggatgtctccaccctgatggggtgtcccagagacattttcccatggcagtcctcctctctgagaccagggctgtcacttttctgccaggggtactgggtccccctcagcaccctccacagcacaggccttccaagtggatgtcccgttgccttattcccccagcccacaaaggcaccctggccttggtctgctgaagtgttaggaagagggtgggtgccctccagacctggggactgagtggggaaaggagtttacacccgtgagtggggaatgaggctggtcctgcagcctctccctccgctcagggcttgaaggtcggtggcggagggggtggctctcacagggcccaactctaaagtggaagaaccttgttagaccgagagcttgccatccagccaagctgctcgaggccctgcagtggccttggcaatgtctgtgccacctcctgagccctcccagcatgtcctcacatgctcatgcccacccgctcctccacaagcctagtccatcctgcctgagctccagcccccagcccccactgtgcccagacatgtgtgctcagggtggctttctccctaggaccttctgtgtatatagttagttttataaccctgaatgcccccacccttcccctaagcacacaggggttaaagctgtgtgtccctcccagtggctgtggcagtgacagtgacacccacacccacagtaaagaggagactgaatgagaaaaaaaaaaaaaaa

SEQ ID NO: 47887 - DNA, 1660 bp, Homo sapiens
ttttttttttttttacaaagacatttattttccccaaaatatacccccagtttacaaaatccctccgagtcccacatttaaattagaagtcctcacatcttccattcctggggcagggagagatgacatccggaaggcatcagaacgtctgaagtctcactctaccagaggccaggagctggccagaggcaaagccaggaaaagactgccccagccccagaatagcaccatggtgggggtggggggcagtcccctcggtgtccccaaagcattcctggccctgccctgccccaggctctgccttttctgctgctatgaaaggtccagagggccttggtgcctgcccacctgcccacacctggacagacattttggacaccaccagattctctagccgtggcgaggggctatgtccctctctccaggtttccgccccaaccccatgctctgggtaagaattatgggtgggatgggggtgaggtatccaggaagccttgagccacagaggaggtgtggagcagggagcccaggcaggagccccctgcaaaccgcagggtgcagtgtagttagttgtctgtctcccagctggatggggagtccttgagggaggaactttatcttcccacgcagggccccccaccacctaacacagtgctgacatctgtagttgctcaataaacatcaactgaatggatacatgaaaagaaaggaacaaagaggtgagaaggcagagggacagaagctgacccccaggggccccatcacagaccccctggagaaccagtgtgaccagcacatgccttccgtggggaggatgggcaggggagaggggcacctgcagaggaggctgggcccaggggggaacccacacgtgttccagcacgtgcacctgcaggtctccatgcacagctgtgcatgtggtgggcgcagagtgccctgtcttcacttggggcagggagggaaaaggccagtattaaggctagagcaagaggaggaaggaggggaaaggaaacagcttctagactccaggagatgttgaggctgcactgtccctgtctgagaagaaaagattctatgcaggtggaagcagggctgaacatgatcactagtgtatcacggccattggagaaacaaggccggggtgactatgcatcgtgtctttggtgaaataaggcagggggtcagtcagtctgaatattgcatcttttggagaaaaaaggcagccagatggtccacgcagcactggaagaagagggtggtgatgtggtcagtgtaactgtgtccctaagaaatgtatgtactgtgaaataaggcagcaggcaggatgacttaaaagaaactaaaggttgtgggtggtctgttcattgtgtcctataagaaaaaaggcaagcaggatgacttgggaatcatgtccattggagaaataaggctgcacagtggtctgtgtatcgcatcctttggagaaggagcccacctgtcagagcaggatgcatctgttgggggcagggctcacagtgcagccccattgcagccagagggtaggagctgtagggaggggtagcagctccctggtcctcatggtcaggctatttcttgtccatcatcttctttgctggtcagagtgtttcagaggctgcagggctgtcttggagccttctcc

SEQ ID NO: 47888 - DNA, 477 bp, Homo sapiens
  misc_feature (1)...(477): n = a,t,c or g
caagaagccaagaagggagagtttcgtgcactgtggttaacaggagggccgcctggaggcagtggctgagccagaaagtaacacagagctcatgcttggagagagagagtcttggccatggctttcctgcaagaccactgacgagcagtcccatggtgataaagggcagcccggcgggtcccagcatctcgagaccctctgcagaagtattatcagagtagagctgacttccagtacccgggcagccagctctgtctccagggaggcctggcctggaggaggagtccactaacaggaaacacttctcaccccctcacacaggcccaggggagcccctgggaggggaaattccttggcaggggaacaggaaatgtggtcgcctctgccccactgccagcctgagtgggcaaggaagcaggtggatcccccagaaggaaccgcagctcgcgaggtcacctgcttccncgttccccaccc

SEQ ID NO: 47889 - DNA, 1796 bp, Homo sapiens
gaataaaatcctgaaaggcaaagcagcagatataccagattcatcattgtgggagaatccagattctgcgcaagcaaatggaattgattctgttttgtcaagggctgaaattgcatcttgtagttatgaggccaggcaacttggcattaagaacggaatgttttttgggcatgctaaacaactatgtcctaatcttcaagctgttccatacgattttcatgcatataaggaagtcgcacaaacattgtatgaaacattggcaagctacactcataacattgaagctgtcagttgtgatgaagcgctggtagacattaccgaaatccttgcagagaccaaacttactcctgatgaatttgcaaatgctgttcgtatggaaatcaaagaccagacgaaatgtgctgcctctgttggaattggttctaatattctcctggctagaatggcaactagaaaagcaaaaccagatgggcagtaccacctaaaaccagaagaagtagatgattttatcagaggccagctagtgaccaatctaccaggagttggacattcaatggaatctaagttggcatctttgggaattaaaacttgtggagacttgcagtatatgaccatggcaaaactccaaaaagaatttggtcccaaaacaggtcagatgctttataggttctgccgtggcttggatgatagaccagttcgaactgaaaaggaaagaaaatctgtttcagctgagatcaactatggaataaggtttactcagccaaaagaggcagaagcttttcttctgagtctttcagaagaaattcaaagaagactagaagccactggcatgaagggtaaacgtctaactctcaaaatcatggtacgaaagcctggggctcctgtagaaactgcaaaatttggaggccatggaatttgtgataacattgccaggactgtaactcttgaccaggcaacagataatgcaaaaataattggaaaggcgatgctaaacatgtttcatacaatgaaactaaatatatcagatatgagaggggttgggattcacgtgaatcagttggttccaactaatctgaacccttccacatgtcccagtcgcccatcagttcagtcaagccactttcctagtgggtcatactctgtccgtgatgtcttccaagttcagaaagctaagaaatccaccgaagaggagcacaaagaagtatttcgggctgctgtggatctggaaatatcatctgcttctagaacttgcactttcttgccaccttttcctgcacatctgccgaccagtcctgatactaacaaggctgagtcttcagggaaatggaatggtctacatactcctgtcagtgtgcagtcgagacttaacctgagtatagaggtcccgtcaccttcccagctggatcagtctgttttagaagcacttccacctgatctccgggaacaagtagagcaagtctgtgctgtccagcaagcagagtcacatggcgacaaaaagaaagaaccagtaaatggctgtaatacaggaattttgccacaaccagttgggacagtcttgttgcaaataccagaacctcaagaatcgaacagtgacgcaggaataaatttaatagcccttccagcattttcacaggtggaccctgaggtatttgctgcccttcctgctgaacttcagagggagctgaaagcagcgtatgatcaaagacaaaggcagggcgagaacagcactcaccagcagtcagccagcgcatctgtgccaaagaatcctttacttcatctaaaggcagcagtgaaag

SEQ ID NO: 47890 - DNA, 465 bp, Homo sapiens
gcaggagaatcgcttgaacccaggaggcggaggttgcagtgagccgagatcatgccattgcactccagcctgggagacagagcaagactctatctcaaaaataaaaataaaaaaaaaattgcgtgcaattttgtattttcatagtcgtatctttttaaaggtatcatgatttcagttgtggtcaggaagtatgtgccttaaatcctctactctagacccaaagtttggagagctatattatttaataagttgtttgtgacagccttgttacctttttcatttgatttgagggagaaagactgtgatcctgacagattccttctcataaaatggcctaatgtgtatcagtctaggacttctggggagggaacctctaccatgcattctgtcccaggatgtcaaagtcataagaatccaggggtcccctgaaataaaatcactgaaaagatatgttctgttatatat

SEQ ID NO: 47891 - DNA, 618 bp, Homo sapiens
gagggctagaagagaagtcaccaaacacctagggacagtcctaggcctagaaagccctttaaagtaatagtgaattgttttaaaattaagttattgagtggcctactgactgccatccaaaaacctttatcaccaaatttgttcagtgtttgctattgggagattgtccatatccctccgtaattaagggccagcaagtaatacgatcttcttacagccaaccttgctcttcccaaagggagaaagtaatacatcattaacctggaatttgtgatataacaggtagccttggttaatgtttaccttttcactatgtaaaaaagaaaaaacacacagcaaatagtgcaaataaaatttggtcttttaaagcattttagcagtagctatgtaaaaaaagttaatggttattattcctaaattttcataagacccttggtagacaaaactatcggttatattatgtatatatgaggttagttaagctgcatttagttaggaacatttaatttttacctaaatgatcctttttttcatccagaggtagagatttttattgtcattatgaatgttactccccatttagtccaaaatagtgagcttttaagttgtgccaggtac

SEQ ID NO: 47892 - DNA, 853 bp, Homo sapiens
gtggagagcaagtctcattctgtcacccaggctggagtgcagtggcagttctcagctcaccgggacctctgcctcccgggctcaagcaattctcatgtctcagcctcccgagtagctgggattgcgggtgcacaccgccacacctggctgatttatgtatttttttcgtggagacagggttttgccgtgttggccgggctggtctcgaactcctgacctcgggtgatccacccacctcggcctcccaaagtgctgggattgcaggtgtgagccaccgtgcccggccttgactaccatattttaaatttactggaggacttttttgttctcttcttttttctttttttaatagcatcccgctcttatttcagaataaaaaaatttttaaggtatgttgagtaagaatctatagagcaatgaaaatgcaagagcaatagctatgggcaccaaatggtcaatcttcttatcataatgttgagtggaagaagccaggtccaccagacacatgctgctcatttatgcaaagtttggacacaggcaaaacaaaactagtttgatcgtgatgggaaacattagagaaatgcaaagacatgaccatcataattgtcaggagaaggcattggttaggattgggaagcggcaagcagaagcatttagggattggctggcaatgttttacttctcggctgagtgagggttgcatcggtgtttatttgataacacgttctaggggctgggcaagatggctcatgtttgtggtctcagtactttgggaggccaaagatgggaggattgcttgagcccgtgagtttgagaccatgcgtgggtgacatatgcgagaccctgtctctac

SEQ ID NO: 47893 - DNA, 1224 bp, Homo sapiens
  misc_feature (1)...(1224): n = a,t,c or g
tcaggcactttctatttcaacctcctggatctgggtggacagctgggaagagccacatctgagataatctgactgaaaatgggacaaagtgctccatgatggaagcaccccactgccctcagcagggactgtgactaggacggaagtgatggaggacaagcagcagctgatgttgaggacttcctgaagccaaggacgccctggggtgggtgtggccttccctggcaagctgtctcctgaaaaccaggtgctttccacccccatccactgacttcctcccacttcacttattatctgggcaggaggctgtcacctggtacatcagacatagaaagaactagagaaaaggccatgtgcctccaccagccccaggccaagctcttgcccattctggctgggccgtgcggcgggcttggacaaggctctgcctgccttgtctgaagagcagtgggaagagggttcagaaggccagagagatagaattcctagatgacgctggaagactcagcctgtggccctggcttgccaggactggctgagactccaaattcaggcccttctccttctgcggctgccctctgggtctgtccctaagcccacacctcctcctgctcgcacgcaaccattcagggtctcaaagagctgcttgggacagtgccaggattttacatttcagagagtgcttcaaactggtcaggaaagaactgcatctttctaaaatttgccgagaaaacagaaagaagggcaagatggtctcactntactacacaccccgaggacagcagcaggaagtgagtttgctcgcctgtgggcccagagctggctcaaccataaatgagtctttcaagccttggcattcaaccagccttcagacatgaatcaggacatgtctggaccggccagagctattacatatgtttggccccagaacccacatcggtatagaaaccactgacacccaaaggcacaaaataagacaacactaatgagtcctataaacgataaacaactgcaaccatctcagaaacaccataggattataacagtcaatcatcacatcctggacaaaagtccttccttttcatgtgctgtttgtcactcctacaaggaaagaggcctatattattatcccttttgaaaggtgaggaaagcgaggcttaaagatgcttaccaaggtcacccagcttcaataactagaaactaggtctgactcctcgtccagtg

SEQ ID NO: 47894 - DNA, 779 bp, Homo sapiens
ttttttttttttttttaatgggagccaaaatgtttagagaaagcttctgggtgtgcctttcagattttgaacaagctgccttgtctaaacatcaatttctactactctgtagccttaaaatgtgctctatttagatccacaggacccttctactggtgatatgaaaaacagaatacagaaattaagagaatcactttttactcaacaattaggggaagtaagtcaaagccctcctcttgcgacagcagatttcctgcgggccacctgttcagcgccttgataggggatagggtgatcaaagcactcacgaaaacagttcattcaggtatggaatgtcagaattcctttggccattttctcctgactctttgctaggtcccctggtttccttggcagcacttcttggatggaggacagggtccaccaacttctcaagacattgagtcttgagacacaagaaaccacagacttcaaccctgaagggcctaactctgtccatatgtctgtcctttgaacactttctctccctgcccaaaaggaaacccaaattatttgtgggatactggggaaattgtagtgaagggcttaatgtagttaataaaagttaaaagtcagtagaaaacaggtgcctcagccttcaaatggttgtttcttttttattttccataatgaatagactcaccagcattttacccccttgttataaaactgtgcagagcaagaagatgatacttatttttgaatttgtatttttaaaactagatttatagacttttttt

SEQ ID NO: 47895 - DNA, 3510 bp, Homo sapiens; identical to SEQ ID NO: 4535

SEQ ID NO: 47896 - DNA, 816 bp, Homo sapiens
ttcgttttttttttttttttttttgtttcctcacacacagcctttattgagcagctattgggcagtgacgctgccgaggcgggaatcccaccacagtcctgaccgcagctgggacccctttgcctcctctgacacccccacctcaatttgatacccacttcctgagcaaatgtgacccctagggcctgggattcccaagaccaccccgaaatgcagcggccccaccgtctcctgaggccggtgagcgaggggcagcagtgcagctcagcaggtgcgaggcaggcttaggatttcggaatcaccacctggaacttacagacgggcagggctgccacggaggcggtgaccacgctctcaatgcccagggtatagagggcgccgcgcaggaggccgcaggtgaaggccaggaacttgggtgcttcctccagatactgcaggccagaggccatcgggaggaggagggggaagctgttgtcttgcaggacgtaggtcccctggtgattggtgcgcaggctgtccatctgcttctggaacaccgccacccacaggtctttgcacaagaacttgaggacatccagctcctccctgaaggccagcgtctcccggggcagcctctcgcctagagcctggcccacacggaaccccataccctccaggaccgacaggctcatcttctgtcccttggtggcccccgcttcctccccacggagcccggcgctcacccccgggccggggtcggggtcgtgagcccacagctcagccaccatctccgtgtgaagaaactcaaacaacacagtatccgccatgccccctcct

SEQ ID NO: 47897 - DNA, 1787 bp, Homo sapiens
gccggggtgagacgggtttattgtgcacatttacacagcgtcagcagcgtctgggctggcagcggccatgctcctgtggtcgggctgctctacaagggcgttcacttttcttcaccacactatgtacagtcagtgctccaaggtgatgggctacagtgctgcatcagtgagtctgtacacacatttttacataaattacacacgactcatacatgaaaaatagagcctaagggcctgtattttaatgagaaaaaaaaaatttccaacatagttcgggtagctttgaatggtctagtcaaaaaatacttttggtatataaaaagcctgtacgtacaattcacacctcagtgaagcgccctccttgccttgaggctgggcctgggacaaaggtggcctcacagccagcccaggcagggagatcggcagagaggggtggcccctgaccccagctcctctgccccagctgctgctccttggtggcggcccctcctgacaccaggcgtctgccatccttcaggcaccaaacagccccgtctacctggccctggtctgccctcacaccagttccacccccagccccaaccccaaccaccctccgctgccacggcctccagcacctgactccattcagggaactgaatttgagcttgcaggggtgagaaccacactgagcagcatgacaggctgtgagatcggaggagaagagtatatgctgaggctctcccagttgtcacttggtcttaggggtcctggtgcccgtggcgcggcagtccagccacagtgctgggcctgcacaatcagcctttaggtgaactggaacaggaagcggaacccccaaggcggccgagcagagtgggtactgggaggcatacacactggcagcaacactggacatgtttccatacagaggctcctttggtgatgaagggaagaaggatcatgtgtgggaagtgtgagaaaggatgagtgtccgattcggtgacggggggcagagcggtcgcaggggagcaggcctcacagcggcggacagtgttcactgctggagggggtgatggcctcggggccaagtcagtaagagcttctgtcttcactggcaaccaaccgggggttatgggacttcttaatggcaagaggggtgggtgttttgaaagtgggtatttatttggatttatagtaattggcaaaattcagtccttggaggcgaaagtacctctcccagttaatgggcaaactggagaaagggcctcacctggaaactgtaggattcacattgtggacgctgtctgctaaagtgagcaccattaagaccattttctagctgcagctttcctggaaaacagcacaataatctcttaagtggctcctggtagctggcaagaccatgcggtgctccaaaaggaagttcaggcgagtgttcgctgtcggggtttgatccgtggatacagccccagcaggtttttgggcacatagccctcccggtctccaaggcgagcccaccaccactcagtctcgctttcgtccttgcgcctcaggatggtgagggcgtccccttcgtggaaggacagctcgtcactgttctgggcctcgtagtcccacagagcatacgccacacctttgttcatcacacccagcttttcctgcacccctcatagatgatcctctgcaccagatcgaactctccttccagagacgcgtctaggagcagtgccagggggttaaaccggactctcagcccgtgccccgtccgctccgagttgggcttcttcaagttggtccgcttgttcgtg

SEQ ID NO: 47898 - DNA, 1792 bp, Homo sapiens
cttgaggggaagaggctgactgtacgttccttctactctggcaccactctccaggctgccatggggcccagcacccctctcctcatcttgttccttttgtcatggtcgggacccctccaaggacagcagcaccaccttgtggagtacatggaacgccgactagctgctttagaggaacggctggcccagtgccaggaccagagtagtcggcatgctgctgagctgcgggacttcaagaacaagatgctgccactgctggaggtggcagagaaggagcgggaggcactcagaactgaggccgacaccatctccgggagagtggatcgtctggagcgggaggtagactatctggagacccagaacccagctctgccctgtgtagagtttgatgagaaggtgactggaggccctggggaccaaaggcaagggaagaaggaatgagaagtacgatatggtgacagactgtggctacacaatctctcaagtgagatcaaattgaagattctgaagcgatttggtggcccagcttggtctatggaccaaggatccactggggcaaacagagaagatctacgtgttagatgggacacagaatgacacagcctttgtcttcccaaggctgcgtgacttcacccttgccatggctgcccggaaagcttcccgagtccgggtgcccttcccctgggtaggcacagggcagctggtatatggtggctttctttattttgctcggaggcctcctggaagacctggtggaggtggtgagatggagaacactttgcagctaatcaaattccacctggcaaaccgaacagtggtggacagctcagtattcccagcagaggggctgatccccccctacggcttgacagcagacacctacatcgacctggcagctgatgaggaaggtctttgggctgtctatgccacccgggaggatgacaggcacttgtgtctggccaagttagatccacagacactggacacagagcagcagtgggacacaccatgtcccagagagaatgctgaggctgcctttgtcatctgtgggaccctctatgtcgtctataacacccgtcctgccagtcgggcccgcatccagtgctcctttgatgccagcggacccctgacccctgaacgggcagcactcccttattttccccgcagatatggtgcccatgccagcctccgctataacccccgagaacgccagctctatgcctgggatgatggctaccagattgtctataagctggagatgaggaagaaagaggaggaggtttgaggagctagccttgttttttgcatctttctcactcccatacatttatattatatccccactaaatttcttgttcctcattcttcaaatgtgggccagttgtggctcaaatcctctatatttttagccaatggcaatcaaattctttcagctcctttgtttcatacggaactccagatcctgagtaatccttttagagcccgaagagtcaaaaccctcaatgttccctcctgctctcctgccccatgtcaacaaatttcaggctaaggatgacccagacccagggctctaaccttgtatgcgggcaggcccagggagcaggcagcagtgttcttcccctcagagtgacttggggagggagaaataggaggagacgtccagctctgtcctctcttcctcactcctcccttcagtgtcctgaggaacaggactttctccacattgttttgtattgcaacattttgcattaaaaggaaaatccactgctgaaaaaaaaaaaaaaagtcgacg

SEQ ID NO: 47899 - DNA, 1432 bp, Homo sapiens
ggctgcgtagacccgggagatttgaccgagaggtggtcattgggactcccacacttaaacaaagaaaggaaattctgcaagtgattacctcgaagatgcccatctccagtcatgttgatttgggccttcttgcagaaatgacagttggctatgttggtgccgacctgacagcactctgtagggaggctgccatgcatgccctccttcatagtgagaagaaccaggacaatcctgtgattgatgaaatagacttccttgaagcttttaaaaatattcagccctcatcgtttcgaagcgtcattggattaatggatatcaagcctgttgactgggaggagattggtggccttgaagatgtaaaactgaagttaaaacagagcattgagtggcctctgaaattcccttgggaatttgttagaatgggcctgacacaaccaaagggagttctcctctatgggccccctggatgtgctaaaaccactctggtgagggccctggccacaagctgtcactgctctttcgtttcagtgagtggagctgatctgttttcaccgtttgttggagattcagaaaaagtgttgtctcagatatttcgacaagcaagagcaagcactccagcaattttgtttttggatgaaattgattcaatcttgggagcctcgctcagcccagcaagacaggatgtgatgttcaagaacgagttctttctgttctcctgaatgaattagatggtgttggacttaagacaatagagagaagaggaagtaaatcaagtcaacaggagtttcaagaagtttttaaccgaagtgtcatgattattgcagcaacaaatagacctgatgtgttagatactgctttgttacgacctggaagattagataagatcatctatatcccacctccagatcacaagggcaggctttctattttaaaagtctgtacaaaaaccatgccaatagggcctgatgtctccttagaaaacctcgcagcagaaacctgttttttttctggagctgatcttagaaacctctgcacagaagctgctttgctggctctgcaagaaaatggactagacgcaactacagtgaaacaagagcactttctaaaatcacttaagactgtaaaaccgtcgttaagttgcaaggacttggctttatatgaaaacttatttaagaaagaaggattttctaacgtggaaggtatttaaaaatcaccttaaactcttgttcagttcacattaattgaaatgtgaacttgcctgtcgtttgcaacttcacacttttagaatttgtgtttatatttcctgtaagtgaataaataaaacaaaacaaaacaaaaaaaacttgtgcctgataagctaaggctcatttatttttaaaaggcatattaaataaaatactgtaatttaggaaaaacaaaaaaaaaaaaaaaa

SEQ ID NO: 47900 - DNA, 384 bp, Homo sapiens; identical to SEQ ID NO: 4563

SEQ ID NO: 47901 - DNA, 746 bp, Homo sapiens
  misc_feature (1)...(746): n = a,t,c or g
gacctatcctcatctgtgcaaggaggagtggccaactctggagcccaggctgttgcttcctggtctggtggtgaatcctccatagtctggtgagtgtagtgcccaactctggagcccaggatgttgcttcccggtctggtggtgaatcctccatagtctggagatctcagccctgctgagcttgatgatgctgactataggagatgttattaaacaactgattgaagcccacgagcaggggaaagacatcgatctaaataaggtgaaaaccaagacagctgccaaatatggcctttctgcccagccccgcctggtggatatcattgctgccgtccctcctcagtatcgcaaggtcttgatgcccaagttaaaggcgaaacccatcagaactgctagtgggattgctgtcgtggctgtgatgtgcaaaccccacagatgtccacacatcagttttacaggaaatatatgtgtatactgccctggtggacctgattctgattttgagtattccacccagtcttacactgggctatgagccaacctccatgaggagctatccgtgccagatatggacccttttccttacaggacaaggacaccggattaggaacagtttaaaacaacttgggttcntagtgtggggttaagtgggagtttatttgtggatggggtgggaactttttggggccnttccagaggattacagagttatttttatttcggaantttacatgatggnttttccg

SEQ ID NO: 47902 - DNA, 1098 bp, Homo sapiens
tgctcctcgaatgacaatcagttttattgcatgagttatggtgtccaaatgagttaatttgcttttttcaccgtctgagtcaaaataggccacctgcaggcctcatgcaaaatgtagaaactggatagatgatttaagcctcaaaaacgcaagtgattttttggggtgcacgcaggagagggcggatctggggtgtggtcagcagatgaccagccgtggccttgaaggcagtttccagtctctgcagctgcgggatgagggtgaagccccccatttgctctgctcagcctctctgttgagtatttaagaaatcctgattctccgtgttctgccagggaggatactgcagaagagtggactggtgtggccattatttcagcatcttcaccatgtacgggccttgtaatctgtagccgatctttctataataattcctggtgccgacccctgatatcacagcgattttcccagacccatgttcttctctagctattctttctgcttcctccatcagcagcatgccaaatccctgatgctgaaatttagtaggatcccggctgctcacagggaccacactcccatacacatgcagctctcgtactatggagacacctccacccaattcgaaacggaaagtttcttctgaacacttgcgtaatcgtaggaggccaatcaaaatgtcttgatctgggtcttcgtatgacaagaatgtttcccagccaccatttgcaacataatctctccttaccaattcaacctggtatggccgtactttgtgatgaatttcttggattccaacttctctggttctcacatctcgacactgtattccgaggtctttcattcttgcaagtgccagctctctcaggttaccatgctctactcctgagctaactaaaggcattggaatatccctctgtactcggtacactcgagtccatggaggcacgagggctaggatccgagccaccaattcaaccaggtcactaggagagtaactcttatatcttcctgatttccaaagctcataaagcccggtcccacgaatcaccagggtaggatagagtttcagcccatcgggacgaaaagcagggttct

SEQ ID NO: 47903 - DNA, 822 bp, Homo sapiens
  misc_feature (1)...(822): n = a,t,c or g
gtgcacatcaggcagagcaggccacgggcagggacgacgcatcgggacagggctctgcaggggaccgtgactacaggccagctgtgagtggtcccctacagaggctgcccacccaaggtttggttggggtgaaacatgatgacaacacatacacttaagaaggtgggaaccgggggccgggcgcggtggctcacacctgtaatgccagcactttgggcaactgaggcgagtggatcacctgaggtcagganttcgaaccancctggccaacatggtgaaactgcatctctactaaaaatacacgaagaaaaaaaaaacagtgggaacagagttgtcacctacctaacagggctctgagagagccgggaggcccaaagtggctggaagaaggtaaaggaaaaatcctgtcttgggctcaaggtcacagagtggggcccagggggagttcctgctgagggcagggccttgccaggcttcagtctccagtgccaaaggaggaaatgcccaggctgtcagcatttccagatgagagcagaagggagaagcttaaacccaagtcacacatccagcaatggagtccgacagcccagcaccatctgggaactgagaagcacctctgcccgggccccacaccgtgtgggaaagtgaggagcacctctgnctgggccgccaccccgtctgggcaagtgaggagcgcctctgcccggccgctgtgcaaccttccaagtgtgaagtgacagccttgtgtgtgatgttttctgccttccccaagtttgcactttcgacattaaagtttactttttagttaaaagttttaaaaaa

SEQ ID NO: 47904 - DNA, 915 bp, Homo sapiens
ttcacagctccagaggctgaccctcatccactgggagtctcaggaacaccccgtgttgaaggtgagagctccaggctgtcctgcacatcagctgtgacactctgggactgttcagtactctaggaagtgggtcaggcaccttgggggcccaacgctgctccgtggggatgtctgcttgcctgcctggttctcttttcctgctgtttcctccagcagggaggtatcagaggcggggacacccaagtaggcctggcatgggcagaaaggaggtcacagctaaggcggtagagtggggttggcaccagccacttgtctgtttcccttgtggatcttagcctgtcgtctcccaaccccagctgcccctctgtctccccgcagctggtaggtgagtgctgtcctcggctcactttcctcaagctctccggctgccacggtgtgactgctgacgctctggtcatgctagccaaagcctgctgccagctccatagcctggacctacagcactccatggtggagtccacagctgtggtgagcttcttggaggaggcagggtcccgaatgcgcaagttgtggctgacctacagctcccagacgacagccatcctgggcgcactgctgggcagctgctgcccccagctccaggtcctggaggtgagcaccggcatcaaccgtaatagcattccccttcagctgcctgtcgaggctctgcagaaaggctgccctcagctccaggtgctgcggctgttgaacctgatgtggctgcccaagcctccgggacgaggggtggctcccggaccaggcttccctagcctagaggagctctgcctggcgagctcaacctgcaactttgtgagcaacgaggtcctgggccgcctactccacgggtttccaacctgcgcttactggatcttcgtg

SEQ ID NO: 47905 - DNA, 1289 bp, Homo sapiens
gtgcgcaagcgggagttccggctggagacccgtgctctgggccggcgccttcaccatggcctcggcagagctggactacaccatcgagatcccggatcagccctgctggagccagaagaacagccccagcccaggtgggaaggaggcagaaactcggcagcctgtggtgattctcttgggctggggtggctgcaaggacaagaaccttgccaagtacagtgccatctaccacaaaaggggctgcatcgtaatccgatacacagccccgtggcacatggtcttcttctccgagtcactgggtatcccttcacttcgtgttttggcccagaagctgctcgagctgctctttgattatgagattgagaaggagcccctgctcttccatgtcttcagcaacggtggcgtcatgctgtaccgctacgtgctggagctcctgcagacccgtcgcttctgccgcctgcgtgtggtgggcaccatctttgacagcgctcctggtgacagcaacctggtagggggctctgcgggccctggcagccatcctggagcgccgggccgccatgctgcgcctgttgctgctggtggcctttgccctggtggtcgtcctgttccacgtcctgcttgctcccatcacagccctcttccacacccacttctatgacaggctacaggacgcgggctctcgctggcccgagctctacctctactcgagggctgacgaagtagtcctggccagagacatagaacgcatggtggaggcacgcctggcacgccgggtcctggcgcgttctgtggatttcgtgtcatctgcacacgtcagccacctccgtgactaccctacttactacacaagcctctgtgtcgacttcatgcgcaactgcgtccgctgctgaggccattgctccatctcacctctgctccagaaataaatgcctgacacctccccacaacctgcaatctgtcgggcactccttcctcgttcaactccctgtagccctttgggactttgcggtcccctaagtagaaaattcctatgggcctgtctccctgggggcctctgtctgctggtggtctgcttaccacagaatcctaaggggcaggagtgcctgggcatgtgtctgtgggagccttgcagtcagttgtgtttggacaagtgcaacagtcaggctgctgattcctgtggcatgcaggctgtagaggttgacaaatggaggggggtgttgagggtgagccctagttgattttttaaaatttaaactctggtaagaacatttaatatgaaaaaaaaaaaa

SEQ ID NO: 47906 - DNA, 546 bp, Homo sapiens; identical to SEQ ID NO: 4581
  misc_feature (1)...(546): n = a,t,c or g

SEQ ID NO: 47907 - DNA, 831 bp, Homo sapiens
gtctgaggcttcacgggtgccgccgctagagggagtggagcgctgagcacgtcatggctggggggcgcaggtcaagctttcaccagtttttaattctttgatggggtaaatttgagcaattttctcgacttgtcgacattcgttattaactgagcaggaatcaggagaggaacccggtcctctccacacagcccagcagagagcctacgactagatttgcatctttacgtcctgcgcggaggctgctacacacatgcagaagtcatgctggtggcctggacattgaagggagagaagtggatttgggagacatttaggaggaacagtaagaggaccttgtgcatgaataatttgtttccacactacagacagaagaatcccagacttcttagagaacccagtgactttttgcaccttaaatctgtgaaatcctcatgttttcttctgccgtatccatagttcaaacaaagatgaggcaaagctagacgcattcctgaaggaacccaagaaattcctctctttctctctctggaatgaaatgaattctctagaccaccagttctaaccttcaaaaaccaaacctgtttgtgagatctccttcaaatactactgtagaccccagtgtttattcattaaattttttaaatatttgttttatttggaatcaaagtatttgtaattttagtatttgtattaatataagggagaaatgtttaaatctgtctatgccacatgtgcctctggcttattgcccaattaattgtagcctcaggctaaactttggtttctgtctttaatttttgtcagaagaaatataactgatctcaaaac

SEQ ID NO: 47908 - DNA, 1457 bp, Homo sapiens
ggcacgaggcgatgtctactacttcagtccaagtggtaagaagttcagaagcaagcctcagttggcaaggtacctgggaaatactgttgatctcagcagttttgacttcagaactggaaagatgatgcctagtaaattacagaagaacaaacagagactgcgaaacgatcctctcaatcaaaataagggtaaaccagacttgaatacaacattgccaattagacaaacagcatcaattttcaaacaaccggtaaccaaagtcacaaatcatccttagtaataaagtgaaatcagacccacaacgaatgaatgaacagccacgtcagcttttctgggagaagaggctacaaggacttagtgcatcagatgtaacagaacaaattataaaaaccatggaactacccaaaggtcttcaaggagttggtccaggtagcaatgatgagacccttttatctgctgttgcccagtgctttgcacaccaagctctgcgccaatcacagggcaagtctccgctgctgtggaaaagaaccctgctgtttggcttaacacatctcaacccctctgcaaagcttttattgtcacagatgaagacatcaggaaacaggaagagcgagtacagcaagtacgcaagaaattggaagaagcactgatggcagacatcttgtcgcgagctgctgatacagaagagatggatattgaaatggacagtggagatgaagcctaagaatatgatcaggtaactttcgaccgactttccccaagagaaaattcctagaaattgaacaaaaatgtttccactggcttttgcctgtaagaaaaaaaatgtacccgagcacatagagctttttaatagcactaaccaatgcctttttagatgtatttttgatgtatatatctattattcaaaaaatcatgtttattttgagtcctaggacttaaaattagtcttttgtaatatcaagcaggaccctaagatgaagctgagcttttgatgccaggtgcaatctactggaaatgtagcacttacgtaaaacatttgtttcccccacagttttaataagaacagatcaggaattctaaataaatttcccagttaaagattattgtgacttcactgtatataaacatatttttatactttattgaaaggggacacctgtacattcttccatcatcactgtaaagacaaataaatgattatattcacagactgattggaattctttctgttgaaaagcacacacaataaagaacccctcgttagccttcctctgatttacattcaactctgtatccctggggccttaggtttgacatgggaggtgggaggaagatagcgcatatatttgcagtatgaactattgcctctgggacgttgtgaggaattgtgctttcaccagaatttctaaggatttctggcttaaatatcacctagcctgtggtaattttttttccct

SEQ ID NO: 47909 - DNA, 558 bp, Homo sapiens; identical to SEQ ID NO: 4586

SEQ ID NO: 47910 - DNA, 1150 bp, Homo sapiens; identical to SEQ ID NO: 4589

SEQ ID NO: 47911 - DNA, 1061 bp, Homo sapiens
tttttttttcagcccagcccttggggcccctttattgaaacaactcacagcacagtatttgagacagacagtgttggccggcggaaccccaggaggctgagaagtcgaggttgcggcatccctcactgccctcctgggggaggcatcctccaagcagacctgagcggccccgggctggggcgggcgatccacacacagaggcgataagagcacttggaatcagggcagccatgcagcactgccctaggcggggatcccccaaagtctgacagtttgggcatcagtggggtggcaggtgccccctcagctgcctttatgagcgcgctcttccacgtaaagctgcatctttaaaatgtccgacgtcatggtttttagtggtatcagccgggggtcatgcatgtggacatcctgctcatccgccaggatccaggggaaatccttgatgacctggatcttctccatgttgcgagtggcggcttctctcgtgtgcaccaggactgtgaaggtacagcctggggggttgtggtccaggacggcatcgcacacgctgatcttcaggatgaaggcccggagcagctgctccacatgagacaacagcgagtctgagctgatggacagcagtggaggctgggtgatctcaaagacgaatttctccactgggcggtgctctttatccaaaatcaccaccaccactttctccacatcattcttctccaggagtggcttgacgcagtgcagcgtgtcctggatatactgattcagctccgggtggcaggacatctggaccggcacgttgtacttcttgcgtttctggaagatgcccacggggtagacctcgcgcacgtagaggatgagatgcacagccacctccaggaactcgcagagcacatcgccaccacttggccaaagttgaggtcttgtcgtgtgagcgtggtcagccttcccgctaccggctctgcgctcggttccccgcgagacgtcgggcccggcccgccgcggggagccacctgaccggaccgatcgcgcctcccgctcaacccggggcctcgcgccgctcggtg

SEQ ID NO: 47912 - DNA, 3602 bp, Homo sapiens
ccgccggaggaccacggctcgccagggctgcggaggaccgaccgtccccacgcctgccgccccgcgaccccgaccgccagcatgatcgccgcgcagctcctggcctattacttcacggagctgaaggatgaccaggtcaaaaagattgacaagtatctgtatgccatgcggctctccgatgaaactctcatagatatcatgactcgcttcaggaaggagatgaagaatggcctctcccgggattttaatccaacagccacagtcaagatgttgccaacattcgtaaggtccattcctgatggctctgaaaagggagatttcattgccctggatcttggtgggtcttcctttcgaattctgcgggtgcaagtgaatcatgagaaaaaccagaatgttcacatggagtccgaggtttatgacaccccagagaacatcgtgcacggcagtggaagccagctttttgatcatgttgctgagtgcctgggagatttcatggagaaaaggaagatcaaggacaagaagttacctgtgggattcacgttttcttttccttgccaacaatccaaaatagatgaggccatcctgatcacctggacaaagcgatttaaagcgagcggagtggaaggagcagatgtggtcaaactgcttaacaaagccatcaaaaagcgaggggactatgatgccaacatcgtagctgtggtgaatgacacagtgggcaccatgatgacctgtggctatgacgaccagcactgtgaagtcggcctgatcatcggcactggcaccaatgcttgctacatggaggaactgaggcacattgatctggtggaaggagacgaggggaggatgtgtatcaatacagaatggggagcctttggagacgatggatcattagaagacatccggacagagtttgacagggagatagaccggggatccctcaaccctggaaaacagctgtttgagaagatggtcagtggcatgtacttgggagagctggttcgactgatcctagtcaagatggccaaggagggcctcttatttgaagggcggatcaccccggagctgctcacccgagggaagtttaacaccagtgatgtgtcagccatcgaaaagaataaggaaggcctccacaatgccaaagaaatcctgacccgcctgggagtggagccgtccgatgatgactgtgtctcagtccagcacgtttgcaccattgtctcatttcgctcagccaacttggtggctgccacactgggcgccatcttgaaccgcctgcgtgataacaagggcacacccaggctgcggaccacggttggtgtcgacggatctctttacaagacgcacccacagtattcccggcgtttccacaagactctaaggcgcttggtgccagactccgatgtgcgcttcctcctctcggagagtggcagcggcaagggggctgccatggtgacggcggtggcctaccgcttggccgagcagcaccggcagatagaggagaccctggctcatttccacctcaccaaagacatgctgctggaggtgaagaagaggatgcgggccgagatggagctggggctgaggaagcagacgcacaacaatgccgtggttaagatgctgccctccttcgtccggagaactcccgacgggaccgagaatggtgacttcttggccctggatcttggaggaaccaatttccgtgtgctgctggtgaaaatccgtagtgggaaaaagagaacggtggaaatgcacaacaagatctacgccattcctattgaaatcatgcagggcactggggaagagctgtttgatcacattgtctcctgcatctctgacttcttggactacatggggatcaaaggccccaggatgcctctgggcttcacgttctcatttccctgccagcagacgagtctggacgcgggaatcttgatcacgtggacaaagggttttaaggcaacagactgcgtgggccacgatgtagtcaccttactaagggatgcgataaaaaggagagaggaatttgacctggacgtggtggctgtggtcaacgacacagtgggcaccatgatgacctgtgcttatgaggagcccacctgtgaggttggactcattgttgggaccggcagcaatgcctgctacatggaggagatgaagaacgtggagatggtggagggggaccaggggcagatgtgcatcaacatggagtggggggcctttggggacaacgggtgtctggatgatatcaggacacactacgacagactggtggacgaatattccctaaatgctgggaaacaaaggtatgagaagatgatcagtggtatgtacctgggggagattgtgcggcagatcctgatcgacctgaccaagcagggattcctcttccgagggcagatttcagagcgtctccggaccaggggcatcttcgaaaccaagttcctgtcccagatcgaaagcgatcggctggcccttctccaggtccgggctatcctccagcagctaggtctgaatagcacctgcgatgacagtatcctcgtcaagacagtgtgcggggtggtgtccaggagggccgcacagctgtgtggcgcaggcatggctgcggttgtggataagatccgcgagaacagaggactggaccgtctgaatgtgactgtgggagtggacgggacactctacaagcttcatccacacttctccagaatcatgcaccagacggtgaaggaactgtcaccaaaatgtaacgtgtccttcctcctgtctgaggatggcagcggcaagggggccgccctcatcacggccgtgggcgtggcggttacgcacagaggcaagcagctaagagtccgggatccccagcctactgcctctccagcacttctctcttcaagcggcgaccccctaccctcccagcgagttgcgctgggagaacgctggcgccagggcctgcccggcgcggcggaggaaagcaaaatccaactaatggtatatattgtagggtacagaatagagcgtgtgctgttgataatatctctcacccggatccctcctcacttgccctgccactttgcatggtttgattttgacctgggtcccccacgtgtgaagtgtagtggcatccatttctaatgtatgcattcatccaacagagttatttattggctggagatggaaaatcacaccacctgacaggccttctgggcctccaaagcccatccttgggggttccccctccctgtgtgaaatgtattatcaccagcagacactgccgggcctccctcccgggggcactgcctgaaggcgagtgtgggcatagcattagctgcttcctcccctcctggcacccactgtggcctggcatcgcatcgtggtgtgtcaatgccacaaaatcgtgtgtccgtggaaccagtcctagccgcgtgtgacagtcttgcattctgtttgtctcgtggggggaggtggacagtcctgcggaaatgtgtcttgtctccatttggataaaaggaaccaaccaacaaacaatgccatcactggaatttcccaccgctttgtgagccgtgtcgtatgacctagtaaactttgtaccaattcaaaaaaaaaaaaaaaaa

SEQ ID NO: 47913 - DNA, 1263 bp, Homo sapiens
ctactactaattcctagtggtgcacaacgagtttctgagaacacagtaataacgccaaagtagcagtgcatctgagaaacataatttttacctcgttgctttcccaaaaataaatatctcagtcatggaaaacactgtttatttgaaaacaatgagacctcaaatatgaaatatagttaacaatgacattgacactgttgctagcactttcccctaaaccacccgtaagtcttggacgcatgtgcatgcagcacacacacacacacacaaaaaccaaaaacaaagccaaaaaaaaaaaaaatcccaaacacaacaatccatgattgttcaatgactcctgatgccgggaggacaggctgttaaaagaatttgtctcccacaatatctctggagtgggcacaaagcccatcacctgttagtgatcacagacattcagttaacctgtccttccagtaatcagagacaacaattcagaccctggacttctcagaatccatgtactgctgagtcttggctttgagacaagacaagtcttggctaaattgaggcaggacagcagccccttccatatgtttggtcccatttgatagaaagtctaatttagagttataaatgtgctcatctatttactctgagctcaatctaatttgacaggtaattcctcacattttctccattagccagctgagagtcagctgtggtagagacacacgacatgggttcaagcccctcatgagccctgtggtggctggcaagtcctttcctttctttaagccttaatctcctcacttgatagagggggagaaattgacccaatgatgataaatattgtgtggttctatatttctagcctagacaattgttgctcaagtgtaacatgtgactgccaaataggatatctcttaagatgaatatctcctaactttcctcacctggtatgatcacatattctggcttcctctaaggtttagaatctgtaggttcaaaaaggtcttgaagaccacctagcatatttctattctgatgagagaaactccatccaagcagctgtactttttcaacttgaaaatctccaaggaaaagagccttttccttctgttgactaatgtttagatgcagaccagggaatctttcctgtcacttggctgaactcccttgctaaaacaacataagacaagttcaggatcccctttattggaggatccaagggaagattagctggtcactaaagtccagaaagcaatggagtcttatagctcattc

SEQ ID NO: 47914 - DNA, 2857 bp, Homo sapiens
ctgaaggagagacattgtgaacattcaagtgaagcaaaagcctttcatgattatagtgcagcagctgccccgagccccgtgcttggcaacattccccccaacgatgggatgccgggaggccccatcccgccagtttctttcagccttttatgtcaccgcgatacgcaggcggccccaggcccccgatcagaatgggaaaccagcctccgggaggagttcctgggacacagccattgctgcccaattctatggatcccacacgacaacaaggccaccccaacatgggaggatcaatgcagagaatgaaccctccccgaggcatggggcccatgggtcccggcccacagaattacggcagcggcatgagaccaccacccaactccctcggccccgccatgcccgggattaacatgggcccgggagctggcagaccctggcccaatcctaacagtgctaactcaattccatactcctcctcatcacctggtacctatgtgggaccccctggtggtggcggtcctccaggaacacccattatgcccagtcccgcagattcaacaaattccagtgacaacatctacacaatgattaatccagtgccgcctggaggcagccggtccaacttcccgatgggtcccggctcggacggtccgatgggcggcatgggtggcatggagccacaccacatgaatggatcattagggtcaggcgacatagacggacttccaaaaaattctcctaacaacataagtggcattagcaatcctccaggcacccctcgagatgacggcgagctaggagggaacttcctccactcctttcagaacgacaattattctccaagcatgacgatgagtgtgtgatccccccttctccgagacgctgagagagcaggcattgcaggcgggaagatgccagaaattatgcaagaagtgaggtgtcattatccaggagctggtggggagggcatctccctgctcccctcaaccccctcccaccccatccacgccccctacctttcccaattttagtttcatgcaataaaaaggccaaactttttattccataaaacaagaaggacaaaactctcaaaaatgtatttcaagtcagtgaccagaaaaatcccaccccttgccctttccccaaaggaccttttctgtacatgacacttttttgttgttttttgtttggggttttaccattgttgggatttttttatttgttttcaggggggttttttgggggaaaatttttttaaatggaagcttctagcaagccccccaccccaatcaacctctatgctttcttcttaaaaaaaaaaagaaaggaaaagggaaaagaaaaaaaggaaaaccagaagccctgctgtctgtctgtgcccaagcccttccaccagaaaagctagtctaggtgtgagagcccacattgtctgtagccatcaaaaataataataataaactggacagtttacaatcgttggtttctttcaaaaggccttttttggaaagaagaaaaggcagtcaccgttttccacttggggttttggtttgtgcaacaggcaggggaggagtggggacgcgtttgttctagcttgatttccatggcaacagcagcggcacgcttggaccccagaacccagcaccctcatcctgtggccagaggggccggaccactgacccctttcaggattccaccacagcccagaccgtcaccgtgacccggtggcatgcactgttcccaggacaccctcctcctctcctggacctcccttccgtcctggcctccctgcctctccagcccctcctctgcccccaccccagtcttcccagtgagaatcctgccagctgggtggtggcctggcgcagagtgggagaggctgcactgacaggatggctatgacctgggacatggaaacagtgacctccgcgttctggtcccgagatcctcgcatcagcgtcatcgtgtgcaccggcttggggggctggagttccggttttctttgttttttctctttattcgtcctttctcaaagatgggatactgatcagaattgctctgtatatgcttgggactggatggaaagactttggagcagctgtggggggtggggggacaccgacaaccaaacagacgtgctggctccagtcctgtttttactttcaaaaaccaacaagcccgacagtggagcctgtcccctcccaggagggtgctcatggccccactcacctcatcaccccacggaaacctttgtgtcttgccctggaagacacccgaattctttgtacattgacatgcccttctccttcctccctcccctgtagctggtctttgttttactccctccctttctgatccatgtatatcatattatgtgagatatcatctgcctgaaaaaagactttgtgcggattattgggaacattgtagctgtttctgtgttttttcttaccttgtagtctggttctgaattaagagaggaaaaaaaagtaattatgatacattgtagtttgtgtacgatatatgttgataacgttttattaaagggacatcttttttccgcagcccttcctgacatgtttggggaatgtgggttggagtttattacactgattacaaaatgcaaggtgacttcttgggcacagtttttgttcctggtgcataacaagatgttttgtgtttgaggcgtctgcgttcttttcctgggcctgcaagttctgtgttcttgtggagtcgcgatggccttggcggaaggtgggttgggagggaaggtatccatctcactttaaatatttgggggccgtctaaaagccattttccatttcttgtcttgcaaacacattttggtccgctggaatgt

SEQ ID NO: 47915 - DNA, 913 bp, Homo sapiens
taggatccccaaccgcctgcgaaacccaagccgccgcgtaggagcgtgcgtttcgggccctcttctcccacctgttcggccagcctccacgatccagctgccaaccatctagcctaccctgatctctgagcaggggtcgtcgtcattttactccagaggagactgaagccaaaagactccccatccccaggatgtcaacctcagtccctcaaggccatacctgggacccaacggtgaaagaaagacgatgaggaggaggacccgctggaccagctgatctcccgctctggctgtgctgcctcccactttgcagtgcagggagtgcatgggcccagcaccaggactggcggcaatgccagccacaggtgcaggcgtttcaaggattgcatgagtgaacagcaggcgaggcggcaagaggagctgcagaggaggcaagaacaagccggtgcccaccactgagaccccaaaccacctatccccagtagatgggccctgcccaaggaccagcacccagcaagattatagaggaagaaatcctaaatgctggtgtgggaggtctaaaacatggggagagtttttggatctggagttgagagccatgggtttggacatgactggcacaaacagctgtcatatgttcatggtcagatgtcatacattctcagctgtcttgttccaccagtatttaccaggaaaacaaagaatgtgttaagggatgctcccccaccccacatcttaagtcagtgtgccaagtactgagatgattttagggacattttattttaaattaaatttacaatctaatggtaaattgattacctaattagtgcctttctctttcatcacttgttctggatgtttcaatcagtttagtggaaggaaaaataaatggggaaactttttattcaaaaaa

SEQ ID NO: 47916 - DNA, 373 bp, Homo sapiens
gagctgagttggagaagatttttcaagacaaaaaccaggctgaacgggcccttaggaacctggagagtcatcatcaagcagccattgagaagttacgtgaagacctgcagtccgagcacggccggtgtttagaagacttggagttcaagttcaaagagagcgagaaagaaaaacagctggagttagagaatcttcaagcatcatatgaagacctgaaggcacaatcacaagaagagatcaggcgcttgtggtcccagcttgattctgccaggaccagtagacaggaattgagtgagctacatgagcaactcctggcgcgcacctctcgtgtggaagatttagaacagctgaagtcgacgcggccgcgaattcc

SEQ ID NO: 47917 - DNA, 870 bp, Homo sapiens
ctgtctcctgcctctgctcctctgcccttcttatagccagaacttgtatcttctcagcaaccttcactttgtccttgtccctttaccattccccatcaaagagtagtctgctatatcaatttgtgtagatatgtctgtctttttgggtcctcagagaaaatgcccattttctcggagaattctctgcactcctctctgcttcacattcaacttccctgttctcatctttggtaggattctgccagttgcttttgcatcttctgttcctggggtaatggtggggtcttaatgggaggctgggtggaccactggcccgtccactctttcaacagggagggaacaggcatggccaccatagttaacacacatttaggaggaaagggacagaggtctgctccttcctgccacctttctcctggccccttagcattcccccagtccctccctcttcaccttgctccgtctatgtcttcccagctcagccttttccccactcttaaatactgtactacttcactgtaagaacgaaagaattagttaggataccaatgagtaaaagggttcctgttcactctgactctgtgcaaattgtattacagtagaccgctgacgttcccaagtgacagatccagggcctttcaaacatccccaaagtcatggccatactcaccattagccagtttctaacatctgtttcagggtatccagctgtagatgttcttatcccccatacttgtgagttattggggttgctcacaaatactaggggtttttgttgtatttttaacaaatatatcctaatgtcatatttattctcttttgtaactgctgtctttacaataaagaaatcatctgcctttctatcttaaa

SEQ ID NO: 47918 - DNA, 748 bp, Homo sapiens
ttttttttttttttttttgccacttctgaccctttattggggcactgtcggccccaaataaatataatacattaaacccagagctgagggaatcgtgcaccccaggaggcgccccccacaacctcagccgggcaaaataagttagtggggggcctgccagaggccgggccagctccctggtctaaagtgcatctcggttccgtggtccccacgtctgcacagcccctggttgggccgtcgggaggggcgggtgggagatgcctggcgctcacaccgtgccagcagtggccgccgaggctctgtgtgtccatctgtccatgtgggggaacagctgcgtggccggggtcctcaggaaaagctgtcatcgggccggggctgggtgtcaaagggagggtctgagactgtgatgccttggtgcagcttctccagcgagaacttcatctcatccaggagctccacggaggccccgcaggatctgccctccacttgtgcaccctccacgctgtggaattgcttctgcagcgcccaggatctcggcccactctgtggccgtctgggggaacttcgcctatgccagggccaggctgtgccaggactcaaaggtgtgggctgtcctttccagggaccagaggcggtagaagagcaggacgttgagggcgatgaggatgataaggacaatgctgatgagaaccagggcactggggatgccctgccccggggccctggtccacagatggttcggagaagc

SEQ ID NO: 47919 - DNA, 1970 bp, Homo sapiens
aaatgaaagtgaagtaaatgagccagaagaagaggagggttctgataatgatgatgatgagggagaagaagaggaggaagagaatacagattaccttacagattccaataaggaaaatgaaaccgatgaagagaatactgaggtaatgattaaaggcggtggacttaagcatgtaccttgtgtagaagatgaggacttcattcaagctctggataaaatgatgctagaaaatctacagcaacgaagtgatgaatctgttaaagtgcaccaactagatgttgccattcctttgcatctcaaaagccagctgaggaaagggcccccactgggaggtggggaaggagaggctgagtctgcagacacaatgccgtttgtcatgttaacaagaaaaggcaataaacagcagtttaagatccttaatgtacccatgtcctctcaacttgctgcaaatcactggaaccagcaacaggcagaacaagaagagaggatgagaatgaaaaagctcacactagatatcaatgaacggcaagaacaagaagattatcaagaaatgttgcagtctcttgcacagcgcccagctccagcaaacaccaatcgtgagaggcggcctcgctaccaacatccgaagggagcacctaatgcagatctaatctttaagactggtgggaggagacgttgatccagcagcacgtgtcatttcattaggtcctgtatctgatgttgtggttagtggagtcctccagcaattgaatgagagcagtggacacatctcagcaggtcggtctagagagttgcgaatctaaacctgggacaggctggggccaggaggcagaaacaccagcctctgccaacaccggaacaagccgacgcttccagacaaggcggaaaaggccttttgtaatggaaatctcgcgagggttaatcttctcttgagaatggcagtcaagaaatgagatggttcacttgactactgagcagttacaccaaggagagcgtgaaggagatgattgagccagagaagaaacgggttgtgatggtaatggtgtgggggaaatgaacttgagctttaaacttgatttgagtttcagtgtctctgaatttgaacatcccacgttggaagaagatacatttgggggctccaggactacagtagaaaagtatagagcaagcaggaaaatcttctagtaaaacttacatgcaggacaacaaaatgatgaaagatatccaaataccagataatccaccaggaaggcttttgtttaggaatttgtttcaagaggaacaagggatgagggagaaaaatccgttttatccatcagagtcagtgctataaaattgcctattaaggtaaaagaaaaatgtggagactattttactatacagagagcattaattcagatggcttagaaaagtgataccagcccaagaacagggatctaggtgagcccattgtaagtatcattgaaaacaaaacatgcccgtcaacatgtcacagaaaacgaacgaaggacaacaagaagtggatgagaatattttgttgaccttcatgggtttacagcctctgtctctaaacaaagtatggaaacaagtagagcttttattttgcttttgtttttgttttgtttttttttttgttttcccccactaaatagaaatgagggtccttagtctgtttctgacaatctgttaatttcttaggacagctgtctttggtttgctttccagcaggcgtagtatatttagtcggagagcacatctgtatgcgacaacttgattacatctttttttctagctattttgcattttttcttttaccatgtttcagtttctgcatgtagatttaaataaaaaacaaaacttgtaaagttgtaacatttcacatggaaatgctgcccaatcttcaccagcttcagaaatctgacctttgccgatgctgcaataaagtgttgtaatttaaaaaaaaaaaaaaa

SEQ ID NO: 47920 - DNA, 1436 bp, Homo sapiens
tttttttcatattttgtgtgctgattttttaatgaacaacttataatcttacaaaataactggctgtagctgttttacattacaatacagtagatcagctcctttcactacattcccaatcaagccatccccttgggtgttaactaatgcactcaatagtgatcacaaagaatacaggaagtgccaagttcaatgccttgtaatagaaaaaagagaagatgagaatcaggaagagctctttactttcacaatccctttactttaatttctgtcagtatctgcccattctcctcaccctgtccccttacctgcctttctgattggaggctgtcatgctagttgttaggagccagctagccctgggccacctgggcacaatcaaacacacagaagagtctctgaagaaaggctctcaatgaccacatgggtggataagagtagcagaatgtggaccaccacatggattgagtgtgagttgatgttgctggggatctgtgaccacagtgtcttagtccttccactttatccagtgacctgagttgctcaaaacatcaggtcccaggaacaaagactggaagaacctgctgtctctgaatagctatagcctgactatggctgggaagccttatagcctaagaggctcttcacacacaacaggaactttccttttgctttcccagagcagtggtgaattgcagataataaaatattttaaaatgaaatttaaaacagaaatgttcttactgttgctcttgtggagagactgcatgaagacacacactggcatgaaccacaggctccatgttcctgagctgagtaatgccccaggataacaattcctctgcctcaatctcagacaaagtaggattctccaaggcagaacttagaatgtgtctagcaatttggacattttccccaataaaacaagtttataaaattttgaaaatagagtgtctaaacttttccattgtcctttgcatattgaagcctatcagaatcccaagaataaatatgtttgtcttcttgggggcactaagcatgacccaagacaatgaatggtatctgaactacattttctttacactagagattagtagacaaaaggttttttttgaatgggtgaactctgctctttccatttcccaataactttgcaaccctcattccacaaacccacagattaatgtgggtacatcaccttattcgtgttttattctctttcaggatattgttcttccctacgtgatagtgtggataatatttctatcattgtggtagtatttcctattcctatttgcacagccattgctctagtgttgatgggaagagtagaaaaactgtggtcaaagcaaaagagcagaagatgagaagagaccacagctgagctctaaattttgtctgttcttggtttccattggagaagaaactttaaagga

SEQ ID NO: 47921 - DNA, 1943 bp, Homo sapiens
tttttggtaatataaagtttgttctgttgaaaactgattaacattttaaacagggggaaagaaaagcggtctactagattaaattttaaaaggattttgttatttactatacaaatatacatttcaacttttacaacattcactccagtctgacctccttgtctatagaagactaagagatcaacatttccagtctctgacttcaaggacattattacggatacacaatgccctctgaaagcttttgcaaatgacagaaaatactgaagatgaccagaggctcaggtgttaaggatgcattttccatgttttccaacagcacacaaactccttacaaaaaacaagcttatctagatggtcccacgagctggtcatcttcagtttacaatatgctgtggctgctggcccatgtcactgggctttcctataaaagctttcttttcttggaactgctgtcctcctgctccagtgtcctcttgtcccacctagagttcctcctggtgtgatgggtctcggaaccacacttctcctgctccccttcactgaaagccctggcctctctcctgtgacagagctcctcttccgggtcatcacatttgctctgacacgtggaagcctcgggactggcagctggaggttcgccccgcacgggaggtttgtggctgctcagagcagccactacagcagcgggctgctgtatatggctcaggtcctggtgaacgacagggaagcccggctcgcccgtaggaggtgttgctccaggatgctgggggctcgagggttgtggatcccaaaggaatattcctcctttgacctcaatgcccatcctcttcagcagtcgtgggtcctgaagttggtcatgaacaggaggtcctttcagggtcctttgaagtaacagtaagagtaatttccttggagtcagagggtgtgtggtatagagaagcagcaacagatgtcttggcaaatccactgtctagcttgctgctgggcaaaccaccctggggtctggacccctctggggctatggtaggagggtgagtgagacttctctgcagcacaggcttgagtttcagaatcttcactgcatcatgtctatagtttttgtcacaggtcttaataatggcaccacgcttctgagcatcctgaatcagctgattccaatgctggttttccatcagggtcctcaaatgtccgaggatgaagaggctgtacttggctcgtgtgatggtgacattcaatctctgcaaacttgccaggaatccaattgaaccttggatgctatttgctctgacacacgtaacaataaaacaatccttctgccgaccctggaatgcatccacagtgtctacttctgctggtccttttctatcgaactctttgtccaaatccttctgaatcatcgtcttctgggccttgtaatgagttattatgccaatgtttcgaaaactaacatcctttcttttgtctttaataagcttaattatttccatcaccagttttatttcttgaacatttatatatgagtcattatcccgtctttctgaaccatctccaacatcaaacacaaggtatggctgaaatggccaatctgatgaacatcgaatggcttctgtctgtctatttgtttttaagtttctgttataaacataattagaagggaagaggcatatgtctggatgcatcctgtactgaacagtgagctgtagaatgggcagcctgctgatcatgttgtgttctacattctcttccagcagtctgcagaagcgagccatcattgactggtcgtagccatactcctgtgctttcatagagatgactgtcggagggagctgcttaggatctcctactaggatgagcttattgcagcgatggatgagtggagtaagagtctcaatttcacaagactgtccagcctcatcaacaatgacacagctgaagggaca

SEQ ID NO: 47922 - DNA, 881 bp, Homo sapiens
tttttttgcccacctatgccctttccagggcagtttaattggtatcatttgtaaaaggtcttttccatcacccccaaagcctttgcattccctttccaagaaggtggctgtttactggttttggccccatgtgcaacagtaggccttggtatgatgctgccataacactcccatgtgacactccaggtgacatccaagtgcaagtctatgttcagctctggacagcaggggggaaggtgaggagagtcaggtctgtaaattgaagctgggcagggccctggctggctggagatgtgtgggcaaggtgagcaggccccatgtgcaccccagctccagtgcccactgatgtggctgaagcccaggttggttgtggtcaaattagaggtcctgagagagaagcccttaggccaaagaagtgtgtgctgggaagcaggccagggcagaggcccagggaagatctcagcaggggcagtgtgagcatgagcgagtgtgtgcacctgtgacagtgcagacagcccaagatcagagatacaatgtgcaggggggcctttggtgagtgtgtagctgtgcccctcccttctgagatacaggcccagcccccgcctccggaggctaagggggcacacctgggggtaggaggagtctgggaaggaaactcagctggaaatggtttaggcctcagagcccacatcctgtgggaggggctgtcaaggggcctgctgtcccggtcctgtcgcagtcctcaaagatgctagagtgacagtcctctaggggtagagatggtcgtcctcccaggagaaggtggcccggagacttggaggtgggatcaatcctgccagtcctggatcaggaggcctctgtcgggcgcctcgttccgaatc

SEQ ID NO: 47923 - DNA, 948 bp, Homo sapiens
  misc_feature (1)...(948): n = a,t,c or g
cgaacgagttcctcggcggctgcaggatgggggactccaaagtgaaggtggctgtccggatacgacccatgaaccggcgagagactgacttgcataccaaatgtgtggtggatgtggatgcaaacaaggttattcttaatcctgtaaatacgaatctttccaaaggagatgcccggggccagccgaaggtgttttgcttatgatcattgtttctggtctatggatgaatctgtcaaagaaaagtatgcaggtcaagatattgttttcaagtgccttggagagaatatcctgcagaatgcttttgatggctacaatgcatgtatctttgcctatggacagactggctctggaaaatcttataccatgatgggcacagctgaccaacctggattaatcccaagactttgcagtggactctttgaacgaactcagaaagaggaaaatgaagaacagagttttaaagtagaagtgtcctacatggaaatttataatgaaaaagttcgagaccttcttgatcccaaaggaagccgtcagacgttgaaagtcagagagcatagtgtgttgggaccttatgtcgacggactttctaaactggctgtcacaagctacaaggatattgagtcgttgatgtctgagggtaacaaatctcgcacagttgctgcaaccaacatgaacgaggagagtagccgatcccatgcagttttcaaaatcaccctcacacatactctctacgatgtgaagtctgggaaatctggagagaaagtgggcaaactcagcctgggggatttagatggcagtgaacgagcaacgaagacaggcgctgnagggganaggctgaaggaagggagcaagattaacaantnnntcanaannttcggtntggttatnttagntattgcagatnagagtgctggcaaaaagaagaataaatttgttntatatngtgag

SEQ ID NO: 47924 - DNA, 1333 bp, Homo sapiens
aagcagcgagggcgcgaccgggggtactctgctgccggcttctcggagcggcgctgggcgaccagagcagggtcgagatgtcctacatcccgggccagccggtcaccgccgtggtgcaaagagttgaaattcacaagctgcgtcaaggtgagaacttaatcctgggtttcagcattggaggtggaatcgaccaggacccttcccagaatcccttctctgaagacaagacggacaagggtatttatgtcacacgggtgtctgaaggaggccctgctgaaatcgctgggctgcagattgggagacaagatcatgcaggtgaacggctggggacattgaccatggtcacacacgaccaggcccgcaagcggtttcaccaaggcgttcggaggaggtggtgcgtctgcttggtgacgcggcagtcgctgcagaaggccgtgcagcagtccattgtgttcctagcagccaccaccatcttgcgattcctgcctgccgcctctctgtacagtaacgccacttccacactctggtccccatctggcttctgctgaccgctgggccccagctcagaagggctatagctggtcccagaggcctggcctggccttccttcccttctcccatccctggcctggggcctctgggaccagctttctctcctggacaccgaggattggaaataagggcctggagctgagtagtagccagtctgctgtgaccacaggctcaggtccgaccctgctgcttggccacagcagtggctgggcaagtgggaaccactatctcttgggagcccccaaaagctgggaaatgctggaggaaccaggcctttcccgcttttgcctggctgcagggttcggctccgcccctgccccccagccctcgtgtgtccacaccgcagtgcctctgcccctcgggggactggacacacatcctgccagaggcgctacgaagctttgcccagatgaagcccaggtggggctccgcgttcactcccactctcccgaggggtgctggcctccccagggtttgccttcttacggatttagacgaggttcgaggctcacctatcagggcagctctcaggattgtcattttcctctttgcctgtgggtttaacttttgtatttttttaatcacaagtttgatacaaaatgtttttatcgtactctttggagatgcccattctacttttgaatttagcttttactaattcgcatctggaagctcagcaagtgcacaagccttactttggttaccgtggaaaccactgccacccctccccgatgtggtgcgctcaataaaaatgctggaattcaaaaaaaaaaaaaaaaaa

SEQ ID NO: 47925 - DNA, 375 bp, Homo sapiens
  misc_feature (1)...(375): n = a,t,c or g
gggctttgttgaccgggagaaacgagatgggggtgaagctggagatatttcggatgataatctacctcactttccctgtggctatgttctgggtttccaatcaggccgagtggtttgaggacgatgtcatacagcgcaagagggagctgtggccacctgagaagcttcaagagatagaggaattcaaagagaggttacggaagcggcgggaggagaagctccttcgcgacgcccagcagaactcctgaggcctccaagtgggagtcctagcccctcccctgatgaaatatacatatactcagttccttgttaaaaaaaaagaaagaanaaaaaaaanaataaaagaaaaanctcgngggggggcccggtaaccca

SEQ ID NO: 47926 - DNA, 2203 bp, Homo sapiens
aaaaagatccctctgtgttgattaagactgctattcgttgttgtaaggctctgacaggcattgatctaagtgtgtgcacacaatggtaccgttttgcagagattcgctaccatcgcccgtgaggagacccacaaaggggcgtacagttccagcttcatgtggagacagtggttttatttttcccgggatgtttggcattgccttcccacccgctcagagtgggaaaccctctcccgaggatacaagcagcagctggtcgagaagcttcagggtgaacgcaaggaggctgatggagaacaggatgaagaagagaaggatgatggtgaagctaaagaaatttctacacctacccattggtctaaacttgatccaaagacaatgaaggtaaatgacctccgaaaagaattagaaagtcgagctcttagttccaaaggattaaaatcccagttaatagcccgattgacaaaacagcttaaagtagaggaacaaaaagaagaacagaaggagttagagaaatctgaaaaagaagaggatgaggatgatgataggaaatctgaagacgataaagaggaagaagaaaggaaacgtcaagaggaaatagaacgccagcgtcgagaaagaagatatattttgcctgatgaaccggccatcattgtacatccaaattgggctgcaaaaagtggcaagtttgattgtagcatcatgtctttgagtgtcctattggactacagattagaggataataaagaacattcatttgaggtttcattgtttgcggaacttttcaacgaaatgcttcaaagagattttggtgtccgtatatacaaatcattactgtctcttcctgagaaagaggacaaaaaagaaaaggataaaaaaagcaaaaaagatgagagaaaagataaaaaagaagaaagagatgatgaaactgatgaaccaaaacccaaacggagaaaatcaggcgatgataaagataaaaaagaagatagagatgaaaggaagaaagaagataaaagaaaagatgattctaaagatgatgatgaaactgaagaagataacaatcaagatgaatatgaccctatggaagcagaagaagctgaggatgaagaagatgatagggatgaggaagaaatgaccaaacgagatgacaaaagagatatcaacagatactgcaaggagaggccctctaaagataaggaaaaagaaaagactcaaatgatcacaattaacagagatctgttaatggcttttgtttattttgatcaaagtcattgtggttaccttcttgaaaaggatttggaagaaatactttatactcttggactacatctttctcgggctcaggtaaagaagcttcttaataaagtagtgctccgtgaatcttgcttttaccggaaattaacagacacctcaaaagatgaagagaaccatgaagagtctgagtcattgcaggaagatatgctaggaaacagattattacttccaacaccaacagtaaagcaggaatcaaaggatgtggaagaaaatgttggcctcattgtgtacaatggtgcaatggtagatgtaggaagcctcttgcaaaaattggaaaagagcgaaaaagtaagagctgaggtagaacagaagctgcagttactagaagaaaaaacagatgaagatgaaaaaaccatattaaatttggagaattccaacaaaagcctctctggtgaactcagagaagttaaaaaggaccttagtcagttacaagaaaacttagagatttcggaagacatgaatttgcaatttgaaaaccaaatgaataagacaatcagaaacttatctacggtaatggatgaaatccacactgttctcaagaaggataatgtaaagaatgaagacaaagatcaaaaatccaaggagaatggtgccagtgtatgataaaatccatgtagtgatgaggaatggtgttaaataatgtaatatataaaaatcatgatataagaatgtttgaaggtgatgcatgtttgattttagtagtataaatgtattttagttcaaatgatgtataaagttttatgaatgtgagtttctgcttttgaaaattgcttgtaattcctagccttcaaattattaaacactccttgagtgaaataattttgcattgcaaagtgttttaggatgaactttgttatagttttaactccaataaagttcatcagtttaa

SEQ ID NO: 47927 - DNA, 486 bp, Homo sapiens
gacggagaggggttgcttaacgaagaattgccaaattgctgggaatgtccaaagtgctaccaggaggacagctcggagaaagcccaggtaaaggaaccttatcagatttgcactgtgacagaaaggaggcatcaaatgtgggggattgctacacgtttgcctttgcattagtgttcacacagtttctctgacctaggagattatttttgtttggtttggtatgtttttcctttggttaatttttagtattttctttgttagagtttgtagcattgtgttttgtattactaaatgttgttccacttgggatctgcaaattcctaaggtccttttatactctggggccctacaaagagaggaaccacggctgggctatttgaggagagaaattaggtgagtatgatccctcctgaggaatgttaactagaggagaggcagtggcctgaggcagccagtgagtgcagcagtgtacttgagcttccagtc

SEQ ID NO: 47928 - DNA, 419 bp, Homo sapiens
gcagcctgggaaacaggcaagactctgtctcaaaaaaaagaaaaaagaaaaacagagtagagcaaatgagtaaatatatactgttaggtaccagggttctctctgtgggaaaagggccttctcatatggaatgggggaaggcggtggattggagttggggccatcattatgctcttttgatggtataaatatgcaattgacaagtcataaccatagaaagaagagcaagaagccatgtccccctgtagcaatgcatgtatctagtgcccacatctctctatttcttgatgccagtctccatcagaaggagccaggtctccttggacaagtggagggtgccaggcattgaggcatgggaagtaaaatgcaactagagccctttgtccttccagaaagcaagaatgcattcaaagacagat

SEQ ID NO: 47929 - DNA, 1403 bp, Homo sapiens
cctagagccgcccaagggatggcgatggccgtacttggcttggagactggcgcggcgttcgtgtccgaggtcactagtttcccggtagttcagctgcacatgaatagaacagcaatgagagccagtcagaaggactttgaaaattcaatgaatcaagtgaaactcttgaaaaaggatccaggaaacgaagtgaagctaaaactctacgcgctatataagcaggccactgaaggaccttgtaacatgcccaaaccaggtgtatttgacttgatcaacaaggccaaatgggacgcatggaatgcccttggcagcctgccccaaggaagctgcccaggcagaactatgtggatttggtgtccagtttgagtccttcattggaatcctctagtcaggtggagcctggaacagacaggaaatcaactgggtttgaaactctggtggtgacctccgaagatggcatcacaaagatcatgttcaaccggcccaaaaagaaaaatgccataaacactgagatgtatcatgaaattatgcgtgcacttaaagctgccagcaaggatgactcaatcatcactgttttaacaggaaatggtgactattacagtagtgggaatgatctgactaacttcactgatattccccctgggtggagtagaggagaaagctaaaaataatgccgttttactgaggggaatttgtggggctgttttatagattttcctaagcctctgattgcagtggtcaatggtcccagctgtgggcatctccgtcaccctccttggggcttattcgatgccgtgtatgcatctgacagggcaacatttcatacaccgtttagtcacctaggccaaagtccggaaggatgctcctcttacacttttccgaagataatgagcccagccaaggcaacagagatgcttatttttggaaagaagttaacagcgggagaggcatgtgctcaaggacttgttactgaagttttccctgatagcacttttcagaaagaagtctggaccaggctgaaggcatttgcaaagcttcccccaaatgccttgagaatttcaaaagaggtaatcaggaaaagagagagagaaaaactacacgctgttaatgctgaagaatgcaatgtccttcagggaagatggctatcagatgaatgcacaaatgctgtggtgaacttcttatccagaaaatcaaaactgtgatgaccactacagcagagtaaagcatgtccaaggaaggatgtgctgttacctctgatttccagtactggaactaaataagcttcattgtgccttttgtagtgctagaatatcaattacaatgatgatatttcactacagctctgatgaataaaaagttttgtaaaacaagcttaagaattcacacaggaaaaaaaaaaaaaa

SEQ ID NO: 47930 - DNA, 885 bp, Homo sapiens
  misc_feature (1)...(885): n = a,t,c or g
tagctctgggctcatccagaccgtgttcatctccagttacatggtgttggcacctgtgtttggctacctgggtgacaggtacaatcggaagtatctcatgtgcgggggcattgcttctggtccctggtgacactggggtcatccttcatccccggagagcatttctggctgctcctcctgacccggggcctggtgggggtcggggaggccagttattccaccatcgcgcccactctcattgccgacctctttgtggccgaccagcggagccggatgctcagcatcttctactttgccattccggtgggcagtggtctgggctacattgcaggctccaaagtgaaggatatggctggagactggcactgggctctgagggtgacaccgggtctaggagtggtggccgttctgctgctgttcctggtagtgcgggagccgccaaggggagccgtggagcgccacttcagatttgccacccctgaaccccacctcgtggtgggcagatctgagggctctggcaagaaatcctagtttcgtcctgtcttccctgggcttcactgctgtggcctttgtcacgggctccctggctctgtgggctccggcattcctgctgcgttcccgcgtggtccttggggagaccccaccctgccttcccggagactcctgctcttcctctgacagtctcatctttggactcatcacctgcctgaccggagtcctgggtgtgggcctgggtgtggagatcagccgccggttccgcacttccaacccccgggctgatcccctggtctgtgccaatggccttcctggggttctgcaccctttcctntttcctgttcccttgcctgcggncccgtggtaagcatcgtgggccaattatatttt

SEQ ID NO: 47931 - DNA, 919 bp, Homo sapiens; identical to SEQ ID NO: 4710

SEQ ID NO: 47932 - DNA, 1967 bp, Homo sapiens
  misc_feature (1)...(1967): n = a,t,c or g
gtcttcagatgataccacccctttccccagctcccaaccaagagctggttctagggctgtgttatatgtcatatttagcgtgtttatatatgacctttgatttctgttgtttgtattttagcacagtgtatgcaccttcatttaaatacatctgtgtgcatacagatacgcatatatgtgtgtgcgtatgcatatatctctcatctgtagtttccaagagttcagctgaagcagatggagtcctgcagcccaggagacaccctgcatccctgctaatagtgtttgccacaagtattagtgagtcttccttattaatattttcatttcagaagactgaagcaaagctgatagtgtttgctgtttctttggcagctaagtgagggtcttgggatgacttgctgtgttcctcaagctgcactttggggccatctctgcagtattagccccctttttgcttggtggtactctgtctgtgcctgtgtgtgtgtgtgatagtcactcttgcatggcttccatgtctggtttgtggcatttggggataaggtgctgaagccagagcatttgcagtttgtttgaggcctcgttgccaatgatagatcactcctgttgacctggtatgtctgcttgcttgctgcttttccttgctttctcttggaagaggaaaggactctggtcaggcccaggctgagtgagatgagctgcagctggctcatggccttcttagagcagagagaggagtatgtcattttactaagttcctaaacaaacatttatgcaggcaacactccttgcagatccagaaactgaggcacaatagggttatgacttgctcaagaatatgtagctgctagggggtaaatcaaggcatcacaatttctgttcagcgggcaggaataggctgtgaattgctagcacttttttttttttaagcaattactttttgacttgttcctctgaaagtgcaagaggcgtacacctttcccaaatgtagactagaatctgcaggatgccacccactgtatagttctgctttcccagagaggaagaacttttagaaaccaaatgatcttaattgttattgcccacccctggcttttccgggtagaaaattcacagtaggaatgattgttaagagagagtgcttggaaccatgggttaacaggaaaggctacctaacttcacatatctgcaaccagagcagccaccaagcattacttagcagcaggaaaatgattgtatttgagttcctgtgtgtccaaaactgaggcaccatgttctttgaaaacatgccacctcaagnnnnnnnnnnnnnnnnnnnnnnnnnnnnnnnnnnnncgtgatcttattttaaaagaacactgctatagaagaatttacacaccaaattccctgaaagctaaagtattgttccataacttacacttgaggcaatctgctcagtgtgtaaccactttataaaaaataacttaccattgataacctggaaggtggaactacttgtaagtagctggtgtttattgattaaaccatggaagttttcatgatacccaagcatgttgctgaaactgatgcatttgaaagagctgttgaaataatgcaaaactttggttttataagaatctactcatgttttaaaagtatttaactctgtagaccacaattatagaaagctcagtaatgctgctaatgacatttgtaaactatatctgtaatgtagtgcaatatttttatatttcactgggagaggcagtagagacatcatagttgtactttagtgcaagtgggggaacactccaaatagcctagagtatagtaaggtacaaagcttcaatgaaaaaagctgtattatattacattactgatgtaatcttgctgccatgctatgtatcaatagctaaaaaataataataaagactaccacagaaaacaagaatatcttcatttaatgaaatctttaaaaaaggtga

SEQ ID NO: 47933 - DNA, 561 bp, Homo sapiens
tccaagctacgccactcgggctggggcgttgggagcgggagtgcagagcgtggtcgtggcggcggcggtgagaagagcgaggcgtaggagggggtgccatggccgggcagcagttccagtacgatgacagtgggaacaccttcttctacttcctcacctccttcgtggggctcatcgtgatcccggcgacatactacctctggccccgagatcagaatgccgagcaaattcgattaaagaatatcagaaaagtatatggaaggtgtatgtggtatcgtttacggttattaaaaccccagccaaatattattcctacagtaaagaaaatagttctgcttgcaggatgggcattgttcttattccttgcatataaagtttccaaaacagaccgagaataccaagaatacaatccttatgaagtattaaatttggatcctggagccacagtagcagaaattaaaaaacaatatcgtttgctgtcacttaaatatcatccagataaaggaggtgatgaggttatgttcatgaggatagcaaaagcttatgctgcctttaacggat

SEQ ID NO: 47934 - DNA, 689 bp, Homo sapiens
cagagcatctgggacaggctgattctgagctaaacagggctcctttaaggcaatatgaactgttgccttctataaattgcacattgaggaactctaatagacaaagattaggtgtcaggcagaaaacactcattgtaaatatactattagttgataaacataggactttcttattccccagtttttctttatcatataatttaaatatttattcattttgtatttaaagactacctacacatagatatatgattccaaagtcatactttctccatccccacattagccaagtgaatacagggccaaatgggttcttggaatgataataacaaagcattacaaagtgggtccccttggttccagccttgtccagagtttttggttatatatttctatttattacaatttaccttttaaattgtaaaataaacctttgtgtggacagagccaatgtttcaatcttgaatgagtaaagaaaatactttggaactgatcctcattttgaaattggttctaaattattatccatttccaatgtctgaaattctcttacttcctgctaaaactctctttctgccaaagttgtttcgtaatctgtctcaatgactattaatgtaaaatttaaagaaggtaaccctggcttcttcaagggggggaatttaaaagtgtttattgaattttactcaggg

SEQ ID NO: 47935 - DNA, 1217 bp, Homo sapiens
aaaaaaaaaagaaagaaaagaaagctggagctggtggcttaggccatcacccttcccttggctggaactactggacagacccttttgagatgtgcctgtggtgctgtggagatgtgtgtagtggtcttagctctttgttgagcttgtgtgtgtgttgtgtagtcttagctgtatgctgaaattgggcgtgtgttggagggcttcttagctctttggtgagattgtatttctatgtgtttgtatcagctgaatgttgctggaaataaaaccttggtttgtcaaggctcttttttgtgggaagtaagtaggggaaaaggtctttgagggttcctaggctcctttgtacaacaggaaaatgcctcaaagccttgcttcccagcaacctggggctggttcccagtgcctggtcctgccccttcctggttcttatctcaaggcagagcttctgaatttcaggccttcattccagagccctcttgtggccaggccttcctttgctggaggaaggtacacagggtgaagctgatgctgtacttgggggatctccttggcctgttccaccaagtgagagaaggtacttactcttgtacctcctgttcagccaggtgcattaacagacctccctacagctgtaggaactactgtcccagagctgaggcaaggggatttctcaggtcatttggagaacaagtgctttagtagtagtttaaagtagtaactgctactgtatttagtggggtggaattcagaagaaatttgaagaccagatcatgggtggtctgcatgtgaatgaacaggaatgagccggacagcctggctgtcattgctttcttcctccccatttggacccttctctgcccttacatttttgtttctccatctaccaccatccaccagtctatttattaacttagcaagaggacaagtaaagggccctcttggcttgattttgcttctttctttctgtggaggatatactaagtgcgactttgccctatcctatttggaaatccctaacagaattgagttttctattaaggatccaaaaagaaaaacaaaatgctaatgaagccatcagtcaagggtcacatgccaataaacaataaattttccagaagaaatgaaatccaactagacaaataaagtagagcttatgaaatggttcagtaaagatgagtttgttgtttttttttgttttgttttgtttttttaaagac

SEQ ID NO: 47936 - DNA, 508 bp, Homo sapiens; identical to SEQ ID NO: 4748

SEQ ID NO: 47937 - DNA, 702 bp, Homo sapiens
  misc_feature (1)...(702): n = a,t,c or g
gtcaactgaaatgaccctgtctgtgtagtactccggcaggatgggcctcggagcgtaaaggcggcaaaaacaaaaatattaaaaaaaaggagagagggacaaaaaaaagaaaacccgaaagtttcagctgcattgctgcggaacgttttttagccagaaggcgaaagaagaaatcggaagtgacgtcgcggccaaaacaagcccgggcttggaggcctgtactgaagctggcctcagatgggaaggcccgactcgctgtctgctgtcgtcggtggtcgcgagaccttgcactctcaccgggtcggcctccagcccctgtgcccgggatccgctcgccgcggatgagcgagagtttcttcctgggacttttcgggcacagctggccggtggcgacagaacggactttctttcctgcaagagtctcccctccagcgggagacagcgggctcctgtctcgggacgctgggacacctgtcgcctatttttaaatatccagattccaagaacacactggatactgctcttacaaaaccaagaggaaatcatgaagaaatgttttagttattgaaactacagttgaaatcatggatacatcaaacaaatcctggatattggagcccagcttatcgtggaaagaagtgtccccagcacttattagcctaacttgggcatgccagaccatttaaaatnggaacatccact

SEQ ID NO: 47938 - DNA, 6589 bp, Homo sapiens
cccttaccaataacataactttatgttctatgacaatgacatttatttaacacgttatttcacattgtacaaatccttagattctctttattcactggtccatttctacaacaaatacatccaaaacactatataataaaattatttacaacatttccaaatgagaagattgcttttgcccccactactgctattcacacacagtacttccacggcacaatacatcattaggagatctaaaaatgctcaccctgtactctagggctgcttaggaaatgtgaaaactagtaacatttataatggcattagctcctttcaatacaagacaacattttagaaaccttgaacttcaactcgcaacaccaaaagggctcaacagtcctgctttccccattgcactttatgaaacaggttgcagggactaggaaaagggccacattattaaaattactaactgtacagaaattgatttaaaaaagtcacagctcaaaattgctctttgtaaaagtcacacacatttccaagtatcaagtcgcagtcctgcttgtttacttggattttcttcgcttggattgcaccgcactggttatgtctttagtagagctggaggctgaagcaggtcgagaagatcgtttacgatgtccattttccacactttcagaggccacagttggctcttcagttcgggagtttcttcggcctgggattttggacttttcaactatctctttgggctcactgctttgtcccagagactatggccagccatttacctcccagctctggtctggcaacagaggcctgcagtgctgtggttgaagtttcctttgagactaaattctgcgacggggctatgctgggtagaagttctggatgggatcccaccttctcctccactaggccacccgcaagtgactcagatgctatgcccaccatgattgctttttgtggtcggtacggcggagatgagctcggagggtaccagagtggttactatcgaagcgtacactggtggggagagcaccgcccaggtaagctgggtcctgctgaggcagtgcccgcgcccacagggctagaggtcatttttagcagagtgggtgctgggggcgttggggttttactgtccagctctgtggataactgctctgttcccatgagccccggagctgtggtgtctagcccttggccttcagtctctccatctgcaccatattgttcttcccctttctcaagagagcctgtaactttcttacatgccttggtcaacaaaatttggccaattttgtccacttttccctttgcccccttaactaaaacgaagacctgggcttcgcccggttgcccagaggacccccggactattggtccaaaaggggaaaaaaccattgtggttgactgtgaaagagggaagagtgttctgatctgctgaggtgttcacctgagggctagcctcatctggattcaattctttcacttgctgcacagggggatgagaagggacaactggagaagacgtacaaggaggggaaggaagctgaacaggggtggctcgtgagctaaggaccaaaggtcgacctgtctggatgtttggagcaggactactggagagggcattaggcggtacaggagcagaagaaaattttatgttctgaggtatgtgtaaagggccaacaactgcaacagagggaggcatcaggccagagttggttgtcagtggggctgcaggaattgtgcttggctgtgatcctttcataacctgaattattgaggatgaattgataaagacaggtgtaatgaactgaggccgggcattagactgagcagctgactgtccctcagaaaccataaccttgctacccgcattgggcattgtgacaactgttgacatcaatgcagactgcaagtgagttggcaaagctgctgatgtgttagctgaagttgtgatgggattggaagtgacaaatacagttatttgatttgggggcaagggagtggaaatggaggaagagctaacaggtcttgacattactggagggatgcttggtgcaacgttagaactgacctcactcaattcgggatgcacaagggatgaacacagctcattactgtgaggtaagtttagggaattagaaggttctttagaagaagacagatcctgcagtgtgggaatgacagatgcttttttgaggtcctccccagaaactactggaggtgttacttccagatctgtaagcccagggggtttaattgtcacattgggagctccagagttgtcaagaagttgacttaacgatgttggtgcttccctcatagcaggagacaccaaatttttgttctcttcgacactgggaagtttgttaggatccgaaggctgcccatcctttttggactgatcttcagggacaaccattttaacttcttgggcagggactgcttttagttcaatgtttacctgttccttcctactctgggaattctggcaatcactgtcctgaggcacattcaagctctccttgttatcctcaacaacacccccaactgcagccacagacacagtagaattctgaggattcagcccactgttgttaggaaagctcccaggtacagggggattggccagaggagtgggactgaccaatacatttctcggcaactccacattctgcaatagggctgcatttgtctgagaggccagagtaagtttaggggcttttgaattttgcctcccagggcttggagtggttttcctactggacccaggactagacctgcgactgttgcttggacttgcccgttttgttgctccagaattagactgctttccagaattcactaccacagaatctaatttgtgagtttgtggggtagcaaaattggaaggattcatggtaagatttgaaggtgcttgcccgatggccttcaaagttgttggatttaggccttgttgatcaaagcccctgtttaaatttggcctaggaggtaaaggaatattaatctgtggagggaagagtcctgctatggaggcattgagtctttctggtgacagactgatttctgaaggttctgtgctgggagggcggttgttgggtgtctgaggataatagggtctggggctggctctgtttggtgttttgggcctagatgtctgggttggcgcagccacatttgggaagtggtggccgtgagagctgggcagggaatttacagggggttgctggggagttgcaccttgagttgctgaaaggggcgatggtccaggttttggccctgtcatcattaactgattctggggaagtactacatgtgaaggcatgttgtttgggcctcctgggacagatggtgcttcactgccacttgcttcagggagtgaggccatctccgccagtggcgagctggaaggattctgcgggctctcctgatagaccattttccttgaattgcttcccaagggagtattcacaggcattggcattctttgtttatcaggtgatggtggcacggaggcaggtccttgcagactgaccatgacaggcacactgccactctgttgcatgggcattctctgggagtcggggttcagggggccccttggaggatggacattttgagagactggaagcctaactgatttgggatcctgctgcatcatgagcatcatcatcatttgttgctgctgctgctgctgctgctgagactgtggctgactgggaggtggtggctgctgctgctgaggcagttgtggctgtggctgctgctgtggtggctgtggtgggggtgccacatgctgcatgagttgaggaggcatctgctgaagtggcctctgttcaactggttgagaaggataacctggtggccggtttgaaaattctggcagtttagggcctgagttatccaagctaattccttgttctccaggcaacggtggctgatcagcctcttccagaccagctgggcgagtatctggggtgtttagatcttgctgactatttttcttcttccgagggggtttcttcttcttcggtttatttgcgttggtattattttgcttattgtttaccccaaaatggcctgcagatatgtcactctgcaataagttgaccaacaatgggctcgttagcgtgacatccttattgactgggaagcctggattttgaccacaggacatctgatttccattgggagctccactgaaaggtgcattgaaagacatcccatggcctgagaagtggtttcccgaggcactgtttccctgcatggcctgcacatgaggggggaccatgttggtttgttgaatgctaacatcaggcatcatctgagataaactgacatcgttatttgctgtagtagcaggatcaccatgctgctgggccatgtgtgggctgggccctggtggccgcaggacctgtccctgaatgcccataacctgagatggactgttgttcacaggcccttgctggggcagcatctgtcctgacatctgtcccgtaaactgcaccatatttccttgcatgttcggagttggtcccctcattatctgggctggtcccggcatgacattggactggttctgagtgttaaactgctgcttattcccctgcatttgattggtcataatctgctctatcattgggttctgttggagcaaaacctgcccctgaggccccatcatctggttatgtggcgccatcatttgtgggccctgctgggaaagcatctgcttgggtggggtcatcctttggggcgagggcccaagattttggctcggggggttcaccatcatctggccctgtggcataagctgggcccttgaaaggatcatagggttctgagggttcaaggttccttgttgctggaccatctggccctgggagggcacgatttgctggtgcatgcccatcagctgagatggtgggccctgctggggctggccttgcatgttgctgaggttcacttgaggaaccccagaagtaccagcctgctgattgttcatgttgccatgaattcccatgaggctgggctgcatcatatttggcggcccgtgggacacctgcatctggttttgaggaggaccagctccttgaccacctgcatgctggacattttgatttgcttgcagctgaggggctcctgaattcccaggggtggttgctgtggtcgaaggcacctgaccttgcataaagttcggattggcctgtcctgctgagaagccaggtgggaggcgtttaggcattcctcctaggcctggatgtaaactctgtggcccctggtttggtggttgctgctgcatcaccatgaagttaggtggcacatttccctgttgaaccataggattccgacccggagagctgacaggctgctgaaatccctggggaagtgggttattttgaggtggccttggtcccatctgctgctgagtttggttaaccgttggggaggatgcaggggatccctgctggaaggaggagggtgaggaggcaggagacttgttggtgaggtggggctgctgcaagggagttgggaccctagagggccctccctgcaaactcttcatctgaggagctgtgaactggcctgggttgctcatctgaggaaagtttgtgtgggcttgtgaggcttgctggctgccaaagggatatggagggggagggtgggaaggcgtctgtaccgtggctaaggatggtcttgcctggagttgctgttgcattgggccgggcaagggagccttcttccacccttggtttgcagtcattgtgcccagagaaccctgggctggaggaggttgaagggctccagaaggcagctggttccagcctggaggaacaggcacctgagttggggcagtaaactggggtcgaattccctgtggctgttgcctgctgatgttgctgtgggggtcttgcctgcaactgttgttgctgctgttgctgttgttgctgctgctgctgctgctgctgctgttgttgttgttgctgctgctgctgcagctggggaaaattagctgggttcatttgtctgttcacagagacaggctgcattgggtgatgtgggggagctaaagatcctgagggatgactttgctgctgtatatggagcccagagaggagtggatccattgcatctgactgagaagcagggcgaggagtcctgggctgcagctctggattggggcctggtgccatcatggaagatgacacatttccacccgggggtatcataacagtggcagggttgttcatccttattattcctggaccacttgccataggaaatcccgcctccatcctaactgaatttccagctcccatgggtccattcattctcacatcttggcttcggttctgagccaaagccaggttaatagcaccttccccttcaatctgaacggagagaatccctaaatcccgaagctgctggttgttgctctgagcaaggatccgtagccgctccgctgcttcccgggggatgttgaatgtcacacgcacgctgttccagggctccaccttctgtacttttagcttgctggactccatgtgtaacaaattgggcacgtttttcaatattgcatctaatttccatttgaagtctttat

SEQ ID NO: 47939 - DNA, 420 bp, Homo sapiens
gtatgataccagcaactggtctattatatcatttaaaccacatggctatctaaagaggtatttggctattataaataaaatagtgatgaacacgtgtacaggtgtttgtacggacataagttgtcatttctcttgagtaaatacctaaaagtgggcttgctggagttttactacccttggatgctgctgttgacatggaaaagattgaggaacaatttgctaatctgcacattgttaaatgttccttaggaaccaaagagcccacttaccttcttggtatagacacatcaaagactgtccaaggcaggaaaggaaaacttgggttgctgttttatgttctaatgggatcaatcaggaatatatgataaagaaaggttaaatgtactacgagaatttagtggatatcctggacttcttaat

SEQ ID NO: 47940 - DNA, 2895 bp, Homo sapiens
  misc_feature (1)...(2895): n = a,t,c or g
ggacgccggacgtgcggcagttgcaggcgagcaggcgaggaatcgccgtggcgtcttggtgttctccacgctggttcgcaggtgaagagatggcgtttgtgaagagtggctggttgctgcgacagagtactattttgaagcgctggaagaagaactggtttgatcctgtggtcggatggtcacctgatctattatgatgaccagactcggcagaatatcgaggataaggtccacatgccaatggactgcatcaacatcccgcacggggcaggaatgtcgggatactcagcccccggatggaaagtcaaaagactgcatgctccagattgtttgtcgagatgggaaaacaattagtctttgtgcagaaagcacagatgattgcttggcctggaaatttacactccaagattctaggacaaacacagcgtatgtgggctctgcagtcatgacccgatgagacatccgtggtttcctcacctccaccatacacggcctatgctgcaccggcccctgagcaggcttatggctatgggccatacggtggtgcgtacccgccaggaactcaagttgtctacgctgcgaatgggcaggcgtatgccgtgcccctaccagtacccatatgcaggactttatggacagcagcctgctaaccaagtcatcattcgagagcgctatcgagacaacgacagcgacctggcactgggcatgctggcaggagcagccacgggcatggccttagggtctctattttgggtcttctaggggcctcaaggtcttgatgtgcatagcttctgataaccctgtgtgcaataatatgatttgcagggcatttctgtttgtgacaaaagtttttaataatagttttaatcattcctttgaaagtagtgatgtcataattgtactaatccacataagtaccacagagaagggtttgaactgtgctattttgttcaaatgttgactctccgggggcactggctcattccaagactgttcttgtgcaactctcagaataccttatttgagcatacctgttttgaaaggcattttctttttagagttaggtgtagtgcttaagggttaatttattttcatgttatgccagtaatatagtgttgtatgcctattgagtgattgtggcaagaaaagctacagcttctttgcgtttaactttttcaaaccacagaccagaactggttgcatgttactttaggagttgtgggttggtaagctcccagggtacttcccgaggctatggtgtgagagcccccgtcctgcccctctgggctccacaggcccctggcaaggccgatggcttcaggatgatggggcacagcccgcctttgaacaatcatgcttcagaaatctgcctgaccctagctgctgctgctgctcactttattcttgtatggctttggtaggcatacttggagaacatatcccacattaggaattgatttaagcctgagagtttgagggctttaatcctttaaaacttgagccaccgcgcccggccggtcattcattcttggcaacaagcatttactgagcacctactgtgtgctcacaggtaaagaaacatgatcttatcccagtagaggtagatattctgaaaaagaataattcttaaactgcttaaaacaggggtccccacccccaggccacagaccagtaccagtccgtggcactggttaggaaccaggccacacagcagggggtgagcggtgggtgagtgagcacagcttcatctgtatttacagctgctccccagagcttgcattactgcctgagctctacctcccggtcaggtcagcagcagcattagagtctcatgggagtgcgaaccctgttgtgaactgcacatgcnnnnnnnnnnnnnnnnnnnnnnnnnnnnnnnnnnnnnnnnnnnnnnnnnnnnnnnnnnnnnnnnnnnnnnnnnnnnnnnnnnnnnnnnnnnnnnnnnnnnnnnnnnnatcccgctaccccgagtccgtnnnnnnnnnnnnnnnnnnnnnnnnnnnnnnnnnnnnnnnnnnnnnnnnnnnnnnnngcttaaaataccaataaatttttgaaccttaaaaactttgaagaacaaggtaaattggtgttttatttaatgtcctaccctttaatttgttgcattttcctatactctttacactattttatcccaaactatgtatatgaggtgaaaatatatatgaaaagggatactgaagaatatttagtttaaaattaatttcttacgatcacgagcacatggtggcataattacaaagcttggaagtattcaaatagaaaatcaaaggtgtttcaatacagtagaatcccaggactgcattttaaaatcgcctcacagatcacactcgctggtggcaaatatcatcatcgttgctaaaggacagaaaatactgatgtgtgttttaactaactgggtatattgatccatgggaggctgcacagaagaccctgcggccaggagggggcattgtcagtggctgcttctcctgagctccacgccttcattgcagctgcatgttcgatacaatacacctgcttcacagccccatgggacatccctacaggtactgtcatgtgaagccttgcctagtagttctctccagggcaaatgaagctcacagttttgcaaggtggaaacctcttattcacatttgctttgattccccgatggagtagactgcctttgttccatacaggcaaagtaaggatattttaatatcatcctacttcttattagcatttcatttgtctatgtactgtatttcatttgtatgtctcctgaaacatccaaatagagaacataagaacactttatgtacaatctggaaaaaaattacctgagaaatcaattaaagatttttcccctttaaa

SEQ ID NO: 47941 - DNA, 495 bp, Homo sapiens
gagaactagtctcgagttttttttttttttttttttttttcagcccaactttctttactgtgtttcatttaatgctgaaatcagacaatgattagaacatgaaactttgtttgaaaaagtatattcaataaattttgtatttaaaacagagctcttgacctataaagtataaaaagtaattacaatgaaatattcttcagtaaatctgacactttgggattccaggcaaaaggatcgcttgggtgccaagagttcaagaccagcctggtcaacatagtgagattctatctcctagtccaatgtgaataacaaaatgaagaatatcaggatgattcgagaccaggaatactacagatgtccaacacttccacctggaatccccaaagaggcccgcttttagcctccacactggttggtgacctgcctctgcagttcactctgctgcttcagatgaaaattttcaggtctgtctgccactgtagtgaagcactgctt

SEQ ID NO: 47942 - DNA, 566 bp, Homo sapiens
gggtgacaacagacccctaaggctcagatcataagttctggcatttcaggattcaagatgcacttgggggccacccagagccccataatgtctgaagttcctctgttattttttttttattgttgaactcctcctcctgcctctctgaggaagcacttgcaggagcatccgggaccccagggctggtagagagtgccctggccgatgcccccagcctgggattgtgtctagtgtgcagagaagaaaccagaagccagtggcccagaggctgagcccttgcccagagctccacacggagccagtggagccacttgattcggggcatcctcggcagggccctgagggtggaggagtccgccccgagcagccctttattgtgctgggacaggaggagtacggggaacaccactcatccatcatgcactgcagagtggattgctctgggaggagagtcgccagcttagacgtagatggggtcatcaaagtgtggtccttcaaccccatcatgcagaccaaagcatcctccatttccaaatcaccgctgctgtctttggaatggccaccaa

SEQ ID NO: 47943 - DNA, 1837 bp, Homo sapiens
ttttttttttttgtttcatgtacaaaattatttaaaatactgtatagagttaccttcaggctacatgtataaggtatatataaaacatgaatgaatttcatgtttagacatgagacctaccaagatacctcattatgtatatatgcaaatattccaaagtctgaaaaaatccaaaatctgtaacactcctgtcccaagcatttcagataagaaacgcttagcccgtcttgggaaacagcagccactggatggaaaggggcagccagtagcagaggcctcagcccctgccttcatcctgagaatcttctgtaacaaaagctgccagctttcagggaagaaaaagaattctgtggccttgacttaagcccagagaaacaggaactgccaaaccttgttacccagcagaacagacagagagctgacctggctccatggcaaagcaacaggagagcctgggagaaggttcagtttcggggggccagcagagccaggctgggtgggagggctgtcactgaagcaaagtgacacacatccctagaaagagacatcaggggaccacaagagtattctctttttttaaaaaagaaaaagataaatgggcacatatatacaaaatactgtcaatttctactgggccaacacagtagccactgcaatgtttctccttcttccggagctttcctcccatagtctcacatgtactcctggcacagccacaataccagtctctgggaagcatatgtcacctactccacgtgggtcccattccagtcaccacagatggaagcacctgagcctccttgccagtctttccctgcagagtcactgcactggcaggggagctggagtggagcacgtggttttcctgtcctatatctcctccccccaccgcaggataatactgcttcctcggggtggcccttgggggaaaggtcatcaggctttatggggccaggagggtggtcagctttgatcctttgccatccatggagggcggtgaggcagggtcccacagtccatgggcagtgctccagtccacggtgaccacaggggctcggtggccacctaggctcaagcagctctccagaaccttctcatcgccacccagcttgtagatgacgccgcctgtggcagaacatgtcagcatgtaatttccctctgagtcaaaagcgaagagtcggcccctggggacttgaacctgcttgtagccgctgtatccagacagcacaaaggggcccgtggcatctgaggggaggctgtactcggataccttgaggccactcttgtggatgttccactggatgaacttcccgtcctcgccgatgctgtacacggtgttctcatcatagctgaactccacagagtagacctccccgtagtgggccctccagctcatcgcgcactcatgctgctgcatgtcaaacagccggatgacgccatcagctgccccctgtgaccagccaggttcccgttgtgaattgaaggctgtacagttgatagcaatgggttctggatcccagggagaactggagctgctgcttcatggttttcgtgtcccacagcagcagcctgcccaggaacctggttcatgcccttgctgccgatgtctggtgctgagaagtccacctgggaagtgaggctcggagctgctgccgaacagacgaaagaggccccgttggggctgcacgcaagagacaggattctgggcatgttgtcgttgatattgatttcacagagattctctcgtgccgaattcttggcctcgagggccaaattccctatagtgagtcgtattaaattcgtaatcagtcatagggttttcaaaggtttcaaacac

SEQ ID NO: 47944 - DNA, 1395 bp, Homo sapiens
ccttttttctcccaaactttatttagaaatggaaggagttcaattttttcttgttctactttccctattcttatggaggtaaaaggaaagaaggaaggaaaaagcagctttcacttacaaagtttcgtgtaaaaatatctttttttcttaaataactccattcatacaaattgggatgggaagaaaatcctttcctcttgggaaagtaatacaagtcttaagttccattgtagggtgcgccttcagaaacctgctgcacttttctgatatagttcaccacttttctgtcttcacagctttggggaattttggccaggagaccctttacccgtccttgagaacagcggtccaggagaatcaggcagtctgtggcctcctgtagcagggcgctcttaacagactcaggtgtaaggtttggatcccttgctacatcacaaatcagtttcaagagggccttcagtaagaccacaagtctgcaggaaactctgggccaagtatgttgcatgagaagttttagggtttccaatatcttcagtctagcttcctcctcaggtccatcataaacctccagataaccaatgatgactctctccagcctctttaagtgccggacagttaggatccccaacctgttctcgaaagccggcaggtttcttgcgtaggtcctgcgtaaaagaagcggtgctctggctcccatgtgggtcaggatcagccgcaggacctccatccacaaatgggtggtgggtcgagctccatctcctttcccagtgcagggttttctcccaggatggggaataaatccagccagacacaggagcacagcctgaatgaggtggtgctctggtgtgtacaggtggttggaaatggcatggtataggacctgggctctgttatactggagcaaatcagcagctggcacattaagcacaatgtgatggagacagtgtacacccaggattttgttctcagtctgatagtcatctgaaatgaccaatgatgcgggaagtaccctttccagatgctggctcagccagggccgagtgacctgttgcagagtccatgagaaaacatgtttgatggcagggttattcttccaggattccttatacaagtcgggtttgagaagccctagtatcaccgaaagtctccctttctcatcttcattttctccatgtaggaatcctgccacagaaccgcattcagtaacttgaagcagtgaggtgagcacctccctagcaacttcccgagatctcggagtggtccatggttgctccaagctgtgtgtgatggcaaaaatataaacgggtcctgccaagtgatgcaggcccgtctgccatgcagggccgaccagggaattcttagcagtctcaactttccctaacagtttaagaaacc

SEQ ID NO: 47945 - DNA, 1634 bp, Homo sapiens
ctcgagttttttttttttttttttagatgtaaaatattttatttgtaaatggtgatcttctaaatctgtgtccacaaattccaaaacccataacactctgtatacttcaaaaaattcaatttttgccaacattagatactattatacagaacagaaaacaacaaaaacccggtaggacaaatactggtaggatgtcaggatattgtacaagagaagaaaaatattcaggaaacaaatttcatacagctatttatcaagagaaaaatatatacaattgatttattctgtaagataaaaatacatcatgccatatacaagttcaggaactggcatcactggaatataccaacagtttacagtccacttgaattgtgcacacaaaacttcattttatacttagcctgtgaagtgtcagtaccagaattttaagtacaaaataaaaagctaacctggttcaaaatgctgattaagtttctacaagcaaacacaaaacagtgttttttttattaaagaaatgtaaacaaacagttcatacaaacacattttaaaattacatcttccaaaaaccctattgccagagtcctgcagctgtaagcataatcacatctcctttttttttttaactttttcaaatttttgtgttaaatagaaggctaaagggttagatttaagtttctgctacatgatcctattacgtttacatgattctctgtggctgaaacaaagttctaatcaaaactacttttgctgaagaaaaaattcagcctccatttgggtgtatttttaagcagttattcacagttatcacaaattgtaagcacaaaaaaacctgactgaagaagtagggatgcaacaatataatatgaaaaaattagtttaaattaccaaaacagctataaaagttgtagtcgtagcatacgccccgctctgtcagaagtaaggtgtataaaaccattgagtactaatagactgcggtttccaaaaaacccccaacactctaggttgaaattttggttattacataattataatggcatattttataacacaaaattatattgtaacatccctatgaacattttataagcccccgagctggctgcagagcctggtagcatttggtcaataactatttttatactgtattttttctcaaaatatttacatatctgtacaaagtaacagggtttgttagttctgcaggtaacagcagcagcttggctttcttctaactttatttaaaaatagcttcattcacttattcaataataaatacaaaagtttccccttattttacagaaatcaaaaactacaataaactgactcatggaatcaagtatttaaatgtatttagtgcaagttattatcccttagctctatccctaaggaagtcatttcagtacattccttgttcagtggtgtctactttatttaaaaacattttgaagttagagggcctgcccctttttaataaggccgtggccagcactctctgtccccctcgctggtgatttcagtcttacattcataggaaggccctgcccggggcagggcagccatcggctctttgccccagtaaaagtttctccttagtgagactagaaaaccaaaacaatgaaacccacccacaaggg

SEQ ID NO: 47946 - DNA, 1142 bp, Homo sapiens
  misc_feature (1)...(1142): n = a,t,c or g
ttttttttttttttatagtttaaagagctttattaatgcaataaattaactttgtacacatttttatataaaaaaacagcaagtgatttcagaatgttgtaggcctcattagagcttggtctccaaaaatctgtttgaaaaaagcaacatgttcttcacagtgttcccctggtgtgaaattggggctccctcgcaaacgctggtttcgctgttcaaaaaagcggaatattgtatagaaaagcatgttgtcttcagtctgctttgcagcatctaaaaattttcgtgcagaaatgttgtcatggccaccaatgccccgggataaaccttaagggcagctaacacttggtgtttggaaaggagaacttctactatttcatcatttgctgttgaaagtcgcttcagcatgtccagagatagctgatgagcaggaggatagaaactctctagggataacagcagacaagccaaaggtttggagtcgctgaggacgtggtactgcaggaactgatgcagcatataaaagaggttgtgctggacaagggttttgataacaagttcatgtaggtaatgctgtactgcaatctgaaactggttaagagaacgaatgtattccatcagcacggctatcacaaatttatgaggcatctcctagggagaaaaaaatgtggtcttacaaataccaacgaggtgcaaaagaggctgcatataactctctatccaacccccaccnttgtttccatcttaaaatggcccagtgttcatctttcactggttttgcacaaatcgctccagaaccaccccgtcaacaattatgctttaggcctcagcattagaagccaaactaccagctctagggcctcacccaaggaaactccagtgattctaatcacttcaagtgactctaatcacatgaagtctcctcgttttcagcaacttccttgttttgagcattctcagtccagaagaggcggaaagctgcagcccaccttcttttccacaaaggctgacaggacatgggtgtacacatctgactggtccagcaccgcctgggtccgcaccggcctcttgaggagcgggctgcttcggctctgccctgcttccaccgccatcgcataactctgctcggcatccagggtcgacgc

SEQ ID NO: 47947 - DNA, 460 bp, Homo sapiens
gtgggattcggcccgggtgctcttgtgagctgctgctcctgcggttggtgagattacctgggtctagagtgcggagctgctccgtggccacgaggacgtcaccatgcccaaagcaccaaagggaaaaagtgcaggacgggaaaaaaaagtcatccatccatatagtagaaaagcagctcaaattacgagagaggcccacaaacaagaaaaaaaggaaaaattgaagaatgaaaaggccttgcgtctcaaccttgttggtgaaaaactgcaatggtttcaaaatcatcttgatcccccaaaaaagagatattcaaagaaagatgcttgtgaactaattgaaaggtacttaaatcgattcagcagtgagctggagcagattgagttacataacagtatcagggacaggcaggggaggcggcacttgttcccgggagacccgtcatcaagcagacgatggagc

SEQ ID NO: 47948 - DNA, 968 bp, Homo sapiens
cttcttcacagggggagaaggtgtgcatggtgtgtaagaagaagattgggaacagtgcatttgcaagataccccaatggagtggtcgtccattacttctgttcccaaagaggtaaacccagctgacacttgagcccagcatcctggggatccagcggatggacagcttggctctcccagagaggtgaaggagcacctggccttaggaatcctggctgccaccaccacaaggctccccatttggacattactggctatcttgtgccctggaacaactctgaattaattagactcatggtctggcattgccagctttttaatgggaaaagagattagttataccttataccattatgttgtgggcaattccagagaattcagtacctgcttggtcaggaggatgtgcaccatcttgcctttgcacaccagtcacctgaacaaggaaacttgtcacaagtgtttgtaaccatggggttgttcatcaagggcttttctattaagtacatgacttcacaaggaccgctcagcatggctcactggagagttccatgagagaacagcactcaagcttctggccgcatggacccgatggctcgcattctgtgtagtgttttacgtctccatggtaactgtgccctgcacccctcggtagccgccctgttagttttcagtctccttttctttctcaccatttatcacttccctcactgccctacccaggctttctctcccacttccctgactctgggaataactaatatttaagcaaggtaagatgagaagcaaggggtctcagttctaggaatacagtgctagttgattgtcaggtatgttgtaaatagaccctctttggccatacactccatgcctaggatgcctcggagagcatcattctctgcctaggcaaggccctgcatcccttgcctcaggccgggctgagtgtgactgcagctcctggaggatgggcct

SEQ ID NO: 47949 - DNA, 776 bp, Homo sapiens
aagcaaaggggtaagacatcagactcttccctaaacgtgctctctgggcacccctgaacttgctcatccgggttccccctcccacagcactttctgcagctagagctgattaatgggcgcttgagtgcctccttgctgcactcccatgacacagagacacgggccaccatgaacttggcactggctggtgacatccttgctggcagggcaggatgcccactgtcagctcctgcgcttccaggcacatcaacagcagggcaacaaggcagagaaggccggttccaaggagcaggggcctcgacaaaggaagggagcagccccagcagagaagaaatgtggagcggaaacccagcacgaggggctagaactcagggtagagaatttgcaggcggtgcagacagactttagctccgatccactgcagaaagttgtgtgcttcaaccacgataataccctgcttgccactggaggaacagatggctacgtccgtgtctggaaggtgcccagcctggagaaggttctggagttcaaagcccacgaaggggagattgaagacctggctttagggcctgatggcaagttggtaaccgtgggccgggaccttaaggcctctgtgtggcagaaggatcagctggagacacagctgcactggcaagaaaatggacccacctttctgcagtggatcggagctaaagtctgtctgcaccgcctgcaaattctctaccctgagttctagcccctcgtgctgggtttccgctccacatttcttcgtcgac

SEQ ID NO: 47950 - DNA, 1399 bp, Homo sapiens
tttttttttttaaagaaagtacagaacaaaacataccaacataatgtgtggtgtattagcataatttaaaaacaaatgcagagaggtgatctttaaatttaatatcaaaatatgctgaccattagaactgcattataattttgaagaaatgattgacaacctttgtcaccaattgtgtttgcttcatagaaaaaacaagacttgctaatgttttcatatacacaatctgaagaagttatgttgttcataaggaaagtgatatttaattctaagcacagagtattcaccaaaaacaagtttcagtaaaaaaaaaaactaaaacaaacactgaagtagagttttgtaaatacaactgattttgtccttgtagataattagtgaacgtacaaatagaaattttgctagactgcttccaagaaagctaggtagactcggcgactgtgaattcaagtcagcaatgcaggtaggaggcgaacttgggctcttttgtgagcagcactgtagaaaggatttttcaagggggtacagcctgcataaaagcagttatcttggcatgtgcaaacaagaagggggaaagttgtattgaaggaggggtgaattaaagtccctaaaattcaagtcccttctttaggggaggtgagaacctccttggcatatgccctaccttaatctgagctgtgttatagaaaagtaccagactctggtgtttgggactgacatctccaaaccaagaaaattaaataaataaaaaaggcaagggaagtttaaaaaatggttctttcactagtggaatagagtctgaatacccagaattccactgagaatcctatttacacccacagtttgattgcgggcacacacacacaccccatacatatgcatactctcacatacattccccaatctttaatttaaaaaaaaaagtcaaacaatcaagaatgactgcttgaaaaataatttgtaaaatgcctagagctgggctaaatttcaaccttatagcagatcctgaaaataaatttcataataatatttccatgcctaaatatgccactgttaaaactgaaaaaaatttaagcatgtaacattaaacactaaaattagtttaagcaattcagtagcaaatggtttttcttgtaaaactaagtttctttcaccggaaatggcctgaaatattagtcatagccctaaaccatagtacaaaatataactgaagaattctcattttattctaagttaaaccacctaacaataccacttgtatattgccatcatgttattctgtaaagatgtgatatataaaatgctgtaagacctggtaccttttcaatttataaacacagtgaacttcattactgtacatgtactctgcaactacagcttagctgtaaatcctccacac

SEQ ID NO: 47951 - DNA, 2045 bp, Homo sapiens
atttataaagagcattagaaaatgtatttatagacctggatgttatatgtttaatattaatttaagcctttaataatgttataggtttgtaactattcttcagaaattataaagaactcagtgtagactgaattaatctatttagtatctgtaattttgcagacatattttcttacagtattttctatgtaaccacacatgtagaattataactaattagagcacaagaagtttcttcagcaatttagagctaccaattgtttcttgactatatagtcacatttgacaaatttaagaacccagtctttagtgatgcaataaacaaaatgaaccattaagaacaaggaattgcttaaatcccttagctggtgaggatatacatctaaataattcatctttctaactcaaggaatggtgctgattttttaaatgtttgacaccaggccttgtttttccagctgagcattctcattttgcttttctctaagactatcaaagacaaggtattaatagtaggattattcctagatcagaatgtttcatacattcctaaaggtttatgtggaaattggcttaggaaaactttgagtagcagagtctgaggatgagtgctagagatgaaatcaggacagatttgttgcagttaattcttgccaagcaaattagtggtaaatgtcacattgttatgtgaattgagcacacatttttaaagaaagtttacaaaaaatttttagaaccaactatgaggcaatactgtatcactgggggctgggagtgggggcttagaatcatactgaaattgtttaaaagcagcccaggtagtttctgtcctcaggtgaataacagactatataacttccccgaaaggtaaaacgatagccactgcagagacgaggtgtcttccttccaccaaatactttctgagatggtggtaggagtagtatttttaccgtggtttaaaaagtagtcagttacatagaaagtgtattggtatgtatttgaacctgctcttcattaaacaaacagattagatgtaccctcgactggcaataattgtatctattttcaagtacagctagctgtcaaagcatgaagctcttgtgtatacacactgacacttggttcacgcatgaagaacagtgcctatgcactttgtgtagctataatgtaggtatctaggtgtaatttcagtgaaatggtgtatagatgtattgtaatttaaatgtatatgttatttttggctattcatctaaatgcagtagacatgttgatcggtgttttgcaaacatttctttttccttcttagataactagtcgtgaatcatttctcctctttctcagtgtggcttgggaatatatatgagtgaagaatttatctgtgaatcctttgtactgatgattgtttgaaagtctgtgtgtgtccagcacctttgtaaatacacaattcagagcagggatgggctgggtgtgtgtcctggttcttagtgaaaggtcatctcatgtctgtttaatacatggtgaatgcaactgtggaacttttgattacctagacttaggtaggtttagaatgagaacatccatctacagtcctcctttgcttggtggattgggctcagaggaacaaaaagttagtctgactctgtgcatattagcatcatgtctttagagaaaggtcagcctctctggttgccaaatactcatcatgatgctcatgacttaaaggttctgaggagccttgtctcccttggatttttgagtcagggtacaggaaaaaacattgctgactaactaactgcaaatgcatctgcaggtgaaaccctacgaaagcacagttctggctataaacttcagagttctctgtaaaaaacttagagcactagaagcacaggaatagtgagtgtacagcttatgcggttgtagaggggcaactgatgaacacaggtcccacatatatgagggagtatgacgttctctacctaatatgttctgtgtgcatgttttgaatgatttgaaggtggggtttaactaatggcaagttttacagt

SEQ ID NO: 47952 - DNA, 306 bp, Homo sapiens
aaaaatggatgctgcaaaagctccttggcagatcctcgcctatccacatccatctcaagacagcgatttaaaaagtcacggaatacagctgacagtctctcaggattctggagctctggagttccattagtggctatcagatacaatgccctgagtggattttcattaaggtaagggggttcaccttccaccatttcaattgccataattccaagagaccagatatcaactttcgggaccataagcttttcgagtcaccacctcagggtgccatccaatatggggggttcccaccatagtgcttcg

SEQ ID NO: 47953 - DNA, 1321 bp, Homo sapiens
ctctgacaaatggtcctttgccttatcttgtgctggtggtgaagaggccctcaaagccaggcctctctattcctttgactgtctcctcagccattaacccattcttcatcctcggagtgagtgattcccaagtctttgtcttggcttaatccctaaagaacccagttctgctggtatcgaatagttcagcttggttgtcattgaaaggaatttctctcttctgtccatcagcctgtccctcccaactgtctaggacagtcttcggtcacctaaattcctaactgcagacttttgccctttttctctctcatcaccaaagtcccatccatttttttttaataaaagatcctcagctacagtctttccattttccttgcttctcttattgcacacccccagcccattttgcttctctcttggattttgttttttcagatccacatttattgggtttcctgtccagcttcttggaaaggagctcaatcttggaaagactgatctttccaaaatattttccctggtctgaagctttggtctgaacttctcaaggcttagagaatccagttacagaccttttggggttcaggatgctatagattgacaccctcctgcctgtttttctctgcatcccaacctggccaaggcccctcctgtggggtgcccatctgtgcctttattccggctgtgccctcgactttccagcttcccatgtttctttggttaggtttctctcccttccttctttctccttccccaatccgcctgtttcgtcagggcccagtttgtttcctcatacaccttcctcactaccccaccccacatggttgactctttccctcagctccaccagctcttcatcatgccactcatttcagaacttgagcaaaacagggcagtcaggatctgatgtctttctgggtctccctaagaaaactaagctcttgagggacagcccttggcaatgctttcctatctgctgagcatggtgaccttccttaggacttccagagttcagttccttctggcagagaggttttctttctccatgccatatggatgtgactcaaatgagggggtcccacagcttttcctggctaccacttgctgtgaccttatacatgttggggtttgctcttaaagaggagagcaggaagaaaggttggtttcagaaaccaagagggtcggcagtggacgcgtacattttgtcacggagtccacagagctgagcttttgagcagactctgagaagtatcattgcttgtgttgaaagaatacaacaggatttaagtttctctttagaaattgcactgaagaaaggccg

SEQ ID NO: 47954 - DNA, 705 bp, Homo sapiens; identical to SEQ ID NO: 4799

SEQ ID NO: 47955 - DNA, 1449 bp, Homo sapiens
aaaccactctaagtgtgaccactctaaagcattagcaatcagtcatttcactctagggagaaatcagagctgaaatatagaggataggtaaagtccccaatgtagatatgtatttttatatttgattacttgcttttttttgttagatgcaaataatacggcactccgaacagacactaaaaacagctctcatctcaaagaacccagtgcttgtatcacagtatgagaaattagatgctggggaacaacgtttaatgaatgaagccttccagccagccagtgatctctttggacccattaccttgcattctccatcagattggatcacctcccaccctgagggctccccaagactttgaacagttcttcagtgatccttacagaaagacaccctctccaaacaaacgcagcatttatatacagtccattggtaaatactggctctctatgaagcaccagaattatcagtgaagaatatattaaatggctcacgggctactgtaaagcatatttctatggcttgaggagtaaaactcctagaaccagttcctgtttctgtaacaagatgttcctttagagtcaatgagaacacacacaacctacaaattcatgcaggggacatcctgaagttcttgaaaaagaagaaacctgaagatgccttctgtgttgtgggaataacaatgattgatctttacccaagagactcgtggaattttgtctttggacaggcctctttgacagatggtgtggggatattcagctttgccaggtatggcagtgatttttatagcatgcactataaaggcaaagtgaagaagctcaagaaaacatcttcaagtgactattcaattttcgacaactattatattccagaaataactagtgttttactacttcgatcctgtaagactttaacccatgagatcggacacatatttggactgcgacactgccagtggcttgcatgcctcatgcaaggctccaaccacttggaagaagctgaccggcgccctctaaacctttgccctatctgtttgcacaagttgcagtgtgctgttggcttcagcattgtagaaagatacaaagcactggtgaggtggattgatgatgaatcttctgacacacctggagcaactccagaacacagtcacgaggataatgggaatttaccgaaacccgtggaagcctttaaggaatggaaagagtggataataaaatgcctggcagttctccaaaaatgaggaccttcaaataggagtgattgaaataaataactacttgcatgttatgctttcatttgggtggaatacttcattggaataaactactgatcttgtgctgtgtcaaagtaacagactagaaccttctttcaagtacctgaattgaaatgaaactcattttgaataataaaaactctagaaactcttaaaaaaaaagtcgacgcggccg

SEQ ID NO: 47956 - DNA, 643 bp, Homo sapiens; identical to SEQ ID NO: 4802

SEQ ID NO: 47957 - DNA, 790 bp, Homo sapiens
ttttttttttttgattgtcaaaagcaatttaatttttggaggaaaaactgcatacgcagtacaacttatatctcaggcgaaatgtctcagaatcttcctgctcattggacagaaactcagcttcaccacattgccagccgggagaccatggaagggaactggcgccactgcccccagctgcccttcccaggggcaacttcaccaagatgcggaaatcctgggcccaccccacagtcagtcatcgctccatttcttcctggcaccaccacctccatctggcctgctccccaaccccccagaagcaggtgggcccaggctccaggccagtgcccccatcaagatcagacgtaaggcatcttcccaccgtcgctgtgctccggggacttttccaatccttccttcctctctgtccagaggctgccaggctgagggggccaccgtccaggtggaacaggcacaggcatcggggaatcagatggtatcagtggggatagggcacagcactttcctgggagccatgagacgccagatcttcctctggcagttcccactggctgtgggaagtggttttcataaagggggccaacttccaggaacatctagggctcgggagcaacccagcattgacagtgaatcagaatccacctagagctggccatggcccaggcagggggtgtcttccccacagcccccaggagtggctgcacctagtgggcgcagcatttggcctgcctcgcgggccccttgttcagagccacagctgcatccccccgtagagcctggccctccc

SEQ ID NO: 47958 - DNA, 1976 bp, Homo sapiens
  misc_feature (1)...(1976): n = a,t,c or g
gcgtcgacctttttttttttttttttttgctagttgtatataaaatttaatctcaccgaatgtacagttttcaaatttcacgtgtatattaaggaactgatgcatctgagcattgtcaaacaaacgggaagaagaagttaaagggcagcctggcattgatggctggtggagctctgaagcctgcctctgcaggtgcagacacatccacaaaagtaaccgcagtggaaataagaatcgtcctttcatttcctgagttggcctcaggaaaggaggatgaaattagatttgcagttacattgactattttggcctgtggattcagcagggatccgtatttagtccacttcacttctataaccaaagcccctgggagctggcaggaatccttcctgttgaatgactgggtgatgaagtggatgggcacccagtccagcatgtcctgggcctgggaatttccaaaaggggccacgtaatctgggaagccctggccccacagcaggctcttcaccttctgtgctacgagctgacacgggagagctccagtcagtcttagtttacagccagattgcatagtgtaaccaaataatactggggtccggaccccctccagtgctaagcagtcttgctcagttgtgctatgaagaatagtaagctgtccatatctatttgtggtctgaataatcccagaccccttatgaggctggaatccagcagctaatgggagccccacgacataaccagggtttccactgagagggactggctgggtattttcctgaagaaaatgaatttcaaacttttgctgcagtgggaccactacgctgctaactgtccccagaacgaatgagagatcagctttggtgacttcacctgcatctgtgtatgtgaggctgtactttacctcaagaacaacattcacgcaaaggctaaagtgtccagcgttgacgagagtcggctgcagcacatcagtgtcctcccgtcgggtgagcgttttatttagagactgaatgacgatggactgaacagtgatagggaccttttttcttgaatcaggtaccctcagaatttccgggctgctgtaaaaagccatgctgagggcttcaatttcttcacactgttctaaatttatttttctggtgcactttaacagcctggttcaccagaaacgctgcagggttattatcagtgcacagagatgatgtcagggacgaaggaaatctcagaaacgaatctgaagtctgcagaggaaccccatactcatatttagcagcagtaggaatatccagtttggttgtgaaggaaacatatgattcagcattcaatgtaaaaccatcagatgttttcatcaatgtatcaaaattgttttcatcaggtacttctggattaataaaggataatgcaggtttatagtttgtaatatgaatgcagaaaatagatggattaatctggtcaacaagttcaaatactctttgaggtgggtttgctgtaaaattcaatgaatagatgactgctttttgactacaaaactggctgtcgcccgtgacaactggaactgagcaggcagaaaagacactgaaatccacggagctgcagtcgggatcacagcagcagttgatgtcacactgtgctggggataagtcacagacacagagaacagcaacgtccgtgactggggtaggcctggggccggaggagggccctggagccctgggagtcccggggggcctggtcgacgggaaagttccgaaggtggccagggctgcctcggtggagttgaggccctctgtcgtcaccgccggggtggcatcggtctgggcgctcacggaggcccagcagcccaggagcaccaccaggagcggcgggagacctcgcctcgtgccgaattcttggcctcgagggccaaattccctatagtgagtcgtattaaattcgtaatcatgtcatagcantggnnttngtaggtnataannagtagg

SEQ ID NO: 47959 - DNA, 2141 bp, Homo sapiens
  misc_feature (1)...(2141): n = a,t,c or g
tttttttttttttttttttgcattttgacagcccaaattttattttacaaaccaatgacagctactagaagatgctttaggaaaccttagctaagccacataaacaatcagacctatacaagtacagaaaaatctaaacatgcttcagaactaaaaaaaaancaaaaaaaancaaaaaaancaaaaaaaaaaanccaagttgtacgtcctgagggcatacaacttaatttctacaaaaacatactttttcaaaagggctatgagagtatcaattgacaaaagcagaacaagtagcatgattagacagagaagtcttaattgcttaacacaagataaactcagcagttttaaagtgtctgtatccattttaaatgattagtccaggggtagaaaagatgaggatggtttcatcatactttgaaaaggaaactcccactggagctaaaacaaacttacagtccaggttataagaatccaagttacatagtaaattattaactattattttcataccaagttcatgcttaggcaataagaaaatcctgtttgcagcattaattacatgtaattcagtttccaggcacatagttagaggtcacacacaggcagagaaagaacaaatgccagcccagtcatctcactgcctcagtccagcagccagtggcccaggacttcatctacactgtctatctgcttcccagccacttaagccccacgagggaaggcaaggcagctagccctggaggtgagaagacaccgttgatccaccagcgcaggtgcagggccctctgcagatttgttccaccagtgtatctcccatagaaaatgggatttgaaatcacaacttaaaccaagtgggtaatatcctgaccgggggccctaagaaactggcattcttgcattggaaatgaattgcactattcagatgcacagcactccttttgcacaaagttgtgttctgaggtgccaggacatccaagcacttgcagtgtcaatgtcgtgtttaagatgtaccaggggagttcaaacatttaaaaaggaattctactaggaagatttcagtaatttgaagtagataccactccccaccccaatctgtaaattataatactgaatttttattgaaataaagcacactaaatcaaaccaattacaaagatacatgtgtcacaccaagaaaacattttcagttatgctgacagccccaaatgttttccatttttcaaagacagtttgtaatgtcatgggaaaattgctcacgacgttaaaatgaaaaaagcaagatacagtaatcatatatgcagtatgatctcaactatgaaataactttaatatttatacattgaaaaaaagactagaagaaaatgcaccaaacattgaactgaagttaatctctatatactgggataacaagatattaattttttacttcttgaaaactttcaaattttccaagaaattaatcataaaatcagtgagaaaattgaacttgaatgaatatcaaaactgcttaaacaaggactaggctgagtaacctggctttgaggcatgctacatggcccttttcactgcaatgaaaaaaaagtccaacaaaattttatcgcaggttcaagacaattttgcattactgatgttggaagctttatgtccgacctccacaaacttcagcagctaacatctaatcttaatacacggaaaatgccaacttcattgaaaactttaatgctatcttaattgccttaattgttcttttcaggggctggtttgaacaaagggacataatttacaaattccagacttcacagaaaattcaattaaagattctttgaaataattcattttaagtaattaagagactgctttggtgcattaatctcttacatcttaatttccaaaaggtctttagacacattttacttttaaacagctaccaacagttctgttacttcaagaagatgcagactgcaacattcaacaagcattccttaagaatctactgtgttcccacacactgctgagagtgtgggtttccacagagaagaaaggattctgaaaggtgaatgtgtataatccaacaggttggttctaattaattctctgcaacagaaaactgcaagacgtttctttcgtactataccaac

SEQ ID NO: 47960 - DNA, 403 bp, Homo sapiens; identical to SEQ ID NO: 4808

SEQ ID NO: 47961 - DNA, 1838 bp, Homo sapiens
  misc_feature (1)...(1838): n = a,t,c or g
tttttttttaacatttcttttattcaaattttattggaagtttacaaatgtattacagacatcagtaaaacatcatatccattttacagggcacggatctcaagcaaagtgttcagaacagtctctggcagagcccacaccaaaggcctgttgcagaccttcttaacaaatagcttgacactcaacacagaacacagactctggcctgcctcaccttcccaggccctttgaggttttgtttatgcacttgaaatggaaagcaggagatggacaaagcaatcctgtggaggaaagaatgagtttaggagaggaaaacctgccgaagtcctaatttgctaaaaaaaaattaattaaaaaatggaggactcatagtccttacaatgttaagtcagggtctatgatagaatcatgacactttatggaaagatatgaaaatcaactaggtaggtttaagaacagaccttattggtaagtaactctctctgaaaaatttagaaaagcttggtcagtgacctgttgaatatcaatggccaaatgccaagcagagtgaagggatatctcagagaactctcagaatagaacaagcagatttttctctatcctatggattcatcgtattcaaaacacaggaatgttttcctaacactatgtgactttcccctcctttatatttccttgaggaaagctagttttgtcagcaggaagtaagcttataaaatagtatgggctcccaatagtgagtcatattttatggggngtcttgtgttgactaggctactattatgagaaaatggaaaaagaatccaattttttcttgatctttactttgaggactacttccaaatggtcataagaataagctctggtatctgctgaggcaccagagggacaaaccactggagacaaggcaaaggcccatttctacttctcttgtgcttaaagaaatgtacctcaaaaggtggcgatctgaaactgccttcaacaattggcagtggaggcttggctactgagtcttgcatatgcaaatgctgtctgcagagccccattttaaagccctgaaggtgcaaaaacagttgctaatagcaactgtcctggcatgaagtattcagataactggttcagttttccactttcctttgtcatggacggatcttccttcttaggcttaagcatctgttttctgctagaaatacacaaagaacacttctccttggaatttaaatatttatttattttttgttagaaggtgggattacatgaagaataagatgaagtcttacctcacctctgcaaaatgaagactgcctatagtaattggcagagaacatgaaaatggccaaggaggtaaagagatttttttgtcctttagcctaagaagtcagcttcctcgagcctccacaacctgggatgggggaggggcaggtgaattggagtctccgaattacttatacatattggttcctaaatgttcgtaattatgcttcctaaactgtttttgttcctacggcaagagaaccaagagtggaaagacagatatgaatcagttcacaaataagattggttatcagaccaataagatcagttctgatcaactggtcctggctggttggagtgttgcaaagatctgtgaggctgcatccacattctcagcaagagtatacagtgatgcattggttgtatctgctcagcttgcagggagcgcagagcacatgctacatatatgtcatcacaggcctcacctgaattgaacaatagctagtagtacccaagaagcagaaagctgctgcagaaggaagaaaacataatcttgttatagtgcaggaacatcctacaggaaa

SEQ ID NO: 47962 - DNA, 819 bp, Homo sapiens
gaaaatatatttcctcataaacatttgagttttgttgaaaagatggagtttacaaagataccattcttgagtcatggatttctctgctcacagaagggtgtggcatttggaaacgggaataaacaaaattgctgcaccaatgcactgagtgaaggaagagagacagaggatcaagggctttagacagcactccttcaatatgcaatcacagagaaagatgcgcctgatccaagttaatatctctaaggtgagagccttcttagagtcagtttgttgcaaatttcacctactctgttcttttccatccatccccctgagtcagttggttgaagggagttattttttcaagtggaattcaaacaaagctcaaaccagaactgtaaatagtgattgcaggaattcttttctaaactgctttgccctttcctctcactgccttttatagccaatataaatgtctctttgcacaccttttgttgtggttttatattgtaacaccatttttctttgaaactattgtatttaaagtaaggtttcatattatgtcagcaagtaattaacttatgtttaaaaggtggccatatcatgtaccaaaagttgctgaagtttctcttctagctggtaaagtaggagtttgcatacttcacactttttttgcgtagtttcttctgttgtatgatggccgtgagtgtgtgtcttgggtaccgctgtgtactactgtgtgcctagattccatgcactctcgttgtgtttgaagtaaatattggagaccggagggtaacaggttggcctgttgattacagctagtaatcgctgtgt

SEQ ID NO: 47963 - DNA, 1087 bp, Homo sapiens
ttttttttttttttttacagataaacattttaattgtttaaatatattactttcaagatctttttgaaatcgcacttgtactgtactaatcaacagccaaaggcaataagaaagtttaaaaccaaaaatattctgacatgaacacatgacaggaaccgctgctatgtaaagtaacatacactgctcccaagaacaatgatatttttaggagataattcatcttaacatgtgcaaggacaaatttgtaatcaaaggctggaagaaatatatattagtgcctgctttttaaaagtttattttacattttaaatacagtatttttctcataaaaaaaaaatccaggaagtgcctaactccatggtttctataccatatgtacatgaaagctgacagagagcctgacaaatgttctggatgtaacagtatgaacacctatgagctgggactacttctgaatcaaaattaaaaaacacaaattaagcactgcttaaggaaaaaaaaatccagtttctgaacaaccaaaagagaacagagttagatatgtacaaaaccaggtattaaaaaacagaaagaaatacagcacacaaaaaactcaaacaacccatatgtagtgaactgtatatactgcagttaatgaaaaccctcctacaagaagtgatttaggatttgaaattttaaaaatctaagtacttcagtaacaacatacaataacaacattaagtgtatattgccatctttgtcattttctatctataccactctcccttctgaaaacaagaatcactagccaatcacttatacaaatttgaggcaattaatccatatttgttttcagtaaggaaaaaaagatgtacctcttcccgtcaataaagaaataacacaaattaaagctataaaatttaagcatgggcatatgtatttccaattctccttaataagtaattccaaactggaataatgtggggtttgtgactaagtagtaacaaattaaaagaaaatagactgtctctggcagtgatttccatactagtgcaatgttacttcccatatgctgaattatatttaaatgattttatgtattttaatt

SEQ ID NO: 47964 - DNA, 846 bp, Homo sapiens; identical to SEQ ID NO: 4814

SEQ ID NO: 47965 - DNA, 1109 bp, Homo sapiens
tggcccagagcgctcgggctgtcggtctagcaggggggactcccctgaggggccgctgcgggtcgccgtcttcggaggcaccggcgagggcagagccaacagcctcttcacggtctgtaaggtcattgtttgccagtcgtgggcagcgcggcaaacctgctgggaaaaggttttctggttggaataggatgagtaccgcaccagctttgccttccagctgagatgtaaatttcaggcctccatcctgtggaacgtgggaaaactatcttgagtgttggcatgttctaagtatgacataatagtttaatgtatgataaatcatgggtgtttagacgaaagatttacacatataaattggaggctttagcggtcttagtgtaactaacttttcgtccccttaacccttgatgcctgttctatgggtctctagagcggaaggagcattatactccggaaacatttgctggaaggggttatgagaaattcctctctgtatgctaactccgtaatacaagcgtttgtgtattttaaaatcacagctgttccaaatataatctagcctcgttttccccctccgtcggatgataggtgttcttcaggacagttttattttaagcaattcttagtctcaagtaaacaccatcattaaaagaactgagaactattatcaattcttcctttggagtccatcttcaatggaaaggagaagggaaaaccttttttaaaaagaagaaagaaaactgaagtttttgatttgactagagaaatattcagaagactccttattttcacctagtctaatcacaaaattgagaaacaaacattatcccttgaccatgtaaattttacaccacattatgtcaacagcatgtaccttccacattgagtattcagaaagaagtgatctgaactctgaccattctttatggatacattaagtcaaatataagagtctgactacttgacacactgggctcggtgagttctgctttttctttttaatataaatttattatgttgggtaaatttagcttttgggcttttcactttggctctccatggatataaggaaaatgtaggttttcctctttcagtttggaattttcccc

SEQ ID NO: 47966 - DNA, 1308 bp, Homo sapiens
ttttttcttttaaaatggcttttattgagacacttgtagggattctgcaacatttccagttgggaatctttatttccaactcttagggtggctaaacccttttctgaatgccaaaaggcacactctcaccaccttaatgaggaaacacacttatctgtgtctgttccgatatccaactgggacctggaccccaagccccgtggtgtcttgtacaagtctcattagtcctccacgtacaactcagaagcctgttaatcagggagggtaatttccaaataaatgtgagctggcctaaatccagctggttatttctgatttggtaatctgtagtatcttaatttggggacatcctgtcctaagttttggctggtgcatgtagaacttataatctacctgtataacaacagatgcaacatagctccgttccagccccaaattccttaaaggttctagtctactcttgcacttcttcctgtactgttgttgagaagcttacattttagggagaggctggtcaaatctctactctctggtaacagcattaacaagagtctttcttttggaaacagactcagaagttatggacatcagccacttcagacttctttaggccagtatccttgaggtgactgaccagcctcctcatggattggagtttcccatcattgttttaattgctggaaatgttggcctaattctgcttccttgtaactttctgctttttagtacaagttctcttgggaatctacgcatggtaaaaataccagctccttccatctttacagccctgtcagtgctgtgctcttcaaagcctttcccttaatagcaagagggccaagagtggcaaatagaggcagagccgcctgcactacagttgttcccatcgtaaggtgaaaacgaacgtttaacttcatctagaagaaaaaacaaacaaaaaacccatcaggctattaagattctgcttgcaaattaatgccaatccatgtttacatttttttcttctagatgaagttaaacgttcgttttcaccttacgatgggaacaactgtagtgcaggcggctctgcctctatttgccactcttggccctcttgctattaagggaaaggctttgaagagcacagcactgacagggctgtaaagatggaaggagctggtatttttaccatgcgtagattcccaagagaacttgtactaaaaagcagaaagttacaaggaagcagaattaggccaacatttccagcaattaaaacaatgatgggaaactccaatccatgaggaggctggtcagtcacctcaaggatactgg

SEQ ID NO: 47967 - DNA, 493 bp, Homo sapiens
gctggctgacttcctgggggccattggatctggcactggaattctgctagcagtcactattatttaccagtattttgaaatatttgttaaagaacaggccgaagttggtgggatgggtgctttgtttttctaaatgttcaaatattttcattttgtgcgtgtgaaaggggaaaacactttgacggatcgtttttgtcagatgacactggtggctccccttttctccccctcacagtttcttgtttcgagtgcctgactgacccgtttctgaaatgggcaccgagcctaagtctgtgtgcagcattagtacccgctgccttaaaactcaagtttacattattcattaaaaaaagtacatctagtgttgcctgtaatgctggaaaccagtgtatctaccttgctgtgttaaatcatgacagtgagacggtgagatggattcgttttgcacacaacattcaaaacacttcatattgcccccacttgttgaaaaata

SEQ ID NO: 47968 - DNA, 877 bp, Homo sapiens
  misc_feature (1)...(877): n = a,t,c or g
cgagaaccggcgtatcacacacatctccgcggagcaggaagcggcgcttcaacatcaagctggggtttgacacccttcatgggctcgtgagcacactcagtgcccagcccagcctcaaggtgagcaaagctaccacgctgcagaagacagctgagtacatccttatgctacagcaggagcgtgcgggcttgcaggaggaggcccagcagctgcgggatgagattgaggagctcaatgccgccattaacctgtgccagcagcagctgcccgccacaggggtacccatcacacaccagcgttttgaccagatgcgagacatgtttgatgactacgtccgaacccgtacgctgcacaactggaagttctgggtgttcagcatcctcatccggcctctgtttgagtccttcaacgggatggtgtccacggcaagtgtgcacaccctccgccagacctcactggcctggctggaccagtactgctctctgcccgctctccggccaactgtcctgaactccctacgccagctgggcacatctaccagtatcctgaccgacccgggccgcatccctgagcaagccacacgggcagtcacagagggcacccttggcaaacctttatagtcctgggccagaccctggctgctcactcagctgccctgggggctgctttccctggggcacgggctccagggatcatctctgggcactcccttcctgccccaggccctggctctgccctttccctgggggggttggaagcagggtccaggtttcacacttgccacctcctggaggtcaagaagagcaaaatccccgtccctgctctgcactgtgctccancaacgtnaccnttggtgactcctccgcntctttgaccc

SEQ ID NO: 47969 - DNA, 632 bp, Homo sapiens
ggcaagtcactaaaggcgctgagtgtcaggttgaagagttgggcctttatcctgtaagtaaagaaaggcaaatctcatttctagaactcttatgaacagttcatagtggctacttaaagtacatgtattgaaaaggataccctagatgttatctgggcccagtggagaagactgttgtgcttgattaatggtgtgtgccaggggctcagtgggtgtgttagcaaccatgccacattatctatggataaaatatatataggagtagagaccgtataacccagggattaacatggtctgtggagctgggctgcttaaatcctggataagaagtgactgctgtggtctggctgcatggtcctgaggacctgaaccagggtcaggggcatgggagggaagagcctacacagtgaatgggctaaacctgggaacattttgaatgtgggactaagagaggagggctagattgctctacaatgctgcagaagtttctacctgcctggctgggaggtaggagggtctggtttggggatgtggccctgaggagaggaccagtgtttggcagtggccatgtattgatctcccagttcttcctgtggcaggtcccacgtacctcggagatttatgtccaccga

SEQ ID NO: 47970 - DNA, 2502 bp, Homo sapiens
ttttttttttttttacctttcccctcctccctcctgcagtctagccaccctatgaaaattatctaataggcagagtggtaccttaatccaagaaagatttggagccacttgcagtaactttttcttttcccagataaagttctaatactcaaaaaagaagagttgatttaagtcccatatccttcaggaatgaggtataggatataaataaattcaaagtaccacattctaagatatttcactaaacattggaatgaatttttcccctttatgtactttaaaatatagaaaatatgcagttatgactagaaatagctgtaatattgtacctgcagagttgagtatctcactagtataatttataattataacctattctgatttcttttcaaatattaggtgtcctagttgcctatgaaggtttgccacttcatcttgcactgttccccaaactttggactgagctatgccagactcagtctgctatgtcaaaaaactgcatcaagcttttgtgtgaagatcctgttttcgcagaatatattaaatgtatcctaatggatgaaagaacttttttaaacaacaacattgtctacacgttcatgacacatttccttctaaaggttcaaagtcaagtgttttctgaagcaaactgtgccaatttgatcagcactcttattacaaacttgataagccagtatcagaacctacagtctgatttctccaaccgagttgaaatttccaaagcaagtgcttctttaaatggggacctgagggcactcgctttgctcctgtcagtacacactcccaaacagttaaacccagctctaattccaactctgcaagagcttttaagcaaatgcaggacttgtctgcaacagagaaactcactccaagagcaagaagccaaagaaagaaaaactaaagatgatgaaggagcaactcccattaaaaggcggcgtgttagcagtgatgaggagcacactgtagacagctgcatcagtgacatgaaaacagaaaccaggggaggtcctgaccccaacgagcacttctgacaatgagaccagagactcctcaattattgatccaggaactgagcaagatcttccttcccctgaaaatagttttgttaaagaataccgaatgggaagttccatcttcgcgtttcagaagacatgtcaaatatcaggtcacagcatgcagaagaacagtccaacaatggtagatatgacgattgtaaagaatttaaagacctccactgttccaaggattctaccctagccgaggaagaatctgagttcccttctacttctatctctgcagttctgtctgacttagctgacttgagaagctgtgatggccaagctttgccctcccaggaccctgaggttgctttatctctcagttgtggccattccagaggactctttagtcatatgcagcaacatgacattttagataccctgtgtaggaccattgaatctacaatccatggtcgtcacaagggatatctgggcaaagggaaaccaaggttgcttttttgacattaggtgtagcatgtctacttttaagtccctcacccccaacccccatgctgtttgtataagttttgcttatttgtttttgtgcttcagtttgtccagtgctctctgcttgaatggcaagatagatttataggcttaattcttggtcaggcagaactccagatgaaaaaaacttgcatcttcagtatacttcctaaagggcaatcagataatggatatgttttatgtaattaagagttcactttagtggctttcatttaatatggctgtctgggaagaacagggttgcctagccctgtacaatgtaatttaaacttacagcatttttactgtgtatgatatggtgtcctctgtgccagttttgtaccttatagaggcagattgcctccgatcgctgtggttcttattatcaaaattaagtttacttgtatacggaacaaccacaagaaatttgattctgtaaagaatcctctttagctgtggcctggcagtatataaatggtgctttatttaacagaatacctgtggaggaaataaagcacacttgatgtaaaaataattgttttatttttattgacatgactgattgattgattgctattctgtgcacttaattaaactgattgtgatgacttttcatttgtttacatacgttgcttcagtcttctcaggtgaaagtagtgagaaaaccgtgaaagaggggggaaacatttatccattatatgctgtttcactggaagtgttaccagcagtccacagaactaatgtgtccccacagacttctcaatcctctccacaccgaagtgcaaaaccacagcagggagatgtgcagggagatgtggagcaaaacacagccaatttgccctcacctcaacatgcttttgaatgcaatataccactgttttacgacctaaggatctacacaccttaaaaaccctaaagtaaaataaaggaatagtgt

SEQ ID NO: 47971 - DNA, 1052 bp, Homo sapiens
tttctttgccctctgggagctcacagtttatttagggagataggctatacacaggaaacagtaacaagggctgccagctcccagccctccctcactccagctgttctctccagttcttccagatgtcctccaggtgtctgctgcccccccaggccccgagccgccaggccccaacctcacccccacgcatgacggtgcatgaggggcaggagctggcactgggctgcctggcgaggacaagcacacagaagcacacacacctggcagtgtcctttgggcgatctgtgcccgaggcaccagttgggcggtcaactctgcaggaagtggtgggaatccggtcagacttggccgtggaggctggagctccctatgctgagcgattggctgcaggggagcttcgtctgggcaaggaagggaccgatcggtaccgcatggtagtagggggtgcccaggcaggggacgcaggcacctaccactgcactgccgctgagtggattcaggatcctgatggcagctgggcccagattgcagagaaaagggccgtcctggcccacgtggatgtgcagacgctgtccagccagctggcagtgacagtggggcctggtgaacgtcggatcggcccaggggagcccttggaactgctgtgcaatgtgtcaggggcacttcccccagcaggccgtcatgctgcatactctgtaggttgggagatggcacctgcgggggcacctgggcccggccgcctggtagcccagctggacacagagggtgtgggcagcctgggccctggctatgagggccgacacattgccatggagaaggtggcatccagaacataccggctacggctagaggctgccaggcctggtgatgcgggcacctaccgctgcctcgccaaagcctatgttcgagggtctgggacccggcttcgtgaagcagccagtgcccgttcccggcctctccctgtacatgtgcgggaggaaggtgagagggggctgggccctggacggggttcgaggattgtcaaccccttttccttctgttttcatgaacct

SEQ ID NO: 47972 - DNA, 1180 bp, Homo sapiens
  misc_feature (1)...(1180): n = a,t,c or g
tttttttccattaaaaagttgtttatttaaaaataccttctcccaattctgattccatatcaaattaaatcaagaagtgatgttacagcaataactcatcaaagtcatgagtagggaggatggcaatgaccccattagctcattagtataatctagtaagtgaaatacaaattcaactcatttacttcttcacaaaaggcaaacataattgatatacttcatatcaaaaaactagtttataaagcttgtcttcatatttcagtttaaggttcaactgatataaaatgccttaaaagaacatccaagcaatgctttggattttctttctttgcaaaattcaaggaaaacatgattggttgaagtttcttcactgctggcgaattagttaagagctacctgagattccttcgcacttccactcttccactctttgagtttccagtgattaaaatatgccagagacataatttagagagcgctagaaatgccacacagattctcatcgcttaaaaaagagtttctggcccgggccacgggtgnnnnnnnnnnnnnnnnnnnnnnnnnnnnnnnnnnnnnnnnnnnnnnnnnnnnnnnnnnnnnnnnnnnnnnnnnnnnnnnnggttttgaagtttttacagaatgtacagaatgtaatcattaaaaaaatgactttcagaaacatatacattcaaagaaaaccttttagtattctaagcattgaatactttgggggaagaactggtttcttttttggattgtttaagaagtcagtcttttctcaacagtttcttgataagcaataaatcttcgcaaattcattttcacattgtcaagaacacacagctgatctgtgctatagttacctctcccttctttacgtatcttcattttaaagaccggctggaattctttcagagcagataataatttaatttgaatcgaggctctttcggcttctttaccatctgcaaaaacatcaaagagggcatccaaagcttctcctgctaccacaagggaaggatctttggtggtaacttcaagcagaaagcacccaatgttcttaagagtttcaagtgtaccatcttctttggcaaggacgctgccagtgattcctaaaatgctaacgacattcactctaaccccgacattactactatgaatgcctgctcccacgcgtccg

SEQ ID NO: 47973 - DNA, 1985 bp, Homo sapiens
cagtgggtaaggttgggggccactgccagaggctgctgcagtgccctctgggaagtgccagggaccctcagctgcagacccaggggatcccaatcccttatctctgcctgaaaagtggctattgctgcttcgtatcctccagtgtcacaggaatgctgtgcctgagacatcccactttagtttttgttttccaaacctgtcactgactcttcattgtggtgacagatcctctggttcccccattgctcagcctcaggtttattttgagggtaactcagtgtctgactgcccaagtcttttaggggttagttggaccattgtgtaagcttgtttgtatgtctcacctctttctggttggtacttactgtctcacactgctctggcaaacttgtacacacacacacactctctctctctctcacctggctaaggcttttaaaattatgaagataaataatctgtttcaccagctggagtgagttgcaaggaagattgctggagctactcaatctagcgctaatggtttggattcattactgcaaacctacataatttaacatatttgtttactttagtgtgacaactgatgaaaaaaaatggagcaatctgaattgtataaaataacttaagaaggaagaaaagtgatatataaatatattttgcaaatgtcacattaatttaaaaatgagtatgattgattttatttttaaagtgggcattcttcactgtttcgagacctttgtatgtatttgtgtatttttatctttttttttcaggccattattataaggtgttattttggccctctaatgtagaagttatgtttaaatacaaccaatcaggccctaagtgcaaaaaagttctgtcttggtgcttatcactggtataattattatttttttgttttcctaactttgctcttaggagcatgagcctctttgtagctttatggtaatgcaatatttctggtcatttactgtcaaaaaatttttttacattgtgttagtgaagactgtgttttcagggttaaatgattggtatcaatgtatatagagtaaaattattgcaaaatttaaaaatgatttttcttggcattctttttaaatactctgaaacatatatgcaaatgagaaacctttaatcatactaaagccagttatgttaagaatttttcctttggattttataattaagagttgcttataaatacttatgacattgagctcttactgttttagttgtcttaaaacaatgggacatgtcatgaactggtttctttttttaaaaaattcttgatgtgaattccactgttacctgaccatgtatattcagatgaatgtactctttcttgttccttgttaccagattaatctgagagaatgtggattcatcctgtcatctttctcatactcaaatacttaaaatggttcttttgcccaaaagtctcagagtcttcattttggtacagtggagtcacaacttgtaaggtggttaggttttaaagaccgtgcctaaggacaaaattgagcatgctcagaatggtccttgaaaatctcctaaattaccaataaatttctctttgtagtcttaaagtttaaatccctgtggagtgatatgtaggtatgaatatattatgcttatattaagtacaaaaatacaaactgcatatcaagagattcttatagcattaataatttccatgcatgtgtctttttccagtaggtatggttgaatttatgtaaatttattgctaatcccatcccttacgatctagagtataagctgcgcaagggcagaagtttttatctggtttgttcatggatgtattctaagagctgagaacagggcctggacacaataagcattcaataaatatttactgaatgaatgaactcctacctatattcctatttataatttggctccactttatcctactttagctcccattcaattcaataaaaaaaacatttttttgaacacat

SEQ ID NO: 47974 - DNA, 775 bp, Homo sapiens
ttttttttttttttttgcctgcataaaatactgtttattttgtcctttaggaagactaaagtagtccagctcccctacagcccagtcttgcccccaccctgcactctgtcgccttagttcctggggaccaagcatctggcatttctcaagcagaccctctccttgttgctccttttcagtccctggagtctggcttcccaaagccaaagctggaggagagctcattgctgaggaagcagggttggagcctgaggagatgcagagggcctggacccctcgctggatcccagaggcccaggggcagagatgctgggacagggctctaggggaccactgggtgactcttgaggggctagaagcagggctgggtgacttttgctacggtgggctgcaacactgtctggcttctcaaagcgcttgccgcagaattcacaggggaagcgcaaggcagccaccgtctctgcatgcttgcgctggtgccagttcagggaagccttctggcggcaggtaaacccgcatatctcacactgcaggggtttttctccagtgtggatacgtctgtggatgacaaggttgctgctagtgcggaaagaccgggcgcagaactcacagatgtagtcccgggtgtcactgtgcagcttcatgtgctccttcaggtgtttcttaaagttgaaagacttcccacaggctggctctgggcaggagaaagacttctggtggatgtgctggtactttttgtggtgctagagaaggaagtgggtggtagggagagaag

SEQ ID NO: 47975 - DNA, 543 bp, Homo sapiens
agaggggagcgcgctgcgcgtcgcaggagtaacctacttggtctcctgctttcgcgacatggccttcaattttggggctccctcgggcacctccggtaccgctgcagccaccgcggcccccgcgggtgggtttggaggatttgggacaacatctacaactgcaggttctgcattcagcttttctgccccaactaacacaggcactactggactctttggtggtactcagaacaaaggttttggatttggtactggttttggcacaacaacgggaactagtactggtttaggtactggtttgggaactggactgggatttggaggatttaatacacagcagcagcagcaaactagcagtaggttatagttgcatgcccagtaataaagatgaagatgggctagtggttttagttttcaacaaaaaagaaacagagattcgaagccaacaacaacagttggtagaatcattgcataaagttttgggaggaaaccagacccttactgtaaatgtagagggcactaaaacattgccagatgatcaga

SEQ ID NO: 47976 - DNA, 769 bp, Homo sapiens
  misc_feature (1)...(769): n = a,t,c or g
gcacagagggttaagactgcgcgaggagctagagagagcggagacgcggacgcgggccgcacccgccgagccgtgaaaaaagtacatctcctggaagggatgctttttagctgagctctggtggatgagaggagctagccttgaaaaacttgatactgatggacattgtgtgggccagaggcagggatggttggctatgaccccaaaccagatggcaggaataacaccaagttccaggtggcagtggctgggtctgtgtctggacttgttactcgggcgctgatcagtcccttcgacgtcatcaagatccgtttccagcttcagcatgagccgcctgtctcgcagtgaccccagcgcaaagtaccatggcatcctccaggcctctaggcagattctgcaggaggagggtccgaaagctttctggaaagggacacgtcccagctcagattctctccaataggctaatgggagctggtccaattcttgtcatttgaaatgctgacggagctggtccacagaggcagcgtgtacgacgcccgggaattctcagtgcactttgtatgtggtggcctgggctgcctgtatggccaccctcactgtgcaccccgtgggatgtttttgcgcacccgttttgcagctcaggggtgagcccaaggtttattaatacggttgcggcacgccttggggggaccatgttataagggagcgaagggccccagggttttttttaacaaaaggttttggtttcccaactttgattcgncatttt

SEQ ID NO: 47977 - DNA, 1307 bp, Homo sapiens
tcggcggacaagatggcggacatctccctggacgaactcatcaggaagcgcggggcgcggcgaaaggacggcttaatgccagaccgggagttggaggtgtccgatctcgagttgggatccagcaaggccttctcagccagtcaacacgcacagccaccttccagcagagatttgatgcccggcagaagattggcctctcagatgcccggctcaaactgggagtcaaggatgcccgggagaagcttttgcagaaagatgcccgatttcgaatcaaagggaaagtgcaggatgccagagagatgttgaactctcgcaagcagcagaccacgggtgccccagaagccccgccaggttgctgatgcccgggagaagatcagcttgaagaggagttcccctgctgccttcataaacccacccattgggacagtgacccctgctctgaagctcaccaaaaccatccaggttccacagcagaaagccatggcaccacttcatccccatcctgccggaatgagaatcaatgttgtcaataaccaccaggccaaacagaatttatatgacctggatgaagatgatgatggtatagcttccgttcctactaaacagatgaagtttgcagcctcaggcggctttctccaccacatggctgggctaagcagttccaagctttccatgtccaaggccctccctctcaccaaagtggttcagaatgatgcatacacagctcctgctctcccttcctctattcgaacaaaagccttgaccaacatgtcccggacactggtgaacaaggaagaaccccccaaagagctgccagctgctgagcctgttctcagcccattggaaggcaccaagatgactgtgaataatctgcaccctcgagtcactgaggaggacattgttggcagccgatgaagtgcaaccttcacatgaatgggaatgttatcacctcagaccagcccatcctgctgcggctgagtgacagcccatcaatgaaaaaggagagcgagctgcctcgcagggtgaactctgcctcctcctccaacccccctgccgaagtggaccctgacaccatcctgaaggcactcttcaagtcctcaggggcctctgtgaccacgcagcccacagaattcaaaatcaagctttgagcaggggagtgaggcagccagaagtgggggcagaggagggtggctctgtttccccaaggcaaagcttatgaccaatgggccatcggactggagacccctgattgtgggaagggttcccagggataaagagcttcctcactggaaaaaaaaaaaaaaaaa

SEQ ID NO: 47978 - DNA, 613 bp, Homo sapiens
gcccggggcaactgtccagatggcttcagcagtgcctgctcaggttcatcattgaaacatcccagtgtttggccagacattaaggtgtcgtgagagtccctttcatgcctttcttacccaagcaagggtctttgatgggcacgtgtttacagcgctgctgcatagtcttgtaatatattaacagtcacatcaactgaaggtcaatactaagagccacaggttgtacctgtgatggggcgtgtggtttcctgttgtctcacctttaattgtcaacctccagtgttgactctagaaatatgaggaaagcttttcagtttttaaaattgccatttaaatttagtctattaaaaacaaacctagaggtcttggtgcagttgatttcagagtttattaatttagtggtcccaaaagtattacatcttttatattctggaagaaaagaactgtgaacaaattaggaaccccggaacactctgacgtccatggacgcatttccagaaaagtggcaagagatgagtctttcctcctccaggaagcattttggtagaatttccatagagcattgtctgtgagtgactgatcccaacatgtatgttactaagccccaaaacga

SEQ ID NO: 47979 - DNA, 1085 bp, Homo sapiens; identical to SEQ ID NO: 4850

SEQ ID NO: 47980 - DNA, 867 bp, Homo sapiens
gtgctgagtaccttaaactcataactggcttattaaatgcaaaagactttcgtgatcgtattaatgggattaagcagcttttatcagatacagaaaataatcaagaccttgttgttggaaacattgtgaagatttttgatgcttttaaatctcgacttcatgattctaatagtaaagtaaatctggtggctctggaaacaatgcacaaaatgattcctctacttagagaccacttatctcctataatcaacatgctaattccagcaatagtggataacaatctgaattccaagaatccaggcatctatgcggctgctacaaatgttgttcaggcactgagtcagcatgtagacaattacttacttctacagccattttgcacaaaagctcagtttttaaatggaaaagcaaaacaggacatgacggaaaagcttgctgatattgttacggaactttatcaaaggaagccgcatgccacagagcagaaagtgttggttgttttatggcatctcttaggaaatatgacaaatagtggctctctgcctggagctggaggaaatatacgaacagccacagctaaattatcaaaagcactctttgcacagatgggtcagaatctgttaaatcaggctgcatctcaaccaccacatatcaaaaagagtttggaggaattactcgatatggacaattttaaatgaattatgaatcttcgataaaatactgtatgatgaacaaaagtgtttacatgatgacaaatggaactttctaaaagttatgttatcagtgcctgcacttcacatccagcaaattaagtcaatggctatttttatttgcagcctatgagtacacatctgtcctatatcaacc

SEQ ID NO: 47981 - DNA, 763 bp, Homo sapiens
gctcgaccaagatgtgaatatttattcaaagtggaaattaaaaaccccgtaaataacttcaggtaaggtagaattttgccgccaagtgagttttatgaaaaaactttgtgtttgagccaggcatggtggcacgttcctgcagtcccagcagctactccggaggctgaggcaggaggatcgcttgagcctaggagttgagccatgatcacaccactgcactccagtctagacgacacagcgagacactatagctcaggaggtacaatccccagtggtcagaatggtaaggctggctcctctcagctcctcctctgcctcatccatggacagttcctttgcttgtgctcctcttggttggctagagtaggcatcacactggggagcgtgggcagctgagaccttggggctccctgccttccgcctctccacagtgtgacaagctggctgctgactgtgcccacgagctgcggcgccatggggtcagctgtgtgtctctgtggccggggattgtgcagacagaactgctgaaggagcatatggcaaaggaggaggtcctgcaggatcctgtgttgaagcaggttggcaaggggagggcgaaggaagcagagaacaggggagtcggcctctgcatcctcaataacaagatcagatactcccactcaccaggtgcttactgtggcaggtgcagggctgagcatgggacacacattatttcctttaatcctgtaaggggagataccagctccattctacagatggcaac

SEQ ID NO: 47982 - DNA, 1406 bp, Homo sapiens
ttttttttttgaaagagaaatgagacttttattagctccaagagcatttttcaatactaaggcaaaaagtaaaaagaaggacaaggaaaaccaaggcacaaagaagggacctaggcgcaccccagaactcaccacggacacacagcagagggcttctcttcatatcaagggtatgggtaaacaagaaaggctgctgtttcactgagacaggacgaaccaccaagtccaaatgagaagacaagcagagacgtagtgtcagaccaggagggttagaacttgctagtgtagagggcaataatccacttgggcacacggaggaaggagggcaggtaggaggccagccagcccaggccggacacgtgtgagagaacagagctcaaagacaaatagtcttggacggggcggccgtccacatcccgaaggccatagcgtcgagcaaggtcacaggatggcagcaccttaccactcaggctcaggatattgggatctgttgccaaagccaccacacatttgccactcaattctgtggtttccgcagatgagaaggctgatttgaactgcttcaacacaggatcctgcaggacctcctcctttgccatatgctccttcagcagttctgtctgcacaatccccggccacagagacacacagctgaccccatggcgccgcagctcgtgggcacagtcagcagccagcttgtcacacgcagctttgcccacaccataggggacattgaacatatactgcaggcttcctggggaggagatgaccacgatgaacccctggccagctggtaccatcagccgtgccccatacactgagcaaaagtagtggcctctgagtccgacgttgttgatatcatcccacatgggaggcaggggtttcccagaatgccttattcctgggtgttcaggatcgtctgggacccctggcataagcattgttgaccaacaacatctagacgcccttgctgttccccgatccacttgctcaaaccaagcttcgcacttcactctccctggcttgaatcgcaacaccacaggcacacattggccccccgagggattgtgcctcctgagcaacaacgcgaagggtgtccagatggcggccagtgatgtaaactgtggcgcctgctttgcagagctgcaaggcaatgccacggccaatacccctggaggcaccagtcaccacacacacttggccattcatgggagctgccatgactcacaggcaaaggaggcaggtctgccacctgcgctgccgctgaggtctgcagattgcggggctgcggtggaagtctgggttctcgcccagattgagccggcgacgtggaggcagtgttcaaggattgattctgtagtaggacccggggcgattctgtgctgaggtagaggggcagagtcccc

SEQ ID NO: 47983 - DNA, 2289 bp, Homo sapiens
cgagactgaggctgcccgtgccttattcgcacacaaaaacaatgtcacatcaggacttaatccaacccagcagaaaggctttttaaaaatttacttattacttgttcttagcaaattaagacaattacaataaaacatcagctaactgggttcttgtgagaaaactgaggtcagcttggaaaggagttccccgagtggagttcccagcggcccgcggctgacggccagatctgtcctgaggggtcgtgggagcccagcgcctgccttgagggaaatgaacactgaaaacaggatttgggagcagtattggattgacagcagagaagggactgtttgtaagggcagtttctcactgaagctgctaccattttcctttgtaaagaagtcatccacctcctcccagcggtgcccattttcaagacgctgcccgagcctcttaaaacagcttcttgaaagggtttttccacaacgggttctggaatgttctgcttcagctctggaggatgctctaaattagttcaccatgatgaagttagatttgcagtgagctataaactccgtcacagggtcatgctcgccttccgttttgatggtacctgcgatgctgtcattctccaggatggggaggaaaagtttgcacgaagtcagaggtataaggaggagcaatgacgtccagcacctcagtgacaaaatagcgaatgagtgaaatgtcagtgtccagcttctccagacactttcggatgtaactgacaacaggaagtacataacctcgactcagcaggtgaaccatcctgtccagcagtgtcttcttcaactcaagctgctcccatcaacgtcccagctgggaatgcctcaatctccaaaaagctttaacaaagcagcttgcaggaccttgggggtgcaaggagctggtggcaggtgctggatctcatcccagcaacgcccaggtggacaggggtatggtcagtcctgcagctgaaagtacccttggttctgatacagtccaatccacccacttcagcacacccattgctaccactggaaacctaatacactgataaagtgtgctcaattctgccactagttcagaggcccctttgttctcgttgcaacacaaattgtgaacggtttcgacagcttttgacgttgacttcagctcatctttattgatgctcactcgcttgttcttcttccaggtctcaaccacgcttgctgcgtacgcccaagatgtggatgtatttgtgcttgtggtcctggttgatccgagcccctggtttaaagagtgactgcatgaacaggtccaggaaggctggaacgcggataagttcaaccggaggagggtccatgcttgtgaacatcttgaacaggacggtgatgtcagcagggttcagggctcctttggacagcatggccccgagagcctggcaggccctggggtaggaggcagctgtgcccaaggctagtgtgatctgactggcgtcatgacctttctcctgggcaaagcgctgcacttcctgggcgatcctgcgcacagcggagcccccctgctcctcctgggccagcacggacatcatggcctgggcaaacaggtacgtgtgctccccgtggcacaccatcttggcaaactcagggagatttttttcaaggttttcttctcctccatctaaaattgtagctagagaggtccggagcactctcgagaacacttctagctgctggcatgctgtggacacactggtgatctccccctggtaccctgcgtcagaaataagcttaacggtgaagttcagcatcaaacagtctggatgggcttcagccagtttataaaaaaggtcccgccacgtggtatgtgcaatcatctgtttccagccacgctggggtctctccttcttcagtaaaaatagaatctgctttgcgggggtcaaaatgtttgatcagcaaactcttcaagtgattttccacagtttcctgaacctgcactggctcaacacctgtctgaatgagccactcggccagcaggttcacagtctgggccacagcggtgtagttttcagataagagctggataacattctctggagaccctcctgcctgaaaatacctcttcagagtgttgaagatggagggttccatgatataatcccgggtggaaaatttatgcaggcattcttgctgaacctccgcatcatcctctccttctccagaatcatcctcctgctggccgccgtcagcctcgtcgccccactcggccgcgctcccgtagtagtcctcgtccatgatggcgcccgg

SEQ ID NO: 47984 - DNA, 2089 bp, Homo sapiens
ttttttttgcaacatttaatacagtttttatttgtttaatttggtaaatgtagaatgtaatggtttcaaggcaaaccctggactacttcagtcacaacccaatagttaacatgattctgaagaacagtcttatctgcaatatctacccacttctaaacaaacacatctatagaaatccatgtacatatatattagttttcaacaagtcaggattttcaacaactctaaaatttcaattttatattctgaacacacttcaaaattatccacttgatgcaggatataaccatagggagataaaaattcatgcaatgatactcaggttttttttttaaaggtaaatccaatatttgatcattcaatgctacataaagtgcattgaatatcgaaaataaaacaagcgccaattttatcattaattaataacacatttattatcttgaaaccaaactggcccaagttactttttgtctttttgagtcagctctgtataaactcatttctctcaagcttcctgggaaataaaaaccaagatatttcatttattctttgcagttaacaagagatggcagcgggctcaaggtaggtatgttcttgataattcagagtcagaaagtacttcttcttgagcagaaggttcataatctcctacattttcagccaactcaatatctaactcatcattactttctgcactgtaatcaacttcttcaaggaatcgaggttcatcttcatccaagacataagtggtagggctagttactttgcagcttgattcaattaaatcattttcaaagtcaagcaggctggaaggcagattatactccaatggagaggtcagtcttttcaaacgtaaaagaccaacacaaaattttgctcccatctcttccagttctcgggtaccaatctgtaaacccttgtattttccctgatcacagccacataaagtactctccatggtataacttctttgtactcctatttccctccaaactacaacacgtgctgtggattctttagatttttccactacgaagctacagctgctcatgcaaaatgctggggcgatatggctcagtatcttaggcaatgtcctgtatcccgtatcctccacaacatcacatgaagttgcattatcattggtatgccacactgtctctttgatgctgcaaccatacataaatacattcttctttcgggaatggccatgataatcacaataaaccaagggtaaacgcttcactgcagccaagtattgcaacagccccttagcatggtaaattgtaggatgtaaatccggacttggactttgccactgcctattcaaatcctctccacttaaagaacagcgatgatttccattgatgacaccatctggatttaacatagggacaattttaaaaaataataaagattcctccgtaagctcctgaagccagtggggttaattgcctcatggagatattcccaacgttccctttcataaccccaacttgcattaagtttcccccaggatgtacccgagcagacaagaaaacgtaagggcgatttctgaaatggcagatatgttcataataattagactctggcattgctgttatagtcaccaaggggcagctgtttccagacagggtttcacataacacatctttccgaaaatagatttgctgaggattgtgtgctgattccaatttttgaagatgcatctgtaaagttgaatacgtatatggatagtgataagcaaagtagcaaacatcatctttatgtggaaaattgacagtaaatgtaattgtatagtaggattttcccttttgcccacctgcagcaactgaacttcttgagaaatgatttttatagtaacaaatgtcagtccccatacgaatccaccatggtctggcatttaatgcttcctgaaccgaatacatgagtggttgcataccataattaaactgactgttggacttttcacagttaatgatgttaaacctgtaagcaacacctggtcgcattccactgacttcaaagtaaaaccactgatgataatgattgctgtttatgtctgagttcagaataagatcatattcatttt

SEQ ID NO: 47985 - DNA, 1545 bp, Homo sapiens
tttttttttttttttttttataagcaatatgactttatttagttcctttggaaacaaaaccccccaaataatgcctgaacccaaaggtacataaaaatgacccaaaatagatttgaacatcacttgtagtttcttcctcgtaacatgagtgctttcagctggacagtagattacaaagcatctccgatcacgttaaggcagatgatcaatctgtggctgcatctgtaactcctcctgggaaaataatcctgttggagttgggggctcttcccagttgtttggttagttggcccaggaaggggcagtcctggagctggcggggtggggagccaggccccacctgtcttgtcactgctcgttctgctggccctctgtcactgatgctgatacggagccctggcccttgttgacatcactgatgcacacccactgcccatcaacttgactccttccacagggtcaccttattgtctccaccagagacagccaggatgttggctgtgatggaccagctcacatgccacaccacatcgttgaacttgtgcaacaatttaggggaccacgtattgcttgaggcatcatcacaggtccaaatgaacacacgaccatcctgggagcagctggcgatggtgctggtgggcagggccgatggagggggcccaggccacatctcgaacccagtcactgtgcgcttctagcttctgctcctccttccactggccgtcctcctcctccttccacagcttgatgaggttgtcacagccacctgatgcaaacctcttgatgtaattgggtttctgccccgatggggtcgtctatgaggcttccaggtacaacagcaggggcccagctgacggcattgcagccaatggtgtgagcgttgttgatcttctttacttcccattggccttcccccggtgtaaagtccagccagggaagatggccccatccgaagctccccacaggcccaggatcaggccgtaagtcatggggggcccagcaacacccgaagttcaacttgaggagtcgtgtccccgcattgctcgtggctctttcttcccagggtgccgttttcctctctccaagataatgacttttccggtcataggagcacgatgccaggatgttgcccgtaacaatggggtgagccccaggccacttgccacacaggacccctccatgacccctgaaggtcggcgaataaggatctgccctcccattgcgcacatcaaaagattttgacggacctgtctgatgaagcaggttgcccaggcgggtgcccatagtagtccatctgggcgtcgtgaatcatgtcctcatgggaggtatccacagtgttaattactgacacctctggactcccctcggaatggtccgcaagggacggggccagagccccccaaatctctaagcggtggaggggagctgaacggctccagcttgggatttgggactcaggacggccgaggaacccgtgaaggccgcgaccgtggccttcaccctgctaggcctcctcagtaccaacactcaccatgattgcggagc

SEQ ID NO: 47986 - DNA, 2642 bp, Homo sapiens
cacgcgtccggcaagctcctgaggtttccaacttattgtacataatatccagagttgttttttttaagataaagcattgttcttggttttattatttgtataaaaatttcccatttattttatacctaaatagtagataaggttactacaggattaaagagtttgactctgaattaatggggcatacactttggggtaaggatttctttttattcttatgaaagttacagatcatacttcatactaaagttttgtatttcgtgtttcccacttttaaacctcttttgtttttaccactttaaaatattatacatgtacaaacatctttaatagaatgcggagctgctttcaccagcaaacttgaaggaatgtttaaagacatggaactttctaaagacatcatgattcagttcaaacagtatatgcagaatcagaatgttccgggaaatattgagttaactgtgaatatcctgacaatgggctattggccgacatatgtgcctatggaagttcatttaccaccagagatggtaaaacttcaggagattttcaagacattttacctaggcaaacatagtggcaggaaacttcagtggcagtcaaccctaggacactgtgtgttaaaagcagaatttaaagagggtaaaaaggaactccaggtctctctttttcaaacactggtgctgctaatgtttaatgagggagaggagttcagtttagaagagatcaagcaggcaactggaatagaggatggagagttaaggagaacattgcagtcattagcctgtggcaaagctagagttctggcgaaaaatccaaagggcaaagacattgaagatggtgacaagttcatttgtaatgatgatttcaaacataaacttttcaggataaagatcaatcaaatccagatgaaagaaacggttgaagaacaagcaagcactacagaaagagtatttcaagacagacagtatcaaattgatgctgcaattgttcgaattatgaagatgagaaagacacttagccacaatctccttgtttcagaagtgtacaaccagttgaaatttccagtaaagcctgctgatcttaagaagagaatagaatctttaattgaccgggactacatggaaagagataaagaaaatccaaaccagtacaactatattgcatagaatgttggccttgcagcatttggtgtcatatgcagtagccagtggataaactaacctgttgattcaatattatttgactccttttttactaccgatgaccaaatgaagcagtgtaattaatggaaatagttgagtggactttttctcagtggttaacatgcccattttaaagagtaatacttacctttaagaagaatgttgttgaactctttgcatgttatttagtatgatgtgcagaaaacacttaagaacgtacctggtcttcatgaattcctctttggaactgggaaagagatccctgtggctattaaaaaggggggagggttcttacacaccattaattatgaagcaaaaggtttatttgcttaaaatgtcatttaaagatacttaaactgcatgcaaactttatttactgtacagagttctggatgtatttatcaaatagaaaaaccacccttgacttggttgttcacccgttttgtgatttcccttgaaaagagaaatgaattgtcatagctattgatattttactaggtgatgttctgttacactgaaagggatgttttttaaaaaaaattatttggaaacaagttttcaagtagggggacagttgcttacataatatcttgtatattcacatcctaaaaattttcatttatgagtatgggatgtgtgtatatggcttagccccaagttaactgtgctgattaacaagtacttataaaaatagctaaagtagaaaattaatgatcagttgtactagaggaacatcatagaagagaaaaatccaactctttatattaaaaatgaatacaataagaaaattgcaaaagagaccaaaatgaacgtgttttgtaaattgttacaggagcaaaaactttgcaactagttttcaacatactttagactttaaatgttgtttggacagttttgtcttcaacttggaccaattgtagattgttacaggcttcctaggatttagcattcctattttctctaccaaagttttttttagaagcatcccaactcttctctttgttgataaataagcctttcctgtcatcttcattttaacttgctaaaaccctagatacaaaggtcctccctcatttttcccacagagcccctgtttgggaatttgagattctgtgtcatgctggttttcctttcagaattgcttgaaatcgagttctcttagccactggacacctagttttcaggagaatgtcccaagattgtttatatatacaaaatggcaaaagtactgtttttcgaattgataattcaagcaaaggcttctctttactgtcactgatttttttttgtttttattttgtttccttgtttctatttccttgaagctttgaagggaggagaagcagaaaattttgtttatgctcgttaaaaatcagaactacttaatgcttttctgcacagcatatttcctggctgtcggagcgttagaagattact

SEQ ID NO: 47987 - DNA, 568 bp, Homo sapiens
ctcggttgatgtttctgcagaagtttcccccttggtcggtggtggaggtggtaaccgtgatagtagcagctccggcggcagcaacagcgactacgagggatggcggcggctgcagcaggacctgcagcatcccagaggtttttccagagcttctcggatgccctaatcgacgaggacccccaggcggcgttagaggagctgactaaggctttggaacagaaaccagatgatgcacagtattattgtcaaagagcttattgtcacattcttcttgggaattactgtgttgctgttgctgatgcaaagaagtctctagaactcaatccaaataattccactgctatgctgagaaaaggaatatgtgaataccatgaaaaaaactatgctgctgccctagaaacttttacagaaggacaaaaattagatagtgcagatgctaatttcagtgtctggattaaaaggtgtcaagaagctcagaatggctcagaatctgaggtgtggactcatcagtcaaaaatcaagtatgactggtatcaaacagaatctcaagtagtcattacacttatga

SEQ ID NO: 47988 - DNA, 502 bp, Homo sapiens
ttaccccatggtgcagcagtggcgggtccggagcaacctctaccgtgtgaagctcagcaccatcaccctcgcagcaggcttcactaatgttctcaagatcctgaccaaggagagcagtcgggaggagctgctgtccttcatccagcactatggctcccactacatcgcagaggccctctatggctcagagctcacctgcatcatccactttcccagcaagaaggtccagcagcagctgtggctccagtatcagaaagagaccacagagctgggcagcaagaaggagctcaagtccatgcccttcatcacctacctctcaggtttggttgacagcccagatgctgtcagatgaccagctcatttcaggtgtggagattcgctgtgaggagaaggggcgctgtccatctacctgtcacctttgccgccggccaggcaaggagcagctgagccccacaccagtgctgctggaaatcaaccgtgtggtgccactttataccctcat

SEQ ID NO: 47989 - DNA, 1045 bp, Homo sapiens
cccacgcgtccgcccacgcgtccgcccacgcgtccgcccacgcgtccgccctctcctcgctgcttaggctccgcggcctccaagctgtagctatgacggcgcgcgggactccgagccgcttcttggccagcgttctccacaacggactgggtcgctatgtgcagcagctgcagcgttctgagcttcagcgtcagccgcgacggcgcctcgtctcgcggcgccagggagttcgtggagcgggaggtgatcgacttcgcccgacggaatccaggggtcgtaatatatgtaaactcgcgtccgtgctgcgtgcccagagtagtggccgaataccttaacggggctgtgcgcgaggagagcatccactgcaagtcggttcgaggagatctcgacgctggtgcagaatcttggcccgaccagtcgggctttggacgtgatccgcatccgcaagcccttccacaccgacaaccctagcatccagggccagtggcaccccttcaccaacaagccgaccacgttccgcgggctacgcccccgagaggttcaggatcctgccccagcccaggtgcaagcacagtgaagagttgccccaccaactgcagccccaggctttggactgttactccggtaaaggtggttcttcccctttgggattcccaagcccaggcaaatggaacccatcaatgggcaagttgacagaggttctgcttgggataatgaagagctgcctgtttctttccagtgcctgcttctgggggcagtgaccttgtgaaccactcatttttatgcaagtggcatccctaaaacctgagatgaggaagacttcaagggttttacaggacccttgttttttaaatccaaattgataataatgatctcaaaacacagtgagaggtctgaaggctggcttctgaagaatccctgatgtcttattggaacaaccactgagctacggagagctctgctgtgatgggctaggcactttatatctgtgtgaatacagatttataaaacaggttaataaacttatccaaggtcacatttcaaa

SEQ ID NO: 47990 - DNA, 1215 bp, Homo sapiens
tttttttttttttttgaacagtagcaaggtttattatgaagagcaaaaggacaaagctttcacagcgtggaaggggacccaaggcaggttgctgctgctggctggggtggccagcttttattcccttatttgtcccctcccatgttccgtttctgtcctatcagagtgccctttttttcaatcctccctgcccttagctacttttaggatcctagtgattggtccattttacagagcgctgattggtccatcttacagagtgctgattggtccattttacaatcctcttgctagctacagagcgctgattggtgcattttataatcctagctacagagtgctgattggtgcattttacaatcctcttgtaagacagaaaagttctccaagtccccactggacccaggaagttcagccggcttcacctctcactaatacacaaattacatattatggttatttttacagtttgaaacaaatatatagaaaaatatgtatgtaattaatttacactgaatgatacattttcaaagcattctctggtttgggaacattaaccattaacatttcaagaggaccttgcgccactgtatgtttccagggctgtgtttgtggtgggggctgagttgcagggacctgaagttcattaaccttttcctccaggaaagctgctcgaccagctttggatcacaaggaaggaatgatttttatctctatttctaccttactgcctggccctttgctctctgttgagaaaacttggcttggatctaatctagtttagataactgagatgtggcatacatttttgccttgctttatgcagtgtttatgacctcatttgtcttcttagagagtacataaatatctctctttataagtaaactcaatgtctgaaaagtcactaataggaagtgttaagaacagggggaaattgttagtaaatccagcaaatcctatacccatttacctggatcctttttatgtcactgagcctaataaaaagcccagctaaaaagagcagccaaaaaagcagatggctcctccaaagctatgagactttgagaaaatgtgaatttatttcagctcccctaagggaactgctggtggaaatgacatcttgtaatagacacgctctgcaaggtgctttagtacttggcatgccttgaaaacagaacccccttaattcttcggggagtgcttatgtggatgaga

SEQ ID NO: 47991 - DNA, 1342 bp, Homo sapiens
  misc_feature (1)...(1342): n = a,t,c or g
tttttttttttttttttcaataaactcttttattctagtccacagatttttccattacaataataatgaaaatagcactagtaatttgtaacactgaggcccaaagggaaacccctcctcaaattataaggtaaatgacacaaagttgaacatagggtcagtgttgggcaaaaagcatttaaaatatagataacggggtcaagattttgtgtgtgtgcaaacactggggttttgtttttcaggatgacaccattttagaaagtgcatgattttgaaaactatatgtgtaattgtgacaaaactaaactgtagagaaaagacaaaatcaagcaaaaacaaaaaccaagaaaccaaaaggaagccaaatcaaatacaaggggcggatatgcaaacctccggtcctttggccctggaatggcaagtgagtgggcttcatagaaattctctgtagaaaggaatgtgtgggccagtgtggccatggccctggcctgacatcgctgagtctccaagtcttgtctcctcacagaggaaaagaagttgcttgtccgacacatctgctgggggtctgcccgagatggggccttcgttcccaatccctttgagaacagtctcaaatcctgaaaaggcaaggcatccctgcggcggccccagggcggcggcaggagatggggtcagtgtcctgccccaggctctgccggagctgtctgagtggttcaccgggagtgggtgggcctcggtgttgaacaccccagtcttccagggagagcaagtcatcttcagagaacagaagatagagatactttagtgtctccgctagaaagaagctctgcctgcttgttgtcgtggttgggggtgctactgtacacgtcttgggatcccagagaaaccggcttctgtccgacagtatttctccaaggccagcaccacctcccagccccactccctgtagatggggttgtgggtctgtcgccacaggtacatgtagctctccaccacctctggccggaggatgtagtagctctcgctcagctgggtggccacggcctctctgccggagttaaaccagaaggcctcaggcccaagtttggtgtctgagcgggcgtatgactcgtgacacgtcttggtgatctgggctgcgagctctcggtagtgggccctcttttcttccttggcatcctcggcgccaagggcgatcatgcccccggagaaacaggccaggtgccccatcttgtggtccagaatcccccctcgccactcggcaatgtaggtcagccccccgggagagacattcagcaagtaggtctctantgcctccaaggcttcgtagtaccctgtgccgaat

SEQ ID NO: 47992 - DNA, 1802 bp, Homo sapiens
ggtggaagcaaagtaatgaaaggaagaatgggttcctcacttgttattgaaatctctgaagaagaggtaaacaaaatggaatcacagttgcaaaacgactctaaaaaagcaatgcaaatccaagaacagaaagtacaacttgaagaaagagtagttaagttacggcatagtgaacgagaaatgaggaacacactagaaaaatttactgcaagcatccagcgtttaatagagcaagaagaatatttgaatgtccaagttaaggaacttgaagctaatgtacttgctacagcccctgacaaaaaaaagcagaaattgctagaagaaaacgttagtgctttcaaaacagaatatgatgctgtggctgagaaagctggtaaagtagaagctgaggttaaacgcttacacaataccatcgtagaaatcaataatcataaactcaaggcccaacaagacaaactttgataaaataaataaagcaatttagatgaatgtgcttctgctattactaaagcccaagtagcaatcaagactgctgacagaaaccttcaaaaggcacaagactctgtcttgccgtacagagaaagaaataaaagatactggagaaagaggtggatgacctaacagcagagctgaaaagtcttgaggacaaagcagcagaggtcgtaaagaatacaaatgctgcagaggaatccttaccagagatccagaaagaacatcgcaatctgcttcaagaattaaaagttattcaagaaaatgaacatgctcttcaaaaagatgcacttagtattaagttgaaacttgaacaaatagatggtcacattgctgaacataattctaaaataaaatattggcacaaagagatttcaaaaatatcactgcatcctatagaagataatcctattgaagagatttcggttctaagcccagaggatcttgaagcgatcaagaatccagattctataacaaatcaaattgcacttttggaagcccggtgtcatgaaatgaaaccaaacctcggtgccatcgcagagtataaaaagaaggaagaattgtatttgcaacgggtagcagaattggacaaaattacttatgaaagagacagttttagacaggcatatgaagatcttcggaaacaaaggcttaatgaatttatgggcaggtttttatataataacaaataaattaagggacaattaccaaatgcttactttgggagggggacgccgaactcgagcttgtagacagcttggatcctttctctgaagggatcatggttcagtgttcgaccacctaaggaaagttggaaaaagatcttcaacctttcgggaggagagaaaacacttagctcattggctttagtatttgctcttcaccactacaagcccactcccctttacttcatggatgagattgatgcagcccttgattttaaaaatgtgtccattgttgcattttatatatatgaacaaacaaaaaatgcacagttcataataatttctcttcgaaataatatgtttgagatttcggatagacttattggaatttacaagacatacaacataacaaaaagtgttgctgtaaatccaaaagaaattgcatctaagggactttgttgaactttatgctgaagattcttcaagttgattcagtgtattactgatttttttctatttgtaaaggattatgagttgtataaaatacatactccctaaactagatcatgaaactggtttctgttttatgcagttgtcatttgtaaagtctaataaaatattctctataaaaaaaaaaaaaaaaaaaaa

SEQ ID NO: 47993 - DNA, 391 bp, Homo sapiens
cttgcttttgggagccagcggtatggcgtcgggctgcaagattggcccgtccatcctcaacagcgacctggccaatttaggggccgagtgcctccggatgctagactctggggccgattatctgcacctggacgtaatggacggacatgcacatgatggtgtccaagccagaacagtgggtaaagccaatggctgtagcaggagccaatcagtacacctttcatctcgaggctactgagaacccaggggctttgattaaagacattcgggagaatgggatgaagtcttgctctgtcacccaggctgaagtgcagtggcacagtcagggcccattgcaggttggccttgccatcaaaccaggaacctcagttgagtatttggcaccatgggc

SEQ ID NO: 47994 - DNA, 1487 bp, Homo sapiens
ttagcctacaactattttctaactgggataaaagaaaaagagagtattttgtatacttgcaagagaatccctcctctatctaccaccactacactaaaaccaactcaccaaccaaccaaccaaccaactaaccaaccaatgtgtgaaagcagataaaatactgtccaggtcattgtggtgtcaccatttctacaatgaaatgagaggaaaaaagggcaaacaatgtgtttttcataaagctatatatttattcaacttaaatgacaacctttattctgagattacattcttcctaattttaggggctaaaatatattttcttttacataatgatgctgatagcagatggctatttgtttttgtttgtttatttttgttttatgtccttagctggcaaaattaaaagccagaagctaaggcccccatttttttttcttttaatacaaatctactggtgctgaaaactcagagcttaggaaacacagcctaggtaaagaccaatcttcttgctgcatatttcacagtattgaattctttcttggtgagttctccatacaagttatgaagcaggataaaagtcagtcttatattaagtcattgtaaatacggccttaatttcaatcaccaaagaaatgtatttttgttgtataccatggttgcagcatgttttattaaaactaattatatcaatagctacctgtagagtatcaacttaaaaattataatgccatttctatgaagtcattacttttataggactagcctgtgtcatatgtgtgatcaatattggtttaatgcagaaacaaaggcagctgggtgtccaagcaagccacttttctgggtcagggtttcagtggtaccatagatggctgccagtctcaatgtacactttggcccatttatctttataaatcataccatatagcttcgatatttacatacatttaaactgagaagaaatatgcattataagaaagcatagtttagtgggcttcatgtgtcagaaataattccatatttcacaattattttcatgtcattagctacccttgataaagaacaattccatataaatgtacaaactggaagataattttataaaaccgtaaagagatctttgtaaattgcagtgtgtctgcttataaacaaatcaaatcgatctccatttcttcaagtgtcaaaaacaaaagagtagctggacattggtttttataatcagtttcagagaaaatacaggaataatgatcaatggcattttgaagcagataaaactgccaagttttatgcttgagtctatcattctgtgatttgctataatagtattcctttctattaggtgttcccgacaatattagttctatattcatttgatatgagcatttatattaaacttcaaaattacctcggatagtatccagaatatatgtcagaaacccctaaaagcaacttctattttcctcttaattaagataatatttagtcatgtt

SEQ ID NO: 47995 - DNA, 1701 bp, Homo sapiens; identical to SEQ ID NO: 4919

SEQ ID NO: 47996 - DNA, 529 bp, Homo sapiens
  misc_feature (1)...(529): n = a,t,c or g
tgganancagntatgactgattacgaatttaatacgactcactatagggaatttggccctcgaggccaagaattcggcacgagagagaacaggatgccctgtggcagggtctggagcgagaacaggatgccctgtggcagggtctggagctgctacagcatggccaggcctggtttgaagaccatctgagggaggcacagcgacagcagctgcatctaggggcccttggtgagaattttctaacagatttacactcagagcctggtcgccccccgttagcccagattcaaaaggtgaacatctgtttgcagaatctgattcatgagaagttctccccaagtccactgaacaaggctagttcctgcaccacccaggattcaaaggaaagacgaagggagcagaacttgtggcagcaacaggagttgtcaaggcagcagaaaggagtcacccagccaaaggaggagatggctcagcggggctgcaccaaggggccaagaggccctaccgtgtctaaaccctctntaatttc

SEQ ID NO: 47997 - DNA, 1050 bp, Homo sapiens
tttttttttttttttttaaaaaacaaactgcaaaatggtatttatttacattaaaacatgaattgcctgtatacacacaaatataagaggaacaatctgttatgcacaataactgtaatatttagtacatgttatacacagcagtatctgttaagtcagtggtttgagtgaaaacacagtaccaaaacattcctgatacaaaataagttactcattcacatattctaatcatacaagacacttaatattttaaaagttacatacttcaaataacactggctaaatgtacaactaaagtttattaattttttttatgaaaagacttcagattgttattcataaatgatccctttcaggatgcattatcttttaaataaataaactaaattgacttcaagactatttataaatagcccactaaaatatgattgaagacattccttcattttattaaaggtgtagctatatactagagaatatgctcaactactgcctccaaattccaacactgtcattctaatttgcaaataggaattatttaaattccaacttcaggacatgagatgagctgcctgccctattttgtcaattgtttccaaaagcattaacggattaagagactgtcttgaacatctcaaacatttgagaaattcaaggttttctttatgttttaagctgatcctatatatggagattttgagataaattggaacacttttagaagaccttcacaaagaatttttcaattctaaaatctattacagatttatataaagtccaagagaacatgtgaaatattttcataatgcagtgaaggattcatgctttggcatttctccattcattctaaaataagatacttcaacaaacattttatacttttctatctacctactatacatattttctatacacaaaagtatttgattgaaatttgtgttttaacagcaatttcattgctaagaattcttttttagatatgaaaaatattagtaacattcagctttttactatgagaagctgaagttttgatgttgttgaaatgaattt

SEQ ID NO: 47998 - DNA, 1846 bp, Homo sapiens
tttttttttctttttggatttcccagttggaagagctccctctcccttttctttatcatcatctgagaccttttgatcatcaggaattggttcctgggactttagaagtgaagctctttcttcgtctacccaattgccccactcttctgctggtgcattccaatcagagttgggatcagcagaagacagaccatttaacccagaccattcatcatcgatatagggttgattacggctaacatcccactgataatcagaagtggtagactgagaaactggctcagcagtagacccaatgccagaaaatattgaacggtcactccaactccttccccagtcttttccatttgtattagcatctccagtgtcttgactccaggcagatggctcagttttcctctttcctgcagaagcaggtgaaacggagttccacttctcctcacctgcactgatctgtgaggagagttttacagacttttcattccagcctcctccattgacagtgaggttttcattcaatcctgaagaaatctgtgaaggaggcacactattttgcttggtatttgacttggatttatctgtctcttgtagtattggcggcacttgggaagagctcttgtcagaatcactttttgataagattacagatggctcggtagaagtagcaggtggaagagtcttgataggctggctatttttgacgagtacttcggctggatcactagtgcttatggtcttcaaggaaaaagctttttcctgttttggacgggttttagaggtattcactggaaggtcttctctaatctctttttctaattcttctgtgtcctgtgcagtagagttatcttcaccttgcttcttctttttcttttttttctttttggatttcccagttggaagagctccctctcccttttctttatcatcatctgagaccttttgatcatcaggaattggttcctgggactttagaagtgaagctctttcttcgtctacccaattgccccactcttctgctggtgcattccaatcagagttgggatcagcagaagacagaccatcaatgccagaaaatattgaacggtcactccaactccttccccagtcttttccatttgtattagcatctccagtgtcttgactccaggcagatggctcagttttcctctttcctgcagaagcaggtgaaacggagttccacttctcctcacctgcactgatctgtgaggagagttttacagacttttcattccagcctcctccattgacagtgaggttttcattcaatcctgaagaaacctgaagtgtagaatctccttttccagatttaaagttgctaacttgaacatttagatgagaatcacctttattcttcttggaaccaacaggaaatgatgcggttgtaagttgctcggtggtaactgtgatggtattttctatcccagggatagttgaatccaatgaaccagaatcagtcagcaccttatcacgtttacgctgctgtcgtttctctctgtgactaattttagtttcccaggctccttcatcaacttcctttccatcatggcgtgaactgttttgcactgctttagcatctgactttgatttcttcttatttttctttgacttttcatttttcttgtcaatctctggtggctgctttgctgttacactttgaggtgttcgaacagcttcaccctcagccacttcaacagtccgcccatttggtttgggcttctcggacagtttcttccggttcttcttcttctgttcctcgctccggagattcttcagcaaggccaggtctgctcggggccgcgcacgccgcgcctcctcgcttgcgggg

SEQ ID NO: 47999 - DNA, 2941 bp, Homo sapiens
  misc_feature (1)...(2941): n = a,t,c or g
ttttttttttttttttaagtgggacaataaaaatttaaaaataattttaaaatagaacagcttagagatagaaactaaattatttccaattcctactgtgccccaaacaaggttcacaaaagggctgtcctcccaacaattttctgaattctatatattcagcattaaattccatgataaagttggaaatccattcaccatttgtaatacatattgatgcatttaataaaattgcatgggccgtatcttttgcatttctgtatcctagtattaagtacagtgcctaccacaggccaggttctcaatacttgaataaatgacacaaaaatagccaggaccagcaagttttttctgggtgggcttcatagaatctctgtacttgctggaatcaccatgaaatccatggtcttcagctttgcattttcagcaacatagttatattgagttatcctcaggtgagcagtgagacccttgggagcggattcatggtagggtggctttgtaatgtgtcaccttggtgaggctatgtttcccggaactctcttccagtaagatgggccacaagagacattttgcttgataaccggagggcggaagtgaagcagcagcacattgtttttacacttggaaggttggtgctggggcacccaggcgttgttgcagttcacacgttgccatgtatctgctagatcacctcgttggtgtgggcagtagtcaggcctgcagccaggcctgcagctgctccaccttccccaggatcatcctttcagcttctctaattccctgggccagatgcatatttaactctgtgaggaagggcaccagcttcttctgcaggacacccacatcatcgaagctggaggtggtgagagactgacatgggttccaggccatcctcgtgggttccagctcgtgctcgtgggctccactgtgtcctcggtctcccacactttacatccatcttcccttccctagtgcctgccctgcagacttgaatcctacagtctgtagaagcctccagtctactgctttctagctccaggttttttaaggtctttggaccttggcaaccagactgctgtatctcggaagcgggttccacccaggctgaaaatctccgtgatcacgggtgtgccagcccctcctgcctcttcctctggggccaatttggaggcagaatcatccttgttctcctccttgtcctcctctgggtcaggtggctcttgcttcacagaaggcaggcctgggtctactgccttgctagggcagccaggcaccaatacgggagaagtcaggacagctgtgcctggtgtccactcgtcctgggtatccgccttctcttgcttcacctggggtaaggccacaacccaactcatgccagaacactgggcntcctgcaacagggcttctgtggaagctgcaacagggccccggcacctgcacaggantgcttgcgcccttcccgtaaaaaacacaaggtcagtgcccaggcgggggcagcacaaagccaccacctgcttcctgcttcgttggagcctgggtatggtctggttgggctgtgcgtgtagccaaggtgggcttcaaggtagggccaagatggtgccgtcgggcagagctgggcctctttcgacgacggtaaggtgggggcgatcctgccccatcctcagactctgaccagacactgggcagcagccgcttcatggcaaactgcaggcattggcgccaacgacacttctggcgcttctggttgctgcccccgaatttgggcttgtcgcagcagaagtcgcagcggccacatccattccgccgtaggcaggctgcacaggccccgcacttgcggttctgccggcggttcgtgtaggggctgtagctcgtcctcgtctacacagtaatagatgaactcggcaggtggcgagggggccagggctctggggtgcggctctgtgggctctggggactgtgatgggggtggtggaggcagtggctgggctccggggcgccgcctggcagccatcttggagtcacagcctcccttgcggcgggcatgtttaccccgtaggcaacgtcgctggacacatttccactggcgcctgagaccagggcggggagggcgaaggcagatggggcaatggccacaatcctcttgggtctgacagccccggcatactccacaccctcggctcctttcccacaatccggaggcagcgtctccgttcacacttgcagaacagccccgatgccacatcatggggcagctgcaggaggcaggtggagcaggccccacagtcttctgttacctggcaggctgcacactccccacagcccacacgcttaaacattctctcgacagtctttgcacaacgttttgagccgctgcctttgggtgccatcccctgagaagctgattccacagttctcacagcacccaggagcagggaatgaagctggggctgtgtcagtgtcagccttggtctcaatccctcggggcctccttcctgacctcaccactctggggtccaacctgacgtttccgagtcttggctggccttgaaggcttctttcgcttcttgctggcaaccgccacgggatgggccttgggggctggatagcacaagatgccttgtttgaagtcgaagagggtgagatcacacgcagggccccaggtatcgagtcagctcaactttgcttcggatcctgtctcctgtggggctctggtaataggtgtctgagcgtccacaggtggcccctgacttgcgaaagacttcgcggcgcttccagcccaggcccagggccgggcagtccagccagtcctcagccatggaggccacaggaagcagcagtagccagtttggcaccaggccggtatcttccgccactctaggcccgtggacccatggcgagggtccctcctgcaacctcccgcctcgccctcctccccttc

SEQ ID NO: 48000 - DNA, 834 bp, Homo sapiens
cccacgcgtccgcccacgcgtccgcagggaacgggtcttgtggctttgtctcccgcgaagaggagatggcggagtcgttgaggtctccgcgccgctccctgtacaaactggtgggctcgccgccttggaaagaggctttccggcagagatgcctggagagaatgagaaacagccgggacaggctcctaaacaggtaccgccaggctggaagcagtgggccagggaattctcagaacagctttctagttcaagaggtgatggaagaagagtggaatgctttgcagtcagtggagaattgtccagaagacttggctcagctggaggagctgatagacatggctgtgctggaggaaattcaacaggagctgatcaaccaagagcagtccatcatcagcgagtatgagaagagcttgcagtttgatgaaaagtgtctcagcatcatgctggctgagtgggaggcaaacccactcatctgtcctgtatgtacaaagcctgtgatacttgggctgtgatcctctagagccagcttggactcacatcattctatggggttgaagacaactcattccctctgaggagccttgtacatacaagccttttatttataacttattttgtattgaaacttttaaacaatactgaagaaaaaaaaacttttccgacatctgttcttggtcttttgtgacgcaggttgaagggggaggaatagaaaaagacaaactgccttggaggagataaaccaattttatgtctatcatgttatacaaaaatctagaaataatagatttgtacagaaaaaaatgataataaatgagaacacaaaacatataattt

SEQ ID NO: 48001 - DNA, 1374 bp, Homo sapiens
gttttttttttttttcccggcaagaaatcatgtttattcacattccccaccccaccacctgagagtcactttcactccaagccctgggcctgacaggagggggccaaagaggggggctgcctaaggcagggcccagaccccacagtgtgggcctctggagctgtgtctttactcttgctgccgatcaatcccatgctctgaaatgcgcacactctggctccttagtagatgccataggtgggctcatgactgtccctgtaccggtccaggtagcgcaggggctgccggtgggggaagcgcttctgcttggggtggtaagggggcggccgcacgaactcaaacaccggctcccgcatgtccagaagctggtggaagatgtaggtgacggagtcatcccagcggcactggaagaaggacaagccggctggagtcatggtttcttggtgtttcttgtagaaatcaaaagtgcggaaggtccgctgggccagctgatagcagggtgaggggcgtgcgtcctcagagaagtcaatcggctggtcctgcttgaagagcaggaaggcaagacggtggatgccggagcctcgggcagggaagggggggaggtagggacacgtcacctgtccttcagccacccggttacccaggatgttggttagcagccagtggaggtactcagcatctggctccagcaggtgcccattccaagcttagtgagtagcaacgtccacaaggagccctcttctgcctcataggtcacctctggcgcttgggcagcctcggttggagtcacctcattgccacagtacacaggcatcaggtcatcctcacccacagcgtaggccacgtgcagggggactcggggcacaaaggtggcaccgtggaacaggtctcggtagaggccgtaatactcagccagacgctgcttgtggtaggggccacaggtcctctcccactcggccccgcacggcaatccaacgggaacactggctgtgcggaaggcgggcaagcccgctcctcttccacattggcccgaagctcctggatggcctgtttccgttccagtagctgttgggtccgggagactttgggtggaggcagcccaatatcaatcttctctttgggatctgtcttctccccgaaatactctcggtaggtccgccaccagtgcggggcctggcctcctgctctgctcggcgccggtagcggtcgaagctccggtacttctccagccgctccaggttgctcaagtcgatgtcactgttgggcatcggccccagcgggggtgtccggcggcccaggacggccgaggtgctgaagccccgccatctccgacactcgcacagccggctcgccaccagggcgccgccatcttcc

SEQ ID NO: 48002 - DNA, 802 bp, Homo sapiens
ttttttagttctgtaggtcagataatttaataaatatttcaaataaatatataataaaaactgaaataaaatgtcaagaatggggaactaatggtattaagttttatatagaagggcatgagggaagtgtattaaaatttgttcaaatttatgactgagagggctaagaaggtacttaatttcctcagatgatactttgcgaacatgtggtctatttggttgacctttgcaaatagttgaacaaccacaccgtgtattcccataccccctagactgcctgtccaggccaagccttagtaccacgagtccacagtgaagtccactccaggttatctgcataggtagcccaggcacctttcctcttttcctttaggtgcctcccctctacccacaacctcttatttcatctcaaacacagctattacaacatgttttatttcactggaaaattctgtaaagaactaaatctggttcccttgaagaaaacatttagcacagcttaaataaaagttgagaaggagggtaagagtgcattgccccattctagctctgttgctaccttacctctgactctaaggccctgtgggatgaaaagcaggtatccaaaagaactctgcttggccctctgatacggccttgaggtcagccctggtgcctgctttctggcccacagaccgctgaaatcctaggagctgccatgggagttaccaaaaatatgtgaataaactgaatgcagaggctgaggcaggtggatcaactgaggtcaggagtctaagaccagcctggccaacatggtaaaacc

SEQ ID NO: 48003 - DNA, 1646 bp, Homo sapiens
aaaaataacaacaaaatgtatttaaaaacagacttctccagttggcattttgaatgaaattgctaacaactccaaccctctatattgtgtttcttttgctcctggagtcctcttgcagctttaattcttgaaactcaggcggcagcaccagacattaaatccccaaagggagaggtattagtaaaccttttgctggtcattcttttccgaatgcaaatggacaaattcttaagccctcttattcatttcatgatgatcattagataaaaaaattaagcctaacttgcatattgaaaataaaaacaaaaacacacacaaaaaaaccttgcagataataaatatcgcttattcacttattttaaacaaagtccaattttattcactctcaatatccttgcagtccattgtataccttctgcactgacccttgtttcagtagctgtttgataccttctctcgcttcctctgttaactgttcttttggaaaatccacatcaaaagtgattatcaaagagcccttgatattgttgttgtcaaagttggggagcccttcccctttcttccatagcttcgctcctggcctggtgatcttatcccgggaaatatgtaccttgtgaccatccaagtgagtaatatccatctcaaagccaaccagtgactcaactaatgagactgtcacatttgtgtacaaatcatctcctctcctttcaaatattgggtgcttgacaactttgattcggaaccgtaaatctccaggctccccatccacgtgaggctcaccttctccaataaaggggtactccatgccgtctctcaccccaggctctatttctacttccagcgttcgttcttcattcactagtttgacattagggcattcgtcgcagaccacctcctgggtcatttggaagcgcccagggcccagctgggtggtccgcatctcttgccgacaattgcacttccgtttgccaggagcctgccttgccacaggtttgtttccaactactttccacaaattttctgcataatacttcttccaaagtgacttctagatctacaataatatcacttcctcttggaatatttctgtcttgctgacgaggggttcctccaaacatgaaaccaaaatccccaaagaagtgtgaaaaaatgtctccatgggagctctgatgaccatcttttaatccttcttcaccataagtatcgtactgtttccgtttctcactatctgacagaacctcataagcagcacccagatcctggaatttctcctgggcttgtggatcatcagggttccggtcgggatgaagctgcagggctagtttcctataggcctttttaatatcctttatagaggcacttcgaggcacccccaagatcttatagaaatctcgtccggcaatcaccgccccgatgaggtatagcagcaacaggcaaaaggtgctcaggttctgcggagccatggttcctctgtcccgggtcctgttccacacactcctcacagcctcctccgccgccgcgtcggctcgccagcccacccggccctgtgaggccgcctcacaccgggggggcgcgggggtctccctggtccgcacagactagctagctagccccctcttctgccggtccacttcccgggagtcccg

SEQ ID NO: 48004 - DNA, 682 bp, Homo sapiens
gacgagccgggccggaagaagaggtagggcgccgccgtgacagattagtcctaaagggaacggggttgttagttcaattggctaccggaaaaaaccaggctgggctgggcgccgccatgacaaccgataccggaaaaggcgggtcgttccccccggacagccctacgccggcaaaggtctcgagatgcaggcggccctagaggtcaccgctcgctactgtggccgggagctggagcagtatggccagtgtgtggcggccaagccggaatcctggcagcgggactgtcactaccttaagatgagcattgcccagtgcacatcctcccagtgagtgcggcccaatcatccgccagatccgccaggcctgtgctcagccttttgaggccttcgaggagtgtcttcgacagaacgaggcagctgtgggcaactgtgcagagcatatgcgccgcttcctgcagtgcgctgagcaggtgcagccgccacgctcacctgcaactgtggaggcacagccacttcctgcctcctgaggactcctctgacggcaggaaaactggacatgaatgactgcccccccgcccctcccctgcagagtggccagatggagtcctgagccctggacatgggcccggctttcctggatatcaggacttccaataaataaagactctgtatactgggaaaa

SEQ ID NO: 48005 - DNA, 1182 bp, Homo sapiens
ttttttttgtaacaaacagtaccaatttattttggccgtgggtttttgctttttttccagttgatgactttgtgaacattcccaggtattggagcctctgtggccttaaatgtggctcagtggagggagacccagcatagccaggccagtatggagcacctcacgcacagctctcagaagctgcaggcggacgaacatctgaccaaagaggtgtggtcgaggctcccccaggatgtgtacccggttgtagtaggagctgaaatccatgctgagctgtaccaggaacttgcatatcatctctgtgcgtacagcaatgtggagccccggggctgtgcagtccagcactgctgtccggctcagcagatccggaaaggggaggatactgttgaagagcaacaaccactcaccctcatcatgtagcagtgagaagtccagactgctcacaggaggaaaagtggggtacagaccttgttccatactacacttgtaactctcaaagagtgtggcaagacgggcacaattatacatgacaaaggtgccactctttgtgcccttcgtggagatactgctgtcagccagagccaggaagagctgactctgtggggctgtgctcagcatctcaaacttgatggtggccacagagagaacaccaaagatctctgtccaggctgggtcttgtgccagatccccaccatgcttcagtgctgaggccttgcacacctgggtatgccggaactcgtagtactcaggggcagtcatcagagtgccaggtgcaccagctactttcacagggccacagatgaggtgcttctgtctgagtggagccttgtcaaccaacttccgccaaagcaggtccaacttctgttgctggaactcctcctcacagctaacaacatgtacaaccaggcagccgcctgtaccagtatctgaggccccagccaggcctgggtggctgtcctcgggccaatgccatagagcctcttgcagctcagccagcacagagaggagatcctcagtcaccaggacagttgtccagggttggggtcatagccagctgtgcggccctgttcttccaccagctccttcagacacagtctgcctaggatgccaggggacagtgtcctcccgtcattagcagaggtaagttcttcaagggcgtggctcctcagggtgtgggaggaa

SEQ ID NO: 48006 - DNA, 1904 bp, Homo sapiens
gaggacactactgtctgtgtcctagcactccctacaaccacaggctcagcccacgcactcacagctgtttgtaaccatatctcctcggtacgtgctgtggctgtgtggggcattggcaccccaggtggccctcaggatcctcagccaggcctgactgcccatgtggtgtctgcgggggggcgggctgagatgcactgcttcagcatcatggttactccggaccccagcaccccaagccgcctcgcctgccatgtcatgcacctttcgtcccaccggctagatgagtattgggaccggcaacgcaatcggcatcggatggttaaggtagacccagagaccaggtaatatatgctcctgggcagggtgtggtatgggtcatgcagatgctcccaggcttgcaggctccacctgacagctgcatgttgtctctgcaggtacatgtcccttgctgtgtgtgaacttgaccagcccggccttggcccccttttggctgcagcctgtagtgatggggccgtaaggctcttttcttttgcaggattctgggcggattctgcagctccttgctgaaaccttccaccataagcgatgtgtcctcaaggtccactcctttacacacgaggcacccaaccagaggcggaggctcctcctgtgcagcgcagtaactggatgggcagcctgggctttctgggatctcaccaccatgctagaccatgactccactgtcctgggagcctccagtggatcctgggcttccctaccggcttgggcaccccctccctgactctccaggcccacagctgtggtatcaacagcctggcacaccttgcccacccgtgagggccaccatctcgtggccagtggcagtgaagatgggatccctccatgtcttcgtgcttgctgtgggagatgctacagctagaagaggctgtgggagaggctgggctggtaccccagctgcgtgtgctagaggaatactctgtcccctgtgcacatgctgcccatgtgacaggcctcaagatcctaagcccaagcatcatggtctcagcctccattgatcaacggctgaccttctggcgtctggggcatggtgaacccaccttcatgaatagcactgtgttccatgtgcctgatgtggctgacatggactgctggcctgtgagccctgagtttggccaccgttgtgcccttgggggtcaggggcttgaggtttacaactggtatgactgaggtatcctgcggtggctggcgtgctgggcatggggcctgctcacagacagcatggagcagggaagggctgtctgtgcccatgctcagcatgccttgaggggaggaggtggtggccgtgggttcctgatgtcggtgcaggagctgaaggtgagtggagtgctgccaagaatatgcccgactccccatgacaagacagaactttgtaacaaacagtaccaatttattttggccgtgggtttttgctttttttccagttgatgactttgtgaacattcccaggtattggagcctctgtggcctttaaatgtggctcagtggagggagacccagcatagccaggccagtatggagcacctcacgcacagctctcagaagctgcaggcggacgaacatctgaccaaagaggtgtggtcgaggctcctgaaagagaaagggcctgctggtctcatcctctgcttcctttgcctttaccctatacctctctgcacgtcccaccccgttttgctgtgtgctcacccccaggatgtgtacccggttgtagtaggagctgaaatccatgctgagctgtaccaggaacttgcatatctagagacagagactgagtcactggcccatctctttgctcttgtgccccaggccagaataaagaatagagtgtagagtgaaaaaaaaaaaaa

SEQ ID NO: 48007 - DNA, 864 bp, Homo sapiens
  misc_feature (1)...(864): n = a,t,c or g
gtggactgtgaagaaacatggcggccgcgacgttgacttcgaaattgtactccctgctgttccgcaggacctccaccttcgccctcaccatcatcgtgggcgtcatgttcttcgagcgcgccttcgatcaaggcgcggacgctatctacgaccacatcaacgaggggaagctgtggaaacacatcaagcacaagtatgagaacaagtagttccttggaggcccccatccaggccagaaggaccaggtccacccagcagctgtttgcccagagctggagcctcagcttgaagatgatgctcaaggtactcttcatggaccaccattcgctgttggcaagaaacggctttacttacaaaacagactctttaccttctgctgtgtttgaagtatgtttagtcagcatgctcaggaaataaatgtgaattgcccttgagacctgcttctacattggttgctttgttaactctacctgatcttcacttgtcagtaatttgagaccacttcaaagccctctgcaaacaccccaaaggcagaatctgctattttgagttttccattaacttccaaagaattctggttttcaaaacaggagccagagttggagatattacagtcaactttggcttctaagccagtaattccattcttaaatacctcactgtcttggccatggggaagcactatggcctcagctgggggaaagaccctggcctaggggtcttagccactccccaccctagggtatagttnnnnnnnnnnnnnnnnnnnnnnnnnnnnnnnnnnnnnnnnnnnnnttgtctgggccacacataaaatacagtaaccatagctgatgagctaaaacaaaaaacaatggtttgtgc

SEQ ID NO: 48008 - DNA, 477 bp, Homo sapiens
  misc_feature (1)...(477): n = a,t,c or g
gtgnnnnnnnnntttnnanaaccgctatgacatgattacgaatttaatacgactcactatagggaatttggccctcgaggccaagaattcggcacgaggcagacacttcagtattaagccgccagcaggtcttgctccgctatcaacaacttattaaagaaaacttgaaagaaattgccaagttaatcacattggaacaagggaagaccctagctgatgctgaaggagatgtatttcgaggccttcaggtggttgagcatgcctgtagtgtgacatccctcatgatgggagagaccatgccatccatcaccaaagacatggacctttattcctaccgtctgcctctgggagtgtgtgcaggcattgctccattcaattttcctgccatgatccccctttggatgtttcccatggccatggtgtgtggaaataccttcctaatgaaaccatctgagcgagtccctggagcaactatgc

SEQ ID NO: 48009 - DNA, 1094 bp, Homo sapiens
cctaaattatttaaatcagaatgcatacacagccacagctatcaacagcaccaacttctgcacctcagcaaaggatgcctttgtcattctggtggagaatgctttgcgagtggctaccatcaacacagtaggagattttatgttattccttggcaaggtgctgatagtctgcagcacaggtttagctgggattatgctgctcaactaccagcaggactacacagtatgggtgctgcctctgatcatcgtctgcctctttgctttcctagtcgctcattgcttcctgtctatttatgaaatggtagtggatgtattattcttgtgttttgccattgatacaaaatacaatgatgggagccctggcagagaattctatatggataaagtgctgatggagtttgtggaaaacagtaggaaagcaatgaaagaagctggtaagggaggcgtcgctgattccagagagctaaagccgatggcttcgggagcaagttctgcttgaacctagccgacggttatggaaacccattgacattccaaaacaatatatacacacacacataaatcagccaaaatcagagaaaaggaacagggatttaataccttttttatgcttatttttctcaaacatgtactcctttcatacgggtggcttttacaaggcaacttccgtcatttaatgttttcaactgtaattgtcttaatggaaatgttaaaattcatatctgattaacatttttaataacttagaggagattttaactttatttaaaaataggtaaaattattgtacctaattatgtctaaagtttattcaggggtaatttccctgatgtctgtataaaatcaagatcttattttactgatgcataagtcctagtgggtcaagactaggcatatgctttcagataaataaggaattactccaatcagttttccccaatcaaagaagccatgtcattttacttttagaaacatacaattggggcccaatatggggaattttcataatagttcatacatttgtcagccaacattaaaagggtaaccaactcctcagggtatttgtaggtttaccctaacgcttctttaaaaag

SEQ ID NO: 48010 - DNA, 1182 bp, Homo sapiens
cccggcgggccctgggagagctgggacgggcggcggccgggtggcctcggccaccgcttaattgcatcttttcccggcgtctcgtctgcagagggagcactatgtctgcggaagtccccgaggcagcctccgcggaggagcagaaggaaatggaagataaagtgactagtccagagaaagcagaagaagcaaaattaaaagcaagatatcctcatctgggacaaaagcctggaggttcagatttcttaaggaaacggttgcagaaagggcaaaaatattttgattctggggattacaacatggctaaagcaaaaatgaagaacaagcaacttcctactgcagctccggataagacggaggtcactggtgaccacattcccactccgcaagaccttcctcaacggaagccgtcccttgttgctagcaagctggctggctgattaagaggctgaactgcatgaatctgctaaatctcattatttctccttaatatgttacttatctactttttatttcctttcattcactagtcatttgagactgacagctttgcaggtagcagtagtgtgtgctgctattgtggaatatacgtgtgtagagtttttgattagtttaacagtgcactggtgaagaggacatgttagagcaacataagtaaactacttgaaaatagttgtatatattacctaacttctagtgtagtactggttctaacaagtaacaagcaagttttaaaattttaatgttttggctttcattacttcatcttaattatagctttgtatgttactcttatttaatataatctctattgtattgatttcttctgtatttaccttttggattttgtaaaacagaagtttaagaccacaagttagaagaaaggtcacatatttcaaacacaactagatggggctctgaaagatttgtatctctgtgcttgaacttgaatggccttaaacctgtttcagctttaacagtagaattttacttgggcaatatttgcccattctggtgtaacttatgtgactctagtgcttaacagctgccgttgaagctaatattcagttctgtagagttagaataccttttgttgttgaagatgtgaatgaagtatgcatgtgcattaactgttgaattcacttttgtgccatttttgtaaatacagtagttttgcacaac

SEQ ID NO: 48011 - DNA, 941 bp, Homo sapiens
ggttttttctctttttttttttttttttttcaaacaacctgtttatttgggcttatgatttactaactgcaggtctatgtgcaggaaggccagcgtcccctcctgccgttgtcacccacatccacagagcagccctagtgccaggtgcagccactgccacccacggcacacgggaacgggacccatgctgcaggcctgctctcctgcccagggagatgccacgtgtgtctgtccggcagcttcatgacacagttaccaagcagctagggagggcttagatttgttggtgtccccaggcctctccctcgggggcttgggcgcatccccacagcccccaagggatgggggctctgccacggggcccaattccacagctccacggctggcgcccctcccgtgcccatggggcagagccaagtatttccagaggtggcttggaggccctggggtggcggggagaggaacagggagagcatgagacagacccacagggctgaggccaaccctgcttttatttcacaagagcttctcgatggctgacaggagctcgggtttcaggatggagtccggctcggcccccgcggccttgatgtcctccagcacagccatgtcccacgagaaggtcaggagggcagagggcaccagcccgcactcgttcaaggccaggttctcgtcctcggacagcttctgccctcccgaggccagcagctcaaaaggcagccagtcgctctgcagggcctcccggacgaacccgtacaccgcccccaagccgctcccgagcgtagaaagtgccctgcaggaggcagccatcggggaggcgcacgcgcagcagcgtgtaagttgtacttgcgcagcccccgctgctcctccttctcccgcatggccttggtccgcagcacgctcagccgctccaccgcctcggacctgagcctctgctcccg

SEQ ID NO: 48012 - DNA, 586 bp, Homo sapiens
gatgatgagcagctcttctccttaaagaagtctgtgtctaattcctacgcgtggccgttgtcagagtatagctctttcccgttacctttactagccagaaacagcttgcttgctttctgaagaaagagaaatgacgcaccacagggtacatcagatgaatcagaaattacattgtttggacttcaaaacagtgtttactgactctgggcttaaacttctagtccactcctagaacagaaaccctcaaagttcaagagtgtttttttttgtacaattgtttatacaaattcaacaaaggtaaaatcgcatcagggaaggtctaggaaacaccaccttacaacaatggcacttataaatgcagaactttacaactaggaaatagccatgttacaaacctaaatgagaactcaactcacacttcagaggagagaagcaaaagcaaaagaaaggctatgtgggagcatttattctacgtcttgactcactgtataaattagatctatgtaagtacaagagctcatgctggagcagaacctcctgagtgcaaaggctgaagtcgaaattttaaaatttgagaaaagtgaat

SEQ ID NO: 48013 - DNA, 1382 bp, Homo sapiens
agcctggagagtgcgcgcaccgccgcccgggcagccgctggctccagctcacgaaacagccccgggcgccgcgccgctctgagtccagcctcctactgagaacagtccctcccttgtgcgggtcgcacggctagccgcaggttcggccacgtcaaatccattttctcaaaaagcagggagcagagctctctcttcgccgccgacgcagaaaggagctggggaggaaaaagctgctgccttttgcgctggagattcgtggggcaaggcttctcattttcccagggttgcttcccctcccgggtgaggagcgtcctgagattaagggaaagagctgggaaaatgggagcagacctgggacgagagatttattttttgcagaggatgatggggagatggtacccagaacgagttcacacagcagttctgtttcattgacagcttttcttagtgacactaaagatcgaggccctccagtgcagtcacagatctggagaagtggtgaaaaggtcccgtttgtgcagacatattccttgagagcatttgagaaaccccctcaggtacagacccaggctcttcgagactttgagaagcacctcaatgacctgaagaaggagaacttcagcctcaagctgcgcatctacttcctggaggagcgcatgcaacagaagtatgaggccagccgggaggacatctacaagcggaacactgagctgaaggttgaagtggagagcttgaaacgagaactccaggacaagaaacagcatctggataaaacatgggctgatgtggagaatctcaacagtcagaatgaagctgagctccgacgccagtttgaggagcgacagcaggagacggagcatgtttatgagctcttggagaataagatgcagcttctgcaggaggaatccaggctagcaaagaatgaagctgcgcggatggcagctctggtggaagcagagaaggagtgtaacctggagctctcagagaaactgaagggagtcaccaaaaactgggaagatgtaccaggagaccaggtcaagcccgaccaatacactgaggccctggcccagagggacaagatctaaaaaaaataatgctgggaagtcctaaccacatcaagaatgcctcagatcagtgacccaaggaaccttccagaatggatgaaatagacccaaagctgaattcacctaattttagggccaaaaacccaaaaaacaaaacaagaccaaaaaaatcttcagatactgggagaacaaatctcaattgctcaattgtatcttatgaaaacaatttttcaaaataaaacaagagatatttaagattcattaagttcttgtcatttcaaattttaagaaaaatattttctaatggaattacatata

SEQ ID NO: 48014 - DNA, 464 bp, Homo sapiens
gctgggaggcagaggttgcaatgagctgagattgtgccactgcactccactgggcaacagggagagactccatctcaacaacaaaaacaacaacaacaacaaaaaggcaaaaacaaacccctggaaattaactggtaataaagagggggaaaggaactggttggaaactttccttaaaaaaaaaagtcaaaaccctgatttgccaacatgtagacctcagcttaatgtagacttgcagaaagccattaatttagggtagtattgatttatatttgactggtaattaagagcatacatgctgcttctttattatctgggtgacacaaattcatgtggcctgaggaagggtggaaatagtaggggggaaatgtttgtaagctttgagaaagattttttttctgtctgcaagactgcattgaaagcactgtacctaatccaccaccacaccaccaccaccactcctt

SEQ ID NO: 48015 - DNA, 5691 bp, Homo sapiens
  misc_feature (1)...(5691): n = a,t,c or g
tataatatagaatttaattttatctttatgaagtattctgaaataaaagacgataatacatgcatcaggcacattcgacagaagacttttacaatggtttacatttcctttttatttattccttgaaactgctcgtattgcaagtttttcacggatgaaatatggaactgagcagattctttttttctacaaaattatggtataaacttgctcaattttctatcttattgctaataaaccttacaggcgcacagtttgtaaaataaaccccttaaggactgaatgcgtagagcatgctgcaaggtacaagaaataagcctaaaaatgagcatataaacctacatctgggaccaacacagtactgaatgctggcaaacatttatcacaacacaggggaaaattaacaaaaggagatacagttcagtcctgaaagggttaaacagaaaccctaatatattattgtttctaaccatccatcccacattacagtgcttgaaaacaaagtcataagtctggcacagaaaattacacacatttgttcagtacttatcagaaacacagctgcttttgcaatcaaagtaacttggttactaactgaacagcattttgtttcaaaaggaacctcctccccagtggattttctggttagcatgactagttaggttagttctcaaaaatggcattggaagttttttgtgaaagcacagatggtaccagtttcattaaaaacaataaaacaaaacaaaacaaaaaaactaaccagttatgattgcagataagtctgtgcagtaagagtgacaaacatttcacgattaagtcatgtataaacatgcctttaattgccacagtttaaagaaagtgagcagcaaatttagatagtatactagtgttcaacgctgaaatcactcaaaatataaagggcatttttaaggcttttagcttgccttcccaatctatgtgataaattaaatggaacaaataaaaacatattggatcagagactcagcttctatgtgtatgtttagaaactgcatagtcatgagagcataagatacatttctaaaacagaattttttaaaaattcaaacatactataactgaagcactcaccattctaataagagagtctttctgagggtaaatgaccagcatgtctaataatgccatcactggaggagggcacacagtctactataaccagaggacaaggttcctataaattacatactgaaaatgattcacaaaaccatgaaagaaaaaatgtaagcagctgacaaaagaactactgataaacaataagctacaatggacaaatcatttcactctttagtctgtggtatgagaatggccaaaaataggtggggaaaaatgcctgtataagtacattcttggacttttcaaaaaaagaaaagaaaagggtttacagtataatatttcaattatcttacggaaagaaactatcaaaataaaacatacacgtttgttaaaaaaacacaagttccattttaaataaggtcatgaacttggaaaaattatttttggagctacaaaaatgggtaaggaatagtttgttcttcaaaagtatctcttttgttattggttaatttaatatgattccttaactaaataccaaacctaggaagtggaggaaacttgtggccgttaaagcaaagcagcactaggaacatgtccatgctctgaacaaaagcactgtgtaatgattcctgccatgactccatagagaggaataactactactcagaaataagtggtctgtaagaaagagacagtgaacaattacaacaaagaaagataaggccacaatgagttctgcccttgatcactgaaacagatttaaggtgtgaggcaggattagcttataagagagaagtgagtgattggagcagatttgaagaaaaaaggcgatatagaataaaatgcagcctgggggtgattaaaaaggcttgccagtaagagaaaaccgcaataactgatttaaccacctaacgtgctttacaaatgaccttccccttgaaaactgaggaaaaggcgatttaaagatgttaggaagaatatttacagtggcatagtctgagcatagagtgagtgatgaagacagcaaagctggaaaaaaaatgctactaataataatttctaaaaagtctattaatggaaactttttcaaaaacagcccaggacaccagaaagacaatgttctgtagggaaacactgtaggaagttacagttttgcattcataaggtactgtggctcctgttttatgggacagtaaaaagcttaccacaatctagaggtagtttttactctaagagggatgattgtattactagactgtgttgtataacattacacacgtggttcctgtactaaatgtagcccaatgagtctgctgcaatttcagaagaaccaaacaaaggcataaacaaagttcaggaataaagcacggtaaaaccggcgggttagcaagcaaggccaacctacaaccctgaatgcaaccaaatctcaactgaaaagaaaagaaacattttctgagttaggagacatttgtggagatgctcagtactggaaaagagaaaacaaacaaacaaaaaaggcagagaaaaaaatgaaaacataagttacatttgcattttataatcttacaactatctgtttctaaagtactgtcttccagctattttagttgatcatctaataaaagcatcttatgttttaagattacaatgatgttctggctaggctaccccctccaaccccccaaaaaagtaaagataataaaacatgcttttgcggacattttcctgattctaccaataaggggcaccatctaacaactggtagcaaatacttcccatattttttgctacttgccaacaaggcagaaaataccctgctgaatgaaatcactgggaacattccaagttcaaataaaatgtttaacttacacaaaatacaagttatgtacaagattaggagggggggaaaaacctgaacaaatcctggaacacacctatgtattacgtcatgggaaaaggggagagacacttcaaatatcaaacaagttcgcgccaataactcataatagctaaatgccacaccaaattgcatgtgaatgttagaacctctcagataaaccacaataagtccatatttttttttaaaaaaagaaaacacagaaataactacccaacagtgtctgagaagagagactaagttacatacattgcatgtatgcaggcaaggcagaggcaattttttaaagctttttgcacagacttcatataatcttaaaaaaaatatgcaggcctttgcaagatttgacttcgtgaaatccaaacaattttgactcatgaaaaagtcataagacttcagctgaaaaaaaaagaaaaaagttccagccttagaccaaaaaaaaaaacctggaagagtatgatagattaaacaaggatggtcaggcttggaaccagaatgtattttagagcaaagctcaaaggagggtggggaagagaacaacctattggtaacaaggtgtactataataccgtgatataaaaaaaggtatggtgaaaatgtaccttttactaaagcttatacaatatacaagttccttggtccataaaaactatgttagatttgtgtcttctagtttgttcaacttgtattccagccacattatttacttcttgtccctttaaacaaaaccaaacaaaaaccaaccaaccaaccaacaaaacagctgaaaaacttgatttccaatatttatacannnnnnnnnnnnnnnnnnnnnnnnnnnnnnnnnnnnnnnnnnnnnctgtggcttctgcatttcaaatcagcacttgcagggagacaacggggttttagaatagtatcacctggtatgaaaagtttcccaataaaccacaaaagactgttcatttttttttccttttttgtcaactttttgctgcactcaagccgtttgagtcttagcaaaaagacggtagttcaggataccactgttggtgtagatgatgtgacactggttgaatttgtgctggcatttgtgtaacttccatcgctgtttgtgtttaattcattagggggcacgtggcttgaactggcttgaaggatggcacctgctacactgcaatgtggccgcggccctgcttctggtgtgtaggtaaaggtaaggctggtggaatatatgattccatcatttcggaccaaagttactgaaacctgtattggttgctggacctatctccaaccttctcagaatgcagaaacgtctgggacaacacgagcatactctctccacacctgtacatagcttcagcttctacatccccaaaccacactttgtaaaattttgggagtgaaattctgtcctgtaaggttcaagcttggttcgtccccaccgccattcaacttaaggctctctacgacaggcataggcatgaccagggcaaggacagggcccattctctcataaaatgtatacttcgccttatgtgtgctaatgattgcccaggaagcaccatcatttatcatctctttatttggttctgttgggcatggagtggcctgaaattgaattattctttcttgagaaaggcataagtacattctttctgtatcctcaaggtcaaatgcacatttatggagttgtgacacaggatcatctgcatccaataatgtggtctgcttatcaactttcctaattatcaatcttgggagtgccatgccagtaactgagcacacaagcttgactgtttgtccataatgaatgtagccatctctgactgtgaattcttctccttctgatccatcatcatccaagaataatgtaaatgctccccactgctgtgaactggcatgaaaattccctccttctacatgcaagtatctggtactaactgtctgggatcgtagtcgattaaacagagccacctttgttcctgagccaatgcataagtcagcatttttcaatgactgcttctttttggaaggtttggacgacttgctgaggaacacaccaatgtcatcaactggttggcccatagaacatctttacagacaaacatgaaggtgtttcggcttgtctgagtcagatatatacaatgttttggctgtgcaatagttctttccttccaaagtttaagctgctgcatttcttggtcactatttcctatcccaataaatgcacacggttgagactcttgttcagaacaaccatcgcgttccatttgttcttttttttttcttccatccgctgcccataagatatacacaaggaggtgggcaaaaaaaccttttttcatttccatatgacttctgtgcaacttttgcatgaagaataagtactgtttgatcccctcgctcttttaaataatttcgcatagcttccctagtaagtcgtttaggtggaggccgctcaccaaatttccttttaatccacgccatggtacctcaagaacatgttaaggtaagtcacagcttggaacacttcgatgcacctcaaaacacctcagccagtgtatctgtatcattctcctttcgttttgagatcataatggttccgaagaactataatgcttccatttgaatgatagtctcataatttcaatgactcaatgatgctggatagagcagtccaatcatctcaaagagaaactcaatacaggttgttc

SEQ ID NO: 48016 - DNA, 1944 bp, Homo sapiens
ggttaacaaatattttaattcattaaaataaaacttaaaaattacatgcttagtctacacaagtttaacttactttagtcacttagtgaattgtgaattggctcccattagtggtcaggagaatgtatttggtgtagaaaccaaataaatcaagctattatcgccttgtgagtacaaacaatgtttatttgtttgtaaagtgccaggtttatatttaagtaaacattaaaatctgcgttgaagcagtgaggctgcatcttttaactggctgtgctggttaaaggactgtttaatcccgctgtgctaagctcactaaagggtcacccctcactttaaagccaagactgccattgtcactgctatggtaagtcacagccagccaggccttctggcaaaaggtgatactaccagcactataaacagacaggactggttgtgaggtagctacacagttttaaagatgctgttaatgaacattacggacaattcatggtgtggctagttggtaacacttcagctgatttttcttatgagatggaaaaaaaaaatcagccaagtaagggcacatcttcagttcatttagaagtcagcatccaaggtaaaagaattctctgttggacttgacatcactcccatcctctgatactcgcctactctcttctcaaagaagttagtctttccttccagtgaaatattctccataaagtcaaatgggttctctactctgaaaaccttgctaaaacccagttccagcataagtctgtctgccacaaactcaatgtattgcttcattagagtgcaattcatcccaatgagcttcacaggcaaggcctcagtgaggaactcctgttctatccgaacagcattgataattatttctcttactctctcctccgatggtttgtgtaccaggtgtttgaacatcaggcaagcaaaatcacagtgtaaacccctcatctctgctaataagttcattagaaaatgtgaggccaggcatcagtcctcgtttcttgagccagaatatcgacgcaaaagaaccggaaaagaaaatgccttccactgcagcaaaggctacaacacgttcaccataggtagcctctttgtccccaatccagcgcaaggcccagtctgccttcttcttgacacaaggcatcgtttcaatggcattgaagagaaattccctttctttgggatcttttatgtaagtgtcaataagaagactatacatttcagaatgtatgttttccatggcaatttggaagccatagaaacagcgggcttctgtaatctgaacttcttggctaaatcgctccaccaagttttcatttactatgccatcgcttgctgcaaagaaagccagaacatgggatataaaatatctctcctcgggtttcagggattcccagtgctgaatgtccttggagaggtccacctcctcggcggtccaaaaggaagcctctgccttcttatacatctgccagatatcatggtactcgatggggaagatgacaaagcggcgggggttttctctcagcagcggctcatcctccacgccgggggcagctgctttagttttcggctccgtgggctcctggaagatcctcctcgcggtcttgctggccaggacgcgggtcccgctcagggccggcggcgtgttctccttgtcgaccaagctgagccccttcagcggcgagagctgcagctgctgcgggtccgtgatgggcgcgagcgggacacggagggagagcatagtggaggcgcagcgaagcagagcgagcagccaggacaggacggctgggacagggtgcacgggcgacccctcactccagcagcctttaaatctcccgcgccgcgcgctcccggcccttcccattggctttggtgccccggcccttcccattggctgtgccatgcctccgacccttcccattggctgcgcctggg

SEQ ID NO: 48017 - DNA, 1297 bp, Homo sapiens
  misc_feature (1)...(1297): n = a,t,c or g
gtccaagggaacttatattatccagctctaagccctcccaagaaatgagccagtgagcatggggcatggtggtgggggtggggaagcacagtctggtttcactgggcatcgaggagtgccaggcatctactgctctgtccctggataagtcaggctggtgggaagaggcagcaaggagggaggacgtactttgtgaagacagacggtgtctcctctgccatgttcctgcaggcgtcaggggctctctgaagcctgaactggggagtaggaaaggtaagaatggccaagcaaatcagggtccaagcccagtgtcccttctcctagcccaaggccacagggcccaggtaacccagccctctccaaaggaaccagaccgaattaagccatctgctttctatgccagaccccagcagaccattcagccaagaagcaagctccccacactctcattcccatcaggtgaggggtccctggggctcaggcctctctcagctgccctttgacagtgacataggttggtccctgctgttgttggggatgtccatgggagcagaatgctcagacacaaagccggcactcatcataactgtctccagctgcccccgtctgtatatcctgtcccttcttcacagggcctcatcacatgaaaagaagcaccttggtaaatgaggaagcagttcctaatttccagtttcttccttccttggggttggggacctcctggctgagagctggaggctggccatactcacggctccattctgtatggccttccacctcctcttgtctgtttaccatagatttattgacagctactactcgccaggtgtgctggagtcaggtggggctggggctcacagctctctacctgtttaagaggggctggcagtgaggatttctgcctacctcatgggtggggcaggcaaggctaatagacagctcatttcctgcatctgccactccgacgcaccttcttccctcggttccacccctcattcagccaaagcgctctgactgagtcccagaggcctcccgtttgcatttctggctcaaagtctgcagctggccctttccatgcagctggagttctgcagtccatgggaacctgccaccatgatagtccagatcaggccacagtaatggtggctgggctgggagcctgagatgttagcaggaagagagctgctggggcagaaaggttgctgagggtgagcgtagagtctcctgtgctaaatccccgcagctgaacagcacttgaaggttacaaaactttttcantcttgttctcntattggtt

SEQ ID NO: 48018 - DNA, 728 bp, Homo sapiens
atggcggagtcgttgaggtctccgcgccgctccctgtacaaactggtgggctcgcccgccttggaaagaggctttccggcagagatgcctggagagaatgagaaacagccgggacaggctcctaaacaggtaccgccaggctggaagcagtgggccagggaattctcagaacagctttctagttcaagaggtgatggaagaagagtggaatgctttgcagtcagtggagaattgtccagaagacttggctcagctggaggagctgatagacatggctgtgctggaggaaattcaacaggagctgatcaaccaaggtaacccctagtaagtaagtccttccttacttgtatttagctactgggaatactgtgacctttcctccaatcaggattagtttataagtcccctttgtctacctccatcagtcaagtgtccaaaagactccttttgtactctgacatcttggctgtctagcttctcaataataagggtctccagggtgctagactttgtgctaagaacttctcatttaatgatgctgttttctccatgtgactgccctgtaagatagtagtattagaacagaaggtggttggtgttctcgtgcaggtcatacagctagtaagtggaggagatgggaagcaaaatcagttgtatgaatccagttcccatgtttcttctaccatcctgcctctctattaatgggttaatagttcactgagggtggt

SEQ ID NO: 48019 - DNA, 1908 bp, Homo sapiens
  misc_feature (1)...(1908): n = a,t,c or g
agagtggtccggctgagcaccgccaacacctactcctaccacaaagtggacttgcccttccaggagtatgtggagcagctgctgcacccccaggaccccacctccctgggcaatgacaccctgtacttcttcggggacaacaacttcaccgagtgggcctctctctttcggcactactccccacccccatttggcctgctgggaaccgctccagcttacagctttggaatcgcaggagctggctcgggggtgcccttccactggcatggacccgggtactcagaagtgatctacggtcgtaagcgctggttcctttacccacctgagaagacgccagagttccaccccaacaagaccacgctggcctggctccgggacacatacccagccctgccaccgtctgcacggcccctggagtgtaccatccgggctggtgaggtgctgtacttccccgaccgctggtggcatgctacgctcaaccttgacaccagcgtcttcatctccaccttcctcggctagccaaaacagctggcaggactgccggtcacacaccagcacgtcccacctcgtgctcacggattttattacacagatagtggcggcaatggcctcagcccagcccaccctcacctgcttttccagcccacaaagggggacgatcacggcccagcaaaagcgatgctgagaggggaaacagtccagagtccaacagcagaacttgggggaagcggtcggggtggccaggaacataaactatgtataggggccgggggcttctgcccagggctcccctggaccaggacgccaggtagggcagggaacctcagtagtcctccacccagccattctcagagatgaatgcgtcaattaacctcctttcattagccaagttggggatgagctgttcctgggtcagggggctccgggtcacggggtcaaaatgacccacacgctgcaggtgctcctcgatgtccttgcggtcgtaggtgatgccactgggcgtgatgcacggctcccgcatcagctcaaagctgatcttgccacacaggtagtcggggatgtctcgcttcttcctcttctcatccacctgagaaaaaagctcgtccatgtccgccatgtacttgtcgtgcttggcctcaatgcaggcctgctgggccccggacgtggctgtcgtcctcatcaccctcgtggtttcgctggcactcttccagctccctctcacgctccgcggcaatgagcctggagaggtaggagtgcagctcgctctcctggtggatgcgccgctcctcaatgctgttccagcgcttcttcttcgcgattcgaagagcgctggggatgtcgtccccgaagttcagccgctgctccttggccaggctgtaagctcgctgcagattggcgatggcctcatcatagctctccatctccagctggcactgccccaggaagaagtgcgccttcacagactgcccgtccagctccagggcgcgccggcagtcggccagggcctgctcgtgctgctgcatcttcaggtagcacaaggcccggttggtgtaatacacggccaccagcgggttccgggtctagggaccaaggccgggccagccgcatgagggcgtaggctcagcgtgcccactctgacccacggcccgtcccagcttctgcgctctggctagaatcaagaaactaggtttctcagttgtcaaagcccctgggtccaaggatctgtgcacagtggagtactggctgagcctatccgcttgattccacttggttttgaaaagttttccaaatctttggagagtccgggctntagacctggggtcctcaagggtcgagcccctgccctccccccacncggccggcctccatccagcatcgcaccctcgttctccggcacccggcgctggg

SEQ ID NO: 48020 - DNA, 516 bp, Homo sapiens
gaagagggcatttagactgcattttcctggttaaagaaggttaaagcaaatgtttattgccttttctagtgaactaactcgtagagattgtttctcagcaggaagacagtcttagcactgtcacttagcagattgcacttaagtcccttgtgctggccagatggccgtggctggttgccttaatatgtcccaggacccctgacagggctgcctggcctctccctcgtgctcctcaagagcccagtccatacactgtggatgtcattgctgtcgggttaggaagtcttgtcctagaacgccctggctggtatgaccacagttcatgggcggctcttcttcgcttggggtcatggtcatctttccagcacctgctgtgctggggaaggccgaggatgggggggcccagcactgtccaggcctgctggggcctgggcttggggagtcctgttgggcagcatggaacatgcaagctggggcttcctgtgaccaggcaccctctggcactgttgcttgccc

SEQ ID NO: 48021 - DNA, 5076 bp, Homo sapiens
  misc_feature (1)...(5076): n = a,t,c or g
atagacctttttctctaactaactttaggggagaaatcgaaaatatatttgttttttttaaagaccatacttcctcatcctgagtcaacagctcctaacctactgacaacaggtggtgggcaataggccagctccctttcccagacctgaactggccttagtagagagagtcctggcatcaagggcctgcagtctcctggaataacagcatcaggccttcaaccagcacactgtctcacatataggcactcaaaaaatctgcttcctgaatcaatggaagtatattatttcatttgaaagcatactggaaacttcagaggctctgtaatgggcccaggaacaggtaaaaaaaatcccattagggagaggggtaagggcaggttttttttttttttaaagtacccaactcgggtacctcctttggtagacagcaggctgcagtttctgctgggccctgccttggacaccagtctcaccagcagcagcaccagggtgtctttggtgtggagggtcaggttatcacttctggatgtgctcagagccttctggggaaaaggctggtttttagatcatacagacaggacagggtaggccagaatcatttcaggctataaatagaatggcagataagccttccatgccagtgtgactcttaaaaccttcccatctggagtcctgtattttctctgcccatgctgatgtactgctcatttgtgctttagctctgcacacagcctggcctctagctagagttagaactgcaaagctgcctaaaccactgagactggcttcaaaggtcacagaacagccaaaggcagatgcttctgtttggaaaaggttctacgaccagatgacacaaacaggaagcgcactccacagcctactagtttttatgatggcaagaaatgaaagtgaccaagctagaaccccaccattcagagtcaccttaaatgtagccatcttacccagggtcctgagggaaaaagcaatttcaacatggagccagtatggagagattgcaagattacctagaaagttaccaaaaggctatgctctggaatgtctttttatattccaacacttcaatgatggaatggtctcttctcattttatctaacaacagtttagttttataaagaggtatgagctacatttggctttatttcctataaatctatgaacgtcttcaggacacatgctgactttctgaggcataggtgtgggcttggganaannnnnnnnnnnnnnnnnnnnnnnnnnnnnnnnnnnnnnnnnnnnnnnnnnnnnnnnnnnnnncttctagaaggtcttatcaaaagttcctattttaaaaattatcataaaaactaaagggcccttcaaatgaccataaagcagtacaaatcaccaatcctagctaagtaaccaggtcacctgcaaaagcagcacctcggaaacaagagagcctgctgcattcacactcaaagcacccatcatataaaagtatcctagttaaatataaaaagcaaagttcatttccccaaagctcaaacagcctatgctgctcctgttcttttgccaaatctacccaaggcctgaggtggaggaatgctactttccccacaaatggtgggtcccactcctggccccagacctgaaggctgcagagttggaaacccaaggtccaaggagagaaacatgctgagaagttggtggtggacacaaggctgcagtaagcactgttagagcccatcagatcttcctaaatccagggactcaggactcgggaggggagcctgcctgctcacccctgctccttgggaaacagaaatctgggacatgtctctcccaattatctcgttcactctagattctccagaaaggagctggacatgagagcacactgtggttaggccatttctctgctgaacctgatggctggtgttccaagtcagatataaattggtcatcatctaaagtgatgtcctgcagaccaatggttgcaaagttaggctctcgatcttctggttcaggtttaatgctcacagttgccccatcaggtggaaatgacgctggatcacacaaactgtgacatattaaggatgaaggtgcagaaagacccccctggcccgtactttgtgcttgagttgagtgctgtccagaatgcattctggtggctggagacggtgatgaggcagttcctgagctaggagattggtaaggcataggctgaagctgaggagatggtggcccagaaagcggtgaactagccaagggatgagaagctgctggggaagctgttgtagcagaccctgaatgtgaaggaccatatgtaataggttgtaactgagacgaaggctgacctgtaatctggtcacccactggagaagaaagagatctttgtcctgtatttgaacaatgatatcccattgattgcagatgaggcagggtatgcacagaatgaggtgtatgggctaagagatgtcctgttgagcctgaatttgaagaatgaaatggtatggatgacagtggttgacagccaagattcactaaaccagaaagagttgcatcctgctgaaaccaaactgaatcaaattcttgactagaggcagcattaataggaagacaagttggtccattgtacacaacattagtttgcataggctgataggaagaccccacaggaggtgttggtgtgacttgaaaaggctggtgtacaattggagaaggaatcatatgctgttctttactaacactctcatctctacactgcaactgtggcagatgggatgaggtcaccatggatgcatatgtttgtgggatggagcaaatcaaacttctctgtcctgacagtacactgtcatgtgaacaccctgaatcagaggaaggcctctgggtctgagcaggatgaggcacaggcaaagatggaactgaagacaaatcaatctcttctctgtgttcttgcttcagcaaaactggtgtataagtaaaacgttgagactggctttttttcctcttgccattgcaaagataaaagtgcacctgcactgcagctgtaactgctgggttatgatatggaggaacttcaaggacaatgtgagccccttgacatttttccctgattatcttcccttctacctcccactgaggtcgtccatcttgtcctttttcaagaaaaatgattttggattctggaagaaaattagatccagtcacaaccatttcatgacctccatttacagaacaactgttgatactgtacttctcaatatgaggaagttcttgagcagaccgctgggagcactcaacgggtatagaggctatctgcagagaaaggacttttccactgggctgtgggatgtgtacacgaaacacaagtcgtactctagtattctttctgccaatatcagtttctccttttcgaagttctatatctgaattgcggagtttcaaaatacctgcacaatcaatactggctgacatattattttcaggaagaagtggaatttccagaacttttgtactggcaattattatctcttggcttgcagtagcgactgtcttcccagtgattcgatgcacctggtaaaatgcatgaggtcgtaaatatcgatcatctgctgtcccaataaacatttgtagatttattggcttttcgttatagcccaggagcttcacaacaggatgtcccccagtagatgcttttactgcccctcggctaccttcagtttcataatgggctcgatgatgagttttaggttgcacttctattttcagttcacattgtccaaaatgagctggtaaaggccagtctagtggaggtaatgaagatgtgcgaaatataggggtgtggccaggctttggtttgctccaggtaaagggtgaaggaactgaaagaaactgatcaccacatgaatctttctttaaaggatactgagatccaaggccatcatctattgaagtctcccgggctggtgataaactcccttggtcatctgaacacagctctaattttcctggtagtatggcagcttgatcttcagaagttttccttgttttgagagggatgtcagtctctacacagtactgaaatggaaaaactgcagggccaaggcctgacccaccatggacagaagcattgagccacgtatcttctgtcacacttcccctgggggagtgaccaggtgaaggaacaggtgagtgatggggtgaaagggacccagcataacaaacttcagcactggagtgcctccgtttcccacagggggatgtgggccttgatgagggtcctgaggctggcctggggctcagccaattctcatcagtgacactggatctaggagagtggcaaggagattgcctgggtgataatgagtgtccaagtccatactgttgatgccaagtttcttctccagggcagccccctggagagccaccaggagaagtcagaggggatccaagggtaaatcgggctgcagcttcattcaactctgagtccacatcatcataaatatgtgaaagcgattcacaagaagatgcatcagagaaccaactcctagaagagatgctgctggcaggactaggactaagagaagactcccggtaggatggctcaagaggaagatagagatgatctctagaaggcctttccaaaaattcccgttctgggtcatttatctgtaggtcatcttcatgtgcatctaattcttgatgacagttaggagagatagatgtaatttgaatacttgggcactcaaagggtttgggaccacctaatgggctatatttagattcaggaatctcacaagttccttcatagtttttgtgactttggagctgaaacgatggtgacaaaacagaagagtgagacggtaatccatgatgtggtaagcaaagtggtgtggttaaagtagatggaggtggatctacattaaagatgtaaatggatgcacaatcatctggctcaagatctgcaggccgcgagcccgggggcggcggcgccggcgccccgtcctcgccaaagacgagtttgaagtcgagctcgtcgtgggcgccacagtttgcagtagtcatcggcgtggcccagggtgctgcagc

SEQ ID NO: 48022 - DNA, 2309 bp, Homo sapiens
tgaacgtatggcggctagtgatacagagcgagatggactagccccagaaaagacatcaccagatagagataagaaaaaagagcagtcagaagtatctgtttctcctagagcttcaaaacatcattattcaagatcacgatcaaggtcaagagaaagaaaacgaaagtcagataatgaaggaagaaaacacaggagccggagcagaagcaaagagcgtgcttatgcgcgaagagactgaactgaagacgctgcagactcagatagcaaaataataagcctacttcatgataagggaagaagacatgaatccaaagataaatcctctaagaaacataagtctgaggaacataatgacaaagaacattcttctgataaaggaagagagcgactaaattcatctgaaaatggtgaggacaggcacaaacgcaaagaaagaaagtcatcaagaggcagaagtcactcaagatctaggtctcgtgaaagacgccatcgtagtagaagcagggagcggaagaagtctcgatccaggagtagggagcggaagaaatcgagatccagaagcagagagaggaagaaatcgagatccagaagcagggaaagaaaacggcggatcaggtctcgttcccgctcaagatcaagacacaggcataggactagaagcaggagtaggacaaggagtaggagtcgagatagaaagaagagaattgaaaagccgagaagatttagcagaaagtttaagccggactccaagtccacctcccttcagaggcagaaacacagcaatggatgcacaggaagctttagctagaagagaagacggggtctccctatgttgcccaggctgggtaacacagtgtaacctgatgtgcttcccctgggaacccagcctgacagaaactgcagctgaacagcagcaaaagtgttggaaagggcaaagaaattacaagaacagcgagaaaaggaaatggttgaaaaacaaaaacaacaagaaatagctgcagcagctgcagctactggaggttctgttctcaatgttgctgccctgttggcatcaggaacacaagtaacacctcagatagccatggcagctcagatggcagccctgcaagctaaagctttggcagagacaggaatagctgttcctagctactataacccagccgctgttaatccaatgaaatttgctgaacaagagaaaaaaaggaaaatgctttggcagggcaagaaagaaggggacaaatcccaatctgctgaaatatgggaaaaattgaattttggaaacaaggaccaaaatgtcaaatttaggaaattgatgggtattaagagtgaagatgaagctggatgtagctcagttgatgaagaaagttacaagactctgaagcagcaggaagaagtatttcgaaatttagatgctcagtatgaaatggcaagatcacaaacccacacacaaagaggaatgggtttgggtttcacatcttcaatgcgaggaatggatgcagtttgaaaatgatcacacttgtaaagtttgggacttatagacttcttgttctgatgtcacgtccttgttcaccaaacagctagcactctagcttgcatgggtgttgcattgactttaatttattgaaaaatacaaatttttgtaaatatcagatccagtgatactggtgttagtgttgtaatcaggttaaacccacttccattaaacttgacaggactatagaaggataatattttttagttcatgaattctacttttcaaatatataaaagctgcaggtggggataaaatctcatacatggattttttcgtgtccgctgtcttgtgtacttttgtacttaaccttgtacagttattttcatctcttgaaacatgaaagaaatgttatgtagatgttctttagaagatctggccatttggtacataatccagcacagataagctgggtggtaatgataataaaaatggttttctcaaaactggtgttaatttaagttacctgggatgtttctttgaatttgttttatagtttctgtagcatttggcaattgctgttagaaaacactagctagaaatcccctccccaccaccctttttaaggccagttaactatactacagtcaataccgtggtgagcaaaaatgtaaaaggtggaaggagaaaacttattaaaatagtatgttttcctattataagggacagacttggtattcagtatttgtcaaatattacatgtgttattcaggagatagattaatgcattaaagggatgtaagcacttttattttaataaagtgccttataacaaaaa

SEQ ID NO: 48023 - DNA, 999 bp, Homo sapiens
actagtctcgagtttttttttttttttttttttagcaagttaaccaattttaatggaaccaagtaattacacaataaaattttatattcatccacaaaaaaacatcttgcaacctttggaaattgtagaaagaaaacagtggggagcatatccttgtggagcatctctggttgtaactagtgattagtattttggtcttttgacttcaaccccatcagcttccatcttcttcctcttctcaatgattgcactaatcttcttccactggcgatcaagctctgctttgtcattggtttccttgaagcgcctggttttccgcccttcagacattttgataccatactggaatgcagccttgggcaaagcttctttgttgttcatatactcgctgtattcttcctgggtatcaaagtcccaacggcctaagggccccttcttgttaccctggtccattttgctataatccacctcctcatcactatccacagccatgtcatccatcgtggctgggtagcactctgcataactgttggacatgccaaagaaatctcccagctgctttttgtcttctggcttcttcagcgattctgtgccttcccagccagcagacccagcaaacttttcattgatggacttgatcaactccttggtagacccaggtcctttgtcaacgtccatgggctcatcatctacttttggcttctcaaagtagctgtgtctcttcttttcctcttctctctctcggtcccgctctcgctctcgttcccgatctcgtttcacgtctcgctctcggtcacggtctctgtctctttcccgatcacgctcccgttcccgatatctctcccgctccttgtcccgaggtgtcttggttgtggagggtacgtaatccccaatgtcttcaaaaatattcatgtcagcctcaggaggtttcttctcttccagcttccctttatccttcttcttaagcttcttgttacgggttccctgcatcaggtatga

SEQ ID NO: 48024 - DNA, 1013 bp, Homo sapiens; identical to SEQ ID NO: 5006

SEQ ID NO: 48025 - DNA, 939 bp, Homo sapiens
ttttttttttttttaacatcgcatggcagatgggtgttggaataattactttctccacaatctatcattttaatagtttataatagtgcagttcatggaaacatgccaagtccaacaaaagcacaacagattagattacagtcagattgagaagactggtgtgcgttggcagatagacgtgctggacatgctccacacgcgacctgcagacgggacatgactgtagctgggcggcgcagctctcacagcacacagtgtggccacagggacagaaggtggagttgatctcctcctcgcagcacaccatgcacagcatggcttccttcagcttgcgtagcttctcctgcagcacccgggtctgctggcagctgaggccctcgcagctgctgcagttcatgctgctttctgaggacttcagaggcgagtgtgaagggctctggttgtttcttgaaacgaggtccacaacgccagcattgtacagagccctcctggcatggtcatacacctcctttgatgttcttttaatatcaaagacatatttcttgccaaggttaatgttttcattcagaaacagagatgccaagtggcccttcaagtcacggctatactgcatcatcacggcgctggtcactgtgtcacacctgtagaatgcgtgcgtctctgttatcgctcggtagagcccgctggccgccctggtgctgatcattttaaacaagagcacgatgctgttcccagattccttggtgaccgtcaaatatacattctttcctgactgggtggccatctgcaccacaggataagctatcctattaattgggctaaagtcatctttacaaattgagattccttcaggtccaaccccaatgagcagtttctgcccttcgctatcccgcacagaatgccattctatggccatagttttccattgccgacacaatc

SEQ ID NO: 48026 - DNA, 690 bp, Homo sapiens
ttttttttttttggtatctatattggtttttatttataaacagattgacataaaataagtccagatggcagcgtgagtagctgtgctgctgacttgcttacaaggaagcctgtggacaggcgaagtgggtggaaccgagctccagcctggaaaacctgccctcccatcccccttagcgccttcttggccttccggcctgattttcttcgacagcagttctggccagggcaaggagctgtggtgggggcagtataagccagggactcccttcccacagatgaggcctagggctgcaaaagggccccgtgaagagaggagaaggtgacagggatccttctcctccccatatggagtgatgtggtcaaggctttatgggtctctccacctcaaagagaaagtgccctagggtagtgtcctctgaagaggggccacgcctatctgcagagggcctctctgggaccaaagcagggcagtctccctcctcctgaaacccagtgtctagtgtgggaggagtattaactacagggtttgcccaagtgccagaaacaataaattaacaataagatctttttgtaaaaaaggtagaggtttgcaccacgagtttggattcaggggaatctggtgagaaggtacgagctgtggggcgatggggtgccacagcaagaccaggacagagttggccttttcctc

SEQ ID NO: 48027 - DNA, 1098 bp, Homo sapiens
  misc_feature (1)...(1098): n = a,t,c or g
cttttgaccagaacgcacacctcgtcggggggcccagtccagccaccccccagcactttatgtagagagtgtgacatagacctgcatatttgtcagtgccatgatggaagaagctgagcatgtcttaccaaaaacagagagaacgagcctggatacagcagatgtaggggacagccgtgggaccgcgtgagaattgaagcggtggggttcccgcaccctgggctggctggtggttttctcgggaagcaggaccctcctgactggtgctcttcctgtgagcggatagagtgatagactgggtcgtgtgtgagacgcatgtgctccaccccactccttttgggggaagccagggcaacagtggcctctgggagggggtcaggaagaggcgaacagctcaggcagcgcaggtgtgatgggcacagtacgcagagcaagctcgggaagttggtaggatctcaggcttggggccgggactctggagtgaatccccatttctctaccggcttgcttggagtttggacagaagcatttcacctctgatctcagcttccccacctgtggagtgggtttagtgacctgagtcactagggaatgtcacctgaatgcacagcccagcccatgcacctgccccagcccctccagctttggagccaaggccatcgttccagccacttgactgtcctcgacggcctgttccagacagggcgtttgttttgtccatgccttcctccctgcacgcacacggcgtcaaaaccaagctgccggccactgtctccagaacgcaagggttccaggcccgtgtgtctgaagcagtgagtggttccacacaggtgccaggaagtgcccatatgagatgacgaggaaaccccttttgcaggtgaggggacagctttctagaaaaagccacacctggcatctggggacacactttggaaaagtggggaccctccagcctggaagaacccatggactgatgcctccactgctgtgtgcccatgttgtgttaaaactgcgtnttggganccatctgaagttttggcttaggtttgcatctcctgangaacaganacacggtgtcaaaanttggcccttncccaa

SEQ ID NO: 48028 - DNA, 1284 bp, Homo sapiens
ggcgagggaaaggacgccccgggccttatcagagcccccttggacccgcagtggccgaggggcaggaattgaaggacaagagtcgcctgcgctatcctattaacggcttccaggccctggtgctgacagccctgttggtggggctggggatgtcagcggggctgcctctgggggcgctcccggaaatgctcctgcccttggcgtttgtcgccaccctcaccgctttcatcttcagcctctttctctacatgaaggcgcaggtagccccagtttcggccctggcacctggggggaactcaggcaatccgatttacgacttttttctgggacgagagctcaaccctcgtatctgtttcttcgacttcaaatatttctgtgaactgcgacccggcctcatcggctgggtcctcatcaacctggccctgttgatgaaggaggcagagcttcgaggcagtccctcactggccatgtggctggtcaatggcttccagttgctctacgtgggtgatgccctctggcacgaggaggccgtcctcaccaccatggatatcacacatgacgggtttggcttcatgctggcgtttggggacatggcctgggtgcccttcacctacagcctgcaggcccagttcctgctgcaccacccgcagcccctggggttgcccatggcctctgtcatctgcctcatcaatgctactggttactacatcttccgtggggcgaattcccagaaaaacactttccgaaagaatccttctgaccccagagtggctgggcttgagaccatctctacagccacagggcggaaactgctggtgtctgggtggtggggtatggtccgccatcccaactatcttggagacctcatcatggctctggcttggtccttgccctgcggggtgtcacacctgctgccctacttctacctcctctacttcaccgcgctgctggtgcaccgtgaggcccgggatgagcggcagtgcctgcagaagtacggcctggcctggcaggagtactgccggcgtgtgccttaccgcatcatgccctacatctactgaagcggctccaccaccccaggtgggggcatgtgcccactcatccaccagcacacccaggaccaggagcctcgacacacttgggactcaagggcttgcaccccacccagccctgaggatgaacaacctcagagaagaggtggtttagagcaaggaaaaaaatgaaaccagtgaccagaaaaaaaaaaaaaagtcgacccggccgcacatttagtagtagtagtcgacc

SEQ ID NO: 48029 - DNA, 654 bp, Homo sapiens
aagaaaaatatcagaaaaggcatgattctgacaaggaagaaaaaggcagaaaagagccaaaaggattaaagacacttaaggaaatcagaaatgcatttgatttatttaaattaactccagaagaaaaaaatgatgtttctgagaataatcggaaaagggaagaaataccactggattttaaaaccatagacgatcacaaaaccaaggaaaaccaacagtcacttaaagaaaggagaaacaccagagaccgaaacggatacttgggcatacattgctgcagaaggtgatcaggaggttttagacagcgtgtgccaagcagatgagaattcagatggcaggcagcagattctgagtttgggcatggacctgcagttggaatggatgaagttggaagatttccaaaagcaccttgatgggaaagatgagaattttgctgcaacagatgcaattccaagtaatgtgttaagggatgctgtgaaaaatggggattatattactgtaaaagttgcacttaattcaaatgaagaatataacctggaccaagaggattccagtggaatgacactggtgatgcttgccgccgccggagggcaggacgacctcctgcgactcctcatcacaaaaggcgcgaaagtgaacggtcggcagaagaac

SEQ ID NO: 48030 - DNA, 972 bp, Homo sapiens
  misc_feature (1)...(972): n = a,t,c or g
tttttttttttttaattagagcaggtatgcttttgatggtagggaagggatggaaaaaaggaaaagcaatagaaactgtccaattcacatcagttatccgtctgctttttcttgagagcttgtggaaggtgttaacgtggctgggaacatcaacaccttggcatgcatgaatgttaagtcaggaaggccagcgatcaccttgatagcttcttcacttaggtgctcttctcttttcggtttcctactggtagatgtgcttgtcttctctactgtagacatgagtcttgcaaatgcatcagtcactttgaggcttgaggtggagatttccagcttagaagttgttaactcatacaactccggatccacacctgggattgtggtgctgctgctagagctactgtcatccacgggcccaaagaaatcaaggttcagaagagtggaactctcactagcatctaaagggttagtaaggccactgctactccagtcaaactggacgggtggtagagactcctggaactgatcagatgtacatgtgttcatatctggtgacatggtggctgtctgaccgatggaagctattttttctgcagcagaaagtggtttcagtggttccttggtgggctctaacataccctgaaaaaggaatattagcctttaatggggatgggggtgcacagcccataaacttaagttaatctatcagaaagaagaaggtaaaaaacaggtcacttggaaagtactgaagacaaaaaggaactagtctttttttttttaagagacaaggtctcactagttgcccaggctgggcctcaatctccctgggcttaagggatcctcttgcctcaagctgatgccaccacacccagctattcctaaattttatttactggaaatccnatagcnctataatgngaccntttcacaataatacccttggaatccaaggttttaagccagactttgtntttt

SEQ ID NO: 48031 - DNA, 2396 bp, Homo sapiens
ttttttttttttttttttacgatagatcacagttttttattcttaatgtcacaagcaggagaaaaatctcacattcatactaaaaattccaactagactcaacaggaatgaagtctctatttgtaatggaaagtcccagcctcccgctgccgtccagtgcgtgtactgtacacatccacactcattctcactcagggttcccggaccgggctgtcctgcctgcggaactgaggtaaactagctcaggtactgacactaggagggtctaccttacataaggtacaggtagaagcttgattgctaggcccaggcccacccagaccctccaatcctaacaggtatttaggcttgaggttcactccctcctcagctgcacacgcagccaggtattaacgaggatcagagctgttctgaggggtgggaaggagcagccccgccaccactcactcaccctcagtcacatcggggagggggcaccagttacatttacatcacattatttataaaataagaattacatttcatataacatggccagaaggagctctagtcccccaggaaagctgccggggacagcatttgagcctcttctttgcacaggcataacttaactatacagctaattcctagttaatagcatttatacttaaccacctcaatgaaccaagcttgaaggaatttaaaaagccaatttaccttaaaatacaaaaataaatttttgttaaaaaaaacgtttaaatatttttttcttttaatttagacacacgcattcatactttctcccaaagaggttgggcgtgacagcaaggcgcttgggcctggggtatgtggtttcagaaggacggaaggaaaggatgggctgcagagggccctgtttgggaaaaataggattttaaaaatatggttcattaatttaggttttctaacatctactttgggtgacgtagcctccagtgaggtcagttaagtgggacagaaaccgcagagggaagaggtctttgcttcccctgggcccattctccctggctgccagcccttgaagtcagaacaccatgggaaaattcaggagtcggcacttgtagccgtcaagtggtgctactttccacattcaattagcgaggccccagaaaactttgaaacaggaagtccggcactaccaacatgccgccactcatacaactcaactcttcctccaaactcgattcaaagagcaatacacagagcgtcagacaaaggaacacaggacaaggcttgaaacatacaatcctggagaggcagacgagggcccaatggggccaaagggtagctgggcgaggaggcagctgaagcagcggtgggcatcctgcctgctccaagagcttctcccttcacccctggctctgccaggctaacagtcttgagccaccaagctctgaggggccaaactggcagagggttggagatgaaacattgattcaggcttggccaggaagaaaacggcaggagcagcacccactggggtctccaaggcaaagctagattcaagggcatttaaaaaggagggaatcctgcaaggaactggtgagggacacagcagcaagaaatggggaaacagagtccccagaagggaccagaggaagagaaccacttctcacagctaagccaagcaagataaagctttacggatagcccatttcccaaatcccatcaggtgcacaccaccgatccaggcgggctggaccctgccccctccagcgacgacggtctcggggaaaggtggaaggggcgcctgcctaagggtgcgctaagcgggagtcagggcagcggacactatgtacaggtgtttccttagttctccagcctccccagtagaactgttcaagtagaggtcccgggctttggccctccgcatcctgcttccccttccctgaggcttgtgcttcctccagaagggaaagggccccagggctgccactgccccctggcggctgaagccagagatccggggtaggtttgctttacgcagctggaagggtccaaggctcttcctagcaggtgccaaggtccagatttagggaaggggtggggggaacagggacaggggacaaaggctactttttgcgggtgtgctgccttcgggcctgcagtcgctgtcgagcccctggggtcttggatcccgcaccaatggaaaatgaaggggccgccgatccgaacggtccaacaccaacaaagccttgggcgggtgctgaagatgccccaaaggagaggctgctgcccgatgtgcccactccaggcgcaggggtgttctgaccaaaggtgggggtggcggtgcctccaaacacaggtttgctctcagttgtgctgcccacgttgaaggcaaacggtgtgctctggccggtgggaggatccagaattct

SEQ ID NO: 48032 - DNA, 418 bp, Homo sapiens; identical to SEQ ID NO: 5044

SEQ ID NO: 48033 - DNA, 1226 bp, Homo sapiens
cgagttgtacagttcagtcataattgcactgcatggtatctgcactcagcagtttacacctgctagggtgttcaaaggtcagtgctatagaaattcagtatctggcatcgttggttttcttggctttgtgcttgttaaacctggtatttctactgatacagtatttgtgtaggtttctcagagtgttcagtttgatatactctaaaatagtaagcaatgcttttttttccagggtgtcaaattgagaaccaggtagatccccaccacctacagtaaaaaggaccctaaagtaaattggttgaagaaattagatcccaaagattcttggtgaattttgaagtcttcatcagtatatcccatattaaaacgagatgacagaagcccaaagtaattatgggctgacaggacaactggatcagtttcattaaaaagggcaaacttgaagataaatcttttgactccagctctttagaggatctaaagtgaccttgatggacagtggaagaaatcacaacatggaattcctcgaataacaatttattgactttaaataattttgtctaatgctacatatacacaattaaaaaacctttacactatttctagaaagtcagcatgtatttttggctcgaagtttctctagtgttttcttatggaattcttttgcccttgcctctgttttgggcataagcttcttgttttgttttttcttccttttgttgtttcacttcagctagttgattgtataaccttagacccctttggtgccttagagcctgtgtagtctttctgtcttcaggaaaagatgctctgactttattcacgccctttagacgactcacagatgaacttatagatggtttctctttaactgttttgatttgagaattttcagagacatgaattttattccttatttctttctgcctctggtgggatctctccataaatgattttttcctctttataaatgcttcttgtaagctccctggtacaggtgtaagcctgcgaggggtttctgctgtagatgctgtccttggtttttctatggaaagttctgatacagctggataatctgaggcttctgttgctgatacaagaggcagaaacacactcacctgaaagaagcattttgcttcattctcgctcttctcttctagggttaaatttgcaaaatccatttcagcaatactggtatcagtggtgcttattaaagtaagttctgg

SEQ ID NO: 48034 - DNA, 1098 bp, Homo sapiens
  misc_feature (1)...(1098): n = a,t,c or g
gttgtggttaaaattttttttttttttttttggtttctgatctccagttggtgcagattatgttggcagccggtgactgcagaaaaaataaaaatatcaaaacagaaaaaaaacaaggccctccccaaaccaaatgacttaaaaaacaaaacccatatggcgaggaatggagagaggatcctattgtcttggaggcccatggaatctacttccgtctatgaaacgttctccgaaaagagcatcgctcgctggctggctgggacagctctgttctctgtgtttcctacttctgtgtacattctcgggttcaagtttgcttggattttgaccttttttttaatgtttaataaaaaaagcagtgtctgctgccatgttgcgtctctttctctctttgtctctgtatgcctctgtctctgtgcttgtagctgttccttggagcgcggtgtggtgttcttgatgtagtgagctcaagtctgcggctgtttctggggacgtggtggaggctgcatgttctgttctctccaggaagagctagtggttttctaccctgtgtgttggtgagcaatgtgcagaggcagagccgctgaagtatggttcctgaggggtggcgaagcaccgccctcactccaggtcacctcatcagccctcgtttttttttgggccccagccttggggctgccaaagctgagaggcatcaaaaccaatgcacagccagccccctgccactagcccctgccggtctgcacatcttctatttatgttccttggagaagaaatggttgttgccatgtttctgttagcagtcatgtaatgccattgcccgctctggtacattcacttggtcaccaatttgcctctgacctttgggagggagcagccagggcccacagggcccactgtgaggatcctgggggaagagtctagcccaccctgcccactgctttcccagatgcaaggggcgagcaagacaggcctgcctaggaatggggggctctggccttttcaggggctgttgcgatgtcagcattgagcctttcttccttcagcccattggcttgggntccgacgtatttnaggaccaagacaggacaacgagat

SEQ ID NO: 48035 - DNA, 435 bp, Homo sapiens
  misc_feature (1)...(435): n = a,t,c or g
ttgaancnttggacacnttcgaatttaatacgactcctatagggaatttggccctcgaggccaagaattcggcacgagaaagatgatgttaaacccagccacggttctgatctccaggaaagcaattgctgtggtacaaaaggacaagggttaaaagagaacagtgggagctctctttcccaactaactcacgcagtgtgacgcagaggctttcagcacagcccagggtgcccgggactgaaaactccttcaccagccccctccacaggatatagaagacttagatcactacgagatgaaagcagagcccattagtgggaaaaagttggaggatgaaggaattgaaaaagaaaatttggcaatattagagaaattaggaagactggaagacaagagcatttaactgcaaactgttgtcgttgtcaactgggttgt

SEQ ID NO: 48036 - DNA, 1303 bp, Homo sapiens
gtttaagccacccaggctattatatttttgttatagcagcctgaacaaagacagctttgattcttaacatatttaatgaaactcgagcttcataaaccagtgaaatgcctacccctatggagacggggagctggtcatgggacccaggtgcctggaggacatcccagtggctttgaaggctccagccagtcaagacggtcaatattagcccttctgccaacatctggcaatgtgaggctggggtggacgttggcctgatgttgccaggagtaggatgctgatgctgccagagagtaggtgggctccaaaccccaggcttctcacttgcttactaagcacagcagtctgaagcttgggacctggcagtgcgtctttggagaaggcaaaaaagccacagcagcaacacttaggagcaagacccttcccgctctccaccctatttcctcccctgaagaagagcaacagctcaagctctagcatggcacagaacgctaggttgggccaggcaagcagccatggtggggccaggtgaagcaatgtgggtctcagcaaggaacccctctgaaggtggcagtggctcccagggctgctgcacactggacaccacaactttggcaatcagctgcatggtgagctgcagagtggtcagaggggctggggccctgccaagagagcaaggccagacctgcccagccgggaggcaggaaggccctgatccagcaaggagaagtagaggaagtccacagccacctctgttactcatcgctactgggacatctggggacaggctctgttcttgggagagcaggtcaccaggatttgtagggctgcctgccggtgacagacacgtaagtcacagggaaaggccgggatccaggcctcagctgtagcagcagctggaagaggtggagccgcacggtcacaatacatgcagacacagagcagcaatacgaaacagaacagctcagagcggtcagctcctcagcagaagctgcgtgggccgccactccccctttctgcaatcaccccatgatgtctccaccccacctcacatccagatggggctggatggcagagcagatgaagcctgctctgtggcggggcagcctaactgaaatgcacacctttatgggggaagtggacggacacctcacctccctcatgtttcacaccgtggactgcacttgagtcccagctcttcaccacatccctaggagtcttaagaggaaatcagtctgatttcttcagacaggagcagcaagagcggccagagcgaggaggacctcgtgtgcccacgcgtccg

SEQ ID NO: 48037 - DNA, 516 bp, Homo sapiens
gcacgagttcctgcatgaggttccagcggccagcgaggaaatcttcaaaattgcctcaatggcccccggggcgctgctcctggaggctcagaaggagtatgagaaagagagccagaaggcggacgagtacctgcgggagatccaggagctgggccagctgacccaggccgtgcagcagtgcattgaggctgcaggacatgagcaccagccagacatgcagaagagtctgctcagggccgcctccttcggaaagtgtttcctggacagatttccacccgacagcttcgtgcacatgtgtcaggacctgcgtgtgctcaatgctgttcgggactatcacatcgggatcccgctcacctatagccaatataagcagctcaccatccaggtgctgctggacaggctcgtgttgcggagactttaccccctggccatccagatatgcgagtacttgcgccttcctgaagtacagggcgtcagcaggatcctggcccactgggcctgctacaaggtgcaaca

SEQ ID NO: 48038 - DNA, 877 bp, Homo sapiens
ttttttttttaactaggctggaattactagattttatttttccccagaactcttaaacttcagcttcaccaagtaacaggctgacttttggaataacaactctttcccaggctgttgttaactctttccaagagacagaatttattaaaaaacatggttccaggatatttccaccccagaattctaaatcagtcacagaatcataccttcttaggtcttgattagaatgaaacaatctatagacacacgtaacagaatcaaaatattatgtaatgttttttgccttctcttgctcaatacacttccctcttttcccccaaagagtttgttactcaaagatagatagatatgtaagtaagtacagtcagccctccatatccatgggttctgcatccatggcttcaaccaactgccaatcaaaaatattcagaaaaagaaaaattccacaaagttccaaaaaagcaaaacttgaatttactgaacaccaagcactatgttgaatccatgcaaatgaagtgatgtgtagggtagttttatgtaggttataagtagatcgatctatcaggatggatttaacagttacaccaggagggatgtagtgtagggttatgatgcgaaataccatataacccattctctataatgggacttgagcacccatggattctgatatcaagttgggttcctggaacccaatcccccatggataccaagggatgactgtattgccccttttcaagaaagcatctatcagctctcattcgtgactcactcagaataaggaattccttattcaaaaaacaatgtaagtattccgagctaactgttctcagccatgaacaaattaaacttggccaggtgtggtgctcatgcctgt

SEQ ID NO: 48039 - DNA, 1258 bp, Homo sapiens
gcggccgcacagcgctgggcatcaatccagcagggctcccgactcactccctggagaccagctccccaaccacccggccctgatggcatcccgctgcggccaggtgtcctctcagccgaggtccttgtcactgcctagctgcgtccgcctgccacaccagctcacccgagatgtaggtggcctggacgtgaagggagtcgtcgagcaccacgaagtctgcgtcagcaccaaagtccagggtccccttactcttctccagccccagcaactgggcggggtgcagggatgcagcctccagggccgactccatgctgcagcctgtggcctgcaggaagtgccggacacagacgtccattggggctatgctgccactcagcgtcttggtgcctgccacgtaggccgtcagaccgtccacttccacttcctgctgtcccagcgtgtgccggccgttgcccaggcccaaggcagggatggcatcggtgaccagcaccagcccctggggatgggcacggtgggcgatccgcagggcggcggggttggtgtgcgtgccatctgcaatcatcccatagaagatgcagcggcctgcgggcagccggtcgctggtcaggagccccacgatgcctgggtcgcggtggtggaaaggcagcatggcgttgaagaggtgggtgatgaaggtggctccgctccacacagcatcctctgccgcccgcaggtcagccactgagtgccctagggacacgcagatgccacgggccgtcagcgcccggatcacttcgtggctacggcccaactctggggccagcgtcacgatgcggacattgtccaggggcccgtaggtggccagcaagtcctggaaggcatcggcctcgaaggagcggaggtgggcctcggggtgcgcgccccgcttctcccggctgatgaaggggccctccaggtgcagcccgaggacccctgccccatggggaccaccactcttcacagggatctgaggaacaacctcaccttgtgataaacctccggtggggaagtgaccagggtggggcagaaggaggtgacgccgtgcgacaggatcctccgggccacgagggcaacccccgaacccacgtcctccgtggcttgagagaagtcaacaccaaatccaccgttgatctgcacgtcgatgaatccgggagccaagatgcggcccccgcagttcccgccgctcgtcggcaccgcgcggttcctcaaagaacagcttctctgggtccaagatgcggcc

SEQ ID NO: 48040 - DNA, 1256 bp, Homo sapiens
tcgcatgcctgcccgcccgccagcctgccgggtacggccttttccgccggggcttccaggtcaaagaattcgcctttgccgctaccgctttcttaccctccgcacccgttaagttctccggtcgggcggcagtctctgaacacttagccgcgccatccggggtcacaccgcctggaaggaggtgacgggggcggcgcggggcgcggacactccccgctgagagtccgcctgccatggactcggaatattacagcggcgaccagtcagatgatggtggtgctaccccagtacaggatgaacgggattcagggtcagacggtgaggatgatgtaaatgagcaacactccggattcagacactgggaagttttaggaacgttcatttcagaggaattgaaattagttgattcgcaggaagatgggcctccccaaaggacattcatgttgaacaggatttttgaggaacgatgagcccttaaatcttaatgctagtgactctgaaagtgaggagcttcacaggcaaaaggacagcgactctgaatctgaggaacgtgcagagccctcctgcaagcgattctgaaaatgaggatgtcaatcagcatgggagcgactctgagagtgaagagaccaggaaattacctggtagtgactctgaaaatgaggaacttcttaatgggcatgcaagtgactcagaaaacgaagatgttgggaagcatcccgccagtgattctgagattgaggagctccagaagagtcctgctagtgactctgaaacagaagatgctctaaaacctcaaatcagtgactctgagagtgaggaacccccaaggcaccaagccagtgactctgaaaaatgaggagcttcccaaacctcgtatcagtgactcagaaagtgaggaccctccgaggcaccaggccagtgactcagaaaatgaagagcttcccaaaccccgaatcagtgattcggaaagtgaggatcccccaaggaaccaggccagtgattcggaaaatgaggagctacccaaaccccgagtcagtgactctgagagtgaggggcctcagaaggggcctgccagtgactcagaaactgaggatgcgtccagacacaaacagaagccagagtcagatgatgacagcgacagggagaataagggagaggatacagaaatgcagaatgactccttccattcagacagccatatggacagaaaaaagtttcacagttctgatagtgaggaggaagaacacaaaaaaaaa

SEQ ID NO: 48041 - DNA, 1044 bp, Homo sapiens
tatgacatgattacgaatttaatacgactcactatagggaatttggccctcgaggccaagaattcggcacgagctggaatctctcagcctcacctgccagacaacaccccctccttcctcaccctgtctcctgcattctcctgaaaccttcatccacacaatgcctcccaacctcactggctactaccgctttgtctcgcagaagaacatggaggactacctgcaagccctaagcagcccccacagacatcagcttggctgtgcggaagatcgcgctgctgctgaagccggacaaggagatcgaacaccagggcaaccacatgacggtgaggacgctcagcaccttccgaaactacactgtgcagtttgatgtgggagtggagtttgaggaggacctcaggagcgtggacggacgaaaatgccagaccatagttaacctggggaagggagggagcacctggtgtgtgtgcagaaagggggaggtccccaaccggggctggagacactggctggagggagagatgctgtatctggaactgactgcaagggatgcagtgtgcgagcaggtcttcaggaaggtcagatagccggagaggagccaagatccctccagacagcaccagctcacagacgctcttgttgtgcccccttcaagcccagattgtgccaggtcagctgtcccttcctctggccacctttcctccctctgggtccctcctcacccctccccgtgttaatctgtaacttgcagcccccaggccaaagtcctttctcacactccactgcccaatagtgacctcacttccaggtcaaggtctggcgtcccaaatgaaagaagcaggcaaagggaaggagcccctgagaacaaccaatctccgctctctcctgtccatttgacctcttcttttccttctaagaaagaactaagctttgggcatttggcgattagtgaaaattctatcctgatggacttctggaaaactgtgactggggttcaagagtttaaacaggggctactggcagagtcaaaaaaaaaaaaaaaaa

SEQ ID NO: 48042 - DNA, 1161 bp, Homo sapiens
  misc_feature (1)...(1161): n = a,t,c or g
ccaaccccagcccacttgtaggtcctatgcacaacagccagagttatctctgtgtatgtcaccttgctctccacaaagaaggacagcagaagctggaagaaagtcctctgggcacctgggctctggcgttgctctcttccacccatcgttcttatctcgcactcagggtagaaaagtctggtggaatggacacaaggaaagggctcagcacaggaggaaacaaggaggtgtaatgatgaccacagagggaggagatggcccaaggagatgataaaggaaaaggaggtgcagagctaaggaaagccccaaggagctgagagaggaaaagagacagcagagagacttccacggagatggggaggccttaagtagggcagcagcacatgtgggagagaaaccgagagggtggtgttaaagaaacgtaaaaggagccccactcacttccagtacagaaattcacccacagcagaggccaggcctcaattagaggcctacacaatggggtagacgctctcacagtccacgtccatcagcaccccttccatgttcctgcccacagaaaagcagaaagagtgtgtgaatagggacattgtcttctggcacaatcaaggctagaaagaaaaagaggcaaaagcaacaaggacataactcacaaaaaacttctaaatgaagagcggaagacaaaggagtatggggagttagagaagacagaaatattaccctctcaacatactgcaactcaggaatgacctcagtcaacctgcacagatggaagagtcagctgtgacaggtggagggagatgaccctggaagggcaaaggtctgagacactggcctcccctcttcccaggactcacttaaggataagtatcagtaatctgacggcctccactgccacactgtactctctgtccatgaccatgggaaaccatccggtcctgcagaaaggagaaagtcactcaatattcttcatttacaccctttccaaacatttctgtttctctttaggattcagaggacttcttaaaggngagttncctaccgtggagggcaggatgcnttggggttangcccaggacntttttaggaggctttnaggggggttnggaaggtttaccaggttngggggnatttgggggaccccccggnccaaggggcctt

SEQ ID NO: 48043 - DNA, 4812 bp, Homo sapiens
cagaagaacaaatcgtgacatggcttatatctttgggagttttagagtcccctaaaaagaccatctgtgatccggaggagtttttaaagtcctcgctgaaaaatggggtagttctgtgcaaactgatcaacagactcatgcctggctctgtggaaaagttttgtctggatccccaaactgaagctgactgcatcaacaacatcaatgacttcctgaaaggatgtgcaaccctccaagtggaaatatttgatcctgatgacctttattcaggggtcaatttctccaaggtactgagtactcttttagctgtcaacaaagcaacagaagatcagctatcagaaagaccatgtggacgttcctcttctcttagtgctgctaatacttctcagacaaacccacagggagcagtttctagcacagtttcagggctgcaaaggcagtcaaagacagtggagatgacggaaaatggaagtcatcagttgatagtaaaagcaagattcaactttaagcagactaatgaggatgaactgtcagtttgtaagggggacatcatttacgtcacacgagttgaagaaggaggctggtgggaaggcacattaaatgggagaacaggctggttccccagtaattatgtccgtgaaattaaatccagtgagagacctctctccccaaaagccgtcaaaggatttgaaactgctccacttaccaagaattattatactgtggtgttacagaacatcctggacactgaaaaagaatatgctaaagaacttcagtctcttcttgttacttacttaagacccctgcagtccaataacaatctgagtactgtggaggttacatctttactgggaaacttcgaggaagtatgcacatttcaacagacactctgccaagccttggaagaatgttcaaagtttccagaaaaccagcacaaagtaggaggttgtctactgagtctcatgcctcattttaaatctatgtatctggcttactgtgcaaaccatccttcagctgtaaatgtgctcactcagcacagtgatgagttggaacaattcatggaaaatcaaggtgcatcgagcccaggtatcctcattttaacaacaaacctcagcaaaccattcatgcgactggagaaatatgttactctcttgcaagagttagaacggcatatggaggatactcatccagatcatcaggatattctgaaagcaatcgtagcattcaaaactctcatggggcaatgtcaagatctgaggaagagaaaacagctggagttacagatactgtccgaacctattcaggcatgggaaggagaagatattaaaaacttgggaaatgtgatttttatgtcacaagtaatggtgcagtatggagcatgtgaggaaaaagaggagcggtaccttatgttattttcaaatgtcctgataatgttatctgcaagtcctcggatgagtggctttatctatcagggaaaaataccaatagcaggaacggtggtgactagattagatgaaattgaagggaatgactgcacatttgaaatcactggtaacacagtggagagaattgtggtccattgtaacaacaaccaggacttccaggaatggttggagcagctgaacagactgatcagaggacctgcctcttgcagttcattatccaaaacctcatcgtcatcatgtagtgctcattcttcttttagctctaccggacagccccgaggacccttggagcctcctcaaattataaaaccgtggagtttaagttgtctacgacctgcacctccacttagaccatcagcagcactaggttataaagagaggatgtcttatatcttaaaggagtctagtaaaagccctaaaacgatgaagaaatttcttcataaaaggaagactgagagaaaaccatcggaggaggaatatgtgattaggaaaagtacagctgctctggaagaggatgctcaaatccttaaagtgatcgaagcctactgcaccagcgcaaattttcaacaaggccatggctcaagtactcgaaaagattccattccacaagtcctactccctgaggaagagaaactcatcattgaagaaaccagaagcaacggccagaccatcatggaagaaaagagccttgttgatactgtttacgccttgaaggacgaggtcagagaactgaagcaggaaaataaaagaatgaagcaatgcctggaagaagaactgaaatcaagaagggacctagaaaagctggtgcggaggcttttgaagcaaacagatgagtgtattcgaggcgagtccagtagcaagacctcaattcttccataaccatcactgtgccactgggtggagtgtgccttcagggcatcttgaaatgtcccgctgaatgatttgactcagtttgctcacttctttggcttttgttttgtgtttgagtctctctctctctctccctctctcttctctttctctccccgctgtgtgcatatgtgtgtgcgtgcacgtgcgcgcttgggcatttgctgttgtttggttattggttggttgttcattttttttttcaacaggtgaaaaagcaggaagtggtggtagagatggcctcagagtcttttccattcagtaagaaagagaaagggaatgcaggccagttacttaaaaggtcttcagattgccttcagttcacagtgcctctgcaacagccattgccctcaggtcacattctttgggctggctgcccttgcaaagcagctggccaaggcttattaaatgtgaacccaacttttccccagggctttcctgtacctgcaagcctcttagtacttaatttaccgaaggcaaatcttccagactatggcttgagtaggatgaaagacaaacacatctgcccaatgatccagctgcccttccttagaccatcacatgcctcccctcaatcacaggttttaaaattactgccctatgttgtctataagaccaagaaaactgtagtacccttattccttttgtgtcatgtaaattgtaactcaggggggcagaagctctggtcacccacaccaacaccaaatccatcagcaaattctactggacaatcctcccttttagtagcagagttgaccgccttttcccattgcatgataggtttctttccctcattctgcctagtgtgtaagttttctatttccccagtacttttagccaaccttaccaagtggtgtgtaaactagtatgtatgtgctttgcttactttttaaaaaaatgtagttagactgtgaggagttactttatgtacgttgcatattcaaactgtgatgttttatccttcaaaacaatctgcattaagaagatattgtgccctactagacagctttcattcactttattactctctcatatatgctgtgagaagttgtaatattaattggcctctttgggtgggactctaagcagtatttgcagaaatatgcttctggtccaacttgtacatccagaacaaaagggcccctctagtagctgtgtgctggattattcaggactgattaactcaagttgctcattgaatcacatcatccactttatcccagaaactagaactgtgagaaaccaggtttagaagacagtcacagaacagcacacatccaaattcagcgccattgaaagttggcctaaggctcagtgccactcacccctccctccccaaaagacaagagaaatttggccagatggggaaggtcactggaaattgaggccaaagggctgatcagaattgcctttataatatatttgatggatgcctataaatgtgggttttgcaaatattgtttaaaaaccaaacttgaagccaggcatggtggcccacacctgtggtcccagctactcaggaggctgaggtgggaggatcatttgagcccaggaggtcaaggctgcagtgagctgtgatgacaccactgcactccaacctaggtaacagagagacacctctgtctctgaaaaaacaaaacttgaagtttgaaacccccagcttgctgaggagccctttttatttttggtactgagagtctcaaggtcccatagctacatggtacagggctgttgtctgcttgctgcacagcaggaaattacaccatccacaggaaatggactatttttgcagtccaacatcagccaaccacacacagccgtgtttggaagctgaagagtaaagaaatttctaggaatggctgttgttctgttttttagcacagccatttagatataacatccttcacttaaaaattaaaaacatcagtactaccaccaccaccaacaacatcaacacagatcttcacatctgcccattctgtggttagtcaatggcttgcaataaatgtgcaaactgcatctataggaaacatttttgtgattacggaatactttagttgattgctgaaaatattgaaaggtcttcattttacagtgatgagtacatatgcatgtttcggggacttggcccttctgatgaggggccctcggtactctggataacgaagcttgtgcagagtggtaaccatgcttacacactaaactataatataaaggaaatgaagccatgttaatctgagagcagtgtcgccatagttgtgttgtttacaatactctataaatgggttcctgttgccctgtaattaaactgctgcccgtagaggcctttcagttccttttctgtccttccccttcttaacacaagctcaaattttctaacttgtttttattttgaagacttttaaaatggacattttcaatacataaaaataaacagtgctttataaaaaaaaaaaaa

SEQ ID NO: 48044 - DNA, 1797 bp, Homo sapiens
  misc_feature (1)...(1797): n = a,t,c or g
gtagactgttgggtaggctgcgtgctagcttcggcgcggatccctgggcgtccgtacgtcggagtccttcgtcctccagggtccctgttctttgcgccagcgggaaccactatctctgcactcctggggttttgttacatggctgctttcctcaaaatgagtgttagtgtcaatttcttcagacctttcaccaggtttttggtgccatttacccttcataggaagagaaataacttaacaattttgcagagatacatgtcttccaaaataccagctgttacttatcctaaaaatgagagtacacccccttctgaagagctagagttggataagtggaaaactaccatgaaatctagtgtgcaagaagaatgtgtttcaacaatctcaagcagtaaggatgaagatcctctagctgccaccagagagttcattgagatgtggagattgcttggcagagaagtaccagaacacatcactgaagaagagctcaaaacccttatggaatgtgtttctaacacagcaaaaaaaaaatatttaaaatatttatatacgaaggaaaaagtgaaaaaagctaggcaaataaaaaaggaaatgaaagcagcagcaagggaagaagcaaaaaatatcaagctgctagaaaccactgaggaagataaacagaaaaactttctatttttacgactttgggataggaatatggacatagcaatgggctggaagggtgcccaggccatgcagtttggacaacctttggtttttgacatggcttacgaaaattatatgaaacgaaaagaattgcagaatactgtttcccagcttttagaaagtgaaggatggaacagaagaaatgttgatcctttccatatttatttctgcaatctaaaaatagatggtgctttgcacagagagttagttaaacggtatcaagaaaaatgggacaaattgcttttaacatcaacagaaaagtctcatgtagatttatttccaaaggacagtattatctatttaactgcagattctcccaatgttatgactactttcaggcatgacaaagtttatgtaattgggtcttttgttgataagagtatgcagccaggcacatccctagccaaggcaaaacggctgaacctggcaactgaatgccttccattagataaatatttacaatgggaaattggtaacaaaaatctcaccttagatcaaatgatacgtattttgttatgtctgaaaaacaatggtaattggcaagaggctctgcaattcgttcccaagagaaaacatactggttttctggagatttctcagcattctcaagagtttatcaacagactaaagaaggcaaagacttaattcattttcaaaaggttctctgaatgtgcacagaacacgtggctcaaatgagaacatttgatggcttaaaaagtaaatgcgttagaaatacagttctgttaatgtatttcttcccaaacaattcatttttctcttctaaaggtagtctttcccaactgactgtagggttgtgtcttttcccaattaaatatctgcagaactttgggattatactttgtttactgtagaaagataataaaaagagttgtccaagattgttgaacagaataatctttatcccagttaaatagttgtaccattggtagacttttttatggaggttcctagagggtggtgccctggggtgggcttggaagctctgcaccccttcccccatagctttccccgtgcatctctttgtcngtatgttttgtaatatcttttacagtaaactggtaaatgtgtttc

SEQ ID NO: 48045 - DNA, 690 bp, Homo sapiens
ggtatttgaaccagagcgactccattttgagtgagggctgggaaaatgaggctgagacttactggcctgcattctcagaaagttaggcattcctaccctctaggattgaattgggacccctttcctgtaacattatttctggtgacccacagaagggactatagtgcagaaacgttgacccaacggctacctttgcgtaaagtgttggggtcctgtaacatatttctggcaaaccacagaaaggatgatactgaggagacccccgacccaaaggaaatagactgcagcactgattggacgactttgggtaagtgatggggtacccgagtaacaaatgggattgggttagaggcccaacttaggggagttggagtttctcctaagacagagtgagttagaggcccctcttaataaaaggcaaggacacttgactgacctcaggttaaaggcccaacttaggagggttagggtcccttttaagatttagggggttagaggcccctctcagtaaagtccctattggtaaagtccctttcgcctaagaacaggtttggcaatatgggatgctaactgctattctctttggattaacctgccgtgtactatttgctgacggcatggggtgacaaggttaggcatgcacaggagtgtgggacatggggaactttttcctccccaaaaaggggaaac

SEQ ID NO: 48046 - DNA, 962 bp, Homo sapiens
ggtaaattcacttttaaatacaaggttccaagtatccaagttgccaggccagttgcctgtacctggaacaagcctttccaccgaataagaagagtccctacttaaacagcttaagctaatttccatcatactatttatcacagtctaattaccagtttatcagtctcccattaaagtgggggctccctgagagcaaggactgtcatcttcactttgccttgaaaagtagacataggtcccaaattatctgctaaatgagtaatgaacaatatttctattcagaaggtgtgtgcttgcccataattaatatgcaaatattctaaactataatctgatttaaaatccccaaatttaaacaagaaaattataccaaggctttgagatttagcttgtgctaaatcattttttaaaattgtagctctgaggcattttattataaaaacttagtactcatatacataaactaatacgaacttaaaattcatcatacatttacttcattttttagcttgaccttctagtaaatctttagcttcattgattttggctgctatataaggagatcctcctttgtcaggatgatttaaaagcataattcgtcgatgagcatctcttattttccctttattggcagtagggcttacacctagtattaatgctgcttcccgttttgtcattttgggttcaaacccacctctataatagccaccactgaaggcagattttggtaggctttgaaaaacttgttttacttgaggctccatatgcttcatggcttgcaaaacgtaacggcctgcaaatcctgcagcagcaatggtcagtccaactgctaccactgtactggccatggctccggctgggctcccttgcttccaccgggagcacggctcatcccagctcagaggccgcggccaacacctgcacgcctttaccagagagcgacgcaacccccaacctcaagc

SEQ ID NO: 48047 - DNA, 2343 bp, Homo sapiens
cccacgcgtccgtacaggtctggctcttgtaaccgtgatcaaactgttcatgttgtctgctacatttttgtctccatccatttttcctaccacctcctgaaggctatctgatagtcagtcacattagcagccccaggcagcagacaacaggaaagttaggaaatttgtgtttcgtgtcatttttaggagcatctgataaaacctccagcaggttttaggaagtattcatgtatttttctggttactttctgtcatctctaattgaactcacctgatgaaggttcagtgttctggggccagaatttatgattttagatcaccttctttggaaccttagatcactgtgttttgaaatcatgagtttgcttttaacttcatagggtcaactttaaaatgatatgcactgttaattttaaagcatttgctgcagataattaaacttagaagtgcctttgactttaggatacaaatattacagaagaaaatataatttcactttttaaaattggggtgggaaaatcccattgcatatttgaaataggcttttcatactaagcttcatagccaggagtccccagagtcttgttcctctgaaagccactggggagtggcctctggggtgctgattccacagaggtgtatgctgtagacaggagagtgccatctatgccaaaactcgccctcaaaaacaaacaaggcttgctgggaggcgtgctgggcttggccatcagtatttccagtgtggtaaactattgctggcacttccccctggaaataactaatgaggttacgagttgggcacctgcacagatgtccttctctcatagttcctaatgcttaggaatagaggagaaataaaaaaatggattctctcaaaacactgccatttgaatagcgacagaagtgctcccccagcccccaactttggacagcaaagttgaggagaatgagcagacacagttgtttgcttgatctgaatctctctaaagtaaagtatttccaaactgtgtgacaagagcctacctaccactgtagcggtcaaagctgaagcttcttacagcagtgaaacggggcaccacctcccccacactcctcattccccgcttaaaacatggatactttcaaatttgactgtttcttaaactgccatcctaagatatggaaaatttttatagtaaagtgtctagttagcttatttccttttctaaaacaagtgttttcaagataactgtattttacctttatatgtactgaatagctgtttctttttgaattatttgccttttaaaatttgataatgtctctggatataacaggacaggagttcttaaaaaatatcttaagaaattcactttatgggtaaacccaaggtttttgccaacttgttgcctagaaaataagggctagtttcagtttatacaaatagaattattaaacattttacagtccttgattagaaaccagacccaatctccttataacaccacagcgtatcctgccattgacagtgtaatcacaattctccctttttcatttagctgcttttttattattactaaatgttttggattgagcatttttccctctgtaattttcttccttcacgtttattttattttaactcttgtagtattttattgttgttaatttacaagtttaaaaatattaggtactattaataatggttaaaaatagaaaaatgcatatttttgtatgataatcaaatgtaaaatacttttatttttgctggacagttgttatatcatgattattgtggctacagttttattgtggcataatatgaaaaacaactatgacagccttcagtcgggccagggtgaagctgcttataccacctctgccgtcagagggacatgtggtgacagcagtggtgtggctgcacagggcgcactagagagagctcagcacccctgctgcccgccagcagagcccgtgctgagggaatgccgcacagatgctgatgcactgggtgaaatttctagtattgaacgtaaaggtgtacagtgtcttgctgttattttatgatggaaactgattttgaaaccaaaaatagctaactaactttatttaaggaaaggatattaatttgtactaacagagggtgaaagctgttcacatttgtcaacaaaatctgcttgctgcagtagtaacctcaagtggttaaaacttgatttcccgagaaaactaaaacctttgtgcctaaaattgatgacttgagttcaagtgggatgagcaagaagatgtgttatcttgttgttcaacagtattgagtgtgaaggaaattttgatggcttaataaaattccacagcgactgttaagga

SEQ ID NO: 48048 - DNA, 1400 bp, Homo sapiens
ctggcaatgtgtgtcatggtaacagttctctcttgttctctgaaatgctacataggagaccaaataaagtataattggttcattcaaataaagggactagaaatgccacaaaattatttttacaatacatttttcagaaataatctctaggtgaacctttttccttttatacacatatacaaaatttaaacagcaatatacacataatcacagtgaggacgttggcaaattcaccaatctgtagtgtaaatacaaactgcaaagcagccttccaagagaacaatgccacacagcaagcagagctggccaattcaatagcaaacaccaacatgtccctgcgaaagggaaacagtgcaagagaagcagcatgcgctttgatacaaacagcaatttatggctaatgggtgacaaaactgtggtaacagtgactctctcgctgctatgcataaagtcctaggacatctgtttgtctttataccactccacaaactcgtccaacaaaactggccatgctccatcttcatcatagttgctgaggtcaagattaattgttctgctaaactctaggacattgcaccactggtctttattaataactttgtattttgattgctctaagaattggtgaaaaactggaaaaaggggccagatttttcctaataacagtccccaacatgcacttggcagtgtttcatgtcctaggctgcgctggtccttttcaggactggaaagctgaacagcactcacttactcctgctctgcaagggtgccagccagcagctcgcaatcactaacaccatcttcggcccgtgcaaagtcaaacgcatatctgtaaataagtttaaagtttgtagaatcatttaagaatgatcttaagtaatccaaagtatttctgagtttttctgttgtatcacattggagagaagtcattccttttaaccactcctgtagagtaaaataacccatgttttgtgcatccaatttccaagctaggacaagcataactacgttttaaggttcaacaccaatgtcttcacaaaatttctccatgccttcagggcctacaacatcatcagttcctgcatattcatagaaccattccaagcaccttttacttgaaaaggcttcttcttcagtctttattctagtcgaatcatattttctatacatgctatcatgtctacttttcttggcagataaatcatctccagaggcaggtcttctctttttccttggtggcatcactttattaaagcacgtctgaagaactgcaagaccgcagacttcctgtttggtgatcgtcttggccaatgtcttctgttaggttcagcttattaagggtgtggtagatcttatgaatatttgccagtgttgagagatgagagttcagctgaaaatct

SEQ ID NO: 48049 - DNA, 586 bp, Homo sapiens
tgcctaagatggaatgtaaccagggatatttcaatagccaaccaatgaggaaacaatccagatgtccaaaataaggggaagagaataccatgtagccattaaaacttatgtaggaggatgatttgttgatttgggaaatagtcatgatatactttgttaagtgagaaaagcaggatatttcatctcttcactgtataagttttattaaaataattatatatagatgttttcaggtacatgtgcaaagaaggcctataccaaattgttagtgactgtctccagatggatagacactgagggctttttctgtgttgttctgttttccaagtgtcttacctggaatatgcattacttttgtaatcaggaaaaagttattaaaatatttaaatgcagaaggaaaactgcctcaaaaacagttttaaaaacccttgggggatcttgaagatgcacctatgtccaggacttgctcctcacttgatgactagattggtctgtcctgaaattggcccaatattaaagagagatttttttctgctttctctcttaatcctgcctggctgggcccatgttcccagaagccaaaggg

SEQ ID NO: 48050 - DNA, 757 bp, Homo sapiens
cgcgaaactcctgccttaaagccctaaatggcggcttcaatatcagccccactgagcatgagattcatttacttaaataaaatctgaatctcagcccaaacctgggagattcaaaacctgagagcggtcttaccaaagacgcccgtatgtctggtgaagtcagttggatgcaagcagtttgtgctggtaccagggccccagctactgatgaagtggcaggagtccacagaagcctacttcgaagttcccggggcttccaggggagattgacgagattcctggggaggcgattcatgacagctgagttccttttggaggatccgtcttcaggcagtctgatcccccaggaaagcagctggaaaacaagagcatgtgaaggaagcgcagcagctcctcgccagccagacagccagccccgcaccgcaggagtcgacatgcacggcagcctagacgccatcagttaaacttatatgtaggcttgttgaggaaaacgactttcaaacacaaggcaaaagaaaaacatgaaaccaagggttccaacattcatcatccagtttcagagacacccttgaaggaatgctacagcctctttcttacccattcaaaccagtcgctctgctgcatacccacatcacaggaggccctcagccccgacacacaggctcactcagcccggggacatcagcacctgtgccagctccgcaaggtatccaccatgcggccagaactgaggcccagcaatagctgaaatgtcctt

SEQ ID NO: 48051 - DNA, 2692 bp, Homo sapiens
  misc_feature (1)...(2692): n = a,t,c or g
cgaaaatgaggaacaagattctcagaatgagggtagtacagatgagaagtcaagccctgccagctctcaagaagggtctccttcaggtgaccagcagttttcacctaaatccaacactgaaaaatctaaaggggaattaatgtttgatgattcttcagattcatcaccggaaaaacaggagagaaatttaaactggaccccggccgaagtcccacagttagctgcagcaaaacgcaggctgcctcagggaaaggagcctgggttgattaacttgtgtgccaatgtcccacccgtcccaggtaacattttgccccctgaggtccggggtaatttaatggctgctggacaaaacctccaaagttctgaaagatcagaaatgatagctacctggagtccagctgtacggacactgaggaatattactaataatgctgacattcagcagatgaaccggccatcaaatgtagcacatatcttacagactctttcagcacctacgaaaaatttagaacagcaggtgaatcacagccagcagggacatacaaatgccaatgcagtggctgtttagccaagtgaaagtgactccagagacacacatgctacagcagcagcagcaggcccagcagcagcagcaacagcacccggttttacaccttcagccccagcagataatgcagctccagcagcagcagcagcagcagatctctcagcaaccttacccccagcagccgccgcatccattttcacagcagcagcagcagcaacagcagccaccaccatcgcctcagcagcatcagctttttggacatgatccagcagtggagattccagaagaaggcttcttattgggatgtgtgtttgcaattgcggattatccagagcagatgtctgataagcaactgctggccacctggaaaaggataatccaggcacatggcggcactgttgaccccaccttcacgagtcgatgcacgcaccttctctgtgagagtcaagtcagcagcgcgtatgcacaggcaataagagaaagaaagagatgtgttactgcacactggttaaacacagtcttaaagaagaagaaaatggtaccgccgcaccgagcccttcacttcccagtggccttcccaccaggaggaaagccatgttcacagcatattatttctgtgactggatttgttgatagtgacagagatgacctaaaattaatggcttatttggcaggtgccaaatatacgggttatctatgccgcagcaacacagtcctcatctgtaaagaaccaactggtttaaagtatgaaaaagccaaagagtggaggataccctgtgtcaacgcccagtggcttggcgacattcttctgggaaactttgaggcactgaggcagattcagtatagtcgctacacggcattcagtctgcaggatccatttgcccctacccagcatttagttttaaatcttttagatgcttggagagttcccttaaaagtgtctgcagagttgttgatgagtataagactacctcccaaactgaaacagaatgaagtagctaatgtccagcctttcttccaaaagagccagaattgaagacgtaccacctcccactaaaaagctaactccagaattgaccccttttgtgcttttcactggattcgagcctgtccaggttcaacagtatatttaagaagctctacattcttggtggagaggttgcggagtctgcacagaagtgcacacacctcattgccagcaaagtgactcgcaccctgaagttcctggcggcgatttctgtcgtgaagcacatagtgacgccagagtggctggaagaatgcttcaggtgtcagaagttcattgatgagcagaactacattctccgagatgctgaggcggaagtacttttctctttcagcttggaagaatccttaaaacgggcacacgtttctccactctttaaggcaaaatatttttacatcacacctggaatctgcccaagtctttccactatgaaggcaatcgtagagtgtgcaggaggaaaggtgttatccaagcagccatctttccggaagctcatggagcacaagcagaactcgagtttgtcggaaataattttaatatcctgtgaaaatgaccttcatttatgccgagaatattttgccagaggcatagatgttcacaatgcagagttcgttctgactggagtgctcactcaaacgctggactatgaatcatataagtttaactgatggcgtctaggctgccgtgcatgtcgactcctgcggtgcggggctggctgtctggctggcgaggagctgctgcgcttccttcacgtgctcttgttttccagctgctttcctgggggatcagactgtgaagcaggaagacagatataataaatatactgcatctttttaagatgtgcaattttattctgaggaaacataaattatgttttgtattatatgactttaagagcccacattaggttttatgattcatttgccaggtttttaaatgttttcacaaaactgttacgggacttcaactagaaataaaatggtgtaaataaagaccttgctatctctaaattatggatgttaaagatttgaaatgttttgtactttgattatttttatttctaaaactctgttttcttttanattganatcttgcccacattttaaataaatgtacttttg

SEQ ID NO: 48052 - DNA, 438 bp, Homo sapiens; identical to SEQ ID NO: 5100
  misc_feature (1)...(438): n = a,t,c or g

SEQ ID NO: 48053 - DNA, 954 bp, Homo sapiens
cttggactacaactcccggcagagctcgcggcagggggtgtgccgcaatcggcgaggagcgtgggtgactcaaaccaagtgacggaagtgagcgagggcgtgcctgtttgttgcaggcgcggtgtagcaattggaggacccaggaagaaggggcggacgtattcttgggtcaaccaatggcttgagctcaggagcaaccagggcacggggcgtgtcggggctgattctctggctgtgtggggcgcacggtcccgggatactggggacggcggggtgggagggcgccgtcctggggccgcggcggccgggcgggggagatggcggcgcgatggagcagcgaaaacgtggttgtagagttccgtgactcccaggcaactgcgatgtctgtggactgtcttgggcagcatgcagtgctttctggccgcagattcttatacatcgtcaatctagatgcccctttcagaaggtcaccgaaagatctctcgccagagcaaatgggacattggagctgtgcagtggaatcctcatgacagctttgcacactattttgcggcttcgagtaaccaacgagtagacctttacaagtggaaagacggcagtggggaagttggcacaaccttacaaggccacactcgtgtcatcagcgacttggactgggcggtgtttgagcctgacctcctgggttaccagctctgtggacacctacatctacatttgggatatcaaagacacaaggaaacctactgttgcactgtctgctgttgcgggtgcctcccaggtcaaatggaataaaaaaaatgctaactgccttgccaccagccatgacggcgatgtgcggatatgggataagaggaaacccagtacagcagtggaatatctagccgccacctctccaaaatccatggcctggactggcacccagacagcgagcacattcttgctacctccagtccg

SEQ ID NO: 48054 - DNA, 542 bp, Homo sapiens
  misc_feature (1)...(542): n = a,t,c or g
ctgaaggcatttacagtgggcctggatatgtgctgaaagccaaacttttaaattttttggtttttttaagcaaagaaatattttaaataaatcctatttcaacactgaaattgttgaaaaccgtctcataacaaaaggaaaaaacattggaatttttgttttagtggtcagtataggggaatgaaagcgtctgttgttacccacgtaactattttgataagtattagaggttaaccttaaatccagcaaaacattaaaacagaaacttttcaacttggagcctgccattcagcgttgaggtagatgagttccgacactgtcacggctgtgttcccagcagcgaaggcctctgcggagctgcccagtcgtcttgaacgtgcatggggcgggcgtgtgacatctcccggggagggccgtccgaagtcgaggaattcgttcagctgttaagtagggagcttacacagcgcagaggaaaatgggaccacccatccgtgagggccttttttccggagggagccgcacatttggattttanatttttc

SEQ ID NO: 48055 - DNA, 835 bp, Homo sapiens
ttttttaaatggattgtttttattaatttacaatgaaatagtttttgaatgacttcacacaaaaacctagagataacatcacaattgcaatgttataaagtttaaaggcctattcatttcactgtcagttgaaattcgttaccaggtgaaaattctggagctgggttttgcactgaggatgctacacagccactagcctttttaatttggtcttattaacagaaatactgacttagtgaaattacagggcataggcctcttaatcgctttttatgagtctgaacttttgctttcaataccaaatagtatctgaaaaacatggctcacttttgtggcttcttgagaaattctaagaattggcccagattcatgtggatagtcatttccttaatccatagtcaccatggggcctcagggagtaactcttcaaaagaatggaaaaggcgcaggtcctcaccatttccttctgtctccacgctttcagcatggcttacaggaaatgtgcttccaattggggtacctaattgtgtgccagaactcctcacagtggctcttgaaaccctccacacagattataccaggctttcctgtcatgcaaaatccagtcacatctaaccttttcccaacatccaaaatctttttccttaggtcctgctgatatatatggtgactgtagatccacattcggaggaatgtgttcttgactggctttgcttgtgtagatggttcatatacaagctttctgttcaggaaataagatgcactgttgtcctgtagccactggattgctgcacatacacagagctcacctggatcaaaagtccctatgtaagac

SEQ ID NO: 48056 - DNA, 1305 bp, Homo sapiens
ccaagcccacgcgggttccgggtcccaagatttggctccaagagctattcgcagagaaacagcctcgcacaaaaagccaccgcccccgaaacccgcgggaaatctgtttcctgtgaaaggcctggcctccgggcattggcggtttccctgatcctctctcccaaattttccggcaggggattgatcgaggcgacatttaggactggggtgggcgagggagtggcggttctcgtcccaagttacaggtgaggacgttcaggccaaggcgtagccaagatcgcgccgccctgtagcttgaggaggcgccgggattcgaaccaaggctgtgcccaatcctaagccctgcgaggtcttgtggaaccgacatgacccactctttggtttgtccagagacagtgagcagggtgagttcagtgctgaatcgcaacactcggcagtttggaaaaaaacatcttttcgaccaggatgaggagacatgttggaactcagaccagggcccctcccagtgggtgacgctggagtttccccagctcatccgtgtctcccagctgcagatccagtttcagggtggcttctccagtcgccggggctgcctggaaggttcacagggcactcaggctctccacaagattgtagatttctaccctgaggacaacaactcgcttcagactttccccataccagctgctgaagtggaccggctgaaggtgacgtttgaggatgccactgacttttttggccgtgtggtcatctaccacctgcgggtgcttggggagaaggtgtgagacctctaggggctgtctcctccaggaagccctccgggaagcacagcaaagtccctcattctgcacagaaggtttattggttcctcttgggaagggtcccctcccaccacctgtccagaagctgcctttgaagtcagttctgggtttccccagctctggctgaccattttgttccctgagtgtctgagtccccggcaggcggccttcactcagggtcagcgggcaccaggttgctctggaagagcttgaggatgtggttctcgatcacctgttgcactgagatggggcagggaaaaggtgggctgtgagcttgaatcgggagtggggtggaggaggccaacctgcgctctccccttaggggacaaacaagggacccttgcagagacctgcattacagagcaaagctgggagaaccgaggactcaccccaggaacctcaacttcccctaagtttgtaaaaatgcacttttgtagcttttcagaattaatataaaaatatttcctaccaagcaaaaacaaaa

SEQ ID NO: 48057 - DNA, 1049 bp, Homo sapiens
  misc_feature (1)...(1049): n = a,t,c or g
acaacaatttnccaaactattgaaataaatctatgaataattcaatggccgacattttccatacaaaccaataaaatgcagagtgtgcatgaagctatctgttacaatctgtggcactgatatttcacaaaagaattctgtcccaatctgagcccctgcattgtgccttcaaatcctcctggactgcaagtccgtaagaaacaggacctccaggttccgccccagggaggttggaattcagcaatataaaaagggtggtggtgccgcaggaaagggtggaactggaaacgctcctggtttcttacttttctccaaggactcctagaaggaccccacccccctccccccacccctgctcctaggaggacaacgtgatcactgtattcagctccatcaagaatggtccaggttcttctagatgatctgcacaaatggttcctctcctcctgcctggtgtctgccattagcattggaataaagttcctgctgaaaatccacatctcccctgggtccggtgttctggaagcgagagagacaatgtcacacttcaaggaggcagctctctagacaggaaagttattcacgtcccatgtcaattgagaaatgcaattttatctgctgcctttcattctataccctgcttctgaaccatcgtgttcaactgtgaaactcacactttggtgaccacgactccaaaactcacttaatacacccaaggtcagccccagtgatctgcttcatagcaaggactttgggtgggtctgcccagggagtagggcaccctcagagaatgtggctttggacttcatcacagctggggccttttgtgtcacttaagatctaaacttgtaaccatgctagatgtgtttctaatgtgacaacatcacgaaccacgagtccagaagcctaatccttaatcctacctcctcatgatgaagtctcatgctctgtgctcaacgtggttagctgcacaagatgtaaaccaaagcttcactgaaccctcgacccaaatcagtaactcaagtgcgtcaatcataatgaacctcccc

SEQ ID NO: 48058 - DNA, 1434 bp, Homo sapiens
actatgtctggtttcgaactcctgagttttaatttgtatccacccacctcattctccattagcgctgggattatagtgtgttgagcaaccgcgcccgtagctatacagagccttttaacatgaggtcaaaatactctcttctacctgttattacagcaatccaaaaaaagttatctattttcaaattaacaatctgagactctacttttagtagctaattagttgtatcacagggaaactttttttttttttttttaaatatttaagagctcaaaggtatacaggcagaaagtggaaaatctcactactactttttattctaagctcacggtgtttcagatatctatttcacaaccaagaccatgaaacccatcatagtatttgtgactactatgaaaactatgacatgtcagtcagccttgctgcctgctgtgtgctgtatataagtccattacatattccttatagctggattgaaaacctgaaaatgaaatgaagtccctagagaaacttggccatgctggtgctttttaccaagtttgacaatttaaaaaaaaaaaatcagtgttcaaaggagacatacaaaagtccatttaatgtagcagagatgtttaggggattacaatttctatcccctggtaaaaccaatacttggtagaaggataaagaaaaagccacgtgaaataatactgaatagcaccagaatagccttacactaaagctcgcatgcgcacagggctgggaggatggcttcctcttgccaggccctttaggtcatttcagcaattgttctgttaaacatagcattaatgttatcaagacacagcaagcagcagaaagcttgtggagtcacatttcatagtgtctcatctccaaatcagataaaagtggtatacagggttccatccagaaagcattcagtcagagcaagttaaagtcagtactttctaacatacttttaagatacttatgctgaattagcccaaggggagaaaaattaatgtgcttgatgtatttactaagacttgcatctcaagtcttcaataatgcctatttttgaaagaaacctaggcaacgaattgaagagacttggaaatgtgccaattccctaaatgtttttcctcctgtgggataattttttaaagggacaatatatttgaggagaagagattattcctggtgcacctacctaaccactgtacaaaagacttcaccatagacattatactcttgatatcccaaacataggagtacatgtcataaagaattgtcctgttggcacaattggagagccgagtgaacattcccatcactagtccacacatctcttcaaacttggctgctcgtgaccgccattcttcaattttttcagagtcttttcctttgcaattgacactgacaacactactatttgctcgaagccattgaaattcc

SEQ ID NO: 48059 - DNA, 871 bp, Homo sapiens; identical to SEQ ID NO: 5117
  misc_feature (1)...(871): n = a,t,c or g

SEQ ID NO: 48060 - DNA, 627 bp, Homo sapiens
  misc_feature (1)...(627): n = a,t,c or g
ttttttttttttcgctagctataagcagaaaaaaacttttatttctatcaaattgaaaagtatgaaccttcaagcaagataatcaacataatcaataatacaattaacagttaggatagcatatacagatcagactggaggtttagatacttggaagcacatacaccaaaattaagagggccagcaactgtcccaccgaggaaaagcactctgactcatcataaacacacgacttctgggaaacttgagctgacatttcacaggacagtaaaccaaagagacaggttgtcattgggttatagaactgatctgagcttgagagggatcacagtgaaatgccattgtaactcaacaatttccccagagatctgttcatctcaaaaacaggaatatataaaaatcagtagtacaaattctcataaaactagaaaagccctttaagccctaatatccttggagcttacataaagactgagttttcatttttcttccctttagtcttccctaaattaaatacaaaatagtttgttatttaggacatttctgactatatagccaaagctttaaaatgaagacaagaatnatttttataaaatgaattagacacatatcaaccctagggggaat

SEQ ID NO: 48061 - DNA, 1189 bp, Homo sapiens
ggacttagtgatcttgtccaaccccctccccgcttttcacaggttggggagatgggcgcctggagaatggaaatccagttatcaaaattgactccagaagagagaaactaacagaacaataacaatggaggaaattgagaacattatcaaaaagctatcatcctgccaaactccaggctcagattgtcttacaggttaaaaaaagttagtccttcatgaaaatgaaagaccttaagcaacacgatggattcagaagctcatgaaaagaggccaccaacactaacatcttcagaacaagatatatcacctcgtattacaaatgttggtgaaatgaagcattacttgtgtggctgctgtgcagccttcaacaatgtcgcaatcacatttcccattcagacggtcctctttcgacaacagctgtatggcatcaaaacccgggatgcaatattttagttgagaagggatggatttcgaaacttgtatcctgggaatccttcccccattgatgcagaagacagctacacttgcacttatgtttggtctgtatgaggatttatcctgccttctccacaagcatgtcagtgctccagagtttgcaaccagtggcgtggcggcagtgcttgcagggacaacagaagcaattttcactccactggaaagagttcagacattgcttcaagaccacaagcatcatgacaaatttaccaacacttatcaggccttcaaggcactgaaatgtcatggaattggagagtattatcgaggcttggtgcccattcttttccggaatggactcagcaatgtcttgtttttcggccttcgaggtcccattaaggagcatctgcctaccgcaacgactcacagtgctcatctggtcaatgattttatctgtggaggtctattgggtgccatgttgggattcttgttttttccaattaatgttgtaaaaactcgcatacagtctcagattggtggggaatttcagtctttccccaaggttttccaaaaaatctggctggaacgggacagaaaactgataaatcttttcagaggtgcccatctgaattaccatcggtccctcatctcttggggcataatcaatgcaacttatgagttcttgttaaaggttatatgaaaaaaccatcagttaagtgccatttatcaactgaatagaccttctaagaagcac

SEQ ID NO: 48062 - DNA, 1555 bp, Homo sapiens
tttttttttttttttttaaatgtcatagtgtttactttatttaaatcctgaggttaaaaataaagtatttccacatggccatggccagacactataaaataatatgcttagggatacaaaagttttccacccccattgtgcaggtggggtgctggtatttgatgtgcttctagataattctttggcagataagaatgaattggggtcccagacccaccatcccgtaaggccacatgaattgaggattaatcaattaaagtgcaattccaaatgttgagccttccaaatgaggcttgggtattgctctgcagccaccagaggcagagtgtctctgcataacatacatcaagcagcctttttctttttttaaatcagagatgcccccccaaatttcaagatgtactttattattttaaaagtgcttaagaggaaagagagaattattaattcagtctctcctgtttccttggaagaaacataatgaaatgagaagaacttactaaagttcccctacaaagtgctttcttggtaagtgttttgtaaacaagaatggccgtctcgatggtctttgtgtacatgaccatccttggttctaagcatcacgaatggcttctctctgctttaattcccaacacctctgagccaaggacagtttcttggcctaaagaattctcatatgtagaatcatgcgcacttttaaaaatgaaactcctttaaaatttcatcagtggacatccaaccatatcataaaacacaggctctgtgatttcatccccaactggcgatttcctttcatttgggcctgaaatagtttcaccaccttcgatgataattttaaaatttccaaaacaccatttattcttgagttatatgacgtggcttttcatttctattctccaaaccctgtggagtttttcagttcccgtgtctttgccctgctcttggtccagtccacctggaatccagtgtgttgaggtcaagcactctgtagagtccacttggacctggaggacaacactttgtgccaaacgtgcctccttgtttgtgggtaagtgaatctgacagaggttggcatgttcttgaaggtggtgagtggcttcagtggcatgatgaagaaggcatctggtatcgatatgaagacgtaactgttattcagagagatgagccatcaaggggctgccccttttaaaaaaaaaaaaaaaagagtgatctgggatcccaaggacgcttccttctggctgatttctagtgtaattcagtctagccagggctaccacctgcagcagtggttcttcaattgctatttgcatttctttaaagtaccccagtccttaattctcagtaaagttgggaatctgattaatatcagaataaagctatttataaaagccactcttaaatatgccaagatgttttgtagctgcagagagcacagcaaacttgagcttaaacagcaacctaacaaaatacaaatgtccacccagcacaaaaaataaattcgctaatgaaaccacatagttaggaagtcacctcagggcacggggcagtcctccga

SEQ ID NO: 48063 - DNA, 731 bp, Homo sapiens
tttttttttttccattagaagtattttattttaaagtacacttgaaattttaaatgtgtacaaattcagaggtttaaaaaacttcgaaagtcacagacacagaatttaggaagctgaaggctgagagtctcccttctcacttaatccatgctttattttgcattcctcacaggtaaggaggcagtgcctgttatgctgtggaccaaaaccagccccacggagctgatcttcaaaaaaatggaatttactctggcatactcctatgtatgatacctttccaaggccaaatcccaagagaccagcaagtgcaactttgggcaatgatccaaatctagaattagctgccaaataaccttggtagactagtccctgggtgacaagcatgcttacaagagaaaaaggcagagctctcttccagaaactttcttcctgacattctcgcataatctttgagatctctgctctgtggatgtgcagttttgattttggacaaaacaacaggctctgcttgcttggtggtggaaaatgggcatctttatcttggtttccacgagcagacgctgaagccatgatgactttgtgcttgctctccttccagttgtttatcctctgcttactccttgacccagtgtctgtgtggtctgggtcgcctccgaggccgagtccctcgttgccaagcccagcaggcctcgctcccccgtgactgcaccgccggcgcgctccagcttcag

SEQ ID NO: 48064 - DNA, 886 bp, Homo sapiens
  misc_feature (1)...(886): n = a,t,c or g
ttttttttttttttctggaaagcaactgtgtatttacacaacagtggacgccttttacattgcagaggggcgggtaagagcgggatggctaggaagctacagcacctatttggttatgaacacagcattttcagatggctgggggaatagatgccacttcccactcaagacagggatttgctcagcgggaaagcaggtaataaaggcagcacatcctgcactttgaactgcatccgtctcatcctgcagccaccctgtagctcaaagcacagttctggagcctattaggtccaaatctcaatctacccttgagtcagcgaggccttaggcaaggaggtccctcgaagtctgtcttcctgtggcagatgaggacggccacaccacaaggcagtcgctgggcccggggcccgtgtccgaggtggcagtgtgcttgggctccatgtgcctagcccgtgcgtgtgttcatcactggcagcggtgactgcgtgctgcttgggggagagcacttgagctgcctcagaacaccctggtgagcaaaggacacttgcatggatggaagcaggaccgaggcaccgtgttggtccctgtgagactctgggtgcactgagctttggggaggggtggtggcacagacctgggcctttctactctcctggcacacagcagtcagcgctcccacttcccttctccactacggtgtttctctctggtgtggtttgggtggaagttaccagaaacgcaaagccctggcactgctacttctcctgggggagaacagatttgtggcctgcctttcgccaggagggctcctggccttgccttgctgatcggcagagacttgctcctcaaagggaaggggtagttggtccttctccncgtgccgaat

SEQ ID NO: 48065 - DNA, 1663 bp, Homo sapiens
tttcgatttgctggctcagaaaacttatcagcatttaactgtttgcataaatttgccaaagattttatgacttatttgtccgcacctaatgcttctgttacaggtcctcataacctagaaacttgtctgagcgtggtgctgctgtctctcgccatggtcatggctggctcaggaaacctaaaggttttgcagctttgtcgcttcttacacatgaaaacgggtggtgaaatgaactatggttttcacttagcccaccacatgggcccttgggacttctatttttggggaggagggaaggtactctttgaggcacatcaaattcttccattgccgctcttctctgtgccctttatccgcacttcccaggcttcacagcactggacaaccggtatcatctccaggctctccggcacctctatgtgctgggccgcggagcccaggcttctagtgcctgtgggatgtgggacacaaacacggccctgctatgccctcttagaagttacctacaagggcactcagtggtatgaacaaaccaaagaagaattgatggctcctacccttcttccagaactccatcttttaaagcagattaaagtaaaaggcccaagatactgggaactgctcatagatttaagcaaaggaacacaacacttgaagtccatcctttccaaggatggggttttatatgttaaactccgggcgggtcagctctcctacaaagaagatccaatgggatggcaaagtttgttggctcagactgttgctaacaggaactctgaagcccgggctttcaagccagaaacaatctcagcattcacttctgatccagcacttctgtcatttgctgaatatttctgcaagccaactgtgaacatgggtcagaaacaggaaattctggatctcttttcttcagtactctatgaatgtgttacccaggagaccccagagatgttgcctgcatacatagcaatggatcaggctataagaagacttgggagaagagaaatgtctgagacttctgaactttggcagataaagttggtgttagagtttttcagctcccgaagccatcaggagcggctgcagaaccaccctaagcgggggctctttatgaactcggaattcctccctgttgtgaagtgcaccattgataataccctggaccagtggctacaagtcgggggtgatatgtgtgtgcacgcctacctcagcgggcagcccttggaggaatcacagctgagcatgctggcctgcttcctcgtctaccactctgtgccagctccacagcacctgccacctataggactagaagggagcacaagctttgctgaactgctcttcaaatttaagcagctaaaaatgccagtgcgagctttgctgagattggctcctttgcttcttggaaatccacagccaatggtgatgtgaccgtgtctggcggtgaacctaccctgaaacgtgacttctgcacaacaaacgtgaccaaacatcaaagctaaagcaatgtttataaagttttatggtataactagggggaaatgagctgcacaaacctcaatgtattttaaatctgttgctgtcatcattaacggtatatgacatataaaagcaagttaaaatttacttttgtaaataaagtttttggtttgtttccaaaaaaaaa

SEQ ID NO: 48066 - DNA, 1082 bp, Homo sapiens
cccactaaactatacttgtagacatattcattacatttattttaataactacttcattaataggctgactggctttccctgtgtggataaagtgtgatctgaaagcaacgctgactgaatgtaaataaagcaaacgttcccagccatttttggcatgaacatggactacagcgtttaatgcagacccaaagccacacatttttggggagtaggttttacttgcagtacagattcttttcattacagatcacaaaaatacaatacaatgtgacaagcccagtttaagaattacatgcagtagctcatattaacacaaacagctccccacgaaggccgacaagagctaaatccggtgtcaacagggttcattgcaggagtagaataatccggtacaaggaacgagaacagattgaaaccagaaacaaagccatgcctgacagtcaatcaaggtcaatctgatcatttccatgaccaattacccatgtgaacaattcaaaatgacggtggaagagctgagcaccctgtactcacacacgatgcccacagcttggcaaaaggtacacaaacacttgtttgaaaagaatgactgaaacgtctactttcaaagaacaatggacacttttaaagggaatgctgacatttaactttacaaaatgaaatttaaaatgtaagtagtactctggggaagaatatgcctgaagcgtaaccatgatttcccagtggtataattaaacagagctctaatttaaaaactcttcctgggctgggcgccgtggctcacacccgttaatcccagcactttggggggccgaggcgggcggatcacgaggtcaggagttcgagaccagcctgaccatcatggtgaaatcttcactctattaaaaatacaaaaattagccaggcatggtgccacatgcctgtactcccagctactcaggtggctgaggcaggagaatcgcttgaacctgggaggtggaggttgcagtgagctgagatggcaccactgcactgcagcctgggcaacagagactccatctcaaaaataaataaaaaataaaaactcttcctcaagattttaagac

SEQ ID NO: 48067 - DNA, 1016 bp, Homo sapiens
ttttttttttttttttttataatggcaagaaaacattcctaccaattttatttatccaggcatgtcttaaatatggctgtttgttacatacagtgattctgcagacatgttgacatgacagtgaaatacataaatatgtaatgagaaaaggcttaactgtggataaaacaaagtcattacaattaaagactcgagtttttggcatttccaattgtagtcagggcactgaggtcaaatttaactacaaattttgcattgtctacattgaacacatgattcttaaaagcctcatgttttatttcagaacaggcctcaggaagttgcagactgtgcaggaggttgtttagggcacaagtcatttctcccaatattaacttataggcagtctccaaaacaggaatattcttcaagctgagcattgcttgataaacagcatgggctacagcaacaacctctttttctttatgataacgcaagaatagtagtttagatgatggtataaacagtttttctacaaatgatgatggcagtttcgtatttatctgttcaacaatcagcgtgagtaaattcaagactgagatgatataattggtaccacaagtctggcaattctccagttggtctaatccatatgtaatgaccatgtcacaatgtatagtcatgctaggatccaagctgccgaggcaaaacaccaacacactcattagcaagctgtcaacacagcctcagaaaaaaacacctggtttgcagccgtcacacatctcattactctgtacagaacctgtgtctctgaagcagcggtttcccctcgaacttggccgacaccaccaggactcggaagctacaggagcaacggttgagggtcgtgtcctccacctccacatgctccgcctccaggtcccgctgcagcttctcgcggaggtattcggcgctgagttccatggcggcagtccagctggaacggcagcccagcagggacacaaccccagctcgggcgccggccacgctaccttgct

SEQ ID NO: 48068 - DNA, 475 bp, Homo sapiens
gaatgagttactctccactggtgattaggtaatacagtagaatgaagagttgtataatatattcatttacagctgtggattgtggtaaggactatgtccacagtgatattccaaagaattgggtttatatttgtgcttcatctgttaatcccaggtgtcctcatgttgctgaaatatttagatagctaaaatatcccttaatttcacagatgaccaggaagaaattaaccaaggttttattgactgccatgtatgtcccatgatgcatttctgagcaaatgcttatcctagagaataactctgtatgaataaaattgcttaattgagtctcttactaaataagtaactagtgccatgcttttgtgagctcttggtatggcccatattactttgttttttgtttttgttattgttgttttgtgatagtcttgctctgtcgcccaggctgcagtgcagtggcacaatctcagctcac

SEQ ID NO: 48069 - DNA, 2078 bp, Homo sapiens
tttttttttttttttttatacttatgattagttttattataaaggatacaaatcagctccacaagccaaggaagacacagggaaaggtctggaagggtcttgagcacagtgctcccatgccccctcttcgtggaattagggcacactgccctgccggcatagccacagcttcaccacccaggaagctatgctgagctttagtgtccagagtttttattagggtttcatgatgtactgattaaagcactggccagatgattaaactcagcctccagtcccccgccccataggtcaggctgactcaaagcctcaaacctctaatcacatggtcagtctgtctggtgaccagccccagctctgagtcatcccaccttttagcataagctcaggtgtgatcccatggcctcacaaataacaaagacactcctattaccctggaaatgtcaaggactgaaagtctccctcccaggaagcagggacaaaggccagttcaattctttagacaacctccaatccacacctcctggaactcctaccccaattgaaacaaggataaaatccactgaacatggagggcccattgctggcctgaactatttttgtttctttttttttttaaagctttttattatagacattttcaaacatatacaacagtaaaatgaataatataatgagccctcacacctccatccctagtaactgattatccgtgtgtggcttactctttgatcgatactctcctgctttcccctagcccccacagttagactgtcccgcagcaaagcccagacagacatcctatcggtctgagaattccttatcaaaagcttcccgaagaggaactctatatagggcaggactaagtgtgctggctataggtctgcagaaatctcaacccttgggagcccttgggtggggcctgggcaggtccctgggcagtagccgtctgtagtgggcggctcatctgctgacaacagtatgacgaacaaatagcattttgtacccgcactacaatgcaggagaacgccaaacaccgctttattgcattcaaaccttctaaggcacgtcagccagccctggccttgtctacagccatgattatctccttaaagagttaactctaaaaaaatattaagctcaagaaataacagctcaaatactcctaactaattaaaatcaatagtgagaggcagaatacggtaaaagataacatattagtattattgatcacagatcaatttcagagtacttaaaacaggaataatcagctaccacatcttgaaaaatacaaagacttgatcctaaccttttatttatcatgccacacggactgagacagtccccagtacctgggtctaggagagttattttatgtttgtgtttctgggaatttccgatacttcccagtgtatcagagtgttcccctcacacatgctagcaggcatctccccactaatggaatagcaagagtggtgaacagagcgatcctctactttctcatcatattctgcaaaatgagaagtcagatggatacaaaggttcctccaactctaggactccagggttgtgtggcggccctgcaaggctaggttatgtaaggtctcaccattgcaaacagaatggttcaagacagcaaggatgcactcctcaatttacaactccaaagcaccttgcacagagcttggctttggttacctacttgactctcttttaaacagagggtcttatgcttccctatcctgcagctgcacatttgccagggaagtggcctcactgttgccctcatttctgccagaagagagccagagcaggagccatggatttatctctggcattctactcctccaagcccagctgtttcccaagtattaattggtttcagacaaggctttcgtttcagaaaatcaatgaagatgcttttgatcatcttcaaaagcagagaagaatcaccaaagaacttttcttccaagtagtaaaggaataaaacttctaaggaccacatatcacctattgcagggatgtctttcctacaaagattattgctctcccgaggaactgaaaatccttgttaggag

SEQ ID NO: 48070 - DNA, 840 bp, Homo sapiens
tttgtcacagaacactgtttgcagtagaggaaactggcattgcagtctggtggtataatggcttgtccacataaaccagtacatgttcatcctttagcgcaaaaagccctaatggcgcgtaccctattaaaattcaggacatctccaatattctctctctctgtttttctttgtcatcttttttttttttaaataaacattttcaaggtttgtccaaaagaaggccatataggttcttggctagcggaagacaattcagaacagctgttgcacacttggactgtcaccttctccaggctggcagttgatatcttattttttttccaactcatttttattaaaaaaataaaaaaatgctccaactatcagctttacaaaatctctaagggaaacacaagagcaaggtgctgaggtaaaaacacctgaggtagcttcttctgtgtgtttttctcgttaaaaaaatctgtgaatttaacgccctgggccaacaaccttggtaaatttctactttcctccacattttttttttttaaagaaaggaatcattttgctgaatattgatggcttatacaccaaaatgcaaaaagacaaaatacattctttcattgtggaattttttctttgtttggttgattggttggtttggtgggttcctgttttcctcttccaaaacgctaggacaagtaccattgactcttgttcttttgagtaaccaagtgtaagttgaggctggtttgtgtgtttcgcttttgttccttttgtgtgatgtgatactcagagcactgctttgcctggggaggggggggtgcgtagatacgggattgagatggagggatgagc

SEQ ID NO: 48071 - DNA, 1030 bp, Homo sapiens
  misc_feature (1)...(1030): n = a,t,c or g
aaatgttcctgtgcttcaacctccattacccttggaaatgccaccacccccacctccacctccagaatcacctccaccccctcctccaccacctcctcctgcggaagatggtgagatccaggaggtagagatggaggatgagggaagtgaggagccccctgccccaggaacagaggaagatacccctttgaaaccttcagcacaaaccacagttgtaactagccagagttcagttgattccaccatctctagttcttcttccactaaaggaataaagaggaaagctacagaaattagcactgcagtggttcagaggtcagctaccattggcagttctccagttctctatagccagtcagctatagctacaggtcaccaggcagcagggattggaaaccaggcaacaggaattggacatcagacaataccagttagccttccagcagcaggaatgggtcatcaggccagaggaatgagcctgcagtcaaattaccttggactagcggcagcacctgcaattatgagttatgcagaatgttctgtcccaattggagtgactgctccctcattgcagccagttcaggcccgaggtgctgtgcctaccgctaccattatagaaccaccaccaccacctcctcctcctcctcctccaccaccaccagctcggtcgtttcgcacactaggtggcatacaggcagcagcaggtgttcatatccttgattttgagaatttcccctcaagtatgtggcagtaaatacaacaagacactctatgtattaatgtctccattgtcttaaccctgttccaaaacaaaattcacctcctttctttatgtgaatgtattctccataaaattccagtatttaaaaagcagtttactgttctgtactttctgttgtatcacaatcaggtaaaagtcactttaaactgaggaaacggcaaattgtgttttaaagctctttgtatttctccagtttctgaccttgtaaatttgtatatatgcactaataaagctttttttanaatcctg

SEQ ID NO: 48072 - DNA, 1412 bp, Homo sapiens; identical to SEQ ID NO: 5151
  misc_feature (1)...(1412): n = a,t,c or g

SEQ ID NO: 48073 - DNA, 1905 bp, Homo sapiens
  misc_feature (1)...(1905): n = a,t,c or g
gctggttcagacagacaagtgataccagcaaagagtaaggtctatgatagccagggtctcctgatttttagtgggatggacctctgtgactgcctggatgaagactgcttaggatgtttctatgcttgtcctgcctgtggttctaccaagtgtggagctgaatgccgctgtgaccgcaagtggctgtatgagcaaattgaaattgaaggaggagaaataattcataataaacatgctggataatctgcggtaccaaactatggagcctttaaaggtctttatttctaaaaatctgttactctaagatacattttaagcttgattatcatatgacaaagattttaaaaccatctcagtgtgccctaatttttcatcttgggtgctttaagattcactatttgatataaattcagataggctatttttcagtagtcagcgttaagcctgtctggatcaatataaacaagtagggtgtaggcagtcctctatttgcatgtttcccatgggcacaaatttcagtgacctagatttagtttaaataccagtttccttaccaggaaggaaagaaaactggtaaggaaactgttgttgttaaaatctaggttaaaattttagttagcacattgtaactgagtaattacatgaagtacaaacctctctgctagctcttcagtctacaaatcgctatgtaaataacagatatgcttcatgattgtgaccagtcatgttatttctttcaaattcttccagtggtttgtccctgtgcatctgttaattcagttcacgtacagcagagcatgtagttatgctgtctctctgtcatctacttgacattctatagaagtgaacactcgaaagaactggtcaacaaagatgaaagtgcagcaaagcaatgaaaaatgataacactggaagtgaaattttaatcaaacataaatgaatttgtagaagaagtcactgaccatgggaatgttgttcttgctgctgtgtattcataggagcttagtgaaggcaaacttaccaacacaaataagcaaagtggttgcaataaagacagatacgtcccagaggaagtgatggttaaaaaaaaaaaactttacattaaaagatatttaatgtgaatataggaaatatttcacaacattgaaagcacaagcaataaaagggtggaagctgacccaaacttagaaggagtatggcagtttgccgngaacataaaagatgcttactcagtatggtaagttacttgccagaaaaaaaggcaagccctattcaaactactttgtttttacaatgaaataaaacactttaattctatttctaatgttttaaattacagtgtactaaatatttttaaacatttttgcatttttttctacatttataactggtcttaagagtttttaatatttgagcagaaccttaaaggtcatggaacaatcatcattttccctattgattattaagattgcaggaccatttttatggtcccacagtaccatgtgaaatgaggatcgcttgtagctgggaacagtgcttacttcagggaaaactgattttgatagaaccgactagttgagtattaaactgttttggaaataatttatatatctaagtgctgaaatatatttctcttctccccacttattcaaataaaaaagttttaatactataaacttttcattgttagcgccacgcagtccttgtcaagattgttctgggggacaaaaacttgatgtataaagcatgaatatacacacagtacttaaacagataccatatctgtggtattaaaattttgggggtggttgattaggattgtaaaaagactccttagggagtgaggatggaaaagagaaacactggttaatacagagtataaataaattttttggaaattgattg

SEQ ID NO: 48074 - DNA, 779 bp, Homo sapiens
cgacttttttttttttttttttaagtcacaggcgcatttattattgtctggaacatcaaggcctttcctcccctggcagtggcacaagggagggccaactctcaggaggcggccacgctgccaccagcagcaggcccatggggtggcagggtcatgggcggcagaaacagcgccttcagcttgcctgacaggctggcgatctcaggatcctgggcttcgtaggacttgaccaagcgagcaaacttaaggacaccttccccgtcgcagctgaagccataggctttgataacctcctgctggatctgcgtggccacgggcagcacgaattgcagcatcttacccatgtcgtttgcaggcgttatcccgagcctcgtccatgcgcactgcattctccggggcggagaacgccttggatcacctccgcgaggaccacctttgcttgctcagcgctcaaggccgccggttgggtcgaggcggacgcatagcgcgtctgaagctctaggttcagcggaggtaaatggaaaactcacgaataaagagccacgtcctacaaccgttcccaacggcccctgggagcggaaaggaaacagcatccggcgcagccggaagcgcccaggcggggcccaaaccttcataccccaagcttacaactgcatcaagaccaccaaaactacccataatttctgcacagtgaaaacaatctatcattggcaacaaacatcataagaggggctttccggtaaaaaaccagaaagcctactagacaaattctaaaagag

SEQ ID NO: 48075 - DNA, 1378 bp, Homo sapiens
agcgtcggactaccgttggtttccgcaacttcctggattatcctcgccaaggactttgcaatatatttttccgccttttctggaaggatttcgctgcttcccgaaggtctttggacgagcgctctagctctgtgggaaggttttgggctctctggctcggattttgcaatttctccctggggactgccgtggagccgcatccactgtggattataattgcaacatgacggcttggaagagctcgtgggcgtagcgacaacgcgggcgcagaaggatgcagacggtgaccgccgcggtgggagggagcttttggtgggccgctcagcgccaggatcgcctcacagtgggggtgtacgagtcggccaagttgatgaatgtggacccagacagcgtggtcctctgcctcttggccattgacgaggaggaggaggatgacatcgccctgcaaaatccacttcacgctcatccagtccttctgctgtgacaacgacatcaacattcgtgcgggtgtcgggcatgcagcgcctggcgcagctcctgggagagccggccgagacccagggcaccaccgaggcccgagacctgcattgtctcctggtcacgaacccttcacacggacgcctggaagagccacggcttggtggaggtggccagctactgcgaagaaagccggggcaacaaccagtgggtcccctacatctctcttcaggaacgctgaggcccttcccagcagcagaatctgttgagttgctgccacaaacaaaaaatacaataaatatttgaaccccctcccccccagcacaacccccccaaaacaacccaacccacgaggaccatcgggggcagagtcgttggagactgaagaggaagaggaggaggagaaggggagtgagcggccgcccccagggcggagatcccgggagcttgcggccccccgatccgatggagaaggggggacccaggccagcaggagacaggacccccgaagctgaggccttgggatggagcagaagccggagtggcggggcacgctgccgccttccccatcacggagggtccagactgtccactcgggggtggagtgagactgactgcaagccccaccctccttgagactggagctggcgtctgcatacgagagacttggttgaacttggttggtccttgtctgcaccctcgacaagaccacactttgggacttgggagctggggctgaagttgctctgtacccatgaactcccagtttgcgaattatagagacaatctattttgttacttgcacttgttattcgaaccactgagagcgagatgggaagcatagatatctatatttttatttctactatgagggccttgtaataaatttctaaagcctctg

SEQ ID NO: 48076 - DNA, 1363 bp, Homo sapiens
  misc_feature (1)...(1363): n = a,t,c or g
atcagttcctagaactcaagcacagctcccgccgatcctggggcggcgccgnctctccacccgcagcctgcggaggcggggacttgggtgtcggcttttctgagggtgatcttttgttttccgagtttgggattcggctgttgggaaaaaaaaatcgcgtttgtaccttttccccccacagatgagaagtgtttgtaatggatttgtatttttcttaattttatgctctttagacgtttaaaagaaccaaaaaagaaacttttgcttcttcgttttcggttgggatttgcagtttaatggcctcagatccttctccagatccccagggtttctttgtcttatttatggagaaaaaccggtcactttgtccagcgcactgtgaggcccccactcaggccagccctggcccccccttggtacttggaaccgaagttacagattatattaaaataataatgtacaaaactttgtttttttgccttattatgcagaagtgtaatttcttttttggtttgtttttttaaaagcaaacgaaacgtgtaaatagtctgttgatataaatatatgacgttactaaattcttaatctagatagactttataaaaaccgtttccagaaacccctctggttgtttgtctaacatggtcacaaaaacccagggcgctgctggctgtaaacattatcagaagtttaatgggcagcaactttccttcaactatggcaaggcgcttcccggcgggctctgctggttgggggaggaaggttccgcccagcgacctcccagcccctggggtccgtgggaggggttggggtccccccaggcagagcccctggggccaggcagaacagcactcctggggcggctcctgtgggcttcaggactggccggctccagccgcaagggcgatgctgtggacgtttgtgtggatggtgcagtgttcttggaatctgtagaccagatcggtggaggtatagaagtgcaagagtctaaaggctgattaacacatacacacacacacacacacaaaatcactgctgtgtgttttcttccgcctgaggcatcagcgtcacctcggtgtggtcgtcgcctcccaggcccttggccctggcctcctctcagtttgggttttgccctcacccacatgagcccccccatgccctgccccccttgcggccttttgtgttccccgatgtctgggctgtgtcctgccgggattcccagccttcggggtcagccgtcgagccacttgctttgctcagttctgtgtttcagccacatttccacggtggaccctgtttgttttaaatattctgttcccatgtcaatcagtgacgataaatacagccttgatttggatgaaaa

SEQ ID NO: 48077 - DNA, 1556 bp, Homo sapiens
  misc_feature (1)...(1556): n = a,t,c or g
ttttttttttttttttgagaattcttctgtattttattgcactcaacatttaatagaagacatttacattatttttagaaaatccaccgatgttgcacaatggcacatatttgtaaagacaaggctcattaattcagatatttggaattcaaaaatatttaaagttaaccacagcataatgaatcctcaacgtccagagttctacaaaaatccagcaaaacttacttttgctcattcatcagttctatgtcactccttagtttccctaaaaaaatatggctttataaaaagtagcttctataattcacaaaatgaagagttttattataatttgagtatcatctctgtatcaccgacagcacagctttagaaaattattgcttttcttattatcttattatttcaggtttcattacacatcgagtacccatgcaggactcactacattgtataataactatgatctatagtgataaaaatatagaagtatccttggattttaatcctaaaagcaggggggaaaaggccccctatcctaatggtaaccaaatccaggggctacccctaatatatcgatcaaaccacttcttatggctttgccttatagttgctcatggtcctttcaaaatgatgtggtagctaccttcttttctgacaaaggattattttcaacagagcaattatttctgagcccaaaataaaccacattaaataagaagaaaatcttcagtgtagaaagaaaaaggctcattgccgtgaaatagcagcaggcatcgggctctgtgagcttttcacacatcctcaatcaacccagctcaaggcgttactgagttcatctagtaagagcactgagcggtctctagtgctggaggggaattactcaattagccaaaggcagaataatctttaagttatgcaccagtaatttatacaggttttctaaaatttaaacaaatgctgaagagactatagctattatatgattaatctgaggtgccaacaaagcatttttgcatgataatagtagggccattctttttccttgtgtcttaacaaggaatttcagctttcccctctcatttaaaaaaataaataaatgataatttaaaactttcactgaaatattaaatttttctaattaatcagctaaaagctacaaaaatttcaaaagtgttaatctgaacacttaaagctaatgtagaaatttttgataagaatatccagtgcaggtatatacaactcaaaatcttcacagctaatgatgatctctgttagcgtttttaagagtgctaacacaaagtactcttaatagcttttaaatcatgtttaacacagtgtacacaagtcagtccaacagttagtgttaattactaataatatatgaaaaccctgccaacacaattgctgctacatcaccaatataattattaaccactgtcggaaaaacacacataaattcaggtaagactaaaagctgtctcacaaaaagnaaaaagnaatccaatggatccactaatgctatcaaaagggacatgcaggaatgtaacatgacattt

SEQ ID NO: 48078 - DNA, 427 bp, Homo sapiens
ggcacgaggctgctcagcatggctgctttagggactgttctcttcacaggtgtccggaagggtgcactgcagcgcagccgcttgggcgggcggccagtggcgactacagcagggactggctgccaacccctccggctacgggccccttaccgagctcccagactggtcatatgcggatggccgccctgctcccccaatgaaaggccagcttcgaagaaaagctgaaagggagacgtttgcaagacgagttgtactgctgtcacaggaaatggacgctggattacaagcatggcagctcaggcagcagaagttgcaggaagaacaaaggaagcaggaaaatgctcttaaacccaaaggggcttcactgaagagcccacttccaagtcaataaaaagcaactcctgcctcccttcaaaaaaaaaaaaaa

SEQ ID NO: 48079 - DNA, 927 bp, Homo sapiens
  misc_feature (1)...(927): n = a,t,c or g
accgccgccagagcaagcgtccatgagcttgccaagtgttctctgctggctctttcctgccactgccaacacgaggttggaatttggcagaaaattgtgatctccagtccgtgtggtgatgctggtggtgcaggttttgtttgttcctttcgggtggtgacttcggccttttgtttgacctttgcctggttagacccaagggctgctaccttttccttggacggctcatgtcaggtcttgcaggatcagtttaatggccacagaaaggaagcaggacagcagggcccctctcacccacaactggaccaggtccagggattctagcagtcctggggcactgacctttgccagctacctgggggagggcttgccactggaaaacctttcaggccgcccccatcagtgggctccaaagtaaatggctgaaaacaaaaatgtttcacttcctaacagttttcctttttccactgtgtgactgaaagctcctatatcattttatatttctgaatctataaaacaaaacaaacaagcctgacagtgtctggaggagccaaaggtggcctccctgtccccaaatatattggctatatgagagtaattttacccctctacgtacctaaaggcacccagttcactagtctgtggggtcctggagcctgtntcttctttctggaggttcaaactgaatagcaataattacgttacccaaagcatgtggaggaaaagtgaaccagccacggagacgctggcccacgggctcggcctgcggtgtggcctgctttgctcaccagcgtcanccgctcatttccttctcatgaagtcccatctggtcatggggacgagggccgggagngcaccgngtagccttttncacanttggggattaggggagtgagaaaagatttgggncattgantgcaaagtcaa

SEQ ID NO: 48080 - DNA, 1232 bp, Homo sapiens
acggcagccatcgcgctttgcagttcggtctcctggtgtacggccaacgccaagtaggggattgctttccctccagtcgcagaccctatcagatttggatatgtccttcatatttgattggatttacagtggtttcagcagtgtgctacagtttttaggattatataagaaaactggtaaactggtatttcttggattggataatgcaggaaaaacaacattgctacacatgctaaaagatgacagacttgggacaacatgtcccaacattacatcccacttccgaagaactgaccattgctgggcatgacgtttacaacttttgatctgggtggacatgttcaagctcgaagagtgtggaaaaactaccttcctgctatcaatggcattgtatttctggtggattgtgcagaccacgaaaggctgttagagtcaaaagaagaacttgattcactaatgacagatgaaaccattgctaatgtgcctatactgattcttgggaataagatcgacagacctgaagccatcagtgaagagaggttgcgagagatgtttggtttatatggtcagacaacaggaaaggggagtatatctctgaaagaactgaatgcccgacccttagaagttttcatgtgtagtgtgctcaaaagacaaggttacggagaaggcttccgctggatggcacagtacattgattaacacaaactcacattggttccaggtctcaacgttcaggcttactcagagatttgattgctcaacatgcataacttgaattcaatagacttttgctggttataaaacagatgttttttagattattaatattaaatcaacttaatttgaatgagaattgaaaactgattcaagtaagtttgagtatcacaatgttagctttctaattccataaaagtacttggtttttacagtttataatctgacatcaccccagcgccatttgtaaagagcaactttccagcagtacatttgaagcactttttaacaacatgaaactataaaccatatttaaaagctcatcatgttaaattttttatgtacttttctggaactagtttttaaattttagattatatgtccacctatcttaagtgtacagttaataattagcttattcaatgattgcatgatgccttacagttttcaataacttttttttttatgcaaacgtcatgcaataaaacaaactctaatgtttggcaaaaaaaaaaaaa

SEQ ID NO: 48081 - DNA, 528 bp, Homo sapiens
tggcggatgacaaggattctctgcctaagcttaaggacctggcatttctcaagaaccagctggaaagcctgcagcggcgtgtagaagacgaagtcaacagtggagtgggccaggatggctcgctgttgtcctccccgttcctcaagggattcctggctggctatgtggtggccaaactgagggcatcagcagtattgggctttgctgtgggcacctgcactggcatctatgcggctcaggcatatgctgtgcccaacgtggagaagacattaagggactatttgcagttgctacgcaaggggcccgactagctctaggtgccatggaagaggcaggatgagcagctcagccttcaggtggagacactttatctggattccccagctgttatccatttgctatctccaactttcctgccaccttcatccttgcctcccttcctgcagattgtggacagtagttcctcagcctgcaccctggattccttcttccccttcctagctccatgggactcgccccaagactgtg

SEQ ID NO: 48082 - DNA, 611 bp, Homo sapiens
  misc_feature (1)...(611): n = a,t,c or g
ccttccgccccctttttttttttttttttttttcccctttgtgtgcggtatttatttcaaatgttttttaaaacagcactgttatttctcaggacaagagcaaaaatcaccccctgcagaagcttgggaactatgtacagaactttacagaatagaggcaatactttagcttaagcctgtctgctgaccagagaatggaattctgcgtggactcaaggaacaaaaggaaactaggcagggaaggggaagaaaagtgcccatctgaatcaaacttcagctgccatcagggcacatcttgtggtggtcacagattgtaggctgttttttggaagattcgggttcaagcacaggattccatttgtctacttggctacaccccctggctgaggtgccatgaggtcaatgtcactcaagttcctggccagccaaactcccgcagcaaagagtccccaaatttagtatcaagttcctccggaagtcattcctatcagtggcaaagcggtagacgccccgaagccaatctcccacgttgtccggtatttcgggagtttcattagccgagccagcagcgctcaccgggacagtgctggaagccatagtgtcaangtcgc

SEQ ID NO: 48083 - DNA, 740 bp, Homo sapiens
  misc_feature (1)...(740): n = a,t,c or g
tgccgcctcctcctgggctgggcgcggtgtctcgtcccctcgcggagcgctcctgccgccgccgccgccgcctcctcattcatcctcgtgcaccataggcggcacaggcaccaagatgtccaaccgagtggtctgccgagaagccagtcacgccgggagctggtacacagcctcaggaccgcagctgaatgcacagctagaaggttggctttcacaagtacagtctacaaaaagacctgctagagccattattgccccccatgcaggatatacgtactgtgggtcttgtgctgcccatgcttataaacaagtggatccgtctattacccggagaattttcatccttgggccttctcatcatgtgcccctctctcgatgtgcactttccagtgtggatatatataggacacctctgtatgaccttcgtattgaccaaaagatttacggagaactgtggaagacaggaatgtttgaacgcatgtctctgcagacagatgaagatgaacacagtattgaaatgcatttgccttatacagctaaagccatggaaagccataaggatgagtttaccattattcctgtactggttggagctctgagtgagtcaaaagancaggaattcggaaaactcttcagtaaatatctagcggatcctagtaatctctttgggggttcttctgatttctgcattggggtcaagggtccgnacagnactatgatgaatcccaggggagaattat

SEQ ID NO: 48084 - DNA, 1100 bp, Homo sapiens
gtccttctctgtctctttctctctgactttctgcgctgcgccttgctggccggctcgtcttcgctcacctccaccttattgaagatcagcccgggcggctcccgcggctccgtgcaggccccctctggggttgcctccaccacctcctgggcctccatggcctcctcagccttcctggccttctctttcgcccacagctcctttcgcttcctcttcttccggtcccgttcctgctttttcgtccttttccccggttgctgcttgctgtgagtgtctctagggtgatacgtgggtgagaaaggtcctggtccgcgccagagcccagcgcgcctcgtcgccatgcctcggaaaattgaggaaatcaaggacttcctgctcacagcccgacgaaaggatgccaaatctgtcaagatcaagaaaaataaggacaacgtgaagtttaaagttcgatgcagcagatacctttacaccctggtcatcactgacaaagagaaggcagagaaactgaagcagtccctgccccccggtgagtgagcctgaagtcacttcaggggcgggtggggtttggaagattgctgtgtgtggccatgttgtatcttgttttgaatccctctcagatttcagagcccattttatggtctaagaatctgctcttgctgttgggagtgtgaggaatagttgtgattctcagattatataccagtacccagaaatccatttccttagccagaagagcggttagagctcatttaatcctgttcacgaccccttcgaggttggtgctagtactgatagtccccattttttacaggggaacagatgaaatataatagaccaagtctttttatcgaatataatagaccaagtctttttatcaaacactaaatattttaacccgaaacttcgctggtggatctaatttctgaaccttgtgtgctctctttagcttaagtacaaaatttagacaagcagcagcaactcagatgtgtcttctggatggcttacttttgtctctttccctctaggtttggcagtgaaggaactgaaatgaaccagacacactgattggaactgtattatattaaaatactaaaaatcct

SEQ ID NO: 48085 - DNA, 1180 bp, Homo sapiens
cgtggctgaagcggccccgggagcatgagcgggcagcgcgtggacgtcaaggtggtgatgctgggcaaggagtacgtgggcaagactagcctggtggagcgctacgtgcacgaccgctttctggtggggccttatcagaacaccatcggggccgccttcgtggccaaggtgatgtcggtcggagaccggactgtgacattaggtatttgggacacagcaggctctgagcgctatgaggccatgagtagaatctactatcggggtgccaaggctgccatcgtctgctatgacctcacagacagcagcagctttgagcgagcaaagttctgggtgaaggaactgcgcagcctagaggagggctgccaaatctacttatgtggcaccaagagtgacctgctggaagaagaccggaggcgtcgacgtgtggacttccacgacgtccaggactatgcagacaatatcaaagctcagctctttgaaacatccagcaagacaggccagagtgtggacgagctcttccagaaagtggcagaggattacgtcagtgtggctgccttccaggtgatgacagaggacaagggcgtggatctgggccagaagccaaacccctacttctacagctgttgtcatcactgagtcagcactcacctggcctgggggaattaaaggaattccccgtaagggctggacccagctcctttctgggcttgggtagtcaaatgtctgagctaccccaggtcctcatgtcagcagagtggcgcctgcctgtgctggcccatggaacggagacagcattgggctgactgtgggcatgaggagggataaggctgatttggaccccaggcttctgccctggacagcacttgtgtctgcagattatttaagtggcttttgatctgtaaataaaatcagtgcactgtgcatcacacccagcccctttccctgctgtgtggattaggtgtcaagacacctagttctttctggggccacccggctggcctcactgcttatattaaggctcctcccaactctcattttcctttggaaaacaagacttttttccccatggttaccgctgagatactggggctgtagtagtataaaagctcacagttccttctgagtgctgaaaagagtgcatgagttgcttcgaaataaaagggtcaagcattcctacctg

SEQ ID NO: 48086 - DNA, 3058 bp, Homo sapiens
atttcaaagagaatcccaacctcagagataactggaccgatgcagaaggctattatcgtgtgaacataggtgaagtcctagataaacgttacaatgtgtatggctacactgggcaaggtgtattcagtaatgttgtacgagccagagataatgcaagagccaaccaagaagtggctgtaaagatcatcagaaacaatgagctcatgcaaaagactggtttaaaagaattagagttcttgaaaaaacttaatgatgctgatcctgatgacaaatttcattgtctgagactcttcaggcacttctatcacaagcagcatctttgtctggtattcgagcctctcagcatgaacttacgagaggtgttaaaaaaatatggtaaagatgttggtcttcatattaaagctgtaagatcctatagtcagcagttgttcctggcattgaaactccttaaaagatgcaatatcctacatgcagatatcaagccagacaatatcctggttaatgaatccaaaactattttaaagctttgcgattttgggtcggcttcacatgttgcggataatgacataacaccttatcttgtcagtagattttatcgtgctcctgaaatcattataggtaaaagctatgactatggtatagatatgtggtctgtaggttgcaccttatacgaactctatactggaaaaattttattccctggcaaaaccaataaccatatgctgaagcttgcaatggatctcaaaggaaagatgccaaataagatgattcgaaaaggtgtgttcaaagatcagcattttgatcaaaatctcaacttcatgtacatagaagttgataaagtaacagagagggagaaagttactgttatgagcaccattaatccaactaaggacctgttggctgacttgattgggtgccagagacttcctgaagaccaacgtaagaaagtacaccagctaaaggacttgttggaccagattctgatgttggacccagctaaacgaattagcatcaaccaggccctacagcacgccttcatccaggaaaaaatttaaacaagatgaagaaactccaagggtttgagtaaatacaaagactgaagaaatttcacagcagtttattaatgtatataaacttataaatatttctccagcaaatttgaggaagcatgatatatttgaattaacaccaagggtgatatttcttttagagatgttagttaatctgttttgtgtcttacgtgaaatttcactgtaggactgttttaaattgccaaggactggcacaaaattacagtgctaatgtatatgggttggcagttcacataaaggacaaaaggcatctgtttatggaaatggggtaggtaatattgggtggttgatttgttcttagcagacttggcttcattttggtcttgagataaaatggccagcataaatgctgtttatattcacgttttcctaggtgtgtgtgtgcaggccacagcagcatgcccttggtgtagtcagtgccgaaaggggtctgttccttcttgagcctgcctgcagggatggtctccttttaaagcaggttgtgtgcagcattcagtacactgaaggtaagctaaaccatcaacatctctggtgttttaagatgttattttattggaacaactgacaaatgagggatgttagctttgtggcagaattccctgcatgtgtgataactgatcttgttttattttttgggcattgcaactgtggcatagttacaatttctgtttgttcatcacatttaaaattggaagagaacgcgcttgatggatagagcgccttcagtgtactgtttcttattaactttactttttttaaatcaacttgctatagactttatatacattttgttaaatatagttcctagtgacatagaaacgatgcgtagttttcatttactaattacaaatgttgaggcctaattctgaaagtcctcatatttaaaggctagacaacgtaatgaaatttttaactatttgtatgtcattttgaaagtgtactgctttatggtaaaagtgtttttcatttgttcattgttttcattatttgtgatcatgttgtctttcaatacaggcataaaccttccactcttgaacaaagcagctgctttttaaaagcggtaattgcttctttaccttttatttcttttgtaaatgaagcttttctttaagaatgtgactttaaagtgttgtctattgcataaaacagttgacactcacttattgtaaagtgaagattgttctactgcatgtgaagtggaccatgcagatttctgtatgttctcagtatgcatcactagataataaagtcttttgtgaacaaggcatttgtagccatttttaaaagtttttgtcttcagtgctggtaagtcaggtaaaccataaatagttaaaagcaaccttttgtttttttcctgaaagtttttaattgaaagtattattagttaaagatgtaaacctagccaaaattaccagtttattaataattaggatcctaattatttcaaaaaatcctacaaatattgtcagctttcagtgtagtgagattattcctgtaggttatggggtataattcaggatttaactaatgtttctgctattttctcacttttccttttgatggtgcggaaagagaaaaaggaaaacggggcacaggcccattcgacgccttctccaaggggtctgatttgctgagacaccagcttcaccttcttaacaaggcacctaattacaacaagcatgcacattttggtgcattcaagaatggaaaatcagaatagcagcattgattcttctggtgcagctcagtggaagatgatgacaaccagaagacatgagctaagggtaagggactgttctgaagaacctttccatttagtgatcaagatatggaagctgatttctgaaaatgctcagtgtgtactctaattatttatggtaccatttgaattgtaacttgcattttagcagtgcatgtttctaattgacttactgggaaactgaataaaatatgcctcttattatcaa

SEQ ID NO: 48087 - DNA, 2954 bp, Homo sapiens
  misc_feature (1)...(2954): n = a,t,c or g
ggctggagcagagcctgccgcgaacccccggagcccacgatccctcgtgccatccctcgaatccaccagcacgagcgtcccacccgcgcctgggaccatggccactgactcatgggccctggcggtggacgagcaggaagctgcggctgagtcgttgagcaacttgcatcttaaggaagagaaaatcaaaccagataccaatggtgctgttgtcaagaccaatgccaatgcagagaagacagatgaagaagagaaagaggacagagctgcccagtccttactcaacaagctgatcagaagcaaccttgttgataacacaaaccaagtggaagtcctgcagcgggatccaaactcccctctgtactcggtgaagtcttttgaagagcttcggctgaaaccacagcttctccaaggagtctatgccatgggcttcaatcgaccctccaagatacaagagaacgcattacccatgatgcttgctgaacccccacagaatctgattgcccagtctcagtctggcactggtaaaacagctgcctttgtcttagccatgcttagccaagtagaacctgcaaacaaatacccccagtgtctatgtctctccccaacgtatgagctcgccctccaaacaggaaaagtgattgaacaaatgggcaaattttaccctgaactgaagctagcttatgctgttcgaggcaataaattggaaagaggccagaagatcagtgagcagattgtcattggcacccctgggactgtgctggactggtgctccaagctcaagttcattgatcccaagaaaatcaaggtgtttgttctggatgaggctgatgtcatgatagccactcagggccaccaagatcagagcatccgcatccagaggatgctgcccaggaactgccagatgctgcttttctccgccacctttgaagactctgtgtggaagtttgcccagaaagtggtcccagacccaaatgttatcaaactgaagcgtgaggaagagaccctggataccatcaagcagtactatgtcctgtgcagcagcagagacgagaagttccaggccttgtgtaacctctacggggccatcaccattgctcaagccatgatcttctgccatactcgcaaaacagctagttggctggcagcagagctctcaaaagaaggccaccaggtggctctgctgagtggggagatgatggtggaacagagggctgcagtgattgagcgcttccgagagggcaaagagaaggttttggtgaccaccaacgtgtgtgcccgcggcattgatgttgaacaagtgtctgtcgtcatcaactttgatcttcccgtggacaaggacgggaatcctgacaatgagacctacctgcaccggatcgggcgcacgggccgctttggcaagaggggcctggcagtgaacatggtggacagcaagcacagcatgaacatcctgaacagaatccaggagcattttaataagaagatagaaagattggacacagatgatttggacgagattgagaaaatagccaactgagaagctccaccagccactgatgccagccctggcactgcccctgcacaggagacaagtgcgttcagggcacaggccccgacatcaccccaaggacaacggcacaagtagagagaaactacctacctcacttcaaattatgtttggacttgacaaaaatgtatgcaaatgatggggggcaatagaagaaaaaatttgcattttgggaaaattgggtccttttccccattttttaaagccacattcccccatctttataataatctggtcacagtggtaagtcgctgggccccccaggaccccctcctgattttggctaggcatcgtggaaccagctccagcccctgaagaaacgatagatgtgcaggttgtgcggaagaggctgagtggaaaatggtgtgagccccaccgctgtgcatcgaatgagggaagtggcagcagagaggccagagctgccccctctctgtctcttcaatggacccttcacaagtgtttctcctgcccttggggctgtcttccttctcctgaaatccagagactttcttgctcatcccttctccctttcacttctgttctctgctgcagaaagcagacttgcatatccctgatgagcagctcggctacttttgtaaacttcagatttggagagaaacacgaaagtctgaatcctgaccccttgagagagagtgatctgggcgagggccgatgaaggggctgggcctggtcttgccttctcttctctcggttgctccctctgcctaggcccctggtactcagtcacggcagccaggagaccccaggtgagtttctgagcgcatacgtagttggttcttacccccaggtgtcacacggggccgagagctgagcaagaatttggaatggaagttatgaccaagggaattatgctgttcatttataatagtggacattatggagagctctgattcctacataatatgaataaggatggatannnnnnnnnnnnnnnnnnnnnnnnnnnnnnnnnnnnnnnnnnnnnnnnnnnnnnnnnnnnnnnnnnnnnnnnnnnnnnnnnnnnnnnnnnnnnnnnnnnnnnnnnnnnnnnnnnnnnnnnnnnnnnnnnnnnnnnnnnnnnnnnnnnnnnnnnnnnnnnnnnnnnnnnnnnnnnnnnnnnnnnnnnnnnnnnnnnnnnnnnnnnnnnnnnnnnnnnnnnnnnnnnnnnnnnnnnnnnnnnnnnnnnnnnnnnnnnnnnnnnnnnnnnnnnnnnnnnnnnnnnnnnnnnnnnnnnnggatggataaattgtagcgtatgcaccattcattatgctaagacattttaaagtaattatgagaaacgctctactaatgatttgtttttatttgtatttttctgcttattagacaaatatatactcattttaaaaaggaaaaaaaaaaaaaa

SEQ ID NO: 48088 - DNA, 2313 bp, Homo sapiens
gcggggcttggacgggattgtggcggtcctctctcccaattcggaagctacagctacctccggacgctctcaagatggcgacctctctgggttccaacacctacaacaggcagaactgggaggatgcggacttccccattctgtgccagacatgtcttggagaaaacccatatatccgaatgaccaaagaaaagtatgggaaggaatgcaaaatctgtgccaggccattcacagtgtttcgctggtgccctggagtccgcatgcgtttcaagaagactgaagtgtgccaaacctgcagtaaattgaagaatgtctgtcagacctgcctcttagacctagagtatggcctgcccatccaggttcgtgacgcaggattgtcttttaaagatgacatgccaaagtcagatgtcaacaaagagtactatacacagaatatggagagagagatttctaactctgatggaacacggccagttggcatgctggggaaagccacatctaccagtgacatgctgctcaaactggcccggaccacaccctactacaaaaggaatcgaccccacatttgctccttctgggtgaaaggagagtgtaagagaggagaggaatgtccatacagacatgagaagcctacagatcccagatgacccccttgctgatcagaatattaaagaccgttattacggaatcaatgatcctgtagctgacaagcttctaaagcgggcttcaacaatgcctcggctggacccaccagaggataaaactatcaccacactatatgttggtggtctaggtgataccattactgagacagatttaagaaatcatttctaccagttcggagagatccggacgatcactgttgtgcagagacagcagtgtgctttcatccagtttgccacacggcaggctgcagaagtggctgctgagaagtcctttaataagttgattgtaaatggccgcagactgaatgtgaaatggggaagatcccaggcagccagaggaaaagaaaaagagaaagatggaactacagactctgggatcaaactagaacctgttccaggattgccaggagctcttcctcctcctcctgcagcagaagaagaagcctctgccaactacttcaacttgcccccaagtggtcctccagctgtggtgaacattgctctgccaccgccccctggcattgctccacccccacccccaggttttgggccacacatgttccacccaatgggaccaccccctcctttcatgcgggctccaggaccaatccactatccttctcaggaccctcagaggatgggagctcatgctggaaaacacagcagcccctagcaccttgtcaccactctggggctctgtggaagaaagggcacttaaaactcccagtaaatcttggaataaatatatttttccttcccttgtagtttccatggtagctgaatgtgctcagatgtgagcagtcagagactgacagccatgctttcctatacttgttcaaaggatcgatggaccgtaaataagctgccattaacacatctggttactgctgtaacatgactaataaaaccgaacgcctgttccccttacccgtgtgggggacacgcagatgagtgaattggaatgtccagcagagttaccctcccaattatatgttcattttgtatattttttggtcgggggaaaaattgacctgcagtaaaaaaacctttgaccatttttatgtccattggatactttcctttttatcatcttaaaaaaagataactagtactaatcattgtagtggcctaagtgtgatttaactcttgaagtcacaccctccgaaagatgagtagaaaccagcaccagcacagcccagatcttctctttcctctccttttcctcatttattcctaaaggaatctgaccattttacgtctctacggcccaaaaaaagacaaaaataaaaattcctttttattcctgtcaactggatggaaacacaaatttcatggagctgtgtaccatcgaagaaacctggtgtctggcatgaaattactgtaaagaacttcctgtaaaacacgttctttaacaaactgaaatgaaaagcattggagcgtctgaatgaaagacgtgacctcctgctgggactctgatggtcttcagcattcaccttcgtgtgtcttcagtgtctcattgtcatccctgcttctgtttggtcttagagtgtttggatataactgaattgtagatggtaaaggaaatttgatgtgttttttgtttttaaataattaaaacgggtcaatttttcaaaaaaaaagtcgacgc

SEQ ID NO: 48089 - DNA, 528 bp, Homo sapiens
attggacggatgttgccttttggtgcctttgcagtgggaggcggcatagctgcctgtctggggaagacagttctcccagcactcccacccctgggcacagcaggctggtactgggaggctgaacccctcttagagcctgaccttttcatctgccttctggttgtgtgaccatcactcaacagccatttcacagcccctgtaattatggcggcggggggctggggtggtggtggtgggaagggcttgtggagaggacacagtctttgtttaaaaactttgtcccgatccatccagaaaagagtaggtagcttgcatcctgacagcctggcaaagtcaagaaagttgaaggagaaacatacctttggagagggggttttctttaaaactagtgttaagaaatgcttagggattttttttttcttatttttcataactaaagctttcacccagagccggctctgtttgcactttgctgccgacattgcaaactttttggcagggtgggagactgagtctcattctgtcaac

SEQ ID NO: 48090 - DNA, 547 bp, Homo sapiens
ggccacgaggggaattgacgaacacgtgacgcggtcgggcggaccactgcagactgagcggtgggaccgaattgggaccgctggcttataagcgatcatgtttctccagtattacctcaacgagcagggagatcgagtctatacgctgaagaaatttgacccgatgggacaacagacctgctcagccccatcctgctcggttctccccagatgacaaatactctcgacaccgaatcaccatcaagaaacgcttcaaggtgctcatgacccagcaaccgcgccctgtcctctgagggtcccttaaactgatgtcttttctgccacctgttaccccctcggagactccgtaaccaaactcttcggactgtgagccctgatgcctttttgccagccatactctttggcatccagtctctcgtggcgattgattatgcttgtgtgaggcaatcatggtggcatcacccataaagggaacacatttgactttttttttctcatattttaaattactacaagattattaaagataaaatgatttgaaaaacta

SEQ ID NO: 48091 - DNA, 1595 bp, Homo sapiens
tgcgaccgccgagttcaagggcgacttgtggttggagtgagcaggctcctggcttccagggcagcaaaaacccccaagcactttctagaaggaatgtgtttcattctgactgtaaacacatttgtaaatgctgagaccaaaccccgacttatggatcctgagccacggccgtcactggccccgctaagcctcatcaccacacggccaggccagaccagcacccgcggacgccagctccacccctgggccccgaggttcccacccgctgaggagccgggagctccgagaaacgcgccaggagctccaagaacgcaggagcagcccgcggtcggcagcaagtttgcatttctaagtgaccacatctaataaaatgaaaaacgggtttactaaaacaggtccaaagacaacacggaagataagctacaaatccagcacacaaggcccacccacaccagccccagcggcccgtggccaggacagggctgaggctccagtctcctccaaagcccagtcacacattttggtttttgcttcccctttcaggtttttaaaagctaaacctaggagcctggtgggtctgcctgtgctgggcagtgtgtccagcctgccgaggtcacgctctggtgcgcggtgccctcagtggcgccttgggtctcggcgcctgggcctcactcctgcgcgatgctcctcagcacgtacttgaccgtgtaagcaaaggctgcaaacccaactatcacaaacaagttcgccagggcgccacccaggagtccgtggtgccggttggcctgctggagccctgcgaggtttgggacggcccccggcgcatgccccgttgagcagctgaatcccgttctggacgaggtgcgtctccccgtctggaaccacgtctggcaaggggagagtctggggtctgctactgagttcgtcttgtgctttctgtttttgtttaatctcctccacgacttcaggaaataattcacaaaagactttatctttcaaattaaatgctaaactctgcactgccagttgtcttttcgtgaagtccgacgtctctatactgcccagggtggggcccttctccaccatgaagctcaggagcccagtcaggatggtggagacagaccaggccgggttccacgtgtccgggtggaaatccgtgatagaaagacacagcctggtgttgcacttaaacctcccgttgggagtgatcatatagatactgggaggtttgaaaggaaattctctgggaaaaattagttttccatgataatagccacccttcataaggggtcatctctgggcctcggacgacatagtgccactcgagaatattcgaagggaggggctcggcacagatgtaaggcaccgggtctttcttaatgcgaaggtagtcctgcttcagcctctgggttgccgtggtcggagccctcttactgctggtgctgctcatctctccctgtgctgcgcgtgggccgccgccgcgctcaggctcgccgtagtcgaggccggagcagggtgcggaaaagcggggcccgcgcccgaaacagccgcaccgccccgggattgggcccaccgaacccgccgcaggccgccgc

SEQ ID NO: 48092 - DNA, 1137 bp, Homo sapiens
ctccaccccttcttcctccctttaacttatccattcacttaaaacattagctggtcatctggtaagcccgggacagtaagccgagtggctgttggagtcggtattgttggtaatggtggaggaagagaggccttcccgctgaggctggggtggggcggatcggtgttgcttgcctgcagagagggtggggagtgaatgtgcacccttgggtgggcctgcagccatccagctgaaagttacaaaaatgcttcatggaccgtggtttgttactatagtgttcctcatggcgagcagatggaaccgggagacatggagtccctggccagtgtgagtcctagcattgcaggaggggagaccctggcaggagagagcccgcctcaattgatgcctgcagattggaatttccagaggcttaggaggaggaagttctccaatgttctgtttccaggccttgctcaggaagccctgtattcaggaggctaccatttaaagtttgcagatgagcttatggggggcaatcttaaaaagtccacagcagatgccatccggctcgaggggccatcagctttgaataaatgcttgttccagagcccatgaaatgccagcaggcacccctcctttcctggggtaaaggttttcagatgctgcatcttctaaattgagcctccggtcatactagttttgtgcttggaaccttgcttcaagaagatccctaagctgtagaacattttaacgttgatgccacaacgcagattgatgccttgtagatggagcttgcagatggagccccgtgacctctcacctacccacctgtttgcctgccttcttgtgcgtttctcggagaagttcttagcctgatgaaataacttggggcgttgaagagctgtttaattttaaatgccttagactggggatatattagaggaagcagattgtcaaattaagggtgtcattgtgttgtgctaaacgctgggagggtacaagttggtcattcctaaatctgtgtgtgagaaatggcaggtctagtttgggcattgtgattgcattgcagattactaggagaagggaatggtgggtacaccggtagtgctcttttgttcttgcttcgtttttttaaacttgaactttacttcgtta

SEQ ID NO: 48093 - DNA, 1061 bp, Homo sapiens
  misc_feature (1)...(1061): n = a,t,c or g
ggcaggaactttacagtttataaagcttttgcataagtcacctctggttcttcccaaccatcttacgacgctttattactgtgatttcagagaagaaacaggcttacagaggttaagggcttgagaccactcaactggttttaagtggaatccagaccagaggtgccggctccacgtctactgccctttccacggtgccatgctgcctcccacaaaacatccacagtgcccttggcaatgaggggccgccatcggaggtcacaggaagccttttcacagtccctctggggcatgagtggggagcagctcttctccccagagctttaaagccccatcgaggaaggggtgagaactgacctcctgaagtgcccgagtgtgtgtgtacggggagagtggactcaatttttatttttgaaacctcatgcacagagttccttatattccccaggtcccacaagagtaccaggtgccatttcagaaccacctttctaaacctctgcccacccactgaaagcaacacggcccttcacagcctggcttccttcttttgacacacagcccttccgctccagtggagaatcgccaaagatcatgaagggtaaatagtctcctctgaacccctggtctgggaaacccgtttcaaccccggggggagcccagtggccactggtgctgcccaggggctgctgtggggcagagataacacacagaggaagggtggggtggcaggagccctcccaggagcagggcttgcctgtaaacaatgagctgccgcctcgccaaggcaggaggtgattcatctcccccgctgctcagctcctgctggctgcgctcaccgggcaccaaaggactggggcagccctggccaggcgctgacgcctccccactctctgcacaggtcaggatctcaccccagcccttctggaaactggcttgacttcaaaagccttcctgggtgtgtccaaaaagtctcgtgccgaattcttggcctcgagggccaaattccctatagtgagtcgtattaaattcgtaatcatgtcatagctgttaagggnntcaag

SEQ ID NO: 48094 - DNA, 957 bp, Homo sapiens
cccgcgggagggaggagagaagcgaagcgtttccgcggttggctactcagtgtcttggtctcaagttgcctcattgcggctggccgttcccaatacagacgcatcgtttcttttttaatactccctaagaaagggaataaccttcaagctggcgggagcaatggttcacataaagaaaggcgagctgacccaggaggagaaggagctactggaagtcatcgggaaaggtactgtccaagaagctggaacattattatccagcaagaatgttcgtgtcaactgtttggacgagaatggaatgactcctctaatgcatgcagcatataaaggaaaactcgatatgtgcaaattactactgcgacatggagccgatgtaaattgtcatcagcatgaacatggatacacagccctcatgtttgctgcactttctggtaataaagacatcacatgggtaatgttagaagctggtgctgagacagatgttgtcaactctgtggggaagaacagcagctcagatggcagcctttgtgggtcaacatgattgtgtgaccataatcaacaatttctttcctcgagagagactggattattacactaagccccagggactggataaagagccaaaactgcccccaaagttggcaggcccgctgcacaaaattatcaccacaacgaatcttcatcctgtcaagatcgtgatgcttgtaaatgagaatcctctgctgacagaagaagcagccctgaataaatgctacagagtgatggatttgatttgtgagaaatgtatgaagcaaagagacatgaatgaagtattggctatgaagatgcattacataagctgtatctttcagaaatgcattaacttcttaaaagatggagagaataaactggacaccttgatcaaaagggttctggatcccacttgcattctcccgtcccttacccaagccatcactg

SEQ ID NO: 48095 - DNA, 1126 bp, Homo sapiens
ttttttttttttttaacagtacacagattgtgacattttatattctttgttaaatggttcctggtacatgttttaagtgcctctgcttctagtttaaatgaatgacccagacagagctttcaagctgtttcttagagaatgtgtggttgagcagaaatggctatccacacctgacacaggtccccacccacctcacaccctggaggcagcagcataagccccagtttccactatggtgtctcctcaatgaccagaatacccgccagttccaggggtcagcaattccattctctctctccggctcagttcagaagctgtgatggtcctgttagagagcactgcctgcaggtcaaaacctggaagaggctctcccaggccaggcgacaacccttcaggtgcaagacggggaacaaaaggcttaacctgtgataatcccaacaccttctgaaaaaagagtaacagtcatccagcaacgggccatgggtaggggcgggcggtaagcaggggacactgtcccctgcctcagcatgtcctgtccagagggtgggcacagatataggctcgcttctcaaggatctgctgggacactttcttaatctgctcatctaggttttctggagcatacttgtccagctgagagaggctgaagagattctgcaagtaagcttccacgcagaaggtgttggccaagagaacctcgtggtcgtggttgcggagcccaatgcggatggagcggctggcccgcgacagcacggccgtcatgccatacaggttgatgaggatgttggccacccgcttcagtaccagctgctcctccatgatggtcttgccaaagcggagcagcagtgtctccacggtccggccgaagcagtaggtgttctcctcaaacttgttggcactgtccgcaagactggggtgcacaactccatggttgcctgtcagccccaggtccacagttcggcccagggagtcccgaagcctccggccaacggtatccatgactgtgctcactttggcctgtttaagctcatggatcctggtagtcaggatgcggccggcatgctgcagacccgtcagggcgatgtacatccggagaatctcattggttccctcgaagactcgtgcc

SEQ ID NO: 48096 - DNA, 314 bp, Homo sapiens
ggtctctgtccacttggatatacaggcttaaagtgtgaaacagacatcgatgagtgcagcccactgccttgcctcaacaatggagtttgtaaagacctagttggggaattcatttgtgagtgcccatcaggttacacaggtcagcggtgtgaagaaaatataaatgagtgtagctccagtccttgtttaaataaaggaatctgtgttgatggtgtggctggctatcgttgcacatgtgtgaaaggatttgtaggtaagatgtttccagtcttcctatgttgtcttaaaatcttgtaaaccaccacaaattagta

SEQ ID NO: 48097 - DNA, 1670 bp, Homo sapiens
tacgaatttaatacgactcactatagggaatttggccctcgaggccaagaattcggcacgagttcacctgtcagaaagatggtcgctggttccctgagagaatctcctgcagtcctaaaaaatgtcctctcccggaaaacataacacatatacttgttcatggggacgatttcagtgtgaataggcaagtttctgtgtcatgtgcagaagggtatacctttgagggagttaacatatcagtatgtcagcttgatggaacctgggagccaccattctccgatgaatcttgcagtccagtttcttgtgggaaacctgaaagtccagaacatggatttgtggttggcagtaaatacacctttgaaagcacaattatttatcagtgtgagcctggctatgaactagaggggaacagggaacgtgtctgccaggagaacagacagtggagtggaggggtggcaatatgcaaagagaccaggtgtgaaactccacttgaatttctcaatgggaaagctgacattgaaaacaggacgactggacccaacgtggtatattcctgcaacagaggctacagtcttgaagggccatcttgaggcacactgcacagaaaatggaacctgggagccacccagtccctcttttgccaaacccaaatcccttgccctgttccttttgtgattcccgagaatgctctgctgtctgaaaaggagttttatgttgatcagaatgtgtccatcaaatgtagggaaggttttctgctgcagggccacggcatcattacctgcaaccccgacgagacgtggacacagacaagcgccaaatgttgaaaaaatctcatgtgggtccaccagctcacgtaggaaaatgcaattgctcgagggcgttacattatcaatatggagacatgatcacctactcatgttacagtggatacatgttgggagggtttcctgaggagtgtttgtttagaaaatggaacatggacatcacctcctatttgcagagctgtctgtcgatttccatgtcagaatgggggcatctgccaacgcccaaatgcttgttcctgtccagagggctggatggggcgcctctgtgaagaaccaatctgcattcttccctgtctgaacggaggtcgctgtgtggccccttaccagtgtgactgcccgcctggctggacggggtctcgctgtcatacagctgtttgccagtctccctgcttaaatggtggaaaatgtgtaagaccaaaccgatgtcactgtctttcttcttggacggggacataactgttccaggaaaaggaggactgggttttaaccactgcacgaccatctggctctcccaaaagcaggatcatctctcctcggtagtgcctgggcatcctggaacttatgcaaagaaagtccaacatggtgctgggtcttgtttagtaaacttgttacttggggttactttttttattttgtgatatattttgttattccttgtgacatactttcttacatgtttccatttttaaatatgcctgtattttctatataaaaattatattaaatagatgctgctctaccctcacaaaatgtacatattctgctgtctattgggaaagttcctggtacacatttttattcagttacttaaaatgatttttccattaaagtatattttgctactaa

SEQ ID NO: 48098 - DNA, 451 bp, Homo sapiens
  misc_feature (1)...(451): n = a,t,c or g
ttgaanacccgntatttcntgntcncgaatttaatacgactcactatagggaatttggccctcgaggccaagaattcggcacgagagagccccttgcagaagacgccgtacgaggttctccagcatttggctcaaggccccaagggcacatgtgacaagaaggcgccagctttttaaacattggaagttcttctgtgtcagttctgtgacagaacatttacttaacacatcatgaaggctagtttggatgtggaggggaatagactccatctatccatatgagctgctgcagaagaatattttgcctgctggaacctgctgtatctactcaagagtggaagttttcacagggagctgacacgtttctcccagcacaaagttgggagtgacaccagagcctcctgcaagatgcttctgattctgctgtcagtggccctgctggccttcagct

SEQ ID NO: 48099 - DNA, 384 bp, Homo sapiens
gaggcaggggaaatgactccctataaaggttgtgagagagctggttagccatacgcagaagaattaaactggacccctacctttcaccatatacaaaaattaacacaagatgaataaaacatttaaatataagacctcaaaccataagaatcctagaagaaaatctaggaaataccattctggacactggccttgggaaagaatttatgactaagttctcaaaagcaattgcaacaaaaacaaaaattgacaagtgggatgtaattaaagagcttctgcacagcaaaataatcaacagagtaaacagacagcctacagaatgggagaaaatattcacaacctttgcatccaacaatgatctaatatgcagaatctacaaagaat

SEQ ID NO: 48100 - DNA, 545 bp, Homo sapiens; identical to SEQ ID NO: 5241
  misc_feature (1)...(545): n = a,t,c or g

SEQ ID NO: 48101 - DNA, 1459 bp, Homo sapiens
  misc_feature (1)...(1459): n = a,t,c or g
gcagaggcgatagccaagtacgagatcatggaccggcaccaatcgaaggagagtccatcccgatccggctcttcctggccgggtatgagtcacgcccaccatgcgggacatcaacaagaagttctctgtgcgctattacctcaacctggtgctgatagacgaggaggagcggcgctacttcaagcagcaggaagtggtgttgtggcggaagggtgacatcgtacggaagagcatgtcccaccaggcggccatcgcctcacagcgctttgagggcaccacctccctgggtgaggtgcggacccccagccagctgtctgacaacaactgcaggcagtacgcccccagggccgagaagatgctgggcacccacccagcacccccatctaccaacaccagcggctgggggcgggggcggaccttgtgaggctcagttgacccgttacttgcaacctgaaaacaaatcatgtttttgacttaaattcttttctctggagaacccaaggggcttggggtgggaagcagtctctccttgggattctgcggccgatgtgggatagaagaggtagcatcctggaagccagcctctctggggaacatgagcccccttcctcggggggctgccttgcgtcttagaggagggagagcagagagcacgcatccttggctcctggctctctgagcttcctgatacaggatctgagcatgtccctggggattcttgagcttgccaacagggccctgggtagttcacatcttgttactccccttttgctgttccccggaggtagttggcaggagtttgggccagcccccactaagtggcaggggaagactcacgattgggaagctacctctttgggaatcttggatgtggtgatctcaagtttccacaggccacctccttctgggccactcactgctggggacccagggcacctcccttctccatcctctctggattgtcagtaatgtcctggaacagaagcctgtgggatggccttgggcacggagaagccctggggtcagtgtcgtgcacggatggcggcagtgttgaacccaggaggctgaacccggcccaccacggaagatgagtgcatggcaaccgcctggccttcacgtcgctccacttggtaaccccaaggtctgggctgttctaggtattgcttcacgtgccccagcaagcccttaacaagagggcctgggttccctgaagaaccaatcccaggaaggggccttgatccctccgccttgctgagagtgaaccctcgtctctcctcaccctccatttcatttctgggaattggggcttagtttcgaacctttgggcaaggctgttcttactaatgcccaagcccctttacccctctccctattaggttacacaggggagaccagggggcttgggcagaaggattgttgncacatttncggattcanttttgntttggccaaantaggg

SEQ ID NO: 48102 - DNA, 838 bp, Homo sapiens
cgaagatggcggagtaaggcgtgccgctgcaaactggcctctgggccgggggcgagcagcccccgggaggccgagtgcatctgttggaccgtgcgaggagaagaaaaaaaatatcggccagaggagaggaactaaccgaacattcttcctccctaccttatagaggggagtggtcatctacactaaagcaaagtgttaggcgcgtccgtgcgaagagaccaccaaacaggctttgtgttccttatcacaggaagaaaattttccttgacctttaggtgcttttatattcatctcaaaaacaaaattctgaactcaggacttggcaagtgtctctatgttgtctcctagagtgggtagtcctgcttcttttacccagttactttccctgtttttgaaatgtggctatcacttctctacacattacctccatgatttggaatggaaaaggccacttttctttttgttctgcctctcaaattcaacacagaggagctcctaggattccagttatcctgctaacatctccaggaagaaagaagcaactcacatgggtcttttgctgtttgcttaattataaagacatcattttgcaagcagaaggctgagtttcatttgaaacaggtgcttaggtggtggtatttgtgaatacttttcattccaagcaagaagactaaagaagtagcaagtatgaatgacttcagggtttaaaaaaaatgtcttccagtttcagccactaccatgataagcacagttgagactgcagcagtaaattccaaatatgtgtttctaatttgacgtgaaagatactaaaaatttatatttgtatatttaaaaaaaa

SEQ ID NO: 48103 - DNA, 1405 bp, Homo sapiens
aaacaattgttcaaaagctataaaacctgaatgaaagctgaagctgaatttataagccttgttgcatatgagccaaaagtgcaaaaagctctatataatgaactaacctgccactcgtataaatataaatatatataaatatattaaaatcagactgttctacaaaattgtgtatttgtatttttgtgtacgtacaattttctgctaagcagaaggaggatgtagtataggatgctgtgaggaagagatttggtttaatcctatttctttgttacttatttttgttaacatcaggatgcctgtctttgtcttatatgtgtatgacactgtttgggaaagctgcagtatctctcttcctgaggtccagaggccattaaaggaataaacatggggcttagaggtgtcttggccaccaaacacagggtaaggccaacagagttcgggctcccgtacgtggtgtggtgggacctggggcctggagccacttgtactcctggggtgggactgagggagggaaagggctcccccacttcaggctggtcactgtatgttgacttccctctgggaagcaaaattccacttgtaaaaatcagcttccaagacaaaagatgatccgatgtcacttctgggtcaccaggaagggacacaggatctctctgaactttggaacagaccctcatattctggggccagaagtttgcccagaaagcagcaggtggctctgcctggctgtagagcccagctcattggctgtccctgggcttcgtctccctcttccgagtagttgctgcctttcttcagatcaggttaccacaatgcctccccgctgctgacgcttcatcccccacacctccagcccccagttacctggagcttctcagaacccactttgccggtgctaaaacacaagagggggtgaaagtggctgccagtaatggccagaaaccaaccaccagaggccaggctgaaagacaagctccgggtgtccaggggctgacgggccaaccatgtggcaggtcccaggccccacccactgcgccatccgcctctgagctccacagtggtcccactaatgggaacctcctctagggagagtgatactgcaccttcacccgtaggactcatatttataacaatgtgtaatggctgtagcaaaaagcccttgtttctagatgtaaatggtcaaagaaacaagcgctctattgttttgaataaaatagttcaaatgagtcctgtatcattgtatctcctattctggattagtgccttttggacagtagactgttctgtaattaaaatgtagtatactgcttttttgtacagttttgttttaataaaacttttttttaatttgtgtttattttagtattgtacctattagagaataaaatgtataactgaatac

SEQ ID NO: 48104 - DNA, 624 bp, Homo sapiens; identical to SEQ ID NO: 5260

SEQ ID NO: 48105 - DNA, 1520 bp, Homo sapiens
gtgttctcactcctagaaaacaggaaaaagaaggtctgcggcatacgtgaggaatattcttgataatgcagtaaaaagcaagaaatttggggccaagattaacacccctcctgcaggaggaagacagccaccagcggctgctcatggggctgatggtgtctgagctaaaagaccattttttgagacacctacagggtgtagaaaagaagaaaattgaacagatggttctggactacatttcaaaactgctggatctcatttgccacatcgtagaaaccaattggaggaaacataatcttcattcctgggttctccacttcaatagtcgtggcagtgctgctgaatttgcagtttttcacatcatgaccaggattctggaagctacaaacagtttgtttttacctctgcctcctggttttcatactctgcacaccatcctcggggtccagtgtctccctttgcataacctgctgcattgcattgacagtgggagtgttgcttctcactgaaacagctgtcataaggctcatgaaagatctgggataatacagaggaaaaatgaaaaactggaaattcagtattcattgtgcgggctttcctccgcttattgggcagaagatttgtagactttgggatcatcctatgagttctaacatcatttcgcgggaaccacgtgacgcgactgcttcagaactataagaaacagcctcggaattctatgattaacaagtcatcgttcagtgtagaatttctgcctctgaactacttcattgaaattctgacagatatagagtcctccaatcaagccctgtatccttttgaaggacatgacaatgtggatgcagaatttgtagaggaagcagctctgaaacacaccgcgatgcttttaggcttatgaaaaagaaaacgcaattggatctgctgctgccattttaatcttgctcattaaccttactcctttgagaattctttaacaatatttaaaattggtaacaaaaatagtttagccataattgtttagccatgtgagtttcaggttggtacacgttcagacagaactgctgtatcacattccaattttgaatagccagtgagcaatcaagtgtagagaaatgataaatggcctaagaaggcatacagtggcataaacgatgctcttcctagtagcttaataggccacaagctagtttctgttgcactctgaaataaaatatgctttaaaaatgtagggaacagtgcttagaaaagcaaaaactaggtgtgtcattgaaataataggcataaaaattaaatgttacataagaacactatttggaaagagggtccttttaaaaactgaatttgtactaaatcagatttgccatgtccagtacagaataatttgtacttagtatttgcagcagggtttgtctttgtgaattcagatgaaacatatttatttttttttttttataaaaggttgatttaggaatattttgtcagtcattaaaaaacctgaaaacataaaaaaaaaaaaaaaa

SEQ ID NO: 48106 - DNA, 307 bp, Homo sapiens; identical to SEQ ID NO: 5266

SEQ ID NO: 48107 - DNA, 733 bp, Homo sapiens
cccacgcgtccgggaaaacgacagcacgtgttctttttcactagtagaagtgacgttggtttcatgttgacaactttgaagccatttggaagtgtttcagtggagagcaaaatgaataacaaagcgggctcctttttctggaaccttagacaattcagtacattagtttcaacaagcagaactatgaggctatgttgtttgggactttgcaaaccaaaaatagttcattcaaactggaacattttaaataactttcataacagaatgcaatcaactgatatcattagatatctctttcaggatgcattcatttttaaatcagatgttggctttcaaacaaagggcataagcactctaacagcccttagaattgaaagactactttatgctaaaagactgttttttgactcaaagcagtctcttgtccctgttgataaatctgatgatgaattgaagaaagtaaaccttaatcatgaagtctccaatgaagatgttcttaccaaggaaacaaaaccaaaccgtatcagcagtagaaaactgtctgaggaatgtaattccctgagtgatgtgttagatgcattttcaaaagcgcccacatttcctagtagcaactatttcacagcaatgtggacaattgccaaagactgtctgatgaccagaagcgctttgaaaaacgactgatgtttagccaccctgcatttaatcagctctgtgaacatatgatgagagaagc

SEQ ID NO: 48108 - DNA, 5335 bp, Homo sapiens
  misc_feature (1)...(5335): n = a,t,c or g
tttttttttttcagagaagtctttcatcggtctcatttattgcaatattttctagctttgcatccagtacaacacaatgaagtattacagtgatttttatcattgcatcagcatatacaaatacagatcaaatgcaaataaagtgtgcttacagtggtgatccaaacataaaattgcaaagggaattctctttgaaagtgtaattatttttctccaatgtaccaggtatatatttttctctatgccaggtatacatatttgtcttcatcacatgtgacaaacatttgatgacttgtcactaagtaggattcatttccatagggcaactttgaaatgtgtggtccaaatacagcattccagcacatgacctcagcatcactgggttatagtcatgtacacaaagataaaccaactcgtatatgcgtgagtgcagcccatatacaaatctcactttcagaagccagaaggcaggtgttaatatgccagccttgccagggctcacattgaacttgacacagatctgagagtgtgactttctggaaagcatgctctgtttcagggtgcagtgatgtggaagtttaaggtacatcaaaattcgggatccaaaattgcatcctctgaaaactccgcctgcagggtgtgctgctgcagagggctgcctggatgccaactgcatgagggatacatccccccattctcgcagccaaagttcctcctgggtgcaaaggagaaaccgtctgaacctttgcaggcccatgagcttatacttagttcagagcagttaaaattcactcaaaaataccctcattgcataaagaatgaatatagcctctttaggttactagtgaacaagcgcagaggagttagttaaggcaggannnnnnnnnnnnnnnnnnnnnnnnnnnnnnnnnnnnnnnnnnnnnnnnnnnnnnnnnnnnnnnnnnnnnnnnnnnnnnnnnnnnnnnnnnnnngcaggactatttttaattatttttaatacctgcaaaagggaatctgcacatgcacatccgtgtttctacagaaatctgcgatcgatggcagatctgtttgcctttgtgtgtccacatgaaccatttggcaaaggcatccaatgctaacggggcccaccaactacaacggaggcaacaactctgtggattttctttcacagaaagagtaaaatttcattcaaccgttccattttttgcctcctgtgattctaacaatgaaatttaaataggaaaatgtttcaatcgttggagtaaaacactctttaaaaaaataatgcttcgaaaagtaaagcaaaatcttttaccaaaataattctttcacttttcaaattgttctgtccacgagccagtgtaataaacaagtgaaagaatcacattctgtaggcttaaagaatgccaaattattactttttcgcttgcccttaatttgagtggaaaaagctaaggaaaataaatgactcagaaattccaaaagaaggtcagtctatgagaaagagagaataaggccctttcgatagtctaacacatacatctttttaatatattaatgacagtggtatagaaagaatatgaataaatgcctatcacagtaacctaatcagagtaaaacaatacataatatctaaaagaatatagttgaacttcttgaaactattttcttaaaaccaaccagtttctttggagagctcccaacagaagtcagtatcattatcatttggcataagtgtgctcaagtccacactgtcagcaccacctcgctggatggaaggaagccggcagtgtcaaactcattcaaaatactgccttagtaatatttactgtcattttaatctaaggcgttgcaaagttaccatgagctagataaagcgcattcttaaatgtctgccatagatatattaaggcataaatattccagccttgagccacaaaaactggggggagatatgccaatgaaatagactatctttaaccaaaggaattaaagaaaaacttatcacctaaaaatgagactagtcagcaaatactgtaaggggcccatccacaaggccaagtctgaggccaggcctggacccggtggcgtccagatttctatcagagacctcagatccaggtcacatgagccttcacagccctccccactgtgttcagaaggtggtggcactaacattgctataatggaaatgtgccccctactttgccaaaaaccgtgcacatctggcattcctcgattgaccctgtcctaggcggggacagccctcagacagccgccttctgcctaggtttcacagccccaaactgcacgtgaaccagtagctacttgctggagcaggccggaaaggcagcgtcgtaactggcattaagccacaactgaggaatgcttttcacggtacaaatgcacccaactcctagcctagaaagtgctcccttcctatcttgcttagaaatgtcagccccggggtggggcaggggagaaatgcttctcaattctctctgctgtcaggccaatgatgacgcgccaggctcccaggtggagctgtgcactccggggagacctatcctttaatgggtgacaaccaggctctgcactgctggcaagaggctgcttgggacattttacgctgaggcagaatgaatgtcctggttttcaaaaggtggcagtggctctctccaaaaggtgaagttactgaaggtatccgaacagggaaagtctgaagaatggcttcttttcagcaacgggaaaacgtggtcgactacttcacagagtctcacatacgaagagatgttggtctttgcatgttcctgtaccagctctcctttagggttgacggtaaatattctattcaaagacactcctacttgcttgtatgaatacacatcagctggtcggtttccaaaagcagcataaaagggttctgtgttggggaaaaacaggtttttgatgtctgtcaaacactggactttaaacttttctggcttcttttcaatcacttctctgtgcagggcagagaagaggctgctgggactcagcagcaggggcccctggggcagcaccgtgcccctctcgttgacccagtgcaggtagccccgcgtcatgtccgccatcccgatggcacgggcagaacagtagagaaatttatatccattctggctcactttatggtacagcttagcgatgccctgatgggtccaatccttcccaagggtgggcaaaatgtggccaagagtatctgatctggtaattgtcccatcaatatcagaaatgatgactttatcatcccagttccacagatagatggtgccctcacagcggcacgtgccttggtactgcgtggtgacactgaaaaccacgtcgttggggccattcttcaacttcaagcttttaagctgctcggaagtcagccggagagtcttcttgtagctgacattaggcagaagagggaggtggcctgcgtttgatggcttggcagctgcgcgctcctcatcactggaggatgattcatgctttaccctggtggccaagctgagctgcggcggttgctctccggtgctatgggccttgccagccaagcactgctctggcttactttcctccttgattgtggtgtttcttcccctccatgaaaaccaccatcttcctccctttttgggcattttatccctcatgatagattccacagtggcctttggcaaaggtttctggaaggcctgcattgccaggaggaggggtgctgctgttgtccagttataatatttactcccaatctttaccacgagattggggtcatcgataatagcggggttgtccacaaactgttgatatgacacagcttgctccaggaatgcatctttcgtgatctcccggtggtcgctgaggcccccgcagagggagatggcgatggaagggaggtccctcagcccgtccgaggtgctctccacgccactgtccacgcccgagctgcccaccgactgcggggactggttggctgaccgggctccgttgtcgcttgcatgttttgcgagtccggaaggatctccgtttttgggaaaatacagggccgccacttcaggatccatgtctgtgaggtcatccaagtagacgccgtcagcaccaagatgtcggcttcgtttatctcttttcctggaaggagaatccgtcttgtttgctgtctggactacactggcagaggggggtttgagctcctcgatcatgggcaagagtggcgctgctgctcctaaggtctccaggtcttcttcattcacaaactgcatttctgtctgaggcttgttctggtccaaaagtgccccaccgaccagagttggcgattggtcactaaaagtgtctgaagattcgctgtgaatggcctgaaagtgacttttatcacaaatttttctactgctcaatgggctggactctttcatcttgtgtggagaagaagacttagcagcctgcggcagctctccccacagccaaagcatttctgggttcttctgccctgtcctttccgtggacttgctgaccaattctgaatcacttttaggtgttgaaggtcgggaaccggaaggactgggagtgggtgaccactctctatccgaattagggtatgaggctgactgagggtaaatcacagccagggagaggttttcctcaggaatatcatcttggaatggaggtatatcattaggaagagttctgctgctctccagcagctccatggcctcatccgagctcatctcgatggggaacatgtcctcatcctcagatgtgttcatgttgtcatctctcttcaggctgtccagctgtgactttctcctcctttttcttctcttctttactacagagctgcttgacggcgtctcgctgggagcgatcacttgggctggcgtgctggggtccaggcctctcatcctgtccacagagccccttttcagctggcattccattctcgaagctccttctgacaggatgggggaggtggccaggtgcatagggataacttcctgatcattatctgtttcttgaacaaaaaatgcttctccattatctcccaatttcatatgcaaatccacagattccccattgatttctatgtcaaccactttctctcgggagcgcaggacccccatcttcccaaagcggacgtggaaaggggagcattggaggtttccattgggctggcggatgacaatgatgtcaatgcaccctgagagtgtggcgggattcagccccttgtagagctccttcacggtgacaaacacctggccggctaactgccccacgtaattcatggtctgcaccagagcggcgccgcggtggccgcctttgt

SEQ ID NO: 48109 - DNA, 1361 bp, Homo sapiens
ggagggtgcatctgcccggaagactcagactcctgcagcccagcccagtaccaagaccagtttctcaagccaagacctcccccaaatcagaagaaaggatctcgaacacccattatcataattcctgcagctaccacctctttaataaccatgcttaatgcaaaagaccttctacaggacctgaaatttgtcccatcagatgaaaagaagaaacaaggttgtcaacgagaaaatgaaactctaatacaaagaagaaaagaccagatgcaaccagggggcactgcaattagtgttacagtaccttatagagtagtagaccagccccttaaacttatgcctcaagactgggaccgcgttgtagccgtttttgtgcagggtcctgcatggcagttcaaaggttggccatggcttttgcctgatggatcaccagttgatatatttgctaaaattaaagccttccatctgaagtatgatgaagttcgtctggatccaaatgttcagaaatgggatgtaacagtattagaactcagctatcacaaacgtcatttggatagaccagtgttccttacgggttttgggaacattggacaggtacatggtaaaagcataaatcgcacttgagattctgaattatttggctcctccatttctggaaattgagactcaagctttatgaatttatcaagaacttaaaaatgaagaaggtcacagattgatcttttataagaccttatttgatgctttgtgcttcaaggagatgatacctgtcatccatataagcaaactttttggcttacaactatttttttaatattagccttctagtctgtaatggaaattgtatattttgatagaagttttttctccattggttaaattagcattacttaaaatttgtttctttagaaaataaatgcaggttataaatgtgtgtatatttagagattataaagctctctgagcccatcttctggatttttccatggctcctataaattctttttactggaaaatactatgttatgaatggtattaaattttagtctctggaacatcccaaaacccaagcaaagggatgtgactattttgaatgaatcagaatgtcaacttgtatgtacactatatctacacttactcattatttaaaaagaataatgaaaaatctagatcaattcttcaatttgattgaactgttcagccttttcaagatttctttatttacaaatgattacatttaaatgaatgtacattcttctcactgactttggtgattttgaaacctagaatgatgtgtttctatctgtaatatctttccatttgaaaaaaatctcaaaacacagattaaaaccacaataggcaaa

SEQ ID NO: 48110 - DNA, 425 bp, Homo sapiens
aggcaaaaagaaattttattctttcacagaagtctgaggcaggcaggtccagagttcatgcaggagctcaataacatcagagattgggctctttttgttcttcttagcatatcgatgttttacgtgatgctgggcacctcggggacctaagatggctgttgtagctccatgcatcatgattaaaccagagacaggaagtgtacgatggaagaggccagaggtgatggcctcctcctctccttttgtcttattcctggagtgactccctcctcttatcagcagggatacaagcagtgcctggcagccttccctctctcctgtatgagccaaaagcaagactcatggcacccctccctggcaggaaaggggtggaatgggagcccctggggaaagggggcctgggacttgcagtgacagtgctgctc

SEQ ID NO: 48111 - DNA, 1033 bp, Homo sapiens
tttttttttttttttttaacaagcaaggaatgttttattgtgtacattttctcaaaaaaaaaaaaaacccacaaaaacagaacccacaaataggagcaaagaacagttttctagcatctctgggatacacagggcaccatatcttatagaaacatagctagtacaagaacaaagtgtactaattaacattaccccttgcttccccagtcaaaaaaggctatagagaaaaacactttaaattgtactctaatacaaatttgttgcacaattaaacttcaacttactcaaagagttattgtattgtaaactgcagaaaatagaataggcattcaataaatctgctcacaattaacaattaagcaatagacacttgaataaatatagcatgtattacttatttgttaagccttacacttacgatgagcagatggtttatcactatatagtaacagattttttttacactttaggagataccatatccaataacggaagtagaagtactttaacgaaaactgattttagaaaaatatctccttgggtctgagctactatggtatttattacatatttgggtcagtttcaccagtttaaaaatataggtactaacaaactgaattctttcatgggagaacaaagtaatacattctagagcaataatatttctttatatcctttaggtagcaggacagagctaggacatagtaaagagatttacgatgtaatgaataatttgtttctacctaatgctataggggtattgctatcatttgaactaagaaagaacaattttaaaacttgtttataatgaagaatcggcatttccttaccacatatatactagatgtaaatataaggatcttctctaatagtctgtattccttaatccctatctgtacaaattagcctgcatattcaggaatggaacaaccagtaaactgttacttgaagaactaatttaaatgatccatttaagagaaatgcagtcaaaataaggcaataaccatcagcctatctgtacttttcttctgtc

SEQ ID NO: 48112 - DNA, 977 bp, Homo sapiens; identical to SEQ ID NO: 5286

SEQ ID NO: 48113 - DNA, 850 bp, Homo sapiens
  misc_feature (1)...(850): n = a,t,c or g
gagccatgggggctcagaataaaggcatttcctgtgagcacgtgacaatgggtccggacttccggcgccctctggtggcggccattttgattggtgttgggtttatttgtaggagaggctcctgagcgctaggtccgcactgtggtgactgaacccagaagtcggggagcagttgtcctccgctgcacagaggctactctggagctctgtgacgggcgcccagcgtgacccactcctgggccaggatacggaccgtcgtgcccatatctcctggctggtcgccctatcctcccgactctgcttaaaaccacgtggttcgatggctgccgcggctacgctgaggctctccgctcagggcacagtgacttttgaagatgtggctgtgaactttacctgggaggaatggaatctccttagtgaggctcagagatgcctgtaccgtgatgtgacgctggagaacctggcacttatatccctcccctggggaaagaaacagtagctcccacttctgccggtcncctcccctaggggagagggaagcagaggagaaaacagcagcataggtggctggcaaagacaaaggaaagaccagtagaagagaaagaaaccaaaaacagcaagcgcagagccaaacagccaggcaggtaggccaaaggttaagtccctctccccaagcctgcggtttgtgaaaaagagggtgggcaccggctccgggaggagagcagaggaggtgaaaaggcgtaattcttgcaatttgcggcagcatatctgccaagcctctaggctagtgactgcccggggcccagactgcagccacgcaaatcccactcagcccaagaaactaagtgta

SEQ ID NO: 48114 - DNA, 1626 bp, Homo sapiens
agaggaccacgccacagaccctgtccaacctctgcctgaagatcaacgtcaagctgggaggcgtgaacaacatcctgctgccccagggcaggccgccggtgttccagcagcccgtcatctttctgggagcagacgtcactcacccccccgccggggatgggaagaagccctccattgccgccgtggtgggcagcatggacgcccaccccaatcgctactgcgccaccgtgcgcgtgcagcagcaccggcaggagatcatacaagacctggccgccatggtccgcgagctcctcatccagttctacaagtccacgcgcttcaagcccacccgcatcatcttctaccgcgacggtgtctctgaaggccagctaccccagatactccactatgagctactggccattcgtgatgcctgcatcaaactggaaaaggactaccagcctgggatcacttatattgtggtgcagaaacgccatcacacccgccttttctgtgctgacaagaatgagcgaattgggaagagtggtaacatcccagctgggaccacagtggacaccaacatcacccacccatttgagtttgacttctatctgtgcagccacgcaggcatccaggggacaagcaggccttcgcactatcacgtcctctgggacgacaatcgtttctcctctgatgagctgcagatcctaaccttaccagctgtgttcacaccttacgtgcgctgcacacgctccgtgtccatcccagcgccagcatactacgctcacctggtggccttccgggccaggtaccacctggtggataaggaacatgacagtgctgaaggaagccatacctctgggcagagtaacgggcgagaccaccaagcactggccaaggcggtccaggttcaccaagacactctgcgcaccatgtactttgcttgacatgttttagtgtttagcgattgtgtaccgagtgggattcacgagaccagctacactcagaccaacagatggccagcccttccgtgacagccagcatcgaacatgagacgtcattgattttattagattctccgttttccagaatgccttccgtcccagatttcaaacttggattttgaactgcagacctgtatgagaacccaatgtcataggaaatatggtttgctaaaatctataagctgcttattaaaacagagtcccgtgtgtcctaaaaatctcctaaaaccagtctatgaactcagggctttaaaacatttttaatttatttggtcattcaatttacttgtttttaatacatgattctctatgaaattgatgggctcaaactagctgtgaatcttctgagagtgaaagcaacacaaaacacaagtgtggttttaaagccttgaacattctgatgttgtcactaaagttgatttccaggcgatgctcgtgtgcccctggcgtggctcacccaagttcctcgactgagggccggtggccatgcagaggcgtccgcaggtgccgtgttctgccagcaccgcccttcacccggcctgaactaaggagcagtggcagaaggtgggccccgtgtgtttacagcatttccaggtccagagaggttggcagacaagtgccattttaataaaaaatgtattta

SEQ ID NO: 48115 - DNA, 1929 bp, Homo sapiens
gttaccaagctgaggtgggaggattgcttgagccatatgctctaatatattttaaaatacatattttaaatatattttgagtggtaaaatgtagcagataatgttacataaaagaagccatggtaatgacatgacattactggttttgagttgtttgtgtagtagttagctattaatactcaggtataatgatttgctatttaaactacacaaatgctcaaagtccagcgataccctgcacccaaattcagtggctagattaccttcttaggaaagcacaacacttcaatggagtgacactggcatgagtccactagagggtgtgtatacatggcctgagttcaaattgttcctgctgtgagtactgcttttcagcttcaagttattcttatcggccacagtactgtttattccacttagtaacagttctgtttacagagcactttaacataaattctgatttttaacatgaaagctgtctgatgttggtatttttattttaatctttagagatcaagaaatttttttagtgacagaatagggactttattgatccttaaatccgcccctcaccacaataaaggaaaaaagcaaaaacatccttgactcatgtattgaagggtcttttttgagaagggtcagtttttgaaaaattatccaaaactgaaacatctgtcatctgtatcacatctaaagattaacagtgactgatgaccaccagttacttcatatgaaagtgggaaaccgtatcagttatttgtccactaagttggtaggtgctttttgtacaaaagcccaggagaatatgatctgtaaattctagttgagtgatgaagatggggctttgaattaatctacagtcttggaattaattctgcagcattttaaccagggaatttttcagtagtcataaatctatattttaatactgagtaaatgtcctcatttacccccaccaattttgtaaagcagatattaaccaaacttcaatagttataagacaaaaatttaatgaaaattggacagtatgtataatccagggctaaatagttacattggactggagtagaaatttaaaatacaatagatgctggagtaaatgttacatattatcatcatctgattcatcttcttccttcagagattccttagcatatttctctgcttcttctcttatatcttttggaacaatttcatgtcttccattagttaattcaccaacccagctgagttctagttcaaaagctttatccttaacttcgtcatgtactatgtaaattatttttgcaacttctttaacgatatcacggcaggtcatttctttcatctgaagcttctctatttccgtctttgcagcttgcctggctttgccgatggcacagccccaataaccgtatgaaacacctgatgggtcaatcatgtagagttgcgcaccgtcattcacactgtaagaccctaacatgaaactgcagccaaaaggtctaacagcactgtagagtgtatatgcatgcacatacatggccactctgtctgcaagatgttttagtggaatgttgtagccaaagttagatctgaagttggaagcttcttctcttgctatgtctgctaaagaacgagcatctgccaacaaacctgctactgccattccaacatgccgatcaacattaaaaagtcttttgttggaaccttcttcataaagtttagaaaggactaatttttctaccccaaagacaacaccatctttgcatctgattccaatagctgtactactattttccacagccttcatagcatattcaacttgaaaaactcttccgtcaggagagaatgtagaggctgacaggtcatacccagtgccgattgagctcatcgtgctaaacccaaagggacgcgtagggattccaggcccggagcgcttcccctatacca

SEQ ID NO: 48116 - DNA, 1273 bp, Homo sapiens
aaaacttttttttttttttttttttttaggataattaaaactactttgaattttttatttatcaatctggtttctaatataattttagttaaatgaaagacattcacaaagaatattaggcatacgtacataatttccttctttcattctagtttacatgctgttgcttttagagagtgaaattttgtgttatttcacaggggatggaatcctgtttgactttacagaaagaatatttagcccagcttttcacagcactaacctctgcagtcaccacgctcactgaaaaaatttaaaaaacctgacaaaataaaacttagtaaaatctagaactgtttcttggcctacttgagaggaacttccatattttcacagccatctccgaaagcagcagttgctgtaaattaactgagacttggaaatggtgcagactgtcttggtagagctgttcttatagcacaatttttatctgggaaaataaacttgtaaatgcgtgctgtatattaatacatgtgtgcccatatttatttttattatctcctgccagtctttgctcaatgggagatgacagaccaacttctcaacgtgatttccccatttcattgaatgagatttatatgccacttatgaaaaaaaatactgctgtgaaagaaatgtactttaaagtttgcagcactaccatgcagggtacatggagaataggcatatagccactaggctacatgaacacgtcacgtttgtattttgtgttggcctatgtataagccaatctagcatgtttgagggccatgtgtgaagagtaggtaagggagctgtaagttacattccaggtgggaatttagggctttctgcacaaaaaattcctaatttctctgtccttttgctatgttgcatctccccagtgttgacaggttagtctgcatgattaataactgagcagctgtagagccatgccagtaagtctccaattcctgaacgtggccacatttgtcttttgatgtgactttcaaccacaagccacaaagtaagtctttcactaggctccgttgacttcagtctttatataagggtttcaaggtattttgcagtcaagaatcaatggcacctcgcaactgtcttatgaagtaggtaaaacagctccatcttaaatacgggacaaaagttcgaggacttgaccaaggtcacacagggagggtcccaccaaggcagggagagagaaaggggatgctgtcagctaattctcatggtccactcttaaccaaaacatcattta

SEQ ID NO: 48117 - DNA, 1324 bp, Homo sapiens
caattttttttttttttgcaaaaccatttttatgggctgataacgtatgagcttttccctttgcactgaatgatgttctctccgtctcatcggcagtatggggggcagctgtcccagtgtcaatgtttactcaagggtgttcttaggaggcgtgcgctctctactatgccttgatgttgcctaccttattgtggtatcgtggagtttaaaagatcaagttaggatgctgacttaggattattaatgaaagtgttgcaccagttttttcatgttgtaaaactaaagaatttcgctctgcagtttgaaaaactgtggccacagctgtgacttgcagcccacctgccacccaggacgggccctgcactttgaataggctttccattttgttttggaggttctcactttgaaccttcttgcttacagatttttttgtttgttttttgagaaaaaaaaatgtttactcttccatcatttaaaaaaaatgtaaaagacaaaaaaaaaatggaggatgatttaaaagatgctttctatctctgggaaaaaggagcagcatttggccatgttcttttgtttttctattcctgtcccaaatcaaagagcatggttctcaggaaaaccagttccccagtttaaaaaaaaaaaaaaaaattccttgtagtttcttagaggaaaaaaagaaaaaccccaacttttagcactgatactacatattgctctgttaaagaattttctctgccaaaaaaaaagaaaaaacaaaaaaacgcttaaagctggagtttgacattctgctttcagatgctgtctttttattagtgagtgatgatggtttgctaataatcaataggtaataattttttgtaatcccatcaagtggctccatatgtttctgctctctcgtgactgtgttaatgtttaactgttgtaccttaaagccgaaatcagtaactatgcatactgtaaccaaggtattgggcttacagagttgtttgttgtataaagaaaattttaaatgttgttgcaaactaacgagttacaccattttaaactttctttcctcccccctttttttgcccacaaatggtattataatgcttgcttagtcaaagaagagagactaaacaagggtaaaaattttaacagtacagaatttgccatcatatcattgccttgattctaactgtttgtgtcctaagatgcaaaagaagtcagtggcttttaactgtttacaaatagaatgtgattgtaaaatgtacagtttggttgtgtttgaattatgaaatttcttcagatataataaaccatgactttttggctgctcaacatt

SEQ ID NO: 48118 - DNA, 1509 bp, Homo sapiens
tttttttttttccatgaagacaacttttatttttcttctttacatatttatttttaatatgccttacctagaataagagaaaacaaagatttgaaaagcaaagtatcccttttattataatttctttttacataaccttttcaacctatattcaggtaactacctgtctctcccatgaaaggagaagggtcctgcacattacaacaggcaaaaaaggcttttaagaaataaaatattttaaattgatccattacatttgttcaattttcttgagtacattggaaagtgggaaaaacacaaaaggagaaaaaaatggtatttcaaacaaccagactataataatcttagttagattggtagtacactcattatactttttccccaaacaggtacaaaggaggttcaagtgctctatgtggatgctagtctatacctcgatatttttattttactcccagtactcccacggccatggccagtgtttgcctaaattctctgaagcatatcaaggagtctcagttacgcaaaacaaccttgggcaaccacaaagaagagggatgcacatctcccagaaatattaaatagctgtatctcaactacagtttcagaatttagaaccacccaattcaagatggaaatatgccagtgggaagagttattaaaaaggtaaccagaatttgactaaggagcatgaaatgtagaactttaagattaaaagagctcccctggaaggacaatgaggcatatggagcagaagggaaagcagggaaacggctgagatagtttaattacaccaactctactatgcagcatccctttatcaaaaggaaaaatataaagtctataaaaaatattttagtattgcaaactgctgcaataatttattgtaggcaaatggtagctataaagagggtccttgaccccctaaaagaaaagaaaaagtacagcaagtttctaattagtagaactaactagttgtttttttgttgggagagcggtataggaaaggagaatacattttctcccatctcagaaagatttttaaaaatgcagtttgcttttgtgtaggtggctaaaatatctgatgactaaccactgcaaatgaaatttacggagacaaaggataagtgtgacaaaaaagctaagtgtggaatatagatgctagttagtcaaaaagtgtaaaagggacctgagaggaggacaacttttttgtagattcatctaatcaatcttgtattttcaaatctaagtcaatataccaaagtcgactccaaaccatgttggcaggaaagcatattctacatcccttctatctttattccattttctatccccatattatggagaaatggcaaatctgcaacactctgaaaagaaacaatagcgcatttgagactggtgattgtaggtgtctcactctctgttccctggcatcccaaatgctgacactagttggtataaagtaagcctctttcagaaatgacattttgttactcctctttttgggaa

SEQ ID NO: 48119 - DNA, 2489 bp, Homo sapiens
tgtccattccaatttcacatttattaatgaaaaataatgccttctctacatctattgtgactgtcacagaatcaagcagtaatacaaatatttgctgaaagtaaacacatgatgttaataaagaaaaaaggttcttttcttaagattttgaaaagaacatattcaagaattggaatcctacacaggatgcagaagcaatgctaaggataaaatatcctgactacctttattgacatgatttgtgtttaccagctcattaaaatctatgtttcaaattccctggattttcccaagttccagactggtaaaaagtatttttacatacacatttgatgctcacattacaaacttaatatctataaacttgaaacttgttttgcacaagtctatggctttactacttttcaagacaaaagtcacatattaaaatacaaactactcaaaagcaaatagttgtcaagaatgtggtttacaagacagatcttacagataatacagactatattatgatttatctgtttgaaaacagaaagtagtgggattatactgaattctggtataaggtgcgcaggaaactttacttacaatcctttattttcataaggtaaacaccaaagtatttctcacatatattaccaccagatttttttttaaaccaaattcccggtttaaaaatcacacactggacaacacagaaatacggaaatggctaagggaaaagtctagcatatgaaggaaaaacatgtcttatgcattctaatataattttttacaatctagcataaaggcaaatgcggtttttttaaaaatgcagtccatatacaattatagaaaaaacattagtcaagccacctaatataaccaatttcacagatagcactcatttaatataatgtccaaaaatttccaagtaagtgtctacgtatcagttagaataatgcccacaaggatctccaaactacaaaatatcagcaagtaaatgaaaatcacacatttctctttgaaagactgaagcttgactatgagttaaaaggcaacaactatgaactaactttctttaaaatgacttaaactgcccaatctagagcaatacatgtttcctagctatacatgcaaactggactgtgtggtaaaaatgactcagttacttaaaaaaagcagaaaagatccaaaataaccagagctcaagctaagctggtgaaaccacagagacactgaagcccagcaactcccaagaagctgaggattaagattaaaaataaactctggatactgaatcctatatcaacactctgaatttatatttattgttagtaatttctattattcttttctttgggtaaaaaaaaatgttttaaaaagaaccaatgttttggaataagcaatgtaactctgatcattctgctatgtgactaccaaaaaggctgttgttcttttagccctaccacttggtaagatagaaagctctccacacacaaggcccagagaaggctgatatcacaagtcagtgtgagttacactcttctcatgcaatggagctactaaaatacatacatttggtcttacaaaaaaattacaaaactaacaaatctttttctccagaattataaaagatagaatctatgaatcagtactaatgtgatcacagaaaaatagcaaactgaagtcaaaaagcacaggctgcccatcatagagtccccagtctatttaatattttcgacctgctctgaggatggagggtgtcaacaccttagaataccatgatgggctttaaaactgggtaaagaatcatccctagggttagggcaaatgtaacttcacttattgcttacacacaggaaaaaatctgtttccttttccaagatattcttttaaggattacttgacagtggttcttttaaaggtatcaaaagatgtcctaaaaaaaaaaaaaaaaaccctctttggaattctctcggaattccagaaagattatctggcaattcattcctccaccccatcaaaatttttcctttgaaaaattacaactggcaactcacataagatttaatcaacttacttaaaataagggagggcttctcaataatgtttccccactagaaaactaagaaattcagtgatactcagtgccagtaattaagtggtacatatcataaaaattcaaacttggacgcaggtgcgtcacacccagaaaagattttatacatttataagcttgtgctttcacactttataagcaacacaggttagtttccacttcagttttcatttttagtgagtaccgtgcatgttgcatgagggacggtcatcaaacagtctctcttacgcagacttcagtgtttcgtcagagccgaaaaagaaacagccttctctttttctctatgaagattctctccactttgggaaaacaatcttctatgcaatgaaggtcttgtggaactatgtaaacaaatcatacaactgaatagaattttagaggtcaatcagga

SEQ ID NO: 48120 - DNA, 2531 bp, Homo sapiens
  misc_feature (1)...(2531): n = a,t,c or g
tctataccaagcagttgtctcctaacttggatctggacccgctggaattaattgccttggcaaaccagattttgcctgccacacttggttgcacttgcagaacagcatgccgttcaggagttgaccaaagccgccacgagttgctttggcattnacggagaagtgctctcttacttngaattngctcagtttcacaatgcccaccagttngccgcctngtgtttgcaccacatctgcaccaactacaacagtgtatgctccaagttccgtaagaaatcaaatcaaaatctgcagacaaccagggaatacttcgagcggcaccgtgggccccctgtgtggtacctgaaggaagaagatcactaccagcgtgtgaaaagggaacgagagaaggaagatattgcactaaataagcatcgctcaagacgaaagtggtgcttctggaattcatctccagcagtggcctgaagaggaagagaaaaaaaacaaaaaacagaaaccaatcggtaatctgatccaccacttttcaaagcactactataaaattcgtcttgttagagatacgacatagttcaggtttcgggcactgatcttcctccacttttgtgcatttatctttgttaggatcaaagcacaagctcaccatcaatgagcctggacaaaaagggaagctgactctcactgcattccttaaactgatatgtatattttttttgttaggaggcttaataaactttagtctgttattttgtttctgtttatacaaagaaaaaaaattcagctttcatgtttctgattccagattggaaaatatttttatatggtctgttgtattttgttgaaatgaaaatactgtgtattactttattttacaggccacaattgattatgaagtcaccctgtgattctctttgcccacatgaccaccgagcattattacgtaattagagggttatccttttgttgtgaaaggaaggaggggactgaaatctcccaaagtgcaaattggagagtgtttaatctttgttctgttgaataacatcggtgtaattacaaagtcaactccaagaatgtgtatttacaatatttgccatgttaagtgctggtaattatatggttatatgtgccatgtaaaatatagtgatatcaaatattctgttgtttccaatgtctagtttcaagaggacaatctttataatcattagaagggcttattaaatcccagcattatccaggggcaaactcactggtgggacctggaatacataaggtaccattagtgcgctgggtgttcgggattgctgtattaggggtttacatctctgcagtattccttggaacttgcccatgcttctggcatgcagattcttcactgacttgaattgagatgggcaagggaaaaggtccctggactccctcctgccatctacaggcttgtcacatctcaccaccagaaacaggcttcctcaggcttctcacctgtggccaacttcactttgtaagacccatatttttaactcttcccaggggaaaattcatgttgctgcagaagtagggttaaggcagaccacccacttctgctgaaatgcattgggagcctgtgaaagcacaaagctggaggctgggcgcctgcgttctcctacacggaaaggaatctaattccaagagtctaggaaatggtgctattgtgagttcgttctgactctttctcattctgagttttcagtgttaaactaggaagtgtgacagcaggggagctttcgtgaggcagtcagtcattgcttctctgtaaattaaaatgttacagcacacacatacacacacagagagcatttcaaggccacagctccacacctgccatgggatgttaatgtggcagggggtggggctcattctgttgggaggtcaaattaccaatgccaaggactgttgattttgtttttatttttattttttcttctagcttttcagaagatggaaatgagacagttgagtccaaaccccaatgctgacagccatatgcatttgaaaatctatctagattacagatggggcatttattactggcagtggaaccacccagatagaagatcttaggagaggcccagaaatgcatcaccttgtcatgaccaaaagagaaggcagtagagtagggatagttacaaatgcatccatcttaattattttcaataggcttgtaaatcttatcgatggaaggagaaaggagacaagatgtggaagaattgacatgtatcccaccataaaatggtagaagatgagttttcaatgagtagtcatagttgaaattttacaaccaaagctcccatttgattgtaatcttgccaaaatataatggatgtataaatgaacttggggtataagcaataatatccactagtgttgttatcagctactgtaaccaagtggctggttcatttggttgatgctgattatggcctttaaccatggtggtttgttgtgtgttttttatttcacaaaaagccaataaaattgtttagctataaaaaaaaaaa

SEQ ID NO: 48121 - DNA, 1361 bp, Homo sapiens
tcctgctcatggcgctgctgcccatcttcttcggcgccctgctgccgtacgctgcgcccgcggaagaatgcttcagacatgcctgaaacaatcaccagccgggatgccgcccgcttccccatcatcgccagctgcacactcttggggctctacctctttttcaaaatattctcccaggagtacatcaacctcctgctgtccatgtatttcttcgtgctgggaatcctggccctgtcccacaccatcagccccttcatgaataagttttttccagccagctttccaaatcgacagtaccagctgctcttcacacagggttctggggaaaacaaggaagagatcatcaattatgaatttgacaccaaggacctggtgtgcctgggcctgagcagcatcgttggcgtctggtacctgctgaggaagcactggattgccaacaacctttttggcctggccttctcccttaatggagtagagctcctgcacctcaacaatgtcagcactggctgcatcctgctgggcggactcttcatctacgatgtcttctgggtatttggcaccaatgtgatggtgacagtggccaagtccttcgaggcaccaataaaattggtgtttccccaggatctgctggagaaaggcctcgaagcaaacaactttgccatgctgggacttggagatgtcgtcattccagggatcttcattgccttgctggctgcgctttgacatcagcttgaagaagaatacccacacctactttttacacccagtttgcagcctacatcttcggcctgggccttaccatcttcatcatgcacatcttcaagcatgctcagcctgccctcctatacctggtccccgcctgcatcggttttcctgtcctggtggcgctggccaagggagaagtgacagagatgtttcagttatgaggagtcaaatcctaaggatccagcggcagtgacagaatccaaagagggaacagaggcatcagcatcgaaggggctggagaagaaagagaaatgatgcagctggtgcccgagcctctcagggccagaccagacagatgggggctgggcccacacaggcgtgcaccggtagagggcacaggaggccaagggcagctccaggacagggcagggggcagcaggatacctccagccaggcctctgtggcctctgtttccttctccctttcttggccctcctctgctcctccccacaccctgcaggcaaaagaaacccccagcttcccccctccccgggagccaggtgggaaaagtgggtgtgatttttagattttgtattgtggactgattttgcctcacattaaaaactcatcccatggccaggggcgggccactgtga

SEQ ID NO: 48122 - DNA, 3362 bp, Homo sapiens
tttttttttttttaaggtaagctcagagtgacttttaatatgccaatcaatgttaataaaacacaagtcaaagacaagtgcaaacatgttttagaccaaaattaatgagaaaacaaacagacaatttttttcaacatctgttagccagtattattagtcaaatggctaatcacagataaaatatattttgtgaaaaacttggaatgtcagaagtcattctggcatttcaaacagctatgtacagtatcacgaagatcggtttatatacacaaatattgaagagaaaaaccgggcaaaacatttaaaaacagactaataatacaatcaagtataaaacttagggggagacatttaaaaagagtccgggaaggacattaccagaacaagttacaaaaccagtaattattatactacattaatacagcattccaaaggagggaaagggtgcatttttccaatgcactagcttcaaagttcaaaggaaaaaaaaaaaaaggcaaatagctgctttccatcaaaagcagctatacatttcacataattgtttcaaaaagaagacctattaacaacaatgattgtttaatgctacaagtttacagcaaagacaaaactaaaatagcagcaaattcacaaggcaatacctccacagaatcatcatcccatggttcatgcaatgcctacaaagtgctcccagtgggatatacaagtctaattcacaattaaaaaaaaaagaaatataagatggacacacaggtacattgaaggctgagtagtaatgagtcttttagcatgtcccttttcaaagggagggtatgtctgtaataaagcccttgagtactttttacaggtcactacagggaaagacaccttttattacaatgcaacagcaaactataagcagcacaccaccacagtggttaaccctggaaaggctggtgtaacatccaacagtgacacatcctacagaagacagactggtaagattagatgaaagcctgacatagcaatcatcaaaatacagctttcaactgtaattcacaataaaagtcctaatcagtaaaactactgacaccaatcgagaaagtaattgcaaactggattctatcagtgatttcaacctagcttcctcttgtcacagtgttcagggggaggtgggaaaggagtagctcagtatatagtaaggctgacagagcggttcattttctttccaataagtcgagatgttctattactctgggtggtggacctagtggccatccggtcagtgaagagtgctctttcctcagctgcagcttttgccatctgtgctttcttgagttctttttgtaaaagtgaatttttgaacttttcggcattcaattctattcgtaattgttctgcactctttctagaagcggacagcaatactgaatgctttaccagtgccattgctgaaggtcttctctctggatctggatgaatcataacttttagcaactctgtaaattcttgggaaagcacttgtggtatccgaggtaatctaccctgtctgatttcatgccattgatctccatttctcggaagaggttcagcaccagcagcacataccactgtgagggcaagcgcaaaaatatctgcttttggtagatgggtataattctcctgtaaaacttcatttgcaagaaaacgactatcgccctcttcaacttgtggactggagatccttgttacatgcccaagatcacctattttaaacataactttgttggatgcccaatcatcttcgtctccttcttcagaggcagcatttgggattgaggttcgagatatgaaaatattactaggttttatatccatgtgaaccaaagacattgaatgaatatacctcaagcctcggccaacttgcaaaaggagatccttcaactctgcttctttaaagtaactcatgattctgtagttttcacttatagcatcagctaaacttccaccattacaatattcattctgtataagcatatgatcatcttctgcccacgcagagaaatatcgaactacatgagaatgctgtccaagcactgcatgagcatatacttctctcaaagcgttctgctcatcaacagagccccgccaatggcttttttgatcgcttaatggcataaatgcatccatccagcctcttcacacacttaaatacagaaccaaattctccagagccgattttctctagctcatgaaattctgttgtataccgggacttcatattgctttcagtaattgtaattctcttagcaggtcttgtttcatcttcaagctcataatcactggcttccatgtcttcaccacaggaatcattccaatacgttctctttctacgacgacactgtcctgaggaatgaagcaacaaagaatccggagtaaaaggattaatattcacttgaggagtctgtcgcacatcaaattccctttttcctgatttttctgtatccatgaagagagaactaccccggagtttaacagagctggaatcaattccccgagctttggagagcaaactcttgggcgtgtgcggggtgtcgaagagtcgcagcttgcggaaggtcttgtgtggcggggtgcccgggtggtccggccgcggcgagcggcggccttcgcccgcccggcgcgccccgcaaccccgcggcgacgcatctcctgggccgccgcagcgcaccggcgagaaagagctacccaggaagtagggggccgccggcgacttgaccggcgacgaggagccgaagccctcctcctcccacgagtcgccctccgccccaccgcccgcctcgtccgcgcccgggcaggcgccgggcagcaacaggtcctcctccagctcgccggggctgccgggggccggcccgggcgagcggcggcgctcgggcccgggctccgtggggctccgcgcgggcggcagcggcgagtcgggctcttgaaaggccgagtcctccccggtgctgtggccgctgccctcctcctcctcctcttcttcctcctcctcacagtcgctgcagggcgagaagatcagcttctgccgcaaggtgcaggccgccccggcgcggcggggtggcggcggctgctgtcggctcaggaagctcatcgcggccctggggacggggccgaggacaggagagcggaggcctgcggggtccaggacactgcgggcctgggggcgggtccgccacgtgcggctgggcgcgcctagtcgcagccgcggcgtctctgcgcggcggcggcctgcggctccggggcgctcgggctgcggacggtggcggcagcggcggcgcggactttccggcagaggcggggcggcccgagcaccgaggctgaggtctcctcaggtccagtctcag

SEQ ID NO: 48123 - DNA, 1190 bp, Homo sapiens
ttttttttttttttccaacgtatacactttattttaaaatatgccactggcacttgggaaaaatgtaatttatttgcactgcttccattcttctactgtagtgttaggacttaacataagcatcactcttctatttcctatttacattcttttggaatattactacaaatacaatatacaatttaaaaaaacttatggggaaacacagcttatgtttttttctcctctttacaggcttctcagtatcattcgacttcaatggaaatttatatggacattttctgtacatatcttaaaaggcagagattacactgataaagcctaaagaatcctgcacaaatacaatacagaaaacagaaagtacagacgatgttatttggggtacaaatataaacaatacagtaccatttgagtaactgagcaacataatacccatactttatagaaataaaactgcaaacctggagaatgctctgacaaatattaaacattatatacacaatgaggtaaatgtaccttggtctcttgagaggtaatttaagtttaaagcaattgacattttgaagcatctccttaacatatgaagaaatatcaaacaccctattccgttggcacaacgtgaaaaaggggtatcaaaacaagatttgtgaactgaatatcatgaaccatgttttgatacccctttttcacaaatcttgttaaaaaataaaaacaaattcactgaagttccttttaagttgtaataaacaggttgaatgttattaaccatatttttagaagtttacatttacaaacaagattgcataatgggattgaaaagtttaatgtactgacaatcatcttaatgtcctagaagtccagcactcttgagagggcccatgggtattccagtaatccaaaacagagacaagaagctgcagtacatgtccaaagataatccttagtatctcaaaatatctgagctggcattttctgccaaagtgttaacagaaccattatttggaatcactaccatttggagccagaacactgccatggtcaagaaacagttgacttacgattcttccagtgcaagaataaaaataagcttttgatgatgtgtctaatgggatagtgattttgttgtgcactctaacgatctctttgccatcttgttttaatctgacagttctcagacatagagaaaaaag

SEQ ID NO: 48124 - DNA, 6638 bp, Homo sapiens
  misc_feature (1)...(6638): n = a,t,c or g
ccagcacatcctcagccgcacagacactcggcgaggtggaggtgagggcgggcgccagcgaactcggagaggggctcgctcactcccaggcgatcccagccgccaccgccgccgcaccagcagcagcaacagcagcagcagcttccttcctcagactcccctcgagaggctggccaagcgggtgtagccgttgggggaggctcccgccgggggaacccggcgaggacaagagcagggcgaccgccttccactcgggctgtccggcggcggctgcctccgcccgtgtgtccgtcaagggtgccgcgggatgtgtgtcagtttacgcctctgagatcacacagctgcctgggggccgtgtgatgcccaaggcaagtcttggttttaattattattattatcattattgttacgcttggctttcgggaaatactcgtgatatttgtaggataaaggaaatgacactttgaggaactggagagaacatatatgcgttttgtttttaagaggaaaaccgtgttctcttcccggcttgttccctctttgctgatttcaggagctactctcctcctggtgaggtggaaattccagcaagaatagaggtgaagacaagccaccaggactcaggagggaaacgctgaccattagaaacctctgcataagacgttgtaaggaggaaaataaaagagagaaaaacacaaagatttaaacaagaaacctacgaacccagctctggaaagagccaccttctccaaaatggatatgtttcctctcacctgggttttcttagccctctacttttcaagacaccaagtgagaggccaaccagacccaccgtgcggaggtcgtttgaattccaaagatgctggctatatcacctctcccggttacccccaggactacccctcccaccagaactgcgagtggattgtttacgcccccgaacccaaccagaagattgtcctcaacttcaaccctcactttgaaatcgagaagcacgactgcaagtatgactttatcgagattcgggatggggacagtgaatccgcagacctcctgggcaaacactgtgggaacatcgccccgcccaccatcatctcctcgggctccatgctctacatcaagttcacctccgactacgcccggcagggggcaggcttctctctgcgctacgagatcttcaagacaggctctgaagattgctcaaaaaacttcacaagccccaacgggaccatcgaatctcctgggtttcctgagaagtatccacacaacttggactgcacctttaccatcctggccaaacccaagatggagatcatcctgcagttcctgatctttgacctggagcatgaccctttgcaggtgggagagggggactgcaagtacgattggctggacatctgggatggcattccacatgttggccccctgattggcaagtactgtgggaccaaaacaccctctgaacttcgttcatcgacggggatcctctccctgacctttcacacggacatggcggtggccaaggatggcttctctgcgcgttactacctggtccaccaagagccactagagaactttcagtgcaatgttcctctgggcatggagtctggccggattgctaatgaacagatcagtgcctcatctacctactctgatgggaggtggacccctcaacaaagccggctccatggtgatgacaatggctggacccccaacttggattccaacaaggagtatctccaggtggacctgcgctttttaaccatgctcacggccatcgcaacacagggagcgatttccagggaaacacagaatggctactacgtcaaatcctacaagctggaagtcagcactaatggagaggactggatggtgtaccggcatggcaaaaaccacaaggtatttcaagccaacaacgatgcaactgaggtggttctgaacaagctccacgctccactgctgacaaggtttgttagaatccgccctcagacctggcactcaggtatcgccctccggctggagctcttcggctgccgggtcacagatgctccctgctccaacatgctggggatgctctcaggcctcattgcagactcccagatctccgcctcttccacccaggaatacctctggagccccagtgcagcccgcctggtcagcagccgctcgggctggttccctcgaatccctcaggcccagcccggtgaggagtggcttcaggtagatctgggaacacccaagacagtgaaaggtgtcatcatccagggagccccgcggaggagacagtatccactgctgtggaagccagagcatttgtgcgcaagttcaaagtctcctacatcctaaacggcaaggactgggaatacattcaggaccccaggacccagcagccaaagctgttcgaagggaacatgcactatgacacccctgacatccgaaggtttgaccccattccggcacagtatgtgcgggtatacccggagaggtggtcgccggcggggattgggatgcggctggaggtgctgggctgtgactggacagactccaagcccacggtagagacgctgggacccactgtgaagagcgaagagacaaccaccccctaccccaccgaagaggaggccacagagtgtggggagaactgcagctttgaggatgacaaagatttgcagctcccttcgggattcaattgcaacttcgatttcctcgaggagccctgtggttggatgtatgaccatgccaagtggctccggaccacctgggccagcagctccagcccaaacgaccggacgtttccagatgacaggaatttcttgcggctgcagagtgacagccagagagagggccagtatgcccggctcatcagcccccctgtccacctgccccgaagcccggtgtgcatggagttccagtaccaggccacgggcggccgcggggtggcgctgcaggtggtgcgggaagccagccaggagagcaagttgctgtgggtcatccgtgaggaccagggcggcgagtggaagcacgggcggatcatcctgcccagctacgacatggagtaccagattgtgttcgagggagtgatagggaaaggacgttccggagagattgccattgatgacattcggataagcactgatgtcccactggagaactgcatggaacccatctcggcttttgcagtggacatcccagaaatacatgagagagaaggatatgaagatgaaattgatgatgaatacgaggtggactggagcaattcttcttctgcaacctcagggtctggcgccccctcgaccgacaaagaaaagagctggctgtacaccctggatcccatcctcatcaccatcatcgccatgagctcactgggcgtcctcctgggggccacctgtgcaggcctcctgctctactgcacctgttcctactcgggcctgagctcccgaagctgcaccacactggagaactacaacttcgagctctacgatggccttaagcacaaggtcaagatgaaccaccaaaagtgctgctccgaggcatgacggattgcacctgaatcctatctgacgtttcattccagcaagaggggctggggaagattacatttttttttcttttggaaactgaatgccataatctcgatcaaaccgatccagaataccgaaggtatggacaggacagaaaagcgagtcgcaggaggaagggagatgcagccgcacaggggatgattaccctcctaggaccgcggtggctaagtcattgcaggaacggggctgtgttctctgctgggacaaaacaggagctcatctctttggggtcacagttctattttgtttgtgagtttgnnnnnnnnnnnnnnnnnnnnnnnnnnnnnctcccncctttggtctgtgagcaactcaaagaggcagaagaggagaatgacttttccagaatagaagtggagcagtgatcattattctccgctttctctttctaatcaacacttgaaaagcaaagtgtcttttcagcctttccatctttacaaataaaactcaaaaaagccgtccagcttatcccatcctctgattgtcttctgacttaagggatttactgtggtgtaggttctgccagccaaccctacaagctgccatttccagtcctagcatttaagtaggatgttgttgcctttaacttttcttatccaggggaaaattgccattttagggtcagcatgaacagctctttcttgtatgcgatttaaaacaaactggaaaggaaacttcacacgtcaaaatccatagaagcgcctggacgaggcttaaagtgctttgtgagtgaataggagccattcgctaattctagacccacagtgtctggtggtggggcttcccttgtggggcttctggtggtggttttgccttttcttttccctcctccatgttcttctaaaacatatacatatatacatacacacatacacatattcttcaggtctctaagcccctggaagcagcattgtgtgatattctcagaggcaggggaaaatagagggaaaaatagagactattggtatgttctccccatcagcgagttattgtaactggtcaccactggacgggaaggagaacagaggagagggaaagagaagcccaacctctgtgatcatatgagggccaaggctgagcagtgtagacagagaccctttgaaatgcatttgtctctcaaatagactagtaaacaccgacttctcctttgggttacaaacaccatttcaacctttcgggagagtcagagctaggatgtacaagaactgattctaaccagaagtccgcaagtactgtggacaagaatgcttaaccatgctgcttcagccttgagagacctaggttcttacacatatgcacacacgcatacacacatgcacgcacacacacatacacacatgcacgcacgcacgcatgcacaccaatttatgtttttattaagtgccttgaaaaaatgaagaaaaatgtattttccctttatgtaaaaattagtgaatatcttatgaattaaggcattcctctttccctaaccccgatggctccattcccaagtaccccaactcactgctgatcctattaaaggaatgagtcctgctacccgagtggtagtcatagccctagatgactctcaactactcttcaaagggaggcatcaggaatagaatgaaactgtgtgaaggataagattgttcgcatcaagatccaaatcttgatttcatattaacgcctaaggattgcctgtgtgctggaaatatatttgaaactcaaccagtatggcccagcctattgcatatcattgtcagaccatttttgctgctgtgggtcacccacgatttcatttgtcttatacccaggtgaaaggggaagggtgaatgggactggctggttcctttaaatgttaacttatggaaatgctagttcaaatgggtaatgtcacagtgttttgtatgcagagagcaagagttcaaccaacagctgtttattcatgtgtgtgtgtctttgctgctttgagttctctgtatctactgtgtatgtgaatgggtcatgtggggactcagtggtggtgttgtgactttgacctagggtcccgagtgtcacagctgatccttgggcactcggcactcattggcacagtggtagttagagggtgaaaagttgggggccttcaagccccaagggccttagctttagggctcctcctgagttcggcccacagtaggaagcaagattttaacttaggccccttttcctctttcaccctcccatggatggcggcagtgtttcaggaaagctggtaagtcctagggatttccagaagtagcctgcagaagaaggtaagtttgaaagccactccaggggtcctgatgctgtcatggctcagtgagcccattttacagttctccaaagtctagccctgtttcggacctgcacttcacctctaagttatgtacaactcaacctgcatccctctaaaagtcctatatccatattcaccattggctaatttgaggccctgagtgggctttggaatgctaaaaagaagcagggtacggagggctaccatgtagataccacaccaaggctggaggctgctctgtcgtaagacagaaagaaagacgctgggcccaattttgacttggccagggggacaccttggtgtgtttgttatctttatctgtgggtaggctagctgacccatctccttgagtcattccctttgggaaaccccactgccagtattgatctcctttttgccttgtactgaatgacacattaccctccacactctcccggactaggtggtcaacagggcccacagggttgctttctgtctttggtggggcaggggagttgacagggatgagggtccaaggaataagcatgaatgacaagaaaacaagggaaagagttaacctgtcacatagcaggttaactttttcagggtttgcagttagaggtattcgaccattcactggctgagccagatcacgggaacttgagagcttttactgtgattcttcaatgtaaaaaataaacaacaatgtcaaactgtgtttatatgatttgtataaagcctttttaagattactatttaaataaacattataccagagataa

SEQ ID NO: 48125 - DNA, 1198 bp, Homo sapiens
tttttttttttttttaaataaactttatttttagagcagttttaagttcatagcaaaattgattagaaggtacagagatgtcccatacacctcctactcccacacatgcacagccttccccattatcaatagcccccaacagagagatacatttgttaacaactgacgaacctacatatcattatcacccaaagtccacagtttatattattccttctggagaattttcaaatacagaaattcctctaccaggaataaactagcaatttcctctcggctttctataaatttaattattatttcagaaattagcctatctttacaggagaaaatgttataaaccatgaaaagactatcaaatacacaaggaagtgaatgttatataaaaaatgtaccatctcctaaacaactacctgcattcccttcttgttggtaagttataattgtgatagttctgatcatctgtttaattaatttgctaatgaagcctctcacattctttacaactagaaaaattcagttttcaaaaattaaggctctggtatattacatatatcagcttcactcaactcttttatttagtccaaaagaaaaagaagaaaatgtcatttaaaaaataacatactcagctgcttgtttgtagtgcttcaaatctttctttaaatttttgttctcattttccaaaagcataatctgggtgtagacatctggaacattcccaacagttctaagttcagtcactcctttctgtattaactcataccattcagactgaaagcaatcaagagttctggtcattcccattttgatcaagaaattgcagagaaagtcttctattacttcaggtactgcatgctttgaaggaagaactgttttccgttccaaaatttcagtatctgtagcctgttcttgggccatctgaattgcttttgccagatcttcttcaccttctgggatgctaaaattgtcatctggtatctcttcatattcatagtcatcttcagatgcttcagttatggtgacctgttccaggtagtaggcgccctcagccgccaccgcgtccgccgtgtccctcgcgtccccggctgccgtcaaacccatgcccaacgcctcttccaggaccctcccggcggagctgggcatccctcgctgagcagccatctctggcgcttcgggcccccacccccagcaggcccac

SEQ ID NO: 48126 - DNA, 1000 bp, Homo sapiens
tttttgctttttaatgttcttatttatttaaatatgaaaaaacatttcatctcttcccagttcatctgaaaggaggtcccctgggtaaacataggaaagcagttctgcaggctcatgaaggatgctcggctggaggtcggggggagcatggctgctttccccagcatagcccccatgttccccaccctctttgtgccccggatctgcgatcctgagtccagaagagctcagcaggaagtgggaactgagaagctgttgggagccaggagggccctggaccctctgttctctgccccagggcttcagccaccctgcaagcccctccgggacaaggcaacgtcagcccaggtagaaaacttaagagtccctcctagaaaaccagtgatgtgctgggcctttcagggacacaggccccttcagcttcaccggagatgagaaggtgccacccgcaacaggggctgctggtcacagctcagtgcgcgatgccttggccacaatcaccagcttggacagctcagctttgaatgccccgggcctgtgagccactgctgttttggtcacttcaaattcctcagttttcagagggacatcactttccctttcaaatgcggctttagagtaggccatggcgtactcaatctcagcgccccgcacctctgccttgaactgtgtgaagtacagataggacttcccctggggcctccagatggtgcaggtgaagtgctggtggtcttcgctggtccccagactcatctgccattgctcattggtccctccttgagaggcgtaagtgaacatacacgtatatttgtcccccgggcccacgttatgggagaaggaatgcacgacgccgccgggccgcacgtcaaacgccaccgtcgtgggctcggaccacgcctccgccggcctcagcgccacggcccctaggagcagcgcggcccgacgaagtcgcgccgacgccgttccacccatccgctgagagccgcatgttggcggccgc

SEQ ID NO: 48127 - DNA, 1049 bp, Homo sapiens
ggcggctccactagggggtatgttttctgggcagccacccggtccccctcaggccccgccgggcctttccgggccaagcttcgcttcttcaggcagctccaggcgctcctagaccttccagcagtactttggtggacgagttggagtcatctttctgaggcttgctttgcatctctggtgagtcaggactatgtcaatggcaccgatcaggaagaaattcgaaccggtgttgatcagtgtatccagaagtttctggatattgcaagacagacagaatgttttttcttacaaaaaagattgcagttatctgtccagaaaccagagcaagttatcaaagaggatgtgtcagaactaaggaatgaattacagcggaaagatgcactagtccagaagcacttgacaaagctgaggcattggcagcaggtgctggaggacatcaacgtgcagcacaaaaagcccgccgacatccctcagggctccttggcctacctggagcaggcatctgccaacatccctgcacctctgaagccaacgtgagcaaagggcagaggcagttggcctatgagtgggctgatgcgtgaggttggccacacattccttcctgtggacttgacattttggaagaactctttgccagataatgagttcattttagttttatgctcccattgaaaaattttccactatttttataagctgttaatttcttgagtactttataacatgtctgtagcttggataaaccaagtaagtattttttttttgtctttagcgaagtttagactgtgaatatgatgacacagattcttttttatggtggctttgcttgttttaaatttttgcatgacttttcatctttttatgtgtgtttcctgtagtttgatccgaaggaaaagagtatagtagcctgagaatcaggagatgggagttttagtcgtaggccttatgataattaccccgcggtggtgtgtagaaaagtatgtaaatttgctctgttttaagactttgaactacctcaagaagaggaatctaatacaatatttgtaatg

SEQ ID NO: 48128 - DNA, 1427 bp, Homo sapiens
tttacaagaaacactcattatttattcatgtggctgaaagagtatattaattatgtttagatttttggaaaaagtctgaacaaaaaaaggacctatacagtgctcaaactatatttttaaaaatactattttatttttactcacatatgaaaaaaatggctgtactatcatgtttacatacatactaacattggaaacagaataacgaattgtatttaaattttatgaagaacacacaaacattaaaacactgattggttacagaaagcagagtttgaggaaaaaacattagctataattttcattttcattaaagagcagcaccctctgagaataatcaaactgattagtaatattcatctatactgcaaaataatatgtacaaaggaaagttagtgattgtactgattttattacttttaccaagccattttatgttcctcactcaatgcaaagaaataaaacataatctgaagaaaaaatatgtccttattattattcacaataaaaagttggctttattctgcaagcctgggcatattgtacaattggcagcacttaacggctcaagtggatcaatgtaccagtttgattctgatccactgaatagaatctctcatccatatctggtgaccagactaactccatgggagctgtgatagactgaaccatttctgtggtatccctagatctcactaaataagaaagaccctacaccagaaaatatagcaactgatctatctataaattacatctatatgctagctctttagtataagttggaaaaaggggccctttcttgagcacatggataaaagtattattgtagtctaaagattgctggattgatattgtgttgttataatgaagataaggtacacactgaaacccactgtcagattaagaaacttccacaacttgtctcagttcttcaaacaatggagcaagttcccttttcctaggctgaacaattagtcctgtaattgggcactgcctgcctgggcctatgaaactcaccaccaaaggtaaacggattaaattgaaaccacctggtaggtgttaatagtaaacagatgatacttttatttttggaaaagtcccaagtttgcttccttggtctgttgcaagggcaaaagtggataagaacccaggtcgcaaaagcatgctctggagcattgtcatttgccactttaataacaggtactccatctctatctgacacaacaatggcatggagcccttcaacacggaggctactttttatacaagaatcgctttaggtcatccgccatgatgaacccccttctctcgcaggatcaatctccacgcctggggtttctgggctgcctggttctctccgctgtcacttcagggacagctttaaagacaggttcctcctcaagccaccgtcacatgattcatgaccc

SEQ ID NO: 48129 - DNA, 516 bp, Homo sapiens
ggaaattacttcaaactgaggtgtttggccccaggatctacagggctctaggaagtagcttatgagagcatgggcagtgccagcctcctcctctctgcttgggtgtatgtagccccctttataaagtgcctggcctgtgagcagggctccaacttttatcataggatgtaaaatgatgtaaaatttcattttgaatccccatctccaagcatggcaagatgacactgagatgccagggaatctgaaaatttctcagtcacctcccagatgagcggagccaatgactctcccctgcccagacagagacctccacccacactcaggcagagaggccctccctaggcaggtccctacaaactgagcacaaaggcaggactcctggcactggagtcaagagtgtgggcaccctgagccaagcactgtcctagaactctttgctgggtctttatggcggtcaccagggcctggctctggaagcagactcagggtgatctgggggtacaccaatgcctcagc

SEQ ID NO: 48130 - DNA, 583 bp, Homo sapiens
  misc_feature (1)...(583): n = a,t,c or g
gcggctataaggggcggaggctgggcggcgttgctctgcgctctgcggctgacggcgcttttttntccggtgagttttgtggcgggaagcttctgcgctggtgcttagtaaccgactttcctccggactcctgcacgacctgctcctacagccggcgatccactcccggctgttcccccggagggtccagaggcctttcagaaggagaaggcagctctgtttctctgcagaggagtagggtcctttcagccatgaagcatgtgttgaacctctacctgttaggtgtggtactgaccctactctccatcttcgttagagtgatggagtccctagagggcttactagagagcccatcgcctgggacctcctggaccaccagaagccaactagccaacacagagcccaccaagggccttccagaccatccatccagaagcatgtgataagacctccttccatactggccatattttggaacactgacctagacatgtccagatgggagtcccattcctagcagacaagctgagcaccgttgtaaccagagaactattactaggccttgaagaacctgtctaactgg

SEQ ID NO: 48131 - DNA, 875 bp, Homo sapiens
  misc_feature (1)...(875): n = a,t,c or g
cagtgaccaagtgtaatttcactggtgatggaaagacaggggcatcctggacagacaacatcatggcccaaaagtgttcgaagggggctgcagcggagatccgagagcagggggatggggcagaggacgaggagtgggatgactgagggacgtggctgcctctgggggcaccagcaccttctgtagcattgtggaacatttcttccatgaacttctactctggagctggagagaacagtctgccaagtcttacctggttcttccccatagccaccttggaatactctttgaacaagctctgctaaaaccaaacccatgaccactgtgttggtggtggggcctcatgctgtggctcagggagggcccctccctgcatgtgagtctagccttcctagacattacatgatgaccctttaaaaaaaaattagagatgggntctcanngtgttgccaggctnatctcnanctcntggactcaggggatcnaccaacctccnantcccaagggtgttgggattacaangcgtgagcnancgcaccagcctcatgttgaccctggccctggatagcagctttgtttgtagaggcaggtggtgggagagaccctaggacagcctgagagtaactggacctggtattggtgcggagtggggaatatcccttgtctaaatgcagagcagctgagagaagttagcggggctcttcctccgttctcattgtttcctgctttccttccccacccaccccttcctcagcactctgtgttgtagcctgtactatcctgcttcaagcctccgtgtcccttgtaccttccccctaccttgagttgccagttctttactccctcaaatgttcccatgccacctctggggtttc

SEQ ID NO: 48132 - DNA, 502 bp, Homo sapiens; identical to SEQ ID NO: 5348

SEQ ID NO: 48133 - DNA, 1579 bp, Homo sapiens
ttttttttttttaaagaatcataatgactatcatttattgaagaaagaaagcaaaaaaaactaacaattgtgatgggggaggagagacagcttggcaacattccttttaaagttaagttagcataaagaaaacaatatttaggtaaatgaaataggattttcaagggtagggaaaagtagtactcaaggaatgtatttttggatacaaaaattcagttacacaatcagtagcattccaaattagttatgagtatttatacaattacaaaaatggattcatgttttaacaaagtattttaaaagctcaaacattttaaaacaggcacaatattctaaagggcatatgcattcaccatgggcttttgaatgtcctcactcccaacttcacaatcaaaatctacagaagcggcaaaagatcagagttcagagggctattttttttttccctttccttacttaaggttgcaaacacattgacagaggcaaaataaacacgtttcatagcagaaagaccaaaaaattgaatgtaaaccatagctctcccttgggagattacacaaatacaaggttcatctgtacttagaacaaggctcataacttcttgtagcatggacattcaacaggcacagagcaacaacattcacccaaataccagctgcaatttgtcctttaaggatgcctcacaaggatattatgtccaggtagctagtccatttatatcggggaccagttgtccttttgttgtttgtggctgtttattaaatgtagtggcacaactttgttgtgaatatgtaccatcatttgctacaatctagacagatcatcctgtctacaaaaaatcattttctacatttctaagaccattatcagtttatctgctcctgctagaaaaggacatactttttgtcaatttacattaacaaaggctctgctactccccatttactcgctgcaatgaaaactggtaagccaagggtaaagcttaagtatcagggactatgaatttagggtagaagtgaaaataaccaaagtggaactaaatcccccctatcttgagtgcaactgagatcaagtaaacttcgctggactttccttccttaactataaaactattaacccagaaggtaaagtcacacaattttacctcccaacaaacttttaaaataaaaatttccaaaaaatttagatgtctaggttttgttatatcttaccaagagttacacagacataaatttgtatttaacttcagttaaacatctattcactttttaaaaatgctgtctgcaaataaactactggacatcttaagcttactaaaaaaaacttaagatttttaaattaaaaaaaaaaaactaggacaaaaatctagcaaatggtttcacgtacctttaaacactgattcttaaaaatttatatgctgaaaatgaggtttgagaatacgtattttaaaccatttataatcctaccgtcgactctagtcagaagttatctgagcaaagagaaaataaagcctggcgtagacagtcccatagaaaatagaatccatagccactgggctgcccttcaatttcccaattca

SEQ ID NO: 48134 - DNA, 1419 bp, Homo sapiens
  misc_feature (1)...(1419): n = a,t,c or g
cacttacatgaatgcatgtatttgtaatgattataattaaactctcttgctgaagggctcagagtttacaaaaaaatttatttgtgtctgagagccacgattgagaacattaaaaaggtcctcctgggaatgtaacttgggggaaatgtggcgagagggcaggactcggcagcccatgggcatgccacaagatgcgcccaggcgctctggggtgaactctgctgtgacttcaggccagaggtgtctgcccccgcagtgccctgacagctgagtggtcggaaggccccggctgggaaaggattcatttggaatctttcttcttcttctttttcactagcgtttcttctagtgtagcgtcctctgctatctctactggtttttgcagctttttcttccctctcctctttttgggcttcagggtgaagtcccggccctcaggcggctgcacatggtcccctgcatcctgagcagaggccttggaactctggtcccagcaggggcctctgagctgctcttcatgtggcgcgctcttcttcttggccactcgctcgctggcctcgcgtctcgggctttccctccgtgtcctcttgccttaggctggaggtaactttccacatctttacctgtggcctctttatttcttttcttcccccttttacgttccacctgcgtctcagaaatgtcagaccctggaactggaacctggggcttgttcttcagtgctgccatccgcttggcaaagtactcctggatggtgaaggcgctggttgtcgtggtttcggttctccttctggagtggagggacntgcatcgccctcgggagtcttcttactctgtcttttcccaaaaatgcagtcaagatctgttttgctccgagatgacagatccttcccttttgtgaatntcatatagtgaaacacggtttttggagattttggacttttcctcaaggctaaaagatttcttttccttcttgtccgaggaatctgtggtttcctgcccatggcaagtgttcagttcggccagaagctggttaaaatcatcctgatgggcaatccagttgtcttcattattgatggtagctccgagtcccaggtggttatttttcacttgaactttaatatgatctgtggctccttgctcctgagcccctaaaccctttcctttagaccaccccatcttctctagcatccgctggccaaacttggaatcgtcattactccaggcagtgttctgaggatccacagcccacttctgcttccgccgacgttcagccagcatagacatgtcggagagcctgtgataccgccgcctctggacctgggtgactgcggccactgggcgggctggagactccaggagaatcaggacgtgcgtaactccctcgccggcggactgcagcggacgcctgtgccgaat

SEQ ID NO: 48135 - DNA, 721 bp, Homo sapiens
tttttttttaacaggaaaaaattatttaatagtataacaaaatgcaaaataaagtacccaagttacaaaacataaattcctttggttcatgatcacaccactatttttaccttccacatagctacagacatcacaccctcaaagtgaagtcaaactgtccccctcatactgaagatgtcatgccaaaaccatcacataccccactgttcagtgaaactgttggcaacttacatggaacagagctgtggggtaggaaaaaggggaaagggttgcgttaaaaaaaatggggagactctacacatgcagaacaagttagtgggagggagtgctctgctgggtcaacacgccatgaaccacacccctattcgtgcttacatgaggctgagtccttgctacaaccacacagaaatacagacaatcaagtgaacctgagcacccccagggataacagaagaaaaatacagagaagcagaggagagaaagaatggcagcaagaggcagatcacagaataccagggaacacctagtccaaaccctgttttacagatggggaaagtgagacctggagtagtgaagtgtcttgccaaaatacatagtttatgggagcattagaactccatgcttccttttaatgtgagcaaggaaaaaaagagattgacaagaaattgataggcctgctaaggcaggagacagacccaggcctctcattccagttctgttg

SEQ ID NO: 48136 - DNA, 1309 bp, Homo sapiens
  misc_feature (1)...(1309): n = a,t,c or g
tcccccttttccagcccagacacatggccccaggcaagcaccccatcaggctaccccgtggagggatgcccaccctttcttcctcctgtccccagtgatgggcctcctcagccgcacctggagccgcctgaggggcctgggacctctagagccctggctggtggaagcagtaaaaggagcagctctggtagaagctggcctggagggagaagctaggactcctctggcaatcccccatacnccttgggcacgacgccatgaagangaggctgaagacagtggaggccctggagaggacagagaaacacttggggctgaaaaccagcaagttcccttcctgaagcctggggacttttgggatgatgatgatggcatgtatggtgagcgagaggcaaccagtgtccctagaggggcagggaagtcaatttgcagatggccagcgtgctcccctgtctcccagccttctgataaggacactgcaaggttctgataagaacccaggggaggagaaagccgaggaagagggagttgctgaagaggagggagttaacaagttctcttatccaccatcacaccgggagtgttgtccagccgtggaggaggaggacgatgaagaagctgtaaagaaagaagctcacagaacctctacttctgccttgtctccaggatccaagcccagcacttgggtgtcttgcccaggggaggaagagaatcaagccacggaggataaaagaacagaaagaagtaaaggagccaggaagacctccgtgtccccccgagtcttcaggctccgaccccaggtcctgggagtatcgttcaggagaggcgtccgaggagaaggaggaaaaggcacacaaagaaactgggaaaggagaagctgccccaggggccgcaatcctcagccccagcccagaggccccagctcaagtcctggtggtgccaacccagtgatgaagaggagggtgaggtcaaggctttgggggcagctgagaaggatggagaagctgagcccctgcctcacccctgctgcccgggccagagcctgggcacgcctcaggaacccacctttagcccccatccctgccctcacccagaccttgccttcctcctctgtcccttcgtccccagtccagaccacgcccttgagccaagctgtggccacaccttcccgctcgtctgctgctgcagcggctgccctggacctcagtgggaggcgtggctgagaccaactggtttgcctataatttattaactatttattttttctaagtgtgggtttatataaggaataaagccttttgatttgtaa

SEQ ID NO: 48137 - DNA, 792 bp, Homo sapiens
  misc_feature (1)...(792): n = a,t,c or g
cgagtggctgccccacaaaatgcctgcttctctgcggaatcctactgttcttcacatgctctctaataccatcttttcatatccactttctcttccatgttgaaaaattaaattgacaggctggattctgcaaagatctttggacatttaagtatcttcgaccggcgcgaaaagaggcggcctgaccttggaagtgggacggggtcctgcagcgggtccttccggcgggtgacattcagccggcggttcggggcgacggactctccattccagaaccatggcccaatttgtccgtaaccttgtggagaagaccccggcgctggtgaacgctgctgtgacttactcgaagcctcgattggccacattttggtactacgccaaggttgagcctggttcctcccacccctgctgagatccctagagctattcagagcctgaaaaaaaatagtcaatagtgctcagactggtagcttcaaacagctcacagttaaggaagctgtgctgaatggtttggtggccactgaggtgttgatgtggttttatgtcggagagattataggcaagcggggcatcattggctatgatgtttgaagaccaatctttaacatctgattatatttgatttattattttgagtgttgttggaccatgtgtgatcagactgctatctgaataaaataagatttgtcaaaactcagtgttttctncatcagatactccatgaaaggtcacaatttctcttgatattaagctgggttgtctttaaacaaccctaaatacacgtctgtttag

SEQ ID NO: 48138 - DNA, 1015 bp, Homo sapiens
ttctgacgagccacacgtttgcttcttccctgtgttcccagctggagggacatgagtgtccctgggccgtcgtctccggacggggccctgacacggccaccctactgcctggaggccggggagccgacgcctggtttaagtgacacttctccagatgaagggttaatagaggacttgactatagaagacaaagcagtggagcaactggcagaaggattgctttctcattatttgccagatctgcagagatcaaaacaagccctccaggaactcacacagaaccaagttgtattgttagacacactggaacaagagatttcaaaatttaaagaatgtcattctatgttggatattaatgctttgtttgctgaggctaaacactatcatgccaagttggtgaatataagaaaagagatgctgatgcttcatgaaaaacatcaagttaaaaaaaagagcacttaaactgcagcagaagaggcaaaaagaagagttggaaagggagcagcaacgagagaaggagtttgaaagagaagagcagttaactgccagaccagccaaaaggatgtgaaaagttgtgtttgtgtgttttcttctcctgtcccatatttgggttatgatgactcaagtgtagactgaagttgaggtagtgccttatgccattatgtcatatgttgaaatccttattccggtattactgtgtctccatgccttttttcccaagtagccagacgtccatgttgccatggtttttgatatttatatgtaagtttttcaaattttgcttaattttaaaatttattattttgatcttgaattatttataaactggaaagtggtttgattattgtgagtcaaaactctaagtggttaaaaattagtatgaattttttagcttcttaatgaatatggatttaaaactctccagttcttattttatgaaatgacttgcctttctggtaatacaatgctgattttttagtaattgccttttcattactttgttaagaagaaatgc

SEQ ID NO: 48139 - DNA, 424 bp, Homo sapiens
gatctcctcaaggctcccctcacaaaggttacacacttattccatcagctaaatctgacaacttgtctgactccagccatagtgagatttcttcacggtccagcatcgtgagcaattgttctgttgactccatgtctgcagctctacaggatgaacggtgttcctctcaggccctggcagtccctgaatccactggggcattggaaaagacagagcacgcttcagggataggagatcatagtcaacatggccctgggtggacactcttgaagccatctctaatcaagtgtttagctgtctcatcgtctgtgagcaatgaagagatttctcaagagcatatcattatagaagcagctgacagtgggtcgtgggaagttgggacttcgtgttcaagcagctcccatgacaacttccaaagccttcc

SEQ ID NO: 48140 - DNA, 1612 bp, Homo sapiens
tttttttttttttttttcagacatgatttgtcagcctttattaatcaagagtaaagccgagccctagggtttccttaacaacaacaaaaagaacatcaaccttgtttatggcaaacagtgacttaattcttaatgactgttcattatatgtttaacaccacagagcaagaattgatcacgtttcaatcacttattcttcctgagattaaaatacaagatttaaaacgagattaaagataaaattcactccaagtaatttaaaaagataattccacaatgaaagacagtttcaagacactgtatataggaacctcaggaccgaaaagaagaccttaaaacattttttaccttttgagggtagcacaataatgctgaattagattgtatttttattaccagtggagctttaaaaagaaccaacaccgggaatcctaccccctttgcttcaagggtggggctacatgggtttttacgccaaccccctcatgaggttagtgacagttcatgtccttttttttttgtttttttttttttagagtataaagatagccctgcagtgtgtaaaaggaaacctatgggaaggctgcttcccataaaatagacaatagaatcattgaggaacgtcagcagtcaagacaggaggaacaagaggtcattgtagtgaaaaaccaaaacaacttgtatcttggcaagattggtttacaagttcatgacaagaacaaaaattccaacatcagccaactgaaaataaaagataaaagatgacattcatggatctttttatttttctctgtgcaaaatgctcttctttctgaattagagggtagcttgtacactgtgacatgacatgaaatgctgtgtgcccagggtgctgctgggtgccaacagcacctctcactgaatacgatatcactgtgtgcagagaaaacgggcaatcagaggataaacataacctctcctggctggagaaccatttcttgcgactttgctgctgaattcactcattaaactgctcaaaggaaaagctctaccctgatttctgagagtctacagcaatatatgtaacacaattatatatgaagactattgactaacaggacaatagcacatgaacctttccttcagagaattcaaccaagagaagagagtgggtggcataagctgggggccaaaaggaaggctctcaggaatattctctaccatccaaaatcaacagcaaagccagaaaaggggcatgagctctaattcattgaagagaacaccacaaaacagttaacaaagggatctctttccaacacatgctcctctccatgaggctcaaccgtcagtgcagggcttgcctgatgtggacaatgtggatacctcagccctgagttgaacttggcatgccacctttgattccccatgctgcaaaaagaattggaacgctgtcaggtcctggcaccgtggtaatggctatatcctatttcactcacacacgtccttttaaagtctcccttcctcaagctattaaatagaaccctctagggatcctgtatgcagtgagggtctgaactgatgatccatatgtcaatcagtagttggaggaggatgacttttttttttttttttt

SEQ ID NO: 48141 - DNA, 942 bp, Homo sapiens
ctcaaaacataatttctgtttcatggagatgaatacaaggctgcaagtggaacatcctgttactgagatgatcacaggaactgacttggtggagtggcagcttagaattgcagcaggagagaagattcctttgagccaggaagaaataactctgcaggggcaatcccttcgaagctagaatatatgcagaagatcctagcaataacttcatgcctgtggcaggcccattagtgcacctctctactcctcgagcagacccttccaccaggattgaaactggagtacggcaaggagacggaagtttccgtgcattatgaccccatgattgcgaagctggtcgtgtgggcagcagatcgccaggcggcattgacaaaactgaggtacagccttcgtcagtacaatattgttggactgcccaccaacattgacttcttactcaacctgtctggccacccagagtttgaagctgggaacgtgcacactgatttcatccctcaacaccacaaacagttgttgctcagtcggaaggctgcagccaaagagtctttatggccagggcagccctgggtctcatcctcaaggagaaagccatgaccgacactttcactcttcaggcacatgatcaattctctccattttcgtctagcagtggaagaagactgaatatctcgtataccagaaacatgactcttaaagatggtaaaaacagttttcgtctcctcggataatcaaccatttccatactcatgtaatctaggcatactctggagttattacaggtttggttccagaccactacaataaaatgtagccatagctgtaacgtataaccatgatgggtcttatagcatgcagattgaagaaaactttccaagtccttgggtaatctttacagccgagggagactgcacttacctgaaatgttccgttaatgggagttgc

SEQ ID NO: 48142 - DNA, 902 bp, Homo sapiens; identical to SEQ ID NO: 5375

SEQ ID NO: 48143 - DNA, 929 bp, Homo sapiens
tttttttttgaatgagttatgatatagttattttttattgtgtaagcccttattagttcctccctcatcccatcttaaaatattcaacaatagatagtggctcaaaaatttttttttaaaaaaacagactgccatgaaaaccaaatcttttcttcctgtaatagtggcttcctagtgttatttctcattaatgggagtatccgtggacttaactgtatattgcattttagttctggtcgtgtaataatttaatgacttcacacataaaaaactaatcttgtcttgagttttaaaaagttactagcacccatggttaaggaaggaaaactgtagctcacttcttcaatacatttgtttcttttcaattcatgaaatcagagaatatggaagaaacaggatgacagtcaccaagagtggttgaaactacaaactatcacggcaattgaaaataccacattaaagatatatttatatacagaaaatggagcaatgccaataaaattttataatttaaaaaagttacttgttaaaggcagatttcataagttgtgtttacaatcatccatttaatcatctccaaaaaaaggatgaatttattattttaaactaacattctgtaagttaaagagaataatcaagttgtctcatggactggaaggtgacttattaattccctttcatttccaaacctcatcaagcagtcactacatttatgaggcaagtcagctgaatgcttgaaatctagatgaattttaagatcttcaatttgtcctgttgaatattcacaatattgacataaataaatcccttcagataaatgtgaatttaaatgcttggcaatattctagcatacttgaaaagcctttcccacagtcatcacaaacatgaggaaaaatttttgtatgttcaatagcaacatgcctggttac

SEQ ID NO: 48144 - DNA, 660 bp, Homo sapiens
gcggggcgggtgctgcttgctgcaggctctggggagtcgccatgcctacaacacagcagtcccctcaggatgagcaggaaaagctcttggatgaagccatacaggctgtgaaggtccagtcattccaaatgaagagatgcctggacaaaaacaagcttatggatgctctaaaacatgcttctaatatgcttggtgaactccggacttctatgttatcaccaaagagttactatgaactttatatggccatttctgatgaactgcactacttggaggtctacctgacagatgagtttgctaaaggaaggaaagtggcagatctctacgaacttgtacagtatgctggaaacattatcccaaggctttaccttttgatcacagttggagttgtatatgtcaagtcatttcctcagtccaggaaggatattttgaaagatttggtagaaatgtgccgtggtgtgcaacatcccttgaggggtctgtttcttcgaaattaccttcttcagtgtaccagaaatatcttacctgatgaaggagagccaacagatgaagaaacaactggtgacatcagtgattccatggattttgtactgctcaactttgcagaaatgaacaagctctgggtgcgaatgcagcatcagggacatagccgagatagag

SEQ ID NO: 48145 - DNA, 997 bp, Homo sapiens
gtcaccatggctgttactggctcccttgctgtccccaactgttcctcaggtcacctccccaccttgctgcctatgtcccgagggagtgcacaggttccagtggatcagaaacctggtcccagaatttggagtctccagttctcacgttagggtgctttcttccccggcagagtttttcgagctcatgaaggtggactgcctggaaagtactctagaaaagtcactccaagcaaagtttccttcaaatctcaaggtctccattctcttagacttcacgcggggctcacgaggccggaagaactcccgcacaatgctgctcccactcctgcggaggttcccagagcaggtccgagtctccctctttcacacgccgcacctccgtgggctgcttcggctcctcatccctgagcgcttcaacgagaccatcggcctccagcacattaaggtgtacctcttcgacaacagcgtcatcttgagcggtgcaaacctgagtgactcctacttcaccaaccgccaggaccgctacgtgttcctgcaggactgtgcggagattgccgacttcttcacggagctggtggacgcggtgggggatgtgtccctgcagctgcagggggacgacacggtgcaggtggtggatgggatggtgcatccttacaaaggggaccgggccgagtactgcaaggcagccaataagagggtcatggatgtgatcaactcagccaggacccgccagcagatgctgcatgcccagaccttccacagcaactctcttttgacccaggaagatgcagcagctgctggggatcgcagaccagcccctgacacctggatttatccgctgattcagatgaagcccttcgagattcaaatcgatgagattgtcactgagaccctgttgactgaggcggagcgcggggcaaaggtctacctcaccactggctatttcaacctgacccaggcctacatggacctggtcttgggcactcgggctgagtac

SEQ ID NO: 48146 - DNA, 726 bp, Homo sapiens; identical to SEQ ID NO: 5380

SEQ ID NO: 48147 - DNA, 1723 bp, Homo sapiens
ttttttttttttttacaatttgagaattctaattcaagaaatacagcttccagaggatcctttaggatctatgttcttattgcacatggctcagcccgtctagggacatctaccaagaccagatggtcggggcgtgggggcagagcaccggggccacagtgggtaggcactctggccacatcagttcttataatctctctgggctgaagtggctgcttcattgcagggttggaccttgtttaaaaaccagatttgacatttccttaccgaacttcctttcccagcaagaatcctatttgttgggggacttttaaaaaaagagccgagagaaactctgggagggtgggttatcacctcctggctggcagcttggggaagtaaggctttggaagacggcgggcgcaatgacacacccaccgccacaggaaaacatggtcattccagaaggcccaggagaaactgtgggaataaataaaacctccctcctcccactggcggcaagtgctgttttaagcaaaatcctcatttcaatgtgagggtaagaaaactattctggttcaggtgtatcctttgtccaaggtacgagaggaggcctggcggtcacatcaacagcgagtgaagacagaggcagccacgggcactgccttttcttcaggagtcgaggaggctgccctggggtcccggcaccactgactgactcggaggaagaactttctgaagtccttggtgcatgacttaggaaaaaccagtggcaatgatggagctgtgccctgtggcacctataaggcaaagcccactgagggacttaggggtggggaaatggttaggtagatcctggccccctctgcaggccttcccttctgtgggcagggggctggagggctcctgggcacccaggacaaagagcccaccagcgctgctgagaggggagaggtggtctcacccaagcaggtccttgtggggcctctactgtgactcaatactgacctggcacctgcctccatggcctgctcctctccaggttaaccataatccctgaaggccttcgcggggttcacacctatcatggattactgctgcccatcaaaacccaggctgggggtttcggggggctgtgaaaagctctgatgcgactctccttatgctgtcagctacagctaatgtctagcaaaaacatcacccagggtaccttccccaaacaggcctcattttctaaaacatggaagaaatcagctcaacaacttaaccaaatccctgcagagtttaaaaagtagactatatatatatatatcttcatatatgcctatttacatataaatagatatatatacatatacacgcatctataaattacattctatggagagttctctttcttcctcctatctttggccagggcctctggcttctcctgagaggtggctggtggtggctcctgtgagggaggaaaggcagctgggtgccccctcccccagcccttcccactgatatctgctgcgagttttacattctactttcgttgccatggtttctgtatcctaggagagaggcgatgcggagcctccgccagccctgcgagggagggaagcagccccatggcaggttttctgtctgtcctaagagctttctgcatttactgggtgagagagagggcagctgtgcagcgttcggcctccaattccattttaattttgtttctttgtttgtctttcctcaaatatac

SEQ ID NO: 48148 - DNA, 1542 bp, Homo sapiens
gagcggtggaggcggatttcctgggcccggccctctggcgctaccatggcgtttggcaagagtcaccgggatccctacgcgacctccgtgggccacctcatagaaaaggctacatttgctggagttcagactgaagattggggccagttcatgcacatctgtgacataattaacactacccaggatgggccaaaagatgcagtgaaagctttgaagaaaaggatttccaaaaactacaatcataaagaaatccaacttaccttgtcacttattgacatgtgtgtgcagaactgtggtccaagtttccagtctctgattgtgaagaaggaatttgttaaagagaatttagttaagctactgaatcccagatacaacttgccattagacattcagaatagaatcttgaatttcattaagacttggtcacagggcttcccaggaggtgtggatgtaagcgaagtcaaagaagtatacctcgacctggttaagaaaggcgttcagtttcctccctcagaagcagaggctgaaacagcaagacaagagactgctcaaatctcatcaaatcctccaacatctgtccctactgcaccagctctttcttctgtaattgctccaaagaactcgactgttacattggtcccagaacagattggaaaactgcacagtgaattggatatggtgaaaatgaatgtgcgagtgatgtccgccatattgatggagaatactcctgggtctgaaaaccatgaagacatagagcttctgcagaaactctataaaacaggtcgggagatgcaggagaggatcatggacctgcttgtggtggtggagaacgaagatgtaactgttgagctaattcaggtgaatgaggatttgaataatgctatccttggatatgagaggtttactagaaaccaacaaaggattttggagcaaaataagaaccagaaggaagccaccaatactaccagtgagccttctgccccatctcaagatctcctcgacctaagtcccagtccccggatgcctagggccactctgggagaactcaacaccatgaataatcaactttcaggcttaaatttcagccttccaagttctgatgtaacaaacaacttaaaacccagtcttcatccacagatgaacttgctagccttggagaatacagagatacccccgtttgcccaaaggaccagccaaaacctcacctcaagccacgcatatgataattttctggaacattcaaattcagtgtttctacagccagttagtctacaaaccattgcagcagcaccatcaaaccagagtctgccacctttgcccagcaatcatccagcgatgacaaaaagtgatctccagccacctaattactacgaggtaatggagtttgatcccttagctcctgctgtcactacagaagctatttatgaagaaattgatgctcaccagcacaaaggagctcaaaatgatggtgactgagaagaaagtggatgatcagcttcactaccacattcaaaggtgccaacttttttaaaaacgtaggac

SEQ ID NO: 48149 - DNA, 1927 bp, Homo sapiens
cagggagggcaagggtttccttttggcgcttccctttggaccccggagtgaaaaactctaacgtccagatcagtggagagaaacgcagatttaggaccctgaggagtctttttcacccgtttcccgtcactcgctcaggcgcgccgagggcagtccttgtggggtcctcgtggccagccaagatggttgcccccgcagtgaaggttgcccgaggatggtcgggcctgggcgttgggcgtgcggcgggctgtcttgcagcttccagggctaactcaggtgagatggagccgctatagtcctgaattcaaggatcccttgattgacaatggaatattatccgcaagccaagttggaaggaagctaacttgaaggaaggagaaatatgtttcgggagctcaaagaaagactcaagctcatcaaaagcttgctccagcagggaaaacaaggttctgtgtttgaagacccagtcatcagtaaattcaccaacatgatgatgatagggaggaaacaaagtactggccagatccctcatgatttcagactctgggaagctgtggaaaagggaaggcagttttgaggaagttacccttgccgcttcttgccaggagggaacagggcaaccattcgaacggcaaccccttacaccatcttccatcaagcactgaaaaactgtgagcctatgattgggctgggtacccttccttcaagggaggccgtttctaccaggtccctgtacccctaccccgaccggcgtcgccgcttcctagccatgaagtggatgatcactgagtgccgggataaaaagcaccagcggacactgatgccggagaagctgtcacacaagctgctggaggctttccataaccagggccccgtgatcaagaggaagcatgacttgcacaagatggcagaggccaaccgtgccctggcccactaccgctggtggtagagtctccaggaggagcccagggccctctgccgcaagaaacagtgtgagctactgccacgctgaaaactacctgtgggttaaggatgtagttcctttgtaagggtgggcaggcctcgtaagaaagatgtagcagcatattcactatccgttaatccttctttctttgaggctggaacttgctctctctgcccctatttccttgtaaagagggagcacattgacttgggaatttcctccaggaaactcagggctgttttctcttcccttaggttggggcggacctttggacatataaaggaagcagttttagtatcagaaaagatttattagaaaattctcacgctgaactggtgtagcatgtggtgcagcattcagtgaaactggctggaggaaataggcttgtttccagagttgtccttatacaaaatgtataaaaagcagtttctggtgtgacttgtgctctgcctccaccccttgacatcccaaaatatcccaccagtggctatgcttacccattttacagatgggtaaactgaggcaccaaggtagtagttgcactaatggttacacagtgcagtggctcttgggagttgcccttctctgcctggccgtggtgggttgtggtggggaaaggggctcagggcaggaccacggcataagtgggaaacatctcaccaggagatgggaaagtctagaagggaagacactcaaagtctggaagggaaaagtctttgggtgaggcagagactccactgccagctttagaggtgggtagaagaaaggccagtgctggtgaggaagccctgatctggaggcctagtcggagacttcgctgtagtaatacttgtgggcagctggcgttgtcttccagccggccgcccggaactcaatgatctccagcagcagcagctgggccagggagctgaggccagttgggagcaggaagccatcccggatcagcacaaagagctcatccat

SEQ ID NO: 48150 - DNA, 1238 bp, Homo sapiens
ttttttgtttttatgcaaaattcaaactgtatataattcacatttatgcttctaaacaaatagaagctcacatctgtactacttttacaatttacaaagtgcttttatatacattttctcatttgctattcatgacagacacgtgagacaaatattcttattttacagatggaaatagacccagacattattcagtactttaaccactaatagtggaaccctgagactttagatctgcaaaggggtttaataatgcaaatatcacatatatttccatttttaacaccatatttaagttttccattttcttaatagaaaatgataaaaaatgttttccccaatataataatacaaatggaaaatattatagacagtcatatactaacccaatgaccaagattcaccagaagcaaaacctatttggaggggtcctatattgttacatatatacagggcaccagcaccagaaccacatttagactaatactttttatttctaattaaaagaaaacaatgcagggcactcctgcagcctgcaagtctaactgtacatacgtatgtgtcagactatgcaggtggccaagaagaatgcaaagagatattttatccaaatttggagtttagggcctgattgtcctagcttaagcccataggaacctgacaactcgttcatacctctcatctttagtcatagtttctccttctccatccccttttctccgtaactaccctgtgccatttagactggaaattctaacaggtagctttttctttctgaattatctttactactgtataatttttattttcagaatattccttatttctacatctcgaagacatttctttatagtagatgggggagctagagcttacattcactgccagaaaagggtcagttccagtgttaatttcccagcaaacacctgagagaaaaactgaacagaaaaagaatagtgataggtggcagagcagtgacacctgtgcccagaaagccgcactgcaattgtctaatatttgaggctctcctttgttataactctgccaatttaaactagaaaattctggctgcttgaaaattcaaagcagatcaatacatttaaatcaccggttcaaaaaatcactctttttcatgttataatgtttttattgcaattgaggatgttttcaataagtatcttgagcttgaggccctggctaagtattccttttgtactagaaatcagatttctctgcac

SEQ ID NO: 48151 - DNA, 816 bp, Homo sapiens
ataatcagaaggttgtcctttgtctcagcaatttttaagctaatagtagcagaaattgcagtggaaatagactgctttgccacagcattcagaaaatcatttatctttttattgcagttcttgtcaccaaacaatacattttagtacttctcaaattgcagaactctcatagggctgggaaaatgcctgtagacacatacatactatgaatgtgctaatgttttttgtattttcatagcccatcaaagctcctgagtcagtttccactataatcactgcagaatcaatcttctacaagggagtatattaccaaattggtgatgttgtttctgtgattgatgaacaagatggaaagccctactatgctcaaatcagaggttttatccaggaccagtattgcgagaagagtgcagcactgacgtggctcattcctaccctctctagccccagagaccaatttgatcccgcctcctatatcatagggccagaggaagatcttccaaggaagatggaatacttggaatttgtttgtcatgcaccttctgagtatttcaagtcacggtcatcaccatttcccacagttcccaccagaccagagaagggctacatatggactcatgttgggcctactcctgcaataacaattaaggaatcagttgccaaccatttgtagttcacaaattaaaactgggtttccagggcctggtgtggtggctcacgcctgtagccccagctattgcaccactgctctccaagctggggcaatggagtcagattctctttcttaaaaaaccacaaaaaaactggatttccagt

SEQ ID NO: 48152 - DNA, 1086 bp, Homo sapiens
  misc_feature (1)...(1086): n = a,t,c or g
atttttaagcttttattttatcactcttatcaaacacacatcagaaagcattatcaacagtgcatcttatggtaagtcagtttacaacaaaactgaacaaggcaattgtgtttacagaaaaagtcttcagcaaaaaagtatgcaatacagtcaactgaaacgcattgttcacactttttaggaatataggaaagtggaaaataaaagttctttgctattcagcaggaaagagtttaaaagacttgaatggaaatcagaaatttagggatttgagaaaataactttttggtactgacacacatctacatacatagtcccacttagtttttgttttttctttaaaaaaaaaacaaaagctcacaaacaataagacatcacaaataatacagcagaaccacagtgccaagaaatgccaagaccaatatgctactgaaacaactggtagaaatgtcacagacaactattcactatgtattgtaatattcttgtagttcctgaggtgaaggtaaaccaacaggagagattactccttgtaactggctttggtttaagtgatctttcacatttttttctaaccataccttcttataaaaaatgtagcaattacatgttactgagggaaaatagtactaggttttaatattcacaaccaactactccagctgacacaggatgccatcaaccattaaaatttattgatcatacttagattttctaaggctgatcaacagatagcaaagatggaacccttttgggaaaaaataaaatcccttctaccccagttttgacactgttaagaggttataaaggaatgttaaattatttaagatatttcaaaaaagaattaagaatggaagagtaaattctgctggaaaagatagggcagctttacagtctgcaaagtaaataatctacagagatgcagcttaacttttttttattataataaacatacttatttccataaggtgctgtgactttgcagctagtgcatactaatgccacccactgtacccaatgtgcaaaaggaaataatggagatggctaacctccagttttctganccttgatttgcataagtggtga

SEQ ID NO: 48153 - DNA, 2122 bp, Homo sapiens
  misc_feature (1)...(2122): n = a,t,c or g
tattctgactcagaatagcttaagaccctcagggtcatagaaaaataccatcataatctcttttatggtaggttggcaatataaattattaacaaactctaaaatattaccagtacctgaaaaaaaaaaattcagcagaaaactgtgaagtggaacatttagtcactgtttttcattcattttgaaatttttatatgtttacatatatctgttgtaaaaaataccaactttccaagtactaggaatgctgaccactaagcctgatctaaagtttatgttggggacctcaggtatacaggagtggaacagggacaggagtgaaagctttgactgaagacaaatgtgggcttatggcctatctctgtcactaatttaactatatgggcaaagtactaaacctgtgtcttcatctgtaacatagggattagacaccagtgataggagggtcttggtcagtagctaatcacagagctgcttccttaaaagccttgagtacttttgtttaaaagtttaggtctacttgaaagtctgtaaagtgctaatttttatcatcctgagagatctgtttctcccctttccagttaccagtggcattctcccaaaactgttagtatctatgttatagaaagatacttaaatgctatgataaattgtatgaaaaaaactttaaaattcagcaagcaattcttaatgaaagataaaactggccctctagtaccataattagtttagaattcagtcttttaaattatttgcaccttgagactctgtgaaatgaaaacatttaacagtaaactcttgtcccaagggagcaaagtgagagtaaatgctggtccatagtgatggggaaaaaggactgtgttcaccatgagtttttcaggatgcagcataaagcttatctaaatactacacagatcattatcttttaacccaaccaatcatatattcaaattaagggaaaaatatgtaagcttttcctttggaacctgagacaccaggagccttaaaccacaaataatatactgtagctatggacagggtagtcaaatttatttcaaaacaaaagctttgttgggctgcatcaaatgcaggagaaaaggaatacttaggggcatggttaaattaccagtgtgcgtaacagtgaggtatgcctcaaataagcctttaaaactttataaactgaactagaacatacccatgcagtaatattttttcagtgctactaatgaaaaaaaaaaattaaagcctgcactggaaatttacaatatggcagaatttgttacttttaccttttgaccctaatgtacagattttatgacagggtctgtgttaaaaatctaaacattttcacaagattttaaacatcactggaaagctgaatttagaggaaacaatatcagataaaagtacaatgcccgtgacagccaacattatgtaactgggctgtatgaggttgtttagaaggctagggttaaaaagatagatagacaaaaagatttttaaaaatcacccccaaagttgatgcgctgatttgaacataagtacaccagatactacagcaaggggatatacactgcaaaaaggtcatctatttacagaagagtgatttaaagacattatggttttctttacagatgtaagaacagcaactgttcactttttaaaaactctacatctcaaccctccactattattatagtccactgaattgcctgtatcaaaggcagttttttgtttgtttttttcccatttgactctccaaatgaacttccatcatttcttcatcatctgtgggctggctctcctgaaaagtctcagggaataagtcacaggagggcaggtttttgacctgctactaaaaattaaaccacaaaaactagagatccctctcctgcaccctgttcccctcactttgtgcagttcagtcatcactatccgacagggtctcgtactgtgctgagagcagtggggcagggctctcgctcccagatcctgttctgttggtgaggagctgcttggttcaccgcagagggagcacatgcaatcggtgttggtggagtactgctgagcatccgcatagtcagagggntataagggancttagtgagccttttaagagggc

SEQ ID NO: 48154 - DNA, 536 bp, Homo sapiens; identical to SEQ ID NO: 5411

SEQ ID NO: 48155 - DNA, 359 bp, Homo sapiens
ccctttaaaccatttgggtggggttccttagcttctgcctataggaacataagtaatgaaaggtcatctaggtgtgtgtttggaatttttttcttttgttttttggaaaatggaaagaacaaggcaaggaaggaaaattaatggggaagctgaagggaggaaatgttacagtaatccactgagatgtagtttagtcaaacataggtatatgaactgttaatcttggtggattccgttgggatttgttttttacatctcctttttccttccttgaagaaaaattcttggctgtcccaaggattcttcatgtatattgcaaaatttaatatatttgttcacttgagtcttaagagtaggtc

SEQ ID NO: 48156 - DNA, 495 bp, Homo sapiens
tttctttgtctctggattgtttcccttggtctctggctttgctttcttcgtctccggttttgctttcttctgcatttgaggaagatgatacagaggacaggctaatagattgatcaggaaagtccaagtcaggtgtcaaatagatcactatcatctaatattaccaatgttttcttttgtttctttttctgggactttttcaatggctgttctctttcagagtgtttcctagcaagacaattcatactttttgttgctgcactggcatccacagttactgatgggccacaaaagtttttagtttctggaatggtatcaactggtaatggtagaataaactcaagattactatataaaaaatctacattccgcatttggaattctgtaagaagctggatgaatttatgccattcttccttcattgtgattttgtgctttaaaaatgaaaataagtcttcagatggggaaaaaatgttcttaaggccaaacaaggtc

SEQ ID NO: 48157 - DNA, 893 bp, Homo sapiens
tttacatctgagagcagaggctttatttacaatgacattcaaacaggatttagcaaaggatgcctcttcctgctcgcatcttagcagcatgggttgtacttcataaacagaaaagagaaatatcctgggagcaggaagtgaactcttttctcagataatgttctctaaatcccaacacgttccatgctcccggctcttagcaggtagttggtggacacttggttatagcagctgggtgccagatgcctgcatctcactgaggaatgtgttcagggaagatgtcaacactggccgggaaaaacatcaggctttcacctcactcatggcctccataaggcgagcgctgtttgtgactgctgtcgtcaggaaaatgaacctgtagcctttctctctgcccaggaaccggagggctgagatctcagagaatgtacaaccacccaagaacaccaccaagatgaggcgcagggactcactggaagccttgtcttccttagtcatatctgtgaatgcaaagtcactgcagttgagcagccgtaccacctcatcaaggccctgccagcttcgccgctctagcacctgctcaatgattcggcagctcaggggcacataagcaccaccgaagacgtaagccatgtctcggggcactttcagatcatactcgccgtccacacgtgggatcaaattcagctttttgctgatggcacgaaaattgctcctcttggccagagaactgaaggcatcagtaatctttcctggggaagaaatctgtgtcaggtttcacctaaggtctatggattcatgacactgccacagataacaccattcaggacacgacagcaccaatcacatccaaaaactctcggaagctgttcgtcgacgcggccgcgaattcc

SEQ ID NO: 48158 - DNA, 451 bp, Homo sapiens
  misc_feature (1)...(451): n = a,t,c or g
acggaggataaaatggaggtggacctgagtgaaccacccaactggtcagctaactttgatgtcccaatggaaacaacccacggtgctccattggattctgtgggatctgatgtctggagcacagaggagccgatgccaactaaagagacgggctgggcttctttttcagagttcacgtcttccctgagcacaaaagattctttaaggagtaattctccagtggaaatggaaaccagcactgaacccatggaccctctgactcccagtgcggctgccctggcagttgcagccagaagcggcaggcagtgtggccatggaagccagctctgacggagaggaggatgcagaaagtacagacaaggtaactgagacagtgatgaatggcggcatgaaggaaacgctcagccttcactgtagattgcccagacagaagactnccggtcttttcaaa

SEQ ID NO: 48159 - DNA, 853 bp, Homo sapiens; identical to SEQ ID NO: 5444
  misc_feature (1)...(853): n = a,t,c or g

SEQ ID NO: 48160 - DNA, 356 bp, Homo sapiens
  misc_feature (1)...(356): n = a,t,c or g
ggggactgccggtttaaataaccaaatgctaaaagaactggcatagaagtaaatgggctgctgctttatttttaggctgttctttttagagagcaatgacagttatttccaagtttgtcattagaaaataatattaggttggancaaaagtaattgcagtttttgccattgctttcaatggtaaaaggcacaattacttttgcagcaacttantattataaatttgttccttaaagtgtatttttgataagaaagccgttttgtttttccttctgttaatgttttgtttttttcttgggtcgagacagagtcttgccatgctgcccaggctgggagtgcagtgggtgtgatctcgg

SEQ ID NO: 48161 - DNA, 588 bp, Homo sapiens
aattcggcactagggcttcccctcccccggcgtcctctggggctccgagccggcgggaccatgttcaccagcaccggctccagtgggctctacaaggcgcctctgtcgaagagccttctgctggtccccagtgccctctccctcctgctcgccctcctcctgcctcactgccagaagctctttgtgtatgaccttcacgcagtcaagaacgacttccagatttggaggttgatatgtggaagaataatttgccttgatttgaaagatactttctgcagtagtctgcttatttataattttaggatatttgaaagaagatatggaagcagaaaatttgcatcctttttgctgggttcctgggttttgtcagccttatttgactttctcctcattgaagctatgcagtatttctttggcatcactgcagctagtaatttgccttctggattcctggcacctgtgtttgctctgtttgtaccattttactgctccataccaagagtccaagtggcacaaattctgggtccgttgtccatcacaaacaagacattgatttatatattgggactgcagcttttcacctctggt

SEQ ID NO: 48162 - DNA, 796 bp, Homo sapiens; identical to SEQ ID NO: 5455

SEQ ID NO: 48163 - DNA, 519 bp, Homo sapiens
gccacggtgtacaaggcctacgccaagaaggacactcgtgaagtggtagccataaagtgtgtagccaagaaaagtctgaacaaggcatcggtggagaacctcctcacggagattgagatcctcaagggcattcgacatccccacattgtgcagctgaaagactttcagtgggacagtgacaatatctacctcatcatggagttttgcgcagggggcgacctgtctcgcttcatccatacccgcaggattctgcctgagaaggtggcgcgtgtcttcatgcagcaattagctagcgccctgcaattcctgcatgaacggaatatctctcacctggatctgaagccacagaacattctactgagctccttggagaagccccacctaaaactggcagactttggtttcgcacaacacatgtccccgtgggattgagaagcacgtgctccgtgggctcccccctctacatggcccccgagatggtgtgccagcggagttatgacgcccgcgtggacctctggt

SEQ ID NO: 48164 - DNA, 696 bp, Homo sapiens; identical to SEQ ID NO: 5463

SEQ ID NO: 48165 - DNA, 5252 bp, Homo sapiens
  misc_feature (1)...(5252): n = a,t,c or g
tttttttttctagaacaacaacataggcattttatttcttttcattaagcttcttagtttcttagtatcacaatggaatgatgagaaaacaacaaaaacgtgagtctttgcaaatctctgacaaagagcagagatctcaaggcaattggggcgggggaggcttgacagaagtgccagagcagttccaacgtcacatctctccttggctggaatggtgagaaggtggcactgtcgtgagctgtccttggcaattctgccccatgagccacgtgcgcctggtctgcatgggccaccccgcgggatttcctggtgcctcctagtacctggccacacacccctccgcctgctccaacgccctgggagcaccgtccagtgctcaggtggacccagaagccagctctgctgggcagcggcaagatgtggaggagcggcagaggcaggcagcgttgcttgcggtgggagaagccaaggagtgtgaccaaggcccatctgggagacatctgtggtggaaggtagggctggcgcaggtggcagcagcagaagtccgtgtcccccaggcagtaagcaaggccctaaaagcttccacagtccccagggggcaaggctgtcgttgccagagtctgtagtagcgcaggtcgttgaccagcctgtgcacattctgggtgaatgagggcaggtcctggaaggcaggggcatagctgcagccaacaacacaccaggtcacccacccaccagaccccaacagctacttccatcccagagtgtgcactgaagataggggagcactttctaaaactcaaaacttctattcactgttgcactgcgtgtcacagagactctgtgccaggcgctgtgggagaaaaagaacaagaggaatacgtccctagggcctctcgggtgccagacactgctgcaatcaacatacagacatcaactcactgagtcctcaccacaaggctgccaccaagccctaccagaaccactagtctaaggacagaaagaccaaagcgctgcaccatgaagaagctggccccagctcacactgaagagaccagcacacttgctcctgagtccggcccctcaaacgcagacatggctgtggtgacagccctcttcttcaccatggccccttgaggtgacgcgcacaccgagcaatgtctgcagaacctttacccaacggggctccaggccgcccctgcccctcgagagccacccgagcagcagcaaacacagtcccaaggcctgtcccactgggcgcagcgtgggccatggaaagccctgggccagaagtgaggccctgacctccgccatcatgcacacggtgagaccctgctttttttttcagtgtaggtcccggtgaggactcaaacaggcccagcaagccccagcagagccatgagcaggaccaagttcattttcctgcccaaccactattcctcttccagaactccattcaaagcctgcctcttcccaaagtctgcacagatgcctcctatttcctggccccagcagccagctcagcgcctctgtcctgagcaatctgcttctggggagtgtgtgcaggctctggggccagaacacccaggtctgcctcctgcttcgcagctctaccacttccaagttctgtgaactgctcaccttctgagcccccaccatctgtgaaatgggggagtaacaggacccacacttcagaggcttgttagaaggcttactcgagccaagacatgtcacatgcttggcactatgtggtccacagagggtgctgtattggcctgtctaccatgaaagacttggtgaaggctgggactggtgccccagttcctggcccggggcttgagaagcagctggcttcaaacacacagtgcgtgactgaatggaaggtggtgattcttttattttaccctcaaaaaaccaactaagggatgtcttttaaatcagtggctcccaaatgccaaaccagaatttcctgggtagaacacagaagtctgtttctccatttttaataagtaccccaggtgcttctgatataactagannnnnnnnnnnnnnnnnnnnnnnnnnnnnnnnnnnnnnnnnnnnnnnnnnnnnnnnnnnnnnnnnnnnnnnnnnnnnnnnnnnnnnnnnnnnnnnnnnnnnnnnnnnnnnnnnnnnnnnnnnnnnnnnnnnnnnnnnnnnnnnnnnnnnnnnnnnnnnnnnnnnnnnnnnnnnnnnnnnnnnnnnnnnnnnnnnnnnnnnnnnnnnnnnnnnnnnnnnnnnnnnnnnnnnnnnnnnnnnnnnnnnnnnnnnnnnnnnnnnnnnnnnnnnnnnnnnnnnnnnnnnnnnnnnnnnnnnnnnnnnagattttgaaaccacagctttaaatcaaaaagttgactgatattgatgtcgttagaagctgatcattaagtattaggatctggcctctagaaaaaggaaaaaacatatccaggggctgaagtgaactggaagaggcttaggagagaacaagtcccaagaaaaggaagaccccaagacaaaggagaacaggatgagtctaagcaaaagcttccctgccacacgtggcaaatgaggaaagcaggcggccaggtttgcaccagtgagagcaatgtgtgcatctgagcactacggtggagccgtggacaagctgcttcacagaggactcaggtcaagaaccccaagaggaccagggagaaagcgatttcttttcctaatttcatcaagtataaaacggtacaaggaaaagttcccagaagttcctatcaggcaagagagaggcctggtcacctgacacaggaagaagagaacaggtgagccccatggggaaggaggtcccaggcactgtcaggctccaacaagatggcctcatggacaccaagagccagcagcacccagctcccaccgaggtgctgcacgggtggggacagcccacctgacagtccctgcacaggtggcagcagtgggacaagagggtgagtactaggagggctcctcccaggacctggcagcaactcagcccaagctgagctggggctggtctggaaagagcccaagacagccggggaacctgggtcccacctctaaccctggggacccagaagtgcagctcccaagcaccaaccatctcagcctgaatgcaagcctgggcacactccaatgctggccccaccggggctcatcacccaggagggagaacggcagggtcctgggtatgaacaaagatgccaagacaaatggaggggctgcagagccaggaactcgggacctccatggctgagactaagaacatacgtgctacagacaccaagactggggaaaaggctgtgcccctcaatcaggctacagcaccaggtcagcaggcatctcgtgagctgccgccaagctgcagggtgggcacagaccacgcccagaggcctcaatgtgccccctccttgctgcacaggtgccaggcttgcgtgcccactctgccctcctcttagcccggcctctttctctcctcacccgatccatcttgaaattccgccccagcacacttttctggttggcatccacaccatcacagctggtcaggaactctgggaggaaggcggcaaagaagccatcaaagtcgactgaggccatgttgtagatggcgatgccaatctcctcctgcagaagatcatgggacttgtggaccaggacctggagcagcacgttcacaaactggaacagcatggcagtccggaagatcttcttgtggtacagcttctgcttggtgttgagagtctccaagtagaagagattttgtttaaaaaggtggatgtcgggctggagaaaggactgtccgaaagcctgcatgatggcactgaactggggctcattctccatctgctcctcagcgatccccctctggacactggccagcacggtggacttgaagaagtacctccagttgtgatggagcgtccggaaaaggagctcaaacagctcggccttcacatcaggggagggacgctcggcaatgatgggatacacttgctccatgcacagggcgatgatgctggggaggaagggcttgaacacctggcctggctcctggaccaccacctgcaggatcttcagaaacttctccaccacccggcagcctgtgctgccctcgtggaggatgctctcggctaactgctctctggtaaacatgttgaggaaagtctgtatgatttgctcagtgaaaggcacacccatctgtactctaaggcctcgaaacagagtgaggaagaagctcagcatctcatcagtcacatctgactgatggataaaagctggaaagagggcccagggagacctgaacagattcctgcagcgaactggtaaccaaaatctgtcgagacttggtggactcccccgagatattctccacaatatcttctaagacgctgaagtgtctggtggataatcagtttggtgtcatccagtggcatctttctctgtggggcaacagcactgggcttcaggttgcgatagtcccgggagagtgcagagatgaggctggcatggttgatggagcgcacgggccactgctgctcattctctggaaggtttggccacggaagcagcaagatgttagagagggctcggcacaccaacacctgggccttatcgacaagtcgcagggcagaggcatcagtgattctgttgaatactttctgcactgcagggatgctgatcagaaagacgggccgcacggtggtggccagtgagaccagtaagtggcacgcagatagcagcagcttgtcttggaccttggtgctgattagaggtgtgattgcatccatggtagtagagatgagtgtcacgaactgctgcgtgttctgccggtgaacttcactgcaatactgtgctaaccagtgagagtaagcctgcagcgcagccagggactgagcatgcacatcaatgaggtcaggtttcaatactgatggcacagcagtttcaatgttgtacaattttatctgagatccgtacagagtgactttgaccaacctttccacgactgtgagggcatcattgaaccgtgcagcaaacacatccccgataaagtactcggccaggcggcccacggcctgcagcagggagctcaagtctctcagggagcagtgcagccgccggcagtcgttctccgccgtgctcgtgccgaattcttggcctcgagggccaaattccctatagtgagtcgtattaaattcgtaatcagtcataacggtnancgaagtcaaaggggg

SEQ ID NO: 48166 - DNA, 9756 bp, Homo sapiens
  misc_feature (1)...(9756): n = a,t,c or g
ccccagcctccttgccaacgccccctttccctctccccctcccgctcggcgctgaccccccatccccacccccgtgggaacactgggagcctgcactccacagaccctctccttgcctcttccctcacctcagcctccgctccccgccctcttcccggcccagggcgccggcccacccttccctccgccgccccccggccgcggggaggacatggccgcgcacaggccggtggaatgggtccaggccgtggtcagccgcttcgacgagcagcttccaataaaaacaggacagcagaacacacataccaaagtcagtactgagcacaacaaggaatgtctaatcaatatttccaaatacaagttttctttggttataagcggcctcactactattttaaagaatgttaacaatatgagaatatttggagaagctgctgaaaaaaatttatatctctctcagttgattatattggatacactggaaaaatgtcttgctgggcaaccaaaggacacaatgagattagatgaaacgatgctggtcaaacagttgctgccagaaatctgccattttcttcacacctgtcgtgaaggaaaccagcatgcagctgaacttcggaattctgcctctggggttttattttctctcagctgcaacaacttcaatgcagtctttagtcgcatttctaccaggttacaggaattaactgtttgttcagaagacaatgttgatgttcatgatatagaattgttacagtatatcaatgtggattgtgcaaaattaaaacgactcctgaaggaaacagcatttaaatttaaagccctaaagaaggttgcgcagttagcagttataaatagcctggaaaaggcattttggaactgggtagaaaattatccagatgaatttacaaaactataccagatcccacagactgatatggctgaatgtgcagaaaagctatttgacttggtggatggttttgctgaaagcaccaaacgtaaagcagcagtttggccactacaaatcattctccttatcttgtgtccagaaataatccaggatatatccaaagacgtggttgatgaaaacaacatgaataagaagttatttctggacagtctacgaaaagctcttgctggccatggaggaagtaggcagctgacagaaagtgctgcaattgcctgtgtcaaactgtgtaaagcaagtacttacatcaattgggaagataactctgtcattttcctacttgttcagtccatggtggttgatcttaagaacctgctttttaatccaagtaagccattctcaagaggcagtcagcctgcagatgtggatctaatgattgactgccttgtttcttgctttcgtataagccctcacaacaaccaacactttaagatctgcctggctcagaattcaccttctacatttcactatgtgctggtaaattcactccatcgaatcatcaccaattccgcattggattggtggcctaagattgatgctgtgtattgtcactcggttgaacttcgaaatatgtttggtgaaacacttcataaagcagtgcaaggttgtggagcacacccagcaatacgaatggcaccgagtcttacatttaaagaaaaagtaacaagccttaaatttaaagaaaaacctacagacctggagacaagaagctataagtatcttctcttgtccatggtgaaactaattcatgcagatccaaagctcttgctttgtaatccaagaaaacaggggcccgaaacccaaggcagtacagcagaattaattacagggctcgtccaactggtccctcagtcacacatgccagagattgctcaggaagcaatggaggctctgctggttcttcatcagttagatagcattgatttgtggaatcctgatgctcctgtagaaacattttgggagattagctcacaaatgcttttttacatctgcaagaaattaactagtcatcaaatgcttagtagcacagaaattctcaagtggttgcgggaaatattgatctgcaggaataaatttcttcttaaaaataagcaggcagatagaagttcctgtcactttctccttttttacggggtaggatgtgatattccttctagtggaaataccagtcaaatgtccatggatcatgaagaattactacgtactcctggagcctctctccggaagggaaaagggaactcctctatggatagtgcagcaggatgcagcggaacccccccnatttgccgacaagcccagaccaaactagaagtggccctgtacatgtttctgtggaaccctgacactgaagctgttctggttgccatgtcctgtttccgccacctctgtgaggaagcagatatccggtgtggggtggatgaagtgtcagtgcataacctcttgcccaactataacacattcatggagtttgcctctgtcagcaatatgatgtcaacaggaagagcagcacttcagaaaagagtgatggcactgctgaggcgcattgagcatcccactgcaggaaacactgaggcttgggaagatacacatgcaaaatgggaacaagcaacaaagctaatccttaactatccaaaagccaaaatggaagatggccaggctgctgaaagccttcacaagaccattgttaagaggcgaatgtcccatgtgagtggaggaggatccatagatttgtctgacacagactccctacaggaatggatcaacatgactggcttcctttgtgcccttggaggagtgtgcctccagcagagaagcaattctggcctggcaacctatagcccacccatgggtccagtcagtgaacgtaagggttctatgatttcagtgatgtcttcagagggaaacgcagatacacctgtcagcaaatttatggatcggctgttgtccttaatggtgtgtaaccatgagaaagtgggacttcaaatacggaccaatgttaaggatctggtgggtctagaattgagtcctgctctgtatccaatgctatttaacaaattgaagaataccatcagcaagttttttgactcccaaggacaggttttattgactgataccaatactcaatttgtagaacaaaccatagctataatgaagaacttgctagataatcatactgaaggcagctctgaacatctagggcaagctagcattgaaacaatgatgttaaatctggtcaggtatgttcgtgtgcttgggaatatggtccatgcaattcaaataaaaacgaaactgtgtcaattagttgaagtaatgatggcaaggagagatgacctctcattttgccaagagatgaaatttaggaataagatggtagaatacctgacagactgggttatgggaacatcaaaccaagcagcagatgatgatgtaaaatgtcttacaagagatttggaccaggcaagcatggaagcagtagtttcacttctagctggtctccctctgcagcctgaagaaggagatggtgtggaattgatggaagccaaatcacagttatttcttaaatacttcacattatttatgaaccttttgaatgactgcagtgaagttgaagatgaaagtgcgcaaacaggtggcaggaaacgtggcatgtctcggaggctggcatcactgaggcactgtacggtccttgcaatgtcaaacttactcaatgccaacgtagacagtggtctcatgcactccataggcttaggttaccacaaggatctccagacaagagctacatttatggaagttctcacaaaaatccttcaacaaggcacagaatttgacacacttgcagaaacagtattggctgatcggtttgagagattggtggaactggtcacaatgatgggtgatcaaggagaactccctatagcgatggctctggccaatgtggttccttgttctcagtgggatgaactagctcgagttctggttactctgtttgattctcggcatttactctaccaactgctctggaacatgttttctaaagaagtagaattggcagactccatgcagactctcttccgaggcaacagcttggccagtaaaataatgacattctgtttcaaggtatatggtgctacctatctacaaaaactcctggatcctttattacgaattgtgatcacatcctctgattggcaacatgttagctttgaagtggatcctaccaggttagaaccatcagagagccttgaggaaaaccagcggaacctccttcagatgactgaaaagttcttccatgccatcatcagttcctcctcagaattcccccctcaacttcgaagtgtgtgccactgtttataccaggtggttagccagcgtttccctcagaacagcatcggtgcagtaggaagtgccatgttcctcagatttatcaatcctgccattgtctcaccgtatgaagcagggattttagataaaaagccaccacctagaatcgaaaggggcttgaagttaatgtcaaagatacttcagagtattgccaatcatgttctcttcacaaaagaagaacatatgcggcctttcaatgattttgtgaaaagcaactttgatgcagcacgcaggtttttccttgatatagcatctgattgtcctacaagtgatgcagtaaatcatagtctttccttcataagtgacggcaatgtgcttgctttacatcgtctactctggaacaatcaggagaaaattgggcagtatctttccagcaacagggatcataaagctgttggaagacgaccttttgataagatggcaacacttcttgcatacctgggtcctccagagcacaaacctgtggcagatacacactggtccagccttaaccttaccagttcaaagtttgaggaatttatgactaggcatcatcaggtacatgaaaaagaagaattcaaggctttgaaaacgttaagtattttctaccaagctgggacttccaaagctgggaatcctattttttattatgttgcacggaggttcaaaactggtcaaatcaatggtgatttgctgatataccatgtcttactgactttaaagccatattatgcaaagccatatgaaattgtagtggaccttacccataccgggcctagcaatcgctttaaaacagactttctctctaagtggtttgttgtttttcctggctttgcttacgacaacgtctccgcagtctatatctataactgtaactcctgggtcagggagtacaccaagtatcatgagcggctgctgactggcctcaaaggtagcaaaaggcttgttttcatagactgtcctgggaaactggctgagcacatagagcatgaacaacagaaactacctgctgccaccttggctttagaagaggacctgaaggtattccacaatgctctcaagctagctcacaaagacaccaaagtttctattaaagttggttctactgctgtccaagtaacttcagcagagcgaacaaaagtcctagggcaatcagtctttctaaatgacatttattatgcttcggaaattgaagaaatctgcctagtagatgagaaccagttcaccttaaccattgcaaaccagggcacgccgctcaccttcatgcaccaggagtgtgaagccattgtccagtctatcattcatatccggacccgctgggaactgtcacagcccgactctatcccccaacacaccaagattcggccaaaagatgtccctgggacactgctcaatatcgcattacttaatttaggcagttctgacccgagtttacggtcagctgcctataatcttctgtgtgccttaacttgtacctttaatttaaaaatcgagggccagttactagagacatcaggtttatgtatccctgccaacaacaccctctttattgtctctattagtaagacactggcagccaatgagccacacctcacgttagaatttttggaagagtgtatttctggatttagcaaatctagtattgaattgaaacacctttgtttggaatacatgactccatggctgtcaaatctagttcgtttttgcaagcataatgatgatgccaaacgacaaagagttactgctattcttgacaagctgataacaatgaccatcaatgaaaaacagatgtacccatctattcaagcaaaaatatggggaagccttgggcagattacagatctgcttgatgttgtactagacagtttcatcaaaaccagtgcaacaggtggcttgggatcaataaaagctgaggtgatggcagatactgctgtagctttggcttctggaaatgtgaaattggtttcaagcaaggttattggaaggatgtgcaaaataattgacaagacatgcttatctccaactcctactttagaacaacatcttatgtgggatgatattgctattttagcacgctacatgctgatgctgtccttcaacaattcccttgatgtggcagctcatcttccctacctcttccacgttgttactttcttagtagccacaggtccgctctcccttagagcttccacacatggactggtcattaatatcattcactctctgtgtacttgttcacagcttcattttagtgaagagaccaagcaagttttgagactcagtctgacagagttctcattacccaaattttacttgctgtttggcattagcaaagtcaagtcagctgctgtcattgccttccgttccagttaccgggacaggtcattctctcctggctcctatgagagagagacttttgctttgacatccttggaaacagtcacagaagctttgttggagatcatggaggcatgcatgagagatattccaacgtgcaagtggctggaccagtggacagaactagctcaaagatttgcattccaatataatccatccctgcaaccaagagctcttgttgtctttgggtgtattagcaaacgagtgtctcatgggcagataaagcagataatccgtattcttagcaaggcacttgagagttgcttaaaaggacctgacacttacaacagtcaagttctgatagaagctacagtaatagcactaaccaaattacagccacttcttaataaggactcgcctctgcacaaagccctcttttgggtagctgtggctgtgctgcagcttgatgaggtcaacttgtattcagcaggtaccgcacttcttgaacaaaacctgcatactttagatagtctccgtatattcaatgacaagagtccagaggaagtatttatggcaatccggaatcctctggagtggcactgcaagcaaatggatcattttgttggactcaatttcaactctaactttaactttgcattggttggacaccttttaaaagggtacaggcatccttcacctgctattgttgcaagaacagtcagaattttacatacactactaactctggttaacaaacacagaaattgtgacaaatttgaagtgaatacacagagcgtggcctacttagcagctttacttacagtgtctgaagaagttcgaagtcgctgcagcctaaaacatagaaagtcacttcttcttactgatatttcaatggaaaatgttcctatggatacatatcccattcatcatggtgacccttcctataggacactaaaggagactcagccatggtcctctcccaaaggttctgaaggataccttgcagccacctatccaactgtcggccagaccagtccccgagccaggaaatccatgagcctggacatggggcaaccttctcaggccaacactaagaagttgcttggaacaaggaaaagttttgatcacttgatatcagacacaaaggctcctaaaaggcaagaaatggaatcagggatcacaacaccccccaaaatgaggagagtagcagaaactgattatgaaatggaaactcagaggatttcctcatcacaacagcacccacatttacgtaaagtttcagtgtctgaatcaaatgttctcttggatgaagaagtacttactgatccgaagatccaggcgctgcttcttactgttctagctacactggtaaaatataccacagatgagtttgatcaacgaattctttatgaatacttagcagaggccagtgttgtgtttcccaaagtctttcctgttgtgcataatttgttggactctaagatcaacaccctgttatcattgtgccaagatccaaatttgttaaatccaatccatggaattgtgcagagtgtggtgtaccatgaagaatccccaccacaataccaaacatcttacctgcaaagttttggttttaatggcttgtggcggtttgcaggaccgttttcaaagcaaacacaaattccagactatgctgagcttattgttaagtttcttgatgccttgattgacacgtacctgcctggaattgatgaagaaaccagtgaagaatccctcctgactcccacatctccttaccctcctgcactgcagagccagcttagtatcactgccaaccttaacctttctaattccatgacctcacttgcaacttcccagcattccccaggaatcgacaaggagaacgttgaactctcccctaccactggccactgtaacagtggacgaactcgccacggatccgcaagccaagtgcagaagcaaagaagcgctggcagtttcaaacgtaatagcattaagaagatcgtgtgaagcttgcttgctttcttttttaaaatcaacttaacatgggctcttcactagtgaccccttccctgtccttgccctttccccccatgttgtaatgctgcacttcctgttttataatgaacccatccggtttgccatgttgccagatgatcaactcttcgaagccttgcctaaatttaatgctgccttttctttaactttttttcttctacttttggcgtgtatctggtatatgtaagtgttcagaacaactgcaaagaaagtgggaggtcaggaaacttttaactgagaaatctcaattgtaagagaggatgaattcttgaatactgctactactggccagtgatgaaagccatttgcacagagctctgccttctgtggttttcccttcttcatcctacagagtaaagtgttagtcctatttatacatttttcaagatacaagtttatgagagaaatagtattataaccccagtatgtttaatcttttagcctgtggactttttttttaaccgtacaaaactgaaagaaccatagaggtcaagcctcagtgacttgacaccataaagccacagacaaggtacttgggggggagggcagggaaatttcatattttatagtggattcttaagaaatactaacacttgagtattagcaataattacaggaaaataagtgcgaccacatatatcttaacattactgaattaaaactatggcttctaagtccttatccaaactcagtcatccaaactagtttatttttttctccagttgattatcttttaatttttaattttgctaaaggtggtttttttgtgttttgttttttgtaaaccaaaactatactaagtatagtaattatatatatatatattttttcccctccccctcttctttcctaactaattctgagcagggtaatcagtgaacaaagtgttgaaaattgttcccagaaggtaattttcatagatgtttgcattagctccatagcaaaatggaatggtacgtgacatttagggtagctgatatttttattttgttaaataatttccaagaatagagtatggtgtatattataaatttctt

SEQ ID NO: 48167 - DNA, 1702 bp, Homo sapiens
ttttttttttgaattagaaaatccattttattgcttgggtttaaaatagttgtgggatacaagtatttacaatgctattggagtcaattattgacaacactttgcaacagtaataccatttctagcttttcaattggcaatacttagaaccttactcgtagtcgacctgattttaaataccatattatatttactaagttaagagctagtttttactctcttccataatttcattacatgaatgtaagatgatggctcaaaaatgacgacttatagtttgaatttatgtgtatgcaatatacatatgagaaccaaattcaacaagtgacatgaatggttactacatgaacattgaattgtattgcccttgtcagttatttcctctgttcaataaatactgaaggtcacaaacacctttttacttttcaagagtttgccttctcttctcgattttagtaattaatttggatatttttcctcccatgcctcttcatctgatttagtgggatgttttcaataccagcaaaacaaaagaacaggaaaagtattttgcaaactcatctactggaagctaatctccctaagggtccaagcaaaaagggtcaatttcaatttcaaagagctgttctttaaatgagataaagaaagtctccttttgtttttagatggaaaagaaagcacaagttttttctacctgtgaatgaactttggtgacctatatgtgccattcatgcagcatttttgttcatattggcttagaattcagtgcatgaatatcattacattcttatatctaacattcctagttagctttgattcaaaatatacaaaatctgatacatgaatactttgctagattaatgacttgatcatctttggaatgagtaggcaagacgatttttacctattatttctatgttgtgggtaatgttaaaactaaatacagatgataataattgctatttcacagtgatgtttaaaatggcagagatttctcaagccagagagatgggacagtcttccaaactctttcatcaaaaaggaaagtaatctggacctcctacgcccaagaaaaacatcctggcattcttggtaaccttttactctgccatccttaatctttctacagaattgtagcagaaatcatctccaagactgaagagctggcttcctgacattcacatggatctaccataggcaaagacactgtgttcccagcccttgccctcatggatggcaaagccgccaggagccagacaccctagcagccacctatccacccaaccctgaaagaacatagttttatttccgtgaactatactttttccccagaagctctaataattggcattaaaaaaatttgcatctgggatttttataacaatataaaataattccatgctcttttttcggtgtgaaaagttcctctttgaaagaaataggattttgtcaatatctccaccactagcatagtgagaagaggatctcaatcaagataaaaaaaaccaaacgatttgagagttgggatgggtacagttcatagacactgacataatgagctctttcttttttgttaggaaaataaaactgcttttttcatgagtatcttttactaagaagaattaaaagagggaagtctgagttccccagtaatgctaccattaaatagctagaagtaaagcatttatacagcttgtcatta

SEQ ID NO: 48168 - DNA, 460 bp, Homo sapiens
ccaagatggagactgccgagcagccttgagccgttgagcagctgaacagaggccatgccggggcactccgaggcctgagacgaccacgcctgtgccgctgaggaccttcatcagggctccgtccacttggcccgcttggctgtccaatcacactccagtgtcaaccactggcacccagcagccaagagaggtgtggcgtggccctggggacgcatggctgaggcaggaacaggtgagccgtcccccagcgtggaagggcgaacacgggacggagtactgacacgctgccttccgacacaagtctccctcaagtgactcggactctgacctcagcttgcccggtggtgctgaagttggaagcactgtccccgatggggcttgcctggggaggaggattcaggtcctgatgagccgccctcacccccgtcaagcctcctcccagccacggtgcaagccatta

SEQ ID NO: 48169 - DNA, 674 bp, Homo sapiens
  misc_feature (1)...(674): n = a,t,c or g
ggaccagccgtgcaaatctctagaagatgacggtgttctttaaaacgcttcgaaatcactggaagaaaactacagctgggctctgcctgctgacctggggaggccattggctctatggaaaacactgtgataacctcctaaggagagcagcctgtcaagaagctcaggtgtttggcaatcaactcattcctcccaatgcacaagtgaagaaggccactgtttttctcaatcctgcagcttgcaaaggaaaagccaggactctatttgaaaaaaatgctgccccgattttacatttatctggcatggatgtgactattgttaagacagattatgagggacaagccaagaaactcctggaactgatggaaaacacggatgtgatcattgttgcaggaggagatgggacactgcaggaggttgttactgggtgttcttcgacggaacagatgaggctaccttcagtaagattcccattgggatttatcccactgggagagaccagtagtttgagtcataccctctttgccgaaagtggaaacaaagtcccaacatattactgatgccacacttgccattgtgaaaggagagacagttccacttgatgtcttgcagatcaagggngaaaaggaacagcctgttttgcaatgacggcttngatggggatcttttaaaaa

SEQ ID NO: 48170 - DNA, 568 bp, Homo sapiens
  misc_feature (1)...(568): n = a,t,c or g
gactccagataaacgtgaggtatgctatatcattcctaatttacagatgagtcaatacaaacttgagtgagcttgctcacaattccatcaaaggcagggttcagacccaagtttcagcatttagggcaggtgtcctctgcatggaagaaccatactcaatagccgtaaacgctgacaaattccccttcctccctgccttctgatgggggctgggcaggccagctggagctgtgtctcctgctgggattccggactgagagtgacagcaggtagtgaaacctcaagcaatttaaaacatggtattgttcctggaagactggttatgttggctagggtcagcaagagagggcatcaaggctgtagtctagcagtgatttaatctgcaagtcaaaccagacgggtattttgtattattcatatgtcacatcctaccaacagacagtaagtcaggcaaggctcctgggtgctccttgtcactcacgtaattttcacattcagggaaaactctggggctgggtgcagtgggctnacacctgttaattcctaggcacttttgggggaaanccaa

SEQ ID NO: 48171 - DNA, 2968 bp, Homo sapiens
gtgagaagcctcctggcagacactggagccacgatgaagcccccaaggcctgtccgtacctgcagcaaagttctcgtcctgctttcactgctggccatccaccagaccactactgccgaaaagaatggcatcgacatctacagcctcaccgtggactccagggtctcatcccgatttgcccacacggtcgtcaccagccgagtggtcaatagggccaatacggtacaggaggccaccttccagatggagctgcccaagaaagccttcatcaccaacttctccatgaacatcgatggcatgacctacccagggatcatcaaggagaaggctgaagcccaggcacagtacagcgcagcagtggccaagggaaagaacgctggcctcgtcaaggccaccgggagaaacatggagcagttccaggtgtcggtcagtgtggctcccaatgccaagatcacctttgagctggtctatgaggagctgctcaagcggcgtttgggggtgtacgagctgctgctgaaagtgcggccccagcagctggtcaagcacctgcagatggacattcacatcttcgagccccagggcatcagctttctggagacagagagcaccttcatgaccaaccagctggtagacgccctcaccacctggcagaataagaccaaggctcacatccggttcaagccaacactttcccagcagcaaaagtccccagagcagcaagaaacagtcctggacggcaacctcattatccgctatgatgtggaccgggccatctccgggggctccattcagatcgagaacggctactttgtacactactttgcccccgagggcctaaccacaatgcccaagaatgtggtctttgtcattgacaagagcggctccatgagtggcaggaaaatccagcagacccgggaagccctaatcaagatcctggatgacctcagccccagagaccagttcaacctcatcgtcttcagtacagaagcaactcagtggaggccatcactggtgccagcctcagccgagaacgtgaacaaggccaggagctttgctgcgggcatccaggccctgggagggaccaacatcaatgatgcaatgctgatggctgtgcagttgctggacagcagcaaccaggaggagcggctgcccgaagggagtgttctcactcatcatcctgctcaccgatggcgaccccactgtgggggagactaaccccaggagcatccagaataacgtgcgggaagctgtaagtggccggtacagcctcttctgcctgggcttcggtttcgacgtcagctatgccttcctggagaagctggcactggacaatggcggcctggcccggcgcatccatgaggactcagactctgccctgcagctccaggacttctaccaggaagtggccaacccactgctgacagcagtgaccttcgagtacccaagcaatgccgtggaggaggtcactcagaacaacttccggctcctcttcaagggctcagagatggtggtggctgggaagctccaggaccgggggcctgatgtgctcacagccacagtcagtgggaagctgcctacacagaacatcactttccaaacggagtccagtgtggcagagcaggaggcggagttccagagccccaagtatatcttccacaacttcatggagaggctctgggcatacctgactatccagcagctgctggagccaaactgtctccgcatccgatgctgatcagcaggccctccggaaccaagcgctgaatttatcacttgcctacagctttgtcacgcctctcacatctatggtagtcaccaaacccgatgaccaagagcagtctcaagttgctgagaagcccatggaaggcgaaagtagaaacaggaatgtccactcaggttccactttcttcaaatattatctccagggagcaaaaataccaaaaccagaggcttccttttctccaagaagaggatggaatagacaagctggagctgctggctcccggatgaatttcagacctggggttctcagctccaggcaacttggactcccaggacctcctgatgttcctgaccatgctgcttaccaccccttccgccgtctggccatcttgcctgcttcagcaccaccagccacctcaaatcctgatccagctgtgtctcgtgtcatgaatatgaaaatcgaagaaacaaccatgacaacccaaaccccagcccccatacaggctccctctgccatcctgccactgcctgggcagagtgtggagcggctctgtgtgggaccccagacaccgccaggggccagtgaacctgctctcagaccctgagcaaggggttgaggtgactggccagtatgagagggagaaggctgggttctcatggatcgaagtgaccttcaagaaccccctggtatgggttcacgcatcccctgaacacgtggtggtgactcggaaccgaagaagctctgcgtacaagtggaaggagacgctattctcagtgatgcccggcctgaagatgaccatggacaagacgggtctcctgctgctcaggtgacccagacaaagtgaccatcggcctgttgttctgggatggccgtggggaggggctccggctccttctgcgtgacactgaccgcttctccagccacgttggagggacccttggccagttttaccaggaggtgctctggggatctccagcagcatcagatgacggcagacgcacgctgagggttcagggcaatgaccactctgccaccagagagcgcaggctggattaccaggaggggcccccgggagtggagatttcctgctggtctgtggagctgtagttctgatggaaggagctgtgcccaccctgtacacttggcttccccctgcaactgcagggccgcttctggggcctggaccaccatggggaggaagagtcccactcattacaaataaagaaaggtggtgtgagcctggga

SEQ ID NO: 48172 - DNA, 1218 bp, Homo sapiens
ttttttttttacagtcacatgaaaaataaacatctttatttttttgcctactttatttcattttttcaaataaaatttaaatctgtacaaagtatactgttacagtatatattttgtaagaatcaatgcctaaaataatcacaatacttcaataagcagtacagcagacctcgctagttttcagctttgatattgaacaaactcaagccggctgatgcacaacacgtttgcttggtttccacatggtgatttcccagcactgagatgggagaacatgacagcaaatatggtaatattacagcccgacacactgcgtttcttcatgtgataataactgcacatatttaatacagaatgctcaaatttactttttaaattgcatttgcttacttcttagttggcaaaattcagcattcttaaatggggtccccaaacagtgcaaattaatgatattctaactgtatattggcacatctccaataaggattaacttgtaaactcaaagaatatcaacaacttagtcctaaattttaactaatatacatctggtccatttaaccaaagtcattttggaaagatattaaagaacaattctatttctgaaaggatattgttttgaccattctttagagaagataaatttttaaattgtcattaaaatgtttcactataaaaattttacaaacttgattagaaatttcaagattatgattcacagcagacaaatacaaactgtatattccaacaatacctattcttagactttcaaacagagcacaaccatgtcagctgtgttaactaaaattctgaacagtgtactaaatttataagtggtgctgggtctagcaagtgtaaatacacagtatatttcaatgaaaagaattgtcttctttatactttatttgttttcccataaggaaacattaatgtttacattctttaataaagttaatcttacatcagaatataacttaatactgtcagcaacagggaccacacacagtaaataagaagcacatttaaaataagtctgatttcacatagattaacatttgttggttaataaaatatcgacagtattacaatcttacaatatttacagtagggaaaaatctagagtaatatatacctttcacaggcagggattcctttttttaaaatttcttccagtttgggggttgtgtatacacaaaagggctcaaattaaggcaactctgg

SEQ ID NO: 48173 - DNA, 560 bp, Homo sapiens
gcatatggtctgcttgcagcatcggtcttcagattttcaatttgttcgattacttcaaaaccagaaataaccagtccaaagactacatgcaccccatccaggtgtggagcaggctttgtggtactttggagcgcacggtgtaacactctttctgtaaattttacacaaaaatggcaagaaataaattgtaatacacttttaagacaagactgaatctatgttttaatatcaatataactttgaaattaattattttcaagttttatgcagagcaagaaagcttttttaaatggagggctctaaattttctttcatatgggatatttacgtagagatgaattatgcttaagaaaagcatcgtggctaagtgggaatctatttagatccttaatattgtaacatagagtgccaataatagctattaacatattacatttcctttcacaaatcccagaaattagctaagacaacattttctcaaaagagaatagtgtatcttgcatacatacataaatataaaaatctgaatgcccaggaccagttactaccagttgaaagca

SEQ ID NO: 48174 - DNA, 1451 bp, Homo sapiens
gtttttgtcaatttatttagaaaaaaattaacatgggcaaatgagatacctcagtgttacaacagagtatagaaatgtctagcaatagtcaaataatttgatctttaaatacaaaataaccacatgaacacctaatatacaggtttcatctgaatacatatttattagataaatattagaggttgtcacatcatctaactacatacagctttgcaagactagaaatcacaattagttttttgaccagtttaaagtatgaaatgattgcattgtacatacgatgtacaaagacgatgatggtttctgtgggagttacttcaggctgcactggtgggtgtgtttatgtgtgtacgtgtgaatcacctgtgatcatgatatcaaaaattatacaaagtatgaatttggttacaattttcttctgaaatccccgtttcttttcattatttccatagcaccctaaaaatacacaggtggcaggactagtacactggaagctaaatagtacatgtaggtaaaataaaaacagaacaaaaacccctttccactcagggtcagagtatattacatgagcgagagagacagacgtggagaactcacaaatgctataaccaacaggatctagtttttccacgtgatggagttccaagcttttttttttgttttgttttgtttcgcaaaataaaaacaatacacattccaagagaaatgaatgcatctgttgacacgtctctatttctcatttacatatgtacacacgtcccttgagtcgctgctgttgacacggccctgtgtggacgggtcaggcccgaggcccgtcgggagcagacctgtagctctctgggggatcagggcttccattagggagaaagtattagcagtttcttaaaaaataaaatggctacacggaacatgatacatggataaagcttcaaaccaagaagatgggggtgattgcctgtacttggcccttcccgcctgcctggctggctccctgtccatcttgcggagtggcggcagaaacatgcctgtgggccgggtggatgcttggcatggaaaagtggcttgcagaggcctcgtttttgctgaggttacttatggctccaagtagtcgtccgaaaggatcagggaaggatctctccagagttcaggaccatctctgtttatgggcgttgtctacctgcacctgtcacaacctggggcttgctcccgccccggatgcctctgcacctccctcacaccctggcctggctcccagagcactccggaagagcttgtctccagactgcaggctgtaggcaccacgcacggttcagagccagccggaagggaagctctgggccgagcttgctggtggaggcttgctggagaggggacccaggaaacccgcctcaggtgctgagcccagagatggttgcaggaggtgcccggggcctgggctgcagggagcatct

SEQ ID NO: 48175 - DNA, 763 bp, Homo sapiens
ttcagatcttaggtctcaagggcactttggcgcgtagtaagtgctttatgtaagaaggcagggcaggggggctttttacaggagaaaaaaaaatgacttataagagaaagagcctggagtatttttggaaaaaaaaataatatttttatgttaaaacaattttaaaatcttaaaatggccatcagacatagagagctttgtgtgattcatgttttaaaaagaaccgaagaagccacaggagggcctgagggagcccctggctttcccctcagcctcaggaaaggtggtcaggaaaactctggctggacaagggtcagtcttcggggtcagcagcgagattgctctgcagccagtgagggaggtccccgccatgccggctggaagaagaacctcgcatcttttggtgtgtatgcaccttggcagccagcaggaaagcagcgaagagccgcgcgccctctggcctcaagggagcattggcagaaccataaggtactgcagaagccgtcgaaaccgactgctcggctggattaggcgtgttggctacatctttcccacaaccgtataacgaccgatggtcatttctccaagagcaggcttggcgagtccttgcagagctgacataaaggcgcccgcatgtcacttagtctaacgctgacagaaatgaatgcagaaggaagattttcagtcctgaacgtgaattatagaggtagaacgtcgctaataatttctgccatctttataatttctttgtctcacagaagac

SEQ ID NO: 48176 - DNA, 1141 bp, Homo sapiens
ctgtggctcataaaagaggtggtagtcaactgtcagttggggttgcagtcacatctggaagctctactggtggaagatctgtttctgaactcattcatgtggctcttgccagggttccagtttccctggggctcttggactgaagaaatcaattgttggctggctgttggccagaggcttttctcagttctttgccatatgggcctctccaaagggcaccacagtttggcatctgcctccctctgagcaaatgagtgagagaaggtgacacctaagaatttttataacctaatcttggaagtggtatctcattatttctgctatattctatttgttagaggctgcctaccacaaggactttagcttactttttaaagattgaagaaaaaaaagaagacagaaaaagaagaactcaaagatacacaaagtaatttgaaccaaggctcagaagtttttggagccgtgagggatacagcagtttggtcaatattgtcttaacatgcttcaaataaatcagatgttctcagtgcagctgagtcttggtgagcagacatgggaatccgaaggcagcagtataaagaaggctcagcaggctgttgccaataaagctttgactgaatctacgcttcccaaaccagttcagaagccacccaaaagtaatgttaacaataacccaggcagtataactccaactgtggaactgaatgggcttgctatgaaaaggggagagcctgccatctacaggccattagatccaaagccattcccaaattatagagctaattacaactttcggggcatgtacaatcagaggtatcattgcccagtgcctaagatcttttatgttcagctcactgtaggaaataatgaattttttggggaaggaaagactcgacaagctgctagacacaatgctgcaatgaaagccctccaagcactgcagaatgaacctattccagaaagatctcctcaggaatggtgaatcaggaaaggatatggatgatgacaaagatgcaaataagtctgagatcagcttagtgtttgaaattgctctgaagcgaaatatgcctgtcagttttgaggttattaaagaaagtggaccaccacatatgaaaagctttgttactcgagtgtcagtagg

SEQ ID NO: 48177 - DNA, 477 bp, Homo sapiens
gctgctcaccctcccaacgcctgccgtgcacctggttcctaacaggccatagactgataccagtccgtgtcctgggctttggggactcctgacttaacttgtttctttatctcctctccaatatttcctgtggaatatcaaaggctttatcataattatattgtatcacttcagatggcatgtattgtctagctgtttcactgttagtgactagaaattaaggtaaatccctggattaaggtagtgacatctgattccttcattgtaaagttaatattttatacttgagataggcaagaacttcgtagagagatagtttggtactatgtaactgtccagatactcatcattctttcacttaatgagctcagtgtccattgatgatttcttcctgaatcggttatgtcaccgagagctacaaattggtgattttcctattctgttatttcatctgcatttatttcctggcatcttctt

SEQ ID NO: 48178 - DNA, 405 bp, Homo sapiens
  misc_feature (1)...(405): n = a,t,c or g
gcaaggtgggctggggctggggaccggggagtactgggaatggagcctgggcctcggcaccatgcccagagccgccactttccagtgctgcagccagagggaaaggcgtccaccaaaggctgctcgggaagggtcaacacacttgagcagccttagctagactgaccagggagaaagagagaagactcagaagccagaatcgtgaaagaacgagggcacttcgctaagcagacgccacggacaactgcacagcagcacgccagattaactcagaagaagcaagcacgcggctgttgcacgcttccgaaatgcactccagaagaaaatctcagtacgtctatagcaagtgaagaggccgagttagtcccttagaaacctccantgccggcccggtggggggggtac

SEQ ID NO: 48179 - DNA, 452 bp, Homo sapiens; identical to SEQ ID NO: 5523

SEQ ID NO: 48180 - DNA, 1341 bp, Homo sapiens
gaagcaggtataatgagaataaattttgccaataacaaattctgaaatctgaagttttgtttctgctgtcatagtatgaattcgctttaaagagagcaggcaatccaaattcaagcttgcttcaccctgaaagcaaaatgtccgtagattcgtgagtttcattataataaccttctttaatgatctttcttgcaacagaaaccaaattccttttcaacttggggtcgagcaggaagcttattgctgaagtgtacattataaaacttattttcattgtgggcagtttccttaccacctggatggtgcacaatggtgagtttattatagacattttcttcttctggccttttcccaataatgcagtctcgtagttgtcgtaatttctcctgctgaatcatttccaggccactttttcccatctgccagtgtttaaatttctccagagcttcatccatagacattttcccattctttactttctcctgcaggaggatgagttcttcctgaccatcagttagacagcccctgagagtagaaaaggctggactctctatccgagctctgtcttgtttcttaggaagaccacggaacttgtcatcatcagattgtcttctggctgtcttttgttgaaacacttgagctatgtaaggtgtagtttcctcttttggaggtatacttgtgggtcggggtgtgggggcaggaggtctatttataatgaaagaccgactcccagtttttttctttatactcagattggccaatatcatgtcatattcactgtcatcaatctcagcaaaagtatatgggtcttcttcctcctcctgctctttttcctcttctttcttctctttttctcctttgggttcatctcctgtttcttgtctaacaccaggatgaccccagttttgacttctttccatttggccttccaccattgtccctggtaaggtgaagtgaggtctttccagttggaaggcattagctacaggtcgcggcggggggagaggaggtctgctgctcatgagtggctcttgtgaattattttctggatcagcaccaggaatgaacacatacaagtcatcatactggtcttcagaactctcactgccaacctctagtgggctgtgtttggtctccatgcctgatccattctgttttccttccccttccatttcatttgcctcagctccatctgcactctgcccgtatgtcttcctgctttcatgatgaaatgctgggttctgtgtggaaggaatatatgtggaaaatgaggcaatatcctcttcataatcattttcttgctcattatttatgtcaatttcttggattgaaaagtcttcg

SEQ ID NO: 48181 - DNA, 1518 bp, Homo sapiens
tttttgcaaaaacaggataacaacgtcagatagcactttaatatactagaagaccaaatggaactaattttatttcatacatatattttacagtccagtagacaagatatattgtatttctctgctagtaaagtcatattctctccaaatatgtagacaagaggcttaatgtattataaaagtattatgaagagacattaagattgatgcaaactcaaaaaacacactcacacacaagacttttttttctgccatctttcaccctctaactcgcgatggctccacaaggttgacctgttacggctgttcccagacttgatcaccagctggaatacagtgcgtcacatcatcaggaaacgtgcaccttacatccgtcagttattgaatacagtgaaaacatatccatcatctgagaaaacttgaagctttctttcaggatctgtttgggtgtaagtaaatctcattacaaaacgaggaagtgtgtacaggtatgaaataggacacactaaaaaaggcatggttctcacatgaggtgtgtgtgaagtcactggcgacctgtgtgtgtctgacagacaccaccacccgtcccctgattttggcatctggcaaatcccaccctccctggcactggttgctcatgtcctcagttacctctccggggctacactttcccccagagcccacaagcggcaacttcagatgctaagttccagcctggggtccaatttgcaaaacaggatgtttctccgtttgaaaaaaaacaagcaaggaaaacagagtcatatcacgtaagcgcttgttcagggaaaatatgaccttaagtatgctgtaaatggatttgaaaaggctcctttgagttaggcgggcttttgtgaaaagcccgaacattcattgcatagttgaagggtttagctgtctataacaatatatgggaacacagctttagccgactgtgttcactgatattaagtaagtttgcaaatagcacattttaagaagtattaatgtattatgttactttatctatttacatttgtacaaagtaaagctttcatcttacccttttgcatatatgaaccattagctcatgaagcaatctctttttacataactatgtacacggccttcccacctcatctgaaagaattttgcatgatggatggcgtggacttctccccccccaccgcccccgctacaattatcatccaattggtgtgtgttgtcatcttcactgttttggttcaaatcaaaaagttttatacgagaaacaaaaagtaggagacgtgagaacatatgactgggctaaaagatctgaaaaatctcaacatataatatacaaaacatttcaaaatgtgcactgagtctatacattttttacaaggggaaggggtggggctttcccccccagtctgtgtgagccatgcaggagttctgtctctcaagcctggcctggtgtctgcctagggtttcttcttcctcgttcttgctcctgttctcggcttatcgggcctcgtgccg

SEQ ID NO: 48182 - DNA, 1833 bp, Homo sapiens
aacaccaagatcctaagtaattccaaatgccttagatatcaatgaaagctacacaccattgagatgggcaaaattctttctctacaaagggagtaatcaagtaaatacctgttctctttcaatggactgttgcctattgagcattgtggatgatgtgttttcagatttccaggtgaagttctgaccctacctgtttggccaaagacgtaaattgagaggaaaggccttggtcttcctgatcaaccagcatttaacgaacagtggcttaatgcagatcactcaagaggcagcatagcaatgtaaaaggaatataagtaggtgttggatgcctttttcctagaccaggaatggggaatatataacacctgtgccaccgctcttttaaggaggcattatgaatgagtgcagcattcctgtcctctgtgccaggatttggtcttagaatccatgtcagattggtgcttccagacatctattcccagtccatcagagtgaaatgaaggctatttgccatccctgccttagacagaggagtgaaagaattaagtgggtagacaccaaccaaaatgactttgaaagcagtgagctgattgagctccagttctgtggttaccagaaatactgagtgtctgtcatgtgcaagacaatgctaagaacagaatacagacataaataagtcacggcccatgaccttgaagagcttacggccttataaagaggttcactgtaattgtcttcaccagggcgtccttctcaaagatgcccacttttgtctggcacattggggctcggtggtctggtggtcccttcggtcttggccctatctgtcctttgtttttgtgatttactaacaatcatcacgaaccagttttgtttttcttttaaatttgaacatcacatcttgtgttttagttttttgctctatgatttttttctcactgcttttcagtcttctctgtacttcatttttgtgaaaaagtgaaaatcacatataatctttatttaaaaatgctcaccaagcactgcagactttggagttagggattcagcagcttgttccagtgaaaaggaggagtgaagctggggaagttagtatctaagaggggcaagctgattgcatgtgcatttatacctatgcctttaaaatattcccataaaaagtattaataaagaaatttccattccacactagtactgatgaaaaggtggttgattttgccttgtgataattatcaaaggatagtttttcatccttagattttattcacatgagagattttttttattttctctgttgacttaggaacacatcataaattcacaccaactgacacgttgctgacgtctgtacttgacataaccatttttattcatacaggaagcattaaatataaaagatggtcagttttgaagagcaaagggtgctgaaatgacttgtacggttggctggtgctttctcaaatggattgccatagttcattactagtaaagaaaaggaaaatgtgatttacgttgtcatttttcctattaaaaaaaacccttaagaatggggcacttgagctgtccctgcaatgttttcatatctagtagtcattttagggaaagtgataatctgtagaatgaatagttatgttttgatatgactgatactttctttgttaaaaggttgtattaagtcttcaatttcaagtgtagcttaaaagtgtaaaccattatgtgattcatttgaatacaagaatgcctatgaaatacccactataacagcattccttttgtgtttagaactatagaagaaaatgtcttcaaataaagtagttttcagtcaaaaaaaaa

SEQ ID NO: 48183 - DNA, 1030 bp, Homo sapiens
caagtaaattacaacttacattaaaggcagattctttattggctgaatgtgctgtagtagatatttaaaatatcacaaacattcatgattgcagtttttaaacttagctcacagttgagttagatacaacagttaacatacttaggaaagacaattcttaacagctttatcaagcacatttgtgaaagattaaactttcatttccagttaccatgatgtccccccatacaccaaatgaaccaacacatttatttattttaaataatggaaactgtacatggctacactgtgctctaaaattacttgccattaatgaggacattaattttagcatttaaaaaaagagatttaaaaataaccatagaaaaacttgaaaaccctgacaagccgactacaaagagaattcctctctgaaaattttcagatgcgacggtatgagggagttgggtgggctgctgactctgagagaagtcccggtgacctgaacctattccagtgaagccagtcagcagtgaatgtggggcaagtgcatgcggctggtctacagctcccattgcctggtgaccaaggagcatcctgaagtttcagagaagagactgtgtgacagcagcattgttccagctactgagcaagatccttcagcaggtaagaagtggcagagacagtcacctgctgaaggagcgggcagggagttggccgtccacgcggagcctggcctttccgttaggggaccctgaagtctgcgaccgccccgccaacacctgagagtgtaacacagtgcccgttacacattcacactccatcacagataacacacagggcctcagggactgcaacacgtgcatgtgtagtgacgcacgacaaattaagagtgagtgagaatgaaagctcatgcttagccctgtgaaaaataaaaatcagatagcaaaacgcaaagttaaatcacagacacctggaccacaaataatctaccccagttgtaatatgtattttaatggagaccataaatttttccaaaaacccgcttgag

SEQ ID NO: 48184 - DNA, 1263 bp, Homo sapiens
aagatgtttaaagaagtcttttattaagcacaaacaacttttaatacattatcaatacaaataggaaaaggtcttttaatgactatgatatatcaaagatctgaaaggctttctctgtattgacacaataaaaataatcaattctgaagaattacaaagtaaaattttgaggacaccactgtctactaacaagagtttaactactgtctaaatttactaaatcacctgtggaggaagggcaacttttttttttctttttaatagagagaattcctactcttattagcaccattcaaagcttattatcagttgtttgtctacaaactgacaggtcaggtaaagctttaaagcaagttttcagtgcaatgtttatagttccttcttttaagatacttggaatctacagcctcgaagcatgttaagtaattatgccttggtagtagcaaggtgttaacatgtaaagagaaatgtgtcatgaaaagaaatgagacttattttggctgtgaaatgcatcttaaggtgtggtggctaatgctgtagtatgttgacaacatgcgggattatgaactgcaaatctgtaggtagctggtagctattagctctctgtggtcaccatttcaggatgtctcagctgctgccttttgagattaactagtttcatcctgtctctgatgttttctgcagtagaagccatgtcacttggactcccaaaatattgttcggttccatcaggataaactactggaacagttaatctatccaaaagtgatttcccaactgcttcaatttcatcaaattgctcctcatcattaatagcttcaggctcttctggacagtcctgcaaaatcttttcagcatttgagtgaaatgcaatagccatttccaatctatgtactctctcttcagatgctattgtaaattgtttccatactctgttcagtcgaggaagtgtatccccagatgaccgagaagtgcagcgcaaagattggcataacacaactgtggcctgtagcaactgcctgccatagtcataagtgctctgtgcaacatcaacaaattttctatgcttttccagcaaaactttcgtttcttgagcatcatcgcccaatctgatgtgagtcttaagcagagcatccagaagttcacttagccattctactgcctgggcagcatcttcttcacatttaaacaactgcaccatctgaagcatctttaaccttcgcacatctaccatgtcttccacatctttgttttctaagctgc

SEQ ID NO: 48185 - DNA, 1228 bp, Homo sapiens
  misc_feature (1)...(1228): n = a,t,c or g
ggcattttcattttatataaaagactagaaatttcatgtgtatagtaaagaaccatgaacttactatgggtatttctctttggatataatactaaaaataataatgaataataaaaaggttggcaatggccgttcactgtttgggggagacctccattctccaacagcgtggtagtgcttgcagataatgtacagggcagaggccaacttgtctctcagcatgatcaaccccgagtacagcggggttttaatctgcctgggggcatttccacaatacagcctttatccttgagggtaacaagttagcctcataatatcagagagaaaaactagttcttcttcatgctgggcagctgaggaatgcgctaatctaaaacttaatacatctcaaaaagttaaaggggaaaaaattggtttcatcaccacctgccaggctttatggatggatgatggctgacatgcacagaaggggaagggggtctcctggctgcgcatgcctgaggggcttccccatctgttccgtgctgcaggcatgttagagggagcctcacctttgcagtactggagcacagtctccatcgcactcttccggtcggaggcccagcggatgcgggcggaaccagtgatcttgttctcgatgggccaccagccttgccagaggtacacctcgtggtgattgtcaacaaggaaaagtgctgtgagggcagggacagggccagaccatcaggagctccttcacggacacttctagctcactcctcccccaacctagtggatgttgtccctcttgactgcagtgtcacagggggaaacccccttggccatcaaaccaggggcaaaggggcaaacagagaaacccaggataccccagccctttgacagttcaacggggagaagcctgtaggcagagagaagtggtgtcaaggagttggtctttttcattcctcgtcctccaggtcctcctccctttgccccagctcaaggccctggccccttctggatactggcagggctgtgcctaagagtggaagggataatgcatgtgcccactcaaggggctgttagcaccgcatatctccaaagagcacaatcaacactggagcgcacatctcactgcagacaggtcagtggcgttcctgccctgcacgcgattgcttagcagtgaggtgagctcatggctctcttacagagaaatgggccttaaaaagcaaaacttgcnaccgggagt

SEQ ID NO: 48186 - DNA, 450 bp, Homo sapiens
cagagccggttcctggaaagagctggttccctggcaggctggagggcaggagctggggccacgctggtctgggatagttgggcagggaggctgtctacctggtctccagaatggacggccctgtggcagagcatgccaagcaggagccctttcacgtggtcacacctctgttggagagctgggcgctgtcccaggtggcgggcatgcctgtcttcctcaagtgtgagaatgtgcagcccagcggctccttcaagattcggggcattgggcatttctgccaggagatggccaagaagggatgcagacacctggtgtgctcctcagggggtaatgcgggcatcgctgctgcctatgctgctaggaagctgggcattcctgccaccatcgtgctccccgagagcacctccctgcaggtggtgcagaggctgcagggggagggggccgaggttc

SEQ ID NO: 48187 - DNA, 1058 bp, Homo sapiens
ttttttttttttcctgatgagaagctttattgctaaaaagtcagtgagggtttattgagtccccaaacaccagctctttaaaccactccaacaactgctgtgaaggtcactgtgcagagaccctgggtaggggaggctggagccaggtgagtgtgacaggtcacagatggctctcaggccacctgccttcagctccttttgtttcgggttctagccagaagccctggggcctgtctcttgcctcttcttgtagcatgagacacccttgggggccctggggaagggaaggccagtggtgtggcttccctttcagcctagcaacgcccaaacccttttcctctacctggctccacttgtccccagatgctatctccaaattccaagtagcaaaattcctgggtttccccttcccagctcagagtcacttatggctggaatgtgggacaaactcttctaccagaaggtccagggtggttgcagcagctcaaaggtggggatgctggtgacattgactgggatggaaatgatggcccatggcagcccatgctgttccagagaaaggcggatcatgtagccatctcggccgagcaggaagagggcggggatgtcagctgtgcgctgggtactgtcctggatcatctccacgtagaagctgtcattgtcaactgcgttgtcagagatgatcaccgccccgcccgccgtgctcctggaccacccgagtcttggagaggaaggagcagccccccctatccaccagagcaatctggtcctggatgaagaaaccgttgctgagttccccgcaggcctctggaggttcagcggggacaaggtgaatctgctcataccttgtgtgaaagataccaccaaagtccttggcaggtgtggctgtgaagatgtatcgaatgtccccaggactcagcacttgaaagtacaaataatcatggatacggaagccgtgggacgcgacgcacgcggggagccagagcacgagacaacacgcaagccgcgccggggccatctccagggcccggcccgcgccgcgtttcctctcgccgccc

SEQ ID NO: 48188 - DNA, 1059 bp, Homo sapiens
  misc_feature (1)...(1059): n = a,t,c or g
gattcctcaacatgtgatcggtttcattcatttgtttgatcctcgtagtagttctctgatgtcacaaggccatgattgtaagccccattttacagacaggaaaatggggctcagagaaggatcaacttgcctgagcacaacagggccacagcctgtctcccagcccccagatcaggccattgaccaagctgaggatgcagagctgggatccttgccctttgttctgtgttgtcccctggatgtgatggttccttggaactgaagagggcctgggactcagtgggcaggcatacactccagggccccagtgccatcagtcacacacaggagctggggttaggggacggggctttactcttttcttcgagtgagtgttttccagtaggctattgccattgagggggagggtctgtttaggaaccaagatgagggaaggaaaggaaaggggagagagagcagttccaagccagagttgttgaacaacaaggccaaggttgcagaatnaggcaggggtgaatctnagaccagaacccaggctccaggttccaggcttccacgtgagatgcgcaaatatttgagaatcttgcactgtacaggctccaggctgtaattctccccagcccagcttcaacttgtctatctgatgggctgagtgtctatatggagtgtccttggcaatgatgacccagtggactgccccagcccccagaagagctggctgtcaccctgtgtgccccaggatccccagtggccaaagggcaggggcacccaggaagtgagaggagagccgggaccctgggaaatgagtgttgactgtgtctgaaaccgagtgtgggggccgcagccatccttgccccatgtccttctgcagaataagagtaaacaggccttctctagccatgtttgatgcaagatggcccacagctgtgactttttagctttatgtacatagtctttattataaaggtaacatatatttactggaattaacccaaacactacagaaaatatgtaaacatttacaattaaaaatgtgtctactctttgaaaaaaaaaaaa

SEQ ID NO: 48189 - DNA, 799 bp, Homo sapiens
ggatatcgaaataatgatggaaggctgtgtatatgcaatctcgaatgcggaagcctttgcagaaaaattgtccagagagctgcaggtgctagatggggctaacatccagtcaatcatggcatctgaaaaacaagtcaacatcctgatgaaattgctagatgaggctctaaaggaggtagatcagattgaattgaaactgagcagttatgaggaaatgctccaaagtgtaaaagaacaaatggatcagatctctgaaagcaaccacctaattcatcttagtaacactaataatgtaaaactcctatctgagatagagttccttgtgaaccacatggacttggccaaaggtcatataaaggcccttcaggaaggagatcttgcttcttccagaggcattgaggcctgcaccaatgctgctgatgcccttctgcagtgcatgaatgtagctcttcggacccaggccatgacttgcttctggcagtcaaacagcaacagcagcggattcagtgatttgcggagagctttttgcccggagactggccagtcacctcaacaatgtttttgttcaacagagacctcatgattctatctacttttgcctttagcaacatgatgagactgattatgtacataacttagagaaaatgaaaataaactgaaatgcactgaactaaaagtacaaccaggaaaaaactgaagttgtggaactttttaccatatgcttaagtttagaaatttttctctcaacatacatatacagaaacaagctataataaaataaaacctgtattgcagacca

SEQ ID NO: 48190 - DNA, 1254 bp, Homo sapiens
gccagagatgttacacagctctttaataatagtggccatagctgtaataacaatgacaacagtaggtaacggtagtcataccaacagtagggcagtgcattttatattacaactggtttcttgctctagtaggcttggggatgggtgaagacggacagggctggcgcagaccctttccttctcctctccagcccacagtgatctgggcttttacaagacagcctgcttccattcagtagtgtgggaaagttccttcttggcttagcaatacccctgagaccttgttcagtgggctgtgtctctccctgggatgctgggagcaccaagtgtggccgagctagggctgctgacttcctctgggcgcctctgggctgcgagggtctcttacaggaattgaggccctttgctgctccaagaaatgctgaggctgtgggcagaggggtgtacccaaggggactcttgctctgtgtctgactttgggggatccccaggtgggcagggcaggaaggaagcggctgccagcactgcaaaggggcagcagcattacagctcagccttccagacattgtagatccagttgagataggctgagaccttggtgtatactcctggggtgctcgggcccccgcagccatagccccagctaacgatgcccaccacatgccactggtcagattggtacatcaggggcccaccactgtcaccctggcaggtgtccacacccccttccgggatgcctgcacacatcatcttctcggtgacttccccctgggtacgcatcgtctgcattgcaccgtgtgctgtcaatgacctggactgacgcctgcagcagtatgtcagacatcttccctccattctgcttcgtaaagccccatccaatgatccagagtggggtggctggagtgagctcctcatcaaagaagggcagacagatgggcctgactgtgcctgagaaagtgagtgggaactgcagcttcatgagggcgatgtcattgtctttggggtacatggggttgaattcaatgatgatgatcttggccacagccagggatgggaagctgcccagtttgtctgagcctgcccgcaccttccagttgaacacatcggtatgtttcctgaagcagtgggctgccgtgaggacccagtgggggtccaggatgctccctccacagacgtgctgtttgtcgtactggatgctgacctgccaaggccaagaatccacagaggcctcctccccacccacccacgcgtccg

SEQ ID NO: 48191 - DNA, 1420 bp, Homo sapiens
tttactacatataaaatattttattacaaaaagctccattgcatggcatttcaaaaagaacatttcctacagttttctttcttcttcttttttttttttttttttgctgttacacagaagagactagttaagtgtaccattgaagactattacgcatcacgtgcctacgttcatcaggccttaagccctcaaagaacaacagcatcaggggctctgcgagagccgccacctgagcctcaccgcttagttcataaaacagccctgtgtcctttctacaaagccaggtcgtgttttctacccacagttcaggactccagcgtagacagcaaacacaaaacttgtttcctttttgaaacaaaacagtcttagtagaagcaaaacaaacaaccacaatctaaaccagccgcgaggaaccctttcctagctgggaaaggagaatgtgtcgccagcgattcggagtgaaaaggatgggaagatgcctgtgccaacacccttgaatgtggtccacagattcaccagctccaaggcagcatctctttccaaagcacctgcagcaggaggctgtgtggggcaacaaagtcactcctgatacagagaatccccccccgcccgccgccatccaaatggcgtccatgcacagcttggcccctccgcttctcaactgtggctcatgtggctttgttagagtcttgggggtgaaaggtgtgagagacaggagggagcgtggctcaagtggggccattcagtcgggcggccgggtgtcgggggccttctcctggacttcatcatactgcggtggaggagtcaaaggctctatcgagggaggagggacgtttttgtctgggaggttgatcctaaagtctttgaggtgaagcttttcagatttaatccttcgaactttcagctggtttcagtcgtttggccaacttagagttctgcctgtcaggggggttcccagggctggcctccacgtcagccctggtggatgtgggggtggtctcgtcgagccccgtcagtgactcataggacgggagagagatgctcaacctcgggttctgctcctctccccttgcttctgagtagtttgtgttcatcacttcctcgtagctgggaacatagtaccttgaggcagcctcctcatcctcctcttcttcctcctggctgtcttcctcctgggcgtgaggcccagcgcctgtcgggtgctggacatgggccaggtcctcgccctgccgctgcttcctatatccctgatactcaggcagatagaaagcagcagcagcatcaccccggccccgaccagcacgtaggccacagagaaggtcttgctcttgaggatgccgccacccacctcggtcttgttgctgccctgagctgttggcttctcggccgcgctgaagccgggtaccaggttccacatggc

SEQ ID NO: 48192 - DNA, 2198 bp, Homo sapiens
gcccagaaacagcttgattggttacagcttagcaattgtctttaatgggcatggtctgatcacttgacagcctgtggttgcctgaagatcagctggtatggctggctgagatggagctacctgttgcaagaatatactcctaagttaggttgcagtttgattactgagtttttggtacctcttagattttgtacctgggacaggttcctcacctcactcaccctggccctgttcctgagacaaggaatagctccttttaagatgctgattatcatgcttctgccttgctgggcacacccacactgggtgtaatactcaccatctcttcccattttcacatctggactcttcttctcatgcccctcaacccttaatccctccctttctttgtactcttgcttctcttctgtccaatctttgtgtccatctcccaaggccatctcccatggtatattccccacctccccacacctgccctctccatccgccatgctccctgcttctctccagtctctcttgtgcccagatagaccagccagagtttgatgttcccctcaagcaagatcaagaacagaagatctatgcccagatctttcgggaatacctgacttacctgaatcaagctgggaaccttgctgggaggagacccaagcaaggtgcaagaacactcttccttgtcaatctccatcacttcacggctgttccagtttctgaggcccctggagcagcggcgggcacagggcaagctcttccagatggtcactatcgaccagctcaaggaaatggcccccgccatcgactggttgtcctgcttgcaagcgacattcacaccgatgtccctgagcccttctcagtccctcgtggtccatgacgtggaatatttgaaaaacatgtcacaactggtggaggagatgctgctaaagcagagggactttctgcagagccacatgatcttagggctggtggtgaccctttctccagccctggacagtcaattccaggaggcacgcagaaagctcagccagaaactgcgggaactgacagagcaaccacccatgcctgcccgcccacgatggatgaagtgcgtggaggagacaggcacgttcttcgagcccacgctggcggctttgtttgttcgtgaggcctttggcccgagcacccgaagtgctgccatgaaattattcactgcgatccgggatgccctcatcactcgcctcagaaaccttccctggatgaatgaggagacccagaacatggcccaggacaaggttgctcaactgcaggtggagatgggggcttcagaatgggccctgaagccagagctggcccgacaagaatacaacgatatacagcttggatcgagcttcctgcagtctgtcctgagctgtgtccggtccctccgagctagaattgtccagagcttcttgcagcctcacccccaacacaggtggaaggtgtccccttgggacgtcaatgcttactattcggtatctgaccatgtggtagtctttccagctggactcctccaacccccattcttccaccctggctatcccagagccgtgaactttggcgctgctggcagcatcatggcccacgagctgttgcacatcttctaccagctctgtggtactgcctgggggctggcctcgcctgtgacaaccatgccctccaggaagctcacctgtgcctgaagcgccattatgctgcctttccattacctagcagaacctccttcaatgactccctcacattcttagagaatgctgcagacgttggggggctagccatcgcgctgcaggcatacagcaagaggctgttacggcaccatggggagactgtcctgcccagcctggacctcagcccccagcagatcttctttcgaagctatgcccaggtgatgtgtaggaagcccagcccccaggactctcacgacactcacagccctccacacctccgagtccacgggcccctcagcagcaccccagcctttgccaggtatttccgctgtgcacgtggtgctctcttgaacccctccagccgctgccagctctggtaacttggttaccaaagatgccacagcacagaaatatcgaccaacacctccctggtcacatccatggaatcagagcaagatttcctttctgcttctgttccaaaaataaaagctggcacttggcttccgcttgtctcttaaa

SEQ ID NO: 48193 - DNA, 2539 bp, Homo sapiens
tcccaaacacatggcttttgaactgcctttccttggatccagttcaaggggatggaggagcagtgagagtcagccgcccttccactccaatttcccagcacctcccttatctctgcctcacaagtcacccagcccccctctcttccttccttgtgcttgaagaatctctccttgctggaaagccccctgttttctcaatctccctttccacttcggtaaaatctctacttgctggaaagccccctgttttctcaatctccctttccacttcggtaaaatgcccactttctggtccccacctttttcctgagtgtagtcccaaccagccaaatccaacctcaaaacaggaagacccaaggccagtgacccccataggcctgaggcttgtgcagggcagtgggcgtggggtaaggcttcctgatgccccctgtccctgcccagaacctgatggccctcattagtccttggctcttaccttggaagcacaggcgctgacagccgtcccagcccttctgtctgcgggcctgaaccaaacggtgccatggggaactgtctgcacagggtgagtatggggccaggccccagagtcccttatccctatgcccctcatttcccctgctgtttgcccctcagtctttatatctcttccttttcctcctcatcttttctcccttcctgcttttttcctcttccttcaaagtctttttccttctctccttcctatgctagcctcctagctccctcttgtgtccctccctttgcctttgagtcagttccatcctggtctcttggtgcctttccttctgaccttgcactgctcctccagccccagctgccctggcttccccaggactgttcctgctccggctcttcaggctccctgctttgtccttttccactgtccgcactgcatctgactcctgcagagaccttgttctcccacccgaccttcctctctgtcctcccctcccacctgcccctcaattcccaggagactcttccggtgtaactctgatggcctcctctgggtatgtcctccaggcggagctctccccctcaacatgagaactcaagtcagctggacttcgaagatgtatggaattcttcctatggtgtgaatgattccttcccagatggagactatgatgccaacctgggaagcagctgccccctgccactcctgtaacctgctggatgactctgcactgcccttcttcatcctcaccagtgtcctggggtatcctagctagcagcactgtcctcttcatgcttttcagacctctcttccgctggcagctctgccctggggtggcctgtcctggacacagctggctgtggggcagtgccctcttcagcattgtggtgcccgtcttggccccagggctacggtagcaactcgcagctctggccctgctgtagcctgggctactgtgtctggtatggctcagcctttgcccaggctttgctgctagggtgccatgcctccctgggccacagactgggtgcaggccaggtcccaggcctcaccctggggctcactgtgggaatttggggagtggctgccctactgacactgcctgtcaccctggccagtggtgcttctggtggactctgcaccctgatatacagcacggagctgaaggctttgcaggccacacacactgtagcctgtcttgccatctttgtcttgttgccattgggtttgtttggagccaaggggctgaagaaggcattgggtatggggccaggcccctggatgaatatcctgtgggcctggtttattttctggtggcctcatggggtggttctaggactggatttcctggtgaggtccaagctgttgctgttgtcaacatgtctggcccagcaggctctggacctgctgctgaacctggcagaagccctggcaattttgcactgctgtggctacgcccctgctcctcgccctattctgccaccaggccacccgcaccctcttgccctctctgcccctccctgaaggatggtcttctcatctggacacccttggaagcaaatcctagttctcttcccacctgtcaacctgaattaaagtctacactgcctttgtgaagcgggtggtttcttattttgtctggggagaagaaggagaatggagagagagacatttttatgtcagactttcttgccagtgtctgcttctatagctggcttgggaagaaggtgaatgatgaataaataccctcagggtacacagatgttatattgaggtgtggggtcacggccatctcaagggagaagagaagaggaaccagagcatgaggggagtcattaaaccaaaaaaaacagaagggatggcttagctggaaaaaaagctgttatgggaagcaaatggaataggaactcaaactgagagataaacagtgaagagtgatgacaaagcccagagcaataccacctccccctgtccaacctgcccagcctctgtcttctgtctcctctctggctttgtttagtgattaggacagtggtgggaggtgaagtagctaccagggtactt

SEQ ID NO: 48194 - DNA, 600 bp, Homo sapiens
ggcagaacccgccctgccagtacagagggcccactggatttattgaaaaaaacccacatataaatggacctgtgcagtccaaacccatgctgttcaagggtcaactgtagtacataagatctgataatctggcagtcaggtggtgagggttgatgatcagccacatttatcaagggggttaagatttaagagcaatttaaaagggccaggtctcagacctgtgcaaggccacgagttagaagtgagactatccctgagtaaaaccaggacacttaagtaaatacatcctcagtaaaacaatatatagaatgtgaaaaattcacccactagcaagcagagaagaaaaggaatattgtcatttttaactgcgcttctagtgaggaaaaggagtctctcctaagaatttgtcatcataagctttggaatttgggcttcattatactacctacatagactgagaaatcctaaattaaaagtggtactctcctaatattgtgtggtgcttggaagaaacaaaaaaatcttttcggaaccacatactcttaacctaggcaacccataattcccacagataaaagcattgcaaacacaagcttttaa

SEQ ID NO: 48195 - DNA, 1707 bp, Homo sapiens
  misc_feature (1)...(1707): n = a,t,c or g
ttttttttttttttctcatcagcaatttcaattttatgttttctacttatttttatataagaatacaatgcaacaaaatattcatatattgcacaaacagtgatgtgcatacaaagatgctaacaacattggctggtaataggctttaccatgttacgatctaaatgcttgttcatcagagaatgtacaaaattctaagtttggcatccaaaagggggcttacagttattgaatatttttcccagccctattttaaatcaaattcaagtttgcctatgacaaagactgtctataagtaacagggcaagcataccaacatcaaaattattcttcttcttatctcatgtgcccctatttctcccaaataagtgacaaggagagtaaaaggatcactgagggaacatttgaagaatgctactaagtgccaggtcctgtacaaggtaattaattactacaaacactctcgtgatggacatggccaatagtgtattttgtcaaaaaacaaaaacaaaacccaagattccagaagctgtttctgacaagaagtccttgtttcagtactcttcagtatgagtccttacttgcaggactgaggaatgaaattgagaaagaacctttaatcattagaaaaggacccaataaaactatacttaaatggatcattaatgtggatttttttacattcgtgtgggatagagaataatcccatgggaaacaaacacattttgaatattttttaaagaagtagttctgattctaattttactgtatgtttaggcatcattaaggacctctgatttgaaggtagatttatgtgccagggactccaaattcatgacatgttttaaggctccatattccatgcaaaaatggacttactgagcatggtggtaataataagtatgtaaaaaatagataactacagtcgtactttnnnnnnnnnnnnnnnnnnnnnnnnnnnnnnnnnagtatnnnnnnnnnnnnnnnnnnnnnnnnnnnnnnnnnnnnnnnnnnnnnnnnnnnnnnnnnnnnnnnnnnnnnnnnnnnnnnnnnnnnnnnnnnnnnnnnnnnnnnnnnnnnnnnnnnnnnnnncctacacatcgcttcattatgattcaacatagtacttggcttgctgcaaattcaagttttgctttttggaactttgtagaatttttttcttaatatttttgatccaaggttggttgaatccacggacacagaacccatggatttgaaaggctgactgtatttctattttaggtttgtttttcctcctcagaagcctcaacgaagaaaaagtcaaaggtccttctctctctatgaccagaaataaaacctataaaggaaatagagcactaagtggggtccctggaatccccagcttctggtttccagccacttctagatgttctctggaaacataactgcgttgaaaccatactgaagtataaattcccaaattggaaagaaaacaaacaaacttggtagtctcatgcctgggagatacggaagatggaaaattctggaagaccaataggcactgatgaatttctacatctgggcatttcttgagggagagagggcctggctatttggagatggaaaatgtggtgacctagaatgagcaggcccagtctagactaacctctttatttaaccaactgaatagtcttggttccagacttctgtggaacctcagatttg

SEQ ID NO: 48196 - DNA, 1133 bp, Homo sapiens
  misc_feature (1)...(1133): n = a,t,c or g
acaaacttccagatgtgtttcagcaggactttcattttcttcatcatcatctgctctgacagtatcagatgatgatgaagaaaatgaaagtcctgctgaaacagatctgcaggcacaactccagatgttccgagctcagtggatgtttgaacttgctccaggtgtaagctctagcaatttagaaaatcgaccttgcagagcagcaagaggctctctccagaaaacatcggcagataccaaaggaaaacaagaacaggcaaaagaagaaaaggctcgagaactcttcctaaaagcagtagaagaagaacaaaatggagctctctatgaagccatcaagttttatcgtaggggctatgcaacttgtacctgatatagagttcaagattacttatacccggtctccagatgggtgatgggcgttgggaaacagctacattgaagataatgatgatgacagcaaaatggcagatctcttgtcctacttccagcagcaactcacatttcaggagtctgtgcttaaactgtgtcagcctgagcttgagagcagtcagattcacatatcagtgctgccaatggaggtcctgatgtacatcttccgatgggtggtgtctagtgacttggacctcagatcattggagcagttgtcgctggtgtgcagaggattctacatctgtgccagagaccctgaaatatggcgtctggcctgcttgaaagtttgggggcagaagctgtattaaacttgttccgtacacgtcctggagagagatgtttttagaacggcctcgtgttcggtttgatggcgtgtatatcagtaaaaccacatatattcgtcaaggggaacagtctcttgatggtttctatagagcctggcaccaagtggaatattacaggtacaactgtagtacactgagtgagtggaaaattctctctctccatgtattagttaaatggacatctgttctttgttgcttttgattgacccgcaaaatggccctcagtatttttatctagtactcaatgtaggaattgcactaaaaaaaaaaaataggctaatataaattacaaaatttnttnnggccccttttaaatttcttcttgcttttgccctgggggnattnacttgccttttcaaa

SEQ ID NO: 48197 - DNA, 1468 bp, Homo sapiens
  misc_feature (1)...(1468): n = a,t,c or g
actgttggttgccttactttaatgctgacctagcagccccgacaggaagctttaacataaagccttgaccctgagaagcatgggtgcgtcttgtcgtgagcaggttcatggctgtgctccatcctcagcccgctgatttttggtcttttgtcctttgatccagcagttcccacgtggatgttgtactgcttctgtccttgatgttgatgccgtgggcagtcaggccccggcgcagggtgtcgcatgcttccagcaggggctgcctttctaggagctgctgccgccgggcgtcccccgtggcctcgggcatggccagcgcaaactgccggaccttctgccggaaccgcaccagctcgtccaccacaccatgcaaggtagcctcgctgccgtctcctgaaacgtactgttgatttgccagagaaattccaacagtttcaaaaaactgttcaaagtaagagatgatggcaccaaacacagcaggacttctcggcccttcaggttccttcagggacgccctgagctggtccattcccgtggtgtgcaaggcccaggatggcatcaaccaccctgggtgtgtcaaagtcatctgccaaggccgccttcacggccctcttggtgctggagagcctctcccacagcatcgcttccctgacggagccgcaggccagctgccccttcatgtaggcacgtgcgtcctccaggaaagagcccagcccccaggagcagctgctgagcttggagcatggcgctgtcactgtagtcgatggctgagcggtaagtctccgcaggcagaagaaccggaagacatcgggggaaaaggtcttcagaaagtccttaatagtaatgtagttctttaatgatttggacattttttcttctcttnctttggcgtgcaaatgcccagaatgcagaaaataatttccccactgctcgcactgatgaaagacttcgcactgtgcaatttcgttctcatgatgtggaaaagctaaatctatcccacctgaatggatatccagttgacttccaaataccatactagcgatggcaagagcactcggatgtgccagcccggcctcccgggtccccagggagaggcccagaacacctcctggggtttggccgccttccacagggcgaagtcactggcatgacgcttgtcagagtccgctggctctccgactggaccagggaccacgccgaccaatttgccatacttgtctcctctagacttcagatcgaagtagacattgccttttgccgttgaataagcgttcccacgagcaatgattccttcaatgaaagaaattatctgaggaatattttcggttaccctcaggtacaccgtgggtgggagaaccttcagggctgccatgtcctgcttgaagtcttcctcataaagactggcgagggaagcgggggaaatattcatctcattggctcttttgatgattttatcatctacatcctg

SEQ ID NO: 48198 - DNA, 5887 bp, Homo sapiens
ttttttttttttcttttttaaaaaaagtttattttccacactatttgtacagctgtaaactcaaggaatcatccaatacttgtacaaatctgggagaacagttaataagcaccttcagtggtttccacagtttaagaatttaccattaaaaaattttagaataaatctaataaaatgaataaaatagttataaaaatcatacaaaatcatgatgaacatttgatatagagggtttaatatgaaacggataaatacaaaaagtgagactaatttatggatttgggctacggtaaaagacctacatggtcctcgaatcttgtgattcttggggctatatttgcctctcaagacaaactccaattattccaaggaagactttctttcaattcaggttccaatgtactgcagaagcaagtgaggacaaagtcaggagaaggtggggcagagaggctgagtgtactggggtttgaggaaaagaggagagactcttttccccaaagagagtatcaggcaaattcttccatgttctcaagtataagtggtctttggcaaaatgtaccattttctttttggagttacttaagagttttacttattgctgttcttaaattccttcccctaccacttcctcttgggcttttttatttctcttgttgatcaatctcttttttgtgatacttttcattgaatcatctcgactcctttatcccatcctttactgactcaaactccttatgctgaacttttcaatccaaaatttctattgttttaggactctgggaagcagttgataaaaagataacacgagctactgatatggtcaggagatgttttctaaacaaattgtagaaatataaacatgaaatgtggcaatgatccctttaattagatcattgagcaataaaggatatgaaccattagtataaatattcaattcagtctttccggattgtgttgttagataagaatacatccaaaaagggccacagatcgagggagaaaccaaggaggggtgaggtcatggttgagtgtaaattggttctgtcatgtggaggccggaggtgagggactgtggtgggacatcatctggtgccagccccatcctgtacctcagataggtctccgtgaaaaggagggacatcagtgcaagcagtggggctaaagaccagcacagcaacagagactagaaccttggatgcaagtattttgggcaaagaggaataattagtaatctttggtataatttaaggcacatcaaaaaaatcccctattctcaaatatctgacctacaccttgaaattcctacccattggacattctttttgatttaagcctttaactaacaaatgccaatatcctactgctcaaatattgacattctatctgggaggggctgctcattatcatccaccaaatgcccatagatctctaggacagggtaggttttgatgaaaaagcagcgcatgaatattataatgggggtcttagacaagatgatgatggtgaggaactgaggagtaaaactataggactataataaagaagaaattcagagcaccaaaacaaaacattaaggaatgctaatttcctccttaactcccaacttttcctagtcaggccccagctcataggtcaaggagctgacaggacggtgggtacctcaaagcgaggctgagctcataaggccacagggaagggtgcaactcaaatttgggaggttctgttcaccactggggggctagtattgggaaaaggtcctaggacactgggatgggcatgtaatcctcactcaggggtgtataagtctgtctgagggttgggggtaggggtggagggttctgtccttgtgtaggggtggagacttttctattagagaagtccagggtgcatgttttggggaacagtgagggaaaagttgttgttggggctcaggctgggctgggtctgggcctagtggccactcagccagaggacacttttcaatctggaccaagttgcttcaagtagagtgttgctgtgaaatacttggaaaggaaataaggcactcttgtcttcatttccgttcgatacagtcaactcccaaggtgttgtcagggcaacggcaggtcctgctccctggggtggccaagcataggtgggtgcagccgccattgttcactgagcagtagttatggccttgcggacactgagacagggccgtggtgatgccatacagccgggtctgcttgtggggttggaaagcatccgtctccttggaaattgcaagatcgagagcaaccacggaattcatcttccagtctgtgaaatacagattcttcccgtagctcgtcacagcaaaaggatactggagcccttcgagagccttgcgtctgctgggctgactggggttcaggcattccgcccgattggtgcctgcatccacccagcagagctgagatgagaacgcatcgaagtgcagtccattgggcaagcccaggtcatcctgcacaaggatcctccggttcgtgccgtccatgtaggaagtttcaatcttggggttatctctgttccagtctgtccagtaaaggttccctctcacggaatccgttacaatgcctctgggattcaccaggtcagtctcaaagagcacccggcgctgcgtgccgtccagcttcgccacttctattcgatccaggttagagtctgtccagaagatgttgcggccaaggtgatcaacagcgataccttctggacttccaagatcttgtctaatgatggtggttggctctccaccatgtagactagctctcccaatggaaggctcagtgatgtccgtccagtaaaccatcttgtccacgcagtcaaaggccagtccaatgatgactttagccgggacatgaaggaacgcctttgcttctgtcttcctcatggtatttccctccaggggcaggcgctcaatcttcccagtctgggcaaagagtaaatgggtcccaggaggcaaggggatcacggcggtaggcaccgcaggtccttggtgaatcgggggagccactgtactcagacacgggggcgtcatcccgggcctggtcctggtgccctccacctcgcggccgtcgcgatccacgcaccagcagtagccggtgctgccgtggcactgggtgggcgcgtagtgcccgtgcgcatcgcactcaggaacgaacagccccggaggaatgggtcgctgtgggtctgtcgcccccgctgccccgagaatgtgttctcgctcgtgctggcaccgggttttctccacctctccgggcacgcaacggaagccgtctccctgataaccaggtttgcactggcacgtgaaagagcctggagtgttgtagcagaaggcgtcagggtgacatcggcttggctggcattcatctacatcttggcaggcttggccatccccagaaaagcctggcaagcaggaacaggtgtaggaggagcctcctgtgtagatacactgggcccgctggggtatgtcgcagttatgaaggccagtttcacagtagttgatggggcgctggtccacgacagccacacacgttccctcatctgaaaactggtagccctccacacactcgcagcggaaggttcctgggtgattattgcagattgtgtggctcccacacactgagggttgttctgaacattcatcaatatcatagcaggttcgcccgtctcctcggaagccgatggagcactcgcaggtgaactgtgtcctgggaccagggcgacaggccgcgttggtgtcacacccatgagtgccgatgtagcagggattctgaagagcatcaggggagccttccctcacaggcccaatggagttgctgaaagcgtagcgcaagatcttctcctcctggttgtacaggacgaacacgctgtccaccgagagctgctgggtgctgggcagggctggccgggagtcatcgtggacgcattcctggaaggtgatggtctggcgccactggtaagtgtagatgcgtgaaggagatgccccatctcgctcgggctcagtcaccgtgtactcccgggtggaggaggaagtgatcactgaggtggagtagtggtacagctccgtgtagggctcaatgtgcacggaggagccgaacggaatctgcggcacgcggccctccagctccgtgtcgatggtcaggtgcccatgctcatcgatgccgctgaaccgctgcttaatgaccagattgcccgggtgccccacgaaggtcacctcagcctggcgagtgaactcacccccggtgatgctgaacccattcttgaatccgtcctgctccactgcaaacatccatccaatgatgcctccaactggggccagtggaagcagagaatatccaacggtctcgggaatggtgctgatggctgtgtaggagcgcccgtggttcattactacgtaagagtggaggtcagtgttctcaaagacaatggggacctggctgctccccacaaagatccttcctttcaccttgccattgactcgctggggggaaccttctgcaacacattgcctgccattgcccgtatagccagcgacacagctgcagcagaagcccgtggcgtagtccctgcactctgcgtgcaccgagcactggtgtctgttgttagcacacgtctggcgggaatccgtgttatagctgaaaacaactcctgtttcctcaacttcatccacatctatgacctgagggtgctgctggtgaaaagtctccactgccaactggaaagacctggttctctctgtgggaggtccaaggggcctttcggtagctgcccggcgcggggagaggacgctgggcacactgtatgtgtcagcacctccccttctcagagccttgtaggagaagggcgtggtgcccacatcctccaggcccagacgagtggtcgccaggtcataatcttcatcctcatcatcatactctgccccatcttcagttccgaggatcacgtctgcaggcaccacgccattggtggtggctggactcccaatctcaaacacccagacaccctgctgcccagagttactactcttggccaaattttcaattgattccctgtcattagcaaatatgttataagctccgttgctcttccataagaatcccactgaaccttgactgaatgcaaccacggcaggaacttggttgttttccttctttgagaatgtcgtatggaactgcagaccatcctcaggataaaggaaaatggcataggagctggaatcagaggaggctagaacagcctggaacgtgtttctcttgcctttctggtctgggtccctgctgggcccttggtagggggccacggattcccaagtgacaaccaccgcgctactaggctggaaagagatctccgggaaccctctgtggacacactctgctgctcgctgagtgatggagggggataagtcttctcgataataaaccttccccaggccatcggtcgtgtccaagtccgccaggaaaggggcgactgcaccgaatgttggtgggaagagcccgggatgggattctttggccgggggttcactcgtagcaatgatgccatttgtggtgacgtagactgcgtcgatgtcggatctgtcgtagaagcggagcgccccactcagctccagggcaggagagacgaagtcatccccgtcctccagctccaggtccccctgtccggggccgaagggaaagagctcctggcggctcaggcagcccacaggccccgccagcagcagcggcagcagcagcgcccgcgtccacgcagcccggatccggctgctcgaggccaacatgttcccgaactgcggtcccgcaaacccggtcccgcggccaggacagaggaaggcggggatgtaaccggacgcccctggcagccggaattc

SEQ ID NO: 48199 - DNA, 543 bp, Homo sapiens
  misc_feature (1)...(543): n = a,t,c or g
ntttgaanatntgaaaaaccctntgacatgattacgaatttaatacgactcactatagggaatttggccctcgaggccaagaattcggcacgagcacactgggaaacatcattaaatcacgtgcctgcttccccttcgccttctgccgtgattgtcagtttcctgaggcctccccagccacgcttcctgtacagcctgcagaactgtgagtcaattaaacctcttttcttcataaattacccagtttctcatagttctttatagcagtgtgaaaacagactaatggacccttctggttgaaggaatgcagccattctgcttgtttgactatgtcctttctattcatctctatttcctgggaggtgtttatccaagtgcaataggaggtattggtgaccgcacagtcccctcagtgttctgctagtaaatagttgaaggttgatcattgatcttctgcgttttcagtctggcatggaaaagcccctgtgcaactggtaaagatatcaataagcaccaggaggtatctaaatccccangagccat

SEQ ID NO: 48200 - DNA, 508 bp, Homo sapiens
gggcggaggagattttcggacctgcgacattcccgaaccaacccctgggcagggagggagcgggcgttcagccggggggagggcttgaagaaacgctccgggggccaatgggtctaacccttggttcttgccggccctggcggctccctcacggagccagcggccgggaatgcagacatcagaacgtgaggggagtgggccggagctgagccccagcgtgatgcccgaggctcccctggagtctccaccttttcctaccaagtccccagcgtttgaccttttcaacttggttctctcctacaagaggctggagatctacctggaacccttgaaggatgcaggtgatggtgttcgatacttgctcaggtacagactttgtggagttgctctggtctgctctgccttctgccgtcctgctctgtagtaactaacactgaccatttaggcagtggctgggctgtcctttctgccctagtgaggagcagttctgggaggtctgttcggcctc

SEQ ID NO: 48201 - DNA, 713 bp, Homo sapiens; identical to SEQ ID NO: 5659

SEQ ID NO: 48202 - DNA, 1605 bp, Homo sapiens
ctaactgcaaaagtcagagaggctgacaaggaccaatgcttctttatctggtgctcagttctcagtcagacgtgcagcatggctcagggtggaccagctgcctggcattcaggcccagatgcctgcagggctggggctctcgggacagatgcagggatgtgtgctgcagggctgctgggaggagagtggtgggggcctgagggctgagtgattctgtaaccacctgagaccttcacgtttgctgccgttgggggctcaggctgcactccccgggtcacctgacctgctgcccaggggcttccagtcctgtctgtgtggactggcacctgggctgctggagaagtctcctcccgttcggaccagcctcagggctgcacgttacctcaggaatggggccccaccatgaaggggccatctgtcagcagcgtcttctaggtccccagctcagggagccatccccagctccagttttctcatgcgaatatgcacagttttaattcacgttgttacactagcctgccgatgagacccagacacaggcagacctgggcgctcttgacccctgattccagtgagggattgggccctggagggagttcctttgcagacctgcttgccttgccccacggacagggcccaaagatgggaacccccctggccttgtgacagctccccaagtgttctccggtggagaaactgcagaggactggtgggcggggctccccagccatcaccatcctgtgtacaatggctgtagacttgtatatggctcctttaatattgtaaagatgctgatgtacaattgtcgtgcatttgtgtgaacacattgcgttcccagtccatgccataaatgatgctctcaagcaaaagactggaggctctgtcctgtgcagaagcagcagccagactcccgcattcgatgttgtgcagggaggtttgggggcggaacggattcctcccttggatccttcagttcccatcgaggaataacccgcagcagtggtggaggaaggtcagtggctgggtcctgagcttggtgttatttattgcatttgggtgcctgtcccctcagggcagcacagattctgaattctgattcacagtccctagccagatgggaactgggaaagagacagaaggcgtctgggtgcttttgaaccctgtctcaaatgtttgggattttctctctcactattctttggttggggatgatgtcctctttagacccccacgtaatggtatgagaaggtggcaggcagtggctcagccagccaggggggcaccaagtcatgcagccagcgtgagacctgcagttcacctaagcacagaacgagatctcagtatgcctccatgtaaacagattcacataggcctccaatttcaatgagaccttttgcattttttctcaaagcccttatgttctaacccatgagaaccattttacctgccctctaagggcaccagcttcgacctgcctcaggggacagcagcacagaccagtggctccctgtccaaggccgcagagcagacgccatcccactgtacaatcgaatttgctggacaaacttgataggtttctctgcttagcaacgagcctatagttag

SEQ ID NO: 48203 - DNA, 854 bp, Homo sapiens
ggcagtggctttgggggcctggctgcagctgcaattcttagctaaagctggcaagcgagtcctggtgctggaacaacataccaaggcagggggctgctgtcatacctttggaaagaatggccttgaatttgacacaggaatccattacattgggcgtatggaagagggcagcattggccgttttatcttggaccagatcactgaagggcagctggactgggctcccctgtcctctccttttgacatcatggtactggaagggcccaatggccgaaaggagtaccccatgtacagtggagagaaagcctacattcagggcctcaaggagaagtttccacaggaggaagctatcattgacaagtatataaagctggttaaggtggtatccagtggagcccctcatgccatcctgttgaaattcctcccattgcccgtggttcagctcctcgacaggtgtgggctgctgactcgtttctctccattccttcaagcatccacccagagcctggctgaggtcctgcagcagctgggggcctcctctgagctccaggcagtactcagctacatcttccccacttacggtgtcacccccaaccacagtgccttttccatgcacgccctgctggtcaaccactacatgaaaggaggcttttatccccgaggggttaccagtgaaattgccttccacaccatccctgtgattcagcgggctgggggcgctgtcctcacaaaggccactgtgcagagtgtgttgctggactcagctgggataagcctgtggtgtcagtgtgaagaaggggcatgagctggtgaacatctattgccccatcgtggtcttgcaacgaaggactgtt

SEQ ID NO: 48204 - DNA, 646 bp, Homo sapiens
  misc_feature (1)...(646): n = a,t,c or g
gggccaaacaaggctctgggctctgcccctctgggctctctcaaacctgggccttccctcttagcactagcctcctcctaagggggcagcccccaaagcctttcccaccaggcctgttctccatagagagttcctaaagggttactggctcatgttgtaagaaattatgaaacataactttcttgttttttcttttcattaaaaaaattaaaatattcaggactatcagctcctcttttgctttgccttttcttttttatataaaatatcagcaagctgcaaaaaaacaaaaatcaaaaaaaaatttttttaatggggttggggggaacaaaaaggaaaataattgctgaggtaacttcataccttgaggtagtttacttcgcacacagcattgcctgactacgcccacatgttgcggttgtcttgttgttactgttgttgcaatgttgaaaggaggggaactccacgcatgggcttttccatatgtagagaggccttcctcccttcccagcacacttgatagcattgtccagggtagctaaagtgcattacctggctaatatgcattgtcaatcagtatattaggaggagaggcctaacctcatttaactgatggcttctgtctcctaaatnantcnnaacactc

SEQ ID NO: 48205 - DNA, 1792 bp, Homo sapiens
tttttttttttttttttccataaagcataagatattttaatgagaaaacgaaaacaaaatcaaaccttagtctcatgtttctatctaaagacactcaaaactagtttttccctgcccatccctttcctaactgcaactttatgtgtgaccatgtaataaaggccagtttaaagattttttttttaaaaaaagtttaaaccttttttaaaaagattaaacaatcaggctagcaaaaaggtactcaatacatattttccttatatcaaacaagctaatttcagtacaatataactatacagaatatatacaatacacatgttcacaaaggcaaacactatagggctcagaacagatttgaaaaaacatgatattcacattgattacaataaccctaaaaatgattgtaacgttgaaacggcacttagtttacaaaaaaggtcacaaaaatatatatatatatgtagtcaccaagaactatggttcctgtaaaatactaatagccagatactagtatataaaatgtgaagttctgatattgtatacattttttggaaataaaacaaaatccaaaaccatttttgttattgtcaaaagtcaaacatgccaagttaacttagctatggcccagtgtcaccaagtaaagccatacttgaatgagatgacgactggatacaaagctggtgaaactggggactggcacagttaagagttgtactaattctaggaaaggggtagaagacataaaaacacccatctatgtaatttaattcacattttctcccctgcatcaccttcccttgagagtttcacaaaatgccagtgcccagaaagaatcacaatgctataactggcagggtaaaaaagtccccccgccccgacttccttgctgccgggctataggcaaatattaaagcatgcatcagctacccaaagccatcagtcacccatctggaagaccatggtgtacagtttccgcctaggctggctgcactaggaagtactccagtttttaaatggagcccagctttatgttagccctgtaaaatattgagctactgtagcagcaaatatgacattacagaaaaacaaaattttatttaaaaaattgttacatcaaaatttttttccttcaaatctgtgtcctttaaccaaacaacagtttcttctatcacttaattctggtcttattacctcagtctgactttctcattatgcttctctggaaagacacttctaaatcctggagattaaatttactcttaaaaatggaaatacaggaattttaaagtaaaaagaaaaggtctgttcctaaaagttctttcacaaatatatatatttaaatattaaaataggctacctaggatttttataaaatggcttttgaaaagatagtagaggcacaaagaagccatatactatcctccaagttggacataaggtgccacaaggctgccctacaaagaggcaggcaatctctacctgatgcaacgggaggcaccagtaaacaacagaaacattaaatacattattgggaacttggaccaaaaccaaattttactctattagggaccgttgcttttttaaaaaataccttgagatataagcattagaagtcatcactttgtacaaggaagaaaatgaatacagtttatgatcttactccttccaaatacctgatgtcactcatttcaggtacctgaaagatgaaaagcagtgcaactttcaacaatttaatggactactctcattatgagagactttacacagcatctgtcaacttgaaaattaaatc

SEQ ID NO: 48206 - DNA, 1460 bp, Homo sapiens
aaattatattaggttaaactgtatgaaaccctgctatttgatgagttctgatctacaaaaatgacagctccacctgatctgatgtatcacacattaacatcacatctaattcaacctgaaatgtgagtctcctttgatcttgcaaagtatctcctatgaatccgggctcttttgcttagaaggtagacagctgtaacctctaacattgatacttcgatcttcagtctctctgaatgggcagctgttaaacagtaaaggcctgggcagagttgatggtgaaaaaaagctgtatttttataccaaatggaactttagcaacacgttggactactttgtcgggcagagtggtcttcagacaggtgatgctgttggcttaagagatgaacacgtcttctctctgaatttgtttttattggttggtttcacttgaacagaaacgtttgaatggtgtgaagattctttagaaaagtgattggatccatctcaattgtgcacttgcaacagcagtgatgtaaatgtgcttatttgtagttttcatttttaactgtgcagccttaccacacctattttgaaagctgatcttttgtcctcttcagggcttttcccttgtgccatgttgtctccagcaatatatgtggcttctggctcagagcttctgctgaggcagggcctcgcgctgagtcacatggctccttggaacaagaaaactttctcagaagtccccacacgggtgggtgacagaaacagtttgtggcaacacaaatctctctccatggtggaggaaacctttgcttatccactgtattctactcagtgtatagtgatgacagatgtactagaattaaaccagtcaagtgtactggcccagggtgagtgttaaatgtgtatctcgcctgtggaacctactcagcagcttggtttctggggttgggggcatatttatttcttaaagccaaacctctccttcattggtttagtgtacataagtctatttagatacacttatcccactttaatctccaccagcccctaaactctctcctgtaccctctgttgctgaagtggcctcttcacctgggccctggaaaagccgatggaaaaagtctgttcctgcagccaaggcctgggtcccaggtgactaggagtagccataggaaggtgaggaaggagaagtgggcatgtggtgtcatctgtagtccaaggtctctgcgtctcgtcagtgggtgcagtgccttccccctcaggtgtgagcgtgatggactctagactgccttccatgagtgttggtcatgctatgatgtcatcatttgccattaaaacccagtttgtatgatgccaagaggattaattgtgcaagtgactgattcatttaaattgtaatcacatcccttttctgcttcaccaacctgaactgtttttaaaaatatcattaaaagtctgttctctttccttttgactta

SEQ ID NO: 48207 - DNA, 1511 bp, Homo sapiens
tttttttttttttttatttttgcttctttttaatgtaaacagaatacacaatcacattaaaaaccccaacatgacacagaatacacacagaattatatatagatatttacaggccctcgaaagccaaaaggaaaaatggcccctctggttaagggaagcttctcttcctaccttgtccctgtccaaaatcaaagtgctgaggcagctggaaggagcctccgcaattacttctggatataatgtagcaggaggctggaataacatcagaaacaccccacccccaccccagagcacaaccaagataccgactttctggccctggccctaatcctaaactctcctcctttgcaagctgacaaatcaaggatttgtatgtctcgagaggcatcagcatgacccctgaaattcagatgcacggcggaggggttcccatcccattccagctttcccagccttgggctgattgtgaaatgagccaaaaccaaccatatccaagagaggagggtgggggaagtaaaggaagaatggatctcaggcagagatgactgcttcggagcaggaccctgggaaccaaggggaggtcaagctgggctcacccaagcccaggacagactgcggaagacacagtggggctgtgctgccacctggtgggggatgggagcactgcagcaatgaactaggacagtcccacaggtaccttcagatcatcttttctctccatttcagtcccctaaccaacagcctcactgcagcagctcttcccaggaaatgggcttggagaagacctccctttctaaccagaggtcatagttcatctgaaagtcctcagggaggtccacccgttggcccaggacactctgcaggcagttgtccactggcaggaagtcagggttgctgtgggcccggtcatagcgccgggcgttgaagcgttcaatgttggcacgaagggcacactcctctgcctggaagtcccaaggccgggcatcaagatcattgccgtatgcccagtcgtcgttcagccgatgccgcaccttctggtagatggcagacatggtcttcatgttgctctttcgccactgccgccccaagtatttggtctgtaccttgagcagcttcagcacatagagctgcatcatggcttgtttcacctttagggcccgcttcaagatgggggctgacttgaacaccaccagcatcattgtccttgaatgcttccactttgtcagcttgttcaagatccgaagcagattgatacaagaaaagaggttcctccagcaaaattggttactgtcacctgcttccaaactctccgccgtcagctctggcagctcatgcaccacgcagtgagggtaatccaggacagaaatgctgttcttggcagtgatgtaggacatgatgttttgattgaagaactttaggatcaaaggaatgcagttggcaaacaccaggtgctgggccatgtattcaaactggtagacatggttcaacttcaaagtgcttgagcagcagca

SEQ ID NO: 48208 - DNA, 2018 bp, Homo sapiens
  misc_feature (1)...(2018): n = a,t,c or g
tttttcctcaggagccaaggtgaaggctgctgttaaataactttaatggttgatgtgggagtcacaagggaggtatgtttgctccaagggttcttcagtgccatcctcaaagctggttagtgcagggaggtagggcagagttggttccagttttcttccaggaagggtttagggaggtcccagcgagccccaggaatgagtccctcggtaccatggcaaccacaatttaagaggggcttctgcccacccctgcagcctaccccaggtccagcagaggaacaggaggccagactggccaacttgctatagacagcgccgtatccagagcccaactgcgcatgggtcattttctcttctgggcagatcctatgccagcacctttctctctcacactggtgactggagccaagtgcgaggttggcctttgctgcagaggcctctggtccgtggggatcgctgaggtgggaggggggcaaccgagcgagccctaggggagtggtctggggggacagcatccagggaaaaggttcggggtctcccccagggcagggggtgggtccagtctggggctggggccactgaggcaggcgagcaggggttaggcagggcaggctggtctgtaaacattgccagccagggtgggggtgtctccagccttgcgccctcccgctgggtcaggatgtctgtcaccgctgcgatgtcatccagcggctcaatagccatctcatggtacaaggacccctgctttgccagtgcttggggtggtttccggggagcaggagtttcaattttcatgatttcatcacagcactgcttccattggctcatgtcaaagaaaagctgccacagagcctccatccagctctgcagtgcttcccgactttctgtctgaagggtgtgtgtcacctcatcatccccatactggttactgatgcttagggtgaagggccgtcctagagcctggtccagctcccctgcccggactcgaagtctccttgttgacagcaaatagtaaagcagcggctcttcccnagtgtctgcatcctcaggttgccggtaacagaagaggtttgtgcctttcagaactccatgcacttgtgcccagttctgcatctccccagcttgctgccaccctgagggtaccacttgcagtgggctgagtcatgcagagaggctgagctgccagacggcaacacacgctaccataaaggggcanccaggcagggttctcctcatgactggcaagggtgaggtcatgtgtgaggaatccatcttgcactgctgccagggtgagtgtggtgtgagccaagaggtggtaacgaggaccaccaacaactggggtggggagcaagaatgggactgctccctgaacccccagcactgtccagcgatgcccggacacgcctccctgaggagcggcccagggagctgctgagtttggtggcaagcctcttggggccgccagtcagggccccctcttcttccacacaggccccatacagctctaaccgcagttcaaagtctggccccgcctcagcgaagagcacattgctctgaaaggagatgtctgtgagggtcctgtccactaggatcatctctgtgtcctggatgtgttcccccagctgcagcagcaggaacacagcccagcggtgcaagtcacctttgttcttgaaatattctgtgtccttccacatgagtggaatccggaggtcagagatgcagacccggccgcggcagggggagcgctcagcgggcgggccactgtcagaaggccgccggtttgtcttccccagcacctgcgcctccttgcgccgctgcagctcgcccatgtagctgaggatgcggctgttgcacactagcaggctcttggtggcctccagagcctgcttttcgcttgggagcaggttggccagcagcttacaggccccttccctcatccggatctcatggtctagcttcctctgcaactccgtgtcctcgggcaaggtcgctgaagaggctgagtcggaagcggtcgc

SEQ ID NO: 48209 - DNA, 2260 bp, Homo sapiens
tttttttttttgctgatctagacttattaaatttatttcatgtcattgtggtcacttttacagctgtttagacttattttcaatcacattactcttcacagaattcacagaattcattaactaactagtatgttacatccaagggttcttagtagcacattgaaatagaaaagaggcccacgagttgttgcttgtgtgtggaacctgagtctgattacttagacagatgtctagaacattattgctttattaggcctatttttaaaaataataaattattcctaggaaacccaccctgccaggtgctcattctgcgactgctgtgggttcactcagaacatacctgactggtgggtgctgaatgaacctcccacccatgtatcctgctgctccggacgctctgagggctggagcaatgcccctccatgcgtgtaaacattttctacagcttgccactttcctccctggtcttgcagccaatgggctgcaagtcatacatgggtctctatgtaaaacttaaattagacctaaacaacagggttcagcgaatgaggactaatgctccctataaaagccactgccccatgcaagggaatacacctgatgcaacaaaaatatcttgagtctccaactataaggaatgtctcaaagaaaatgtccttgatttaattatggtccaaggtggctgctttgcacaagcttgtcagtgacatgaacttgaagacttcatggtagatttcatggctggggtttcttattttgttccatatgagtttctattttgtgaaaaatatcttggaggttttcgcgtggtccccaaagctctggggaaccgtggataccagggataagggacgggcttcctcagggtcactggcgctccgaccgcatttggggcaggatccctgagagtggtggctgcgtcagacttgggggatgggagcagatgctgtgtgcagaatgcaggctgcagtcggggcctcagtccagcttcttgttgttgtctgtgttgtgcaacagaagctaaaaagtcgattatgagcttggctgtcttcctgggtctttccatcactactgagtgcccacagttttcccagaagctcccacctggcagttggcaattgacttggcccaacatgtctgccccagacacatccagcacctggtcttgtttcccccagatgatctgcgtcggaaccttgatcttgtccatgttctgatggagagagtatctggacttctcactgacgatttccaaaaacaactttcggtagaagttgttatgagggatgcggacatcgacaaggccttgcaggatctgctggggcaccttgaagcggacataggagcagagctgaagcatttcactcatctcttctggggtagacgggatcaagggaatcttctccacggcggcagagccctgcagttctttgagccgttgtacaaaattgattgtcagttgagtactgcaggccagcaggacacacgagacacaggctggagacatccgatgggtagtaagcagcatacaccccagccacctggccacccatggaggtgcctaccaggtggaaaggttttttgttcagcttcaggcattctacaaactggtgtatcctcttaacttgcccatctatggacaggtcatccagggaggagcgggtggtgccctcatgtcctggcatgtccacgcagaccaagtgcaggttctttggaaggaacttgaccacactgagccacatatccttgtgggcagagaatccgtggagcatgaggatggagggtttgtgcccaggcctgccccggaaggaataacagacactgatagtcttcatggtgaacatagcggacttgcatgcccaatgtcctccgccagtaccaataatagattcttatcagtgctgaaggccacagaagaaatgaagccacaaatgccaggattgggatggccagcgtgccgcccgcaatcacaaacatgttaaccacatcaagatccatcctgctctttcaggctggctgactctcttcaaagagcacagccttctttcccaactgctactggctctggcagaagctgaaaatgagattctgaccagcctcaaccgcctgggtcccgccgcgggcccggaccccggccctcggtctctagccccgggctgggaccctgcgccgggctcctacacgcgcggctcccagctccggcgcccagcccagccggactccttaaaggcgcagcgtgccggttcgcgtcctccga

SEQ ID NO: 48210 - DNA, 1331 bp, Homo sapiens
aacaaagctggagcacacaggtgcagcccttgtacagaacaatggaaatggcatggagacaattgctaccagttctataaagacagcaaaagttgggaggactgtaaatatttctgccttagtgaaaactctaccatgctgaagataaacaaacaagaagacctggaatttgccgcgtctcagagctactctgagtttttctactcttattggacagggcttttgcgccctgacagtggcaaggcctggctgtggatggatggaacccctttcacttctgaactgttccatattataatagatgtcaccagcccaagaagcagagactgtgtggccatccttaatgggatgatcttctcaaaggactgcaaagaattgaagcgttgtgtctgtgagagaagggcaggaatggtgaagccagagagcctccatgtcccccctgaaacattaggcgaaggtgactgattcgccctctgcaactacaaatagcagagtgagccaggcggtgccaaagcaagggctagttgagacattgggaaatggaacataatcaggaaagactatctctctgactagtacaaaatgggttctcgtgtttcctgttcaggatcaccagcatttctgagcttgggtttatgcacgtatttaacagtcacaagaagtcttatttacatgccaccaaccaacctcagaaacccataatgtcatctgccttcttggcttagagataacttttagctctctttcttctcaatgtctaatatcacctccctgttttcatgtcttccttacacttggtggaataaagaaactttttgaagtagaggaaatacattgaggtaacatccttttctctgacagtcaagtagtccatcagaaattggcagtcacttcccagattgtaccagcaaatacacaagggaattcttttggtttgtttcagttcatactagtcccttcccaatccatcagtaaagaccccatctgccttgtccatgccgtttcccaacagggatgtcacttgatatgagaatctcaaatctcaatgccttataagcattccttcctgtgtccattaagactctgataattgtctcccctccataggaatttctcccaggaaagaaatatatccccatctccgtttcatatcagaactaccgtccccgatattcccttcagagagattaaagaccagaaaaaagtgagcctcttcatctgcacctgtaatagtttcagttcctattttcttccattgacccatatttatacctttcaggtactgaagatttaataataataaatgtaaatactgtgaaaaaaaaaaaaaa

SEQ ID NO: 48211 - DNA, 847 bp, Homo sapiens
  misc_feature (1)...(847): n = a,t,c or g
gcgtgtgcagccgccgctgtgctgctcctgctggcgctgctgctggcggcgtgcgtgcggtgccgaagaggctcgccgcttgcgccccgcgantcacgttgtcgccgccgccggcgatgacgaacgggagccagccgggcgcgccacacaacagcacgcacacgcgtccgccggggggtcagggctcggcgctgacgcgtccttctacgtgatcctgggcttctgcggcctgacccgcgtctacttcctgatccgggcgtttaggttgaagaagcctcagcggaggcagttacggcctcctcgccaacactgaggaccccacggagatgggcctcgctggacagcgacgaggagacggtctttgagtcccggaatctgagattgatgctgagccagggaggcggcccttccagcagccatgagggaaggacaggagatggggcccaccccagtggcccagcaaccccctgctccaccgctcattcccctgctggccccggggctggtctcacccaagtgccaacccgagagctccttttggaacctgcacagcccgccgaccctgttgccacctgcacccaccgctggaccatgcagcctcgcctcctggatgctgtcccagcctggccgagggtcccaggtgaagactggagggaccccaacagccaccgcccaggacgctgaggctcccttgcctgactgtgacttgtgcctctctcctgcccccgtggggacatggcagcccagagccaaggctgggtgggcaggtgacccaaggaacctttctgggaacaccttctcgccgggctgggaacaataaatgcagccatgtctctgcaaaaaaaaa

SEQ ID NO: 48212 - DNA, 1993 bp, Homo sapiens
ttttttttttcttatttcaaaaacagggatatctgcatttaatttcattcagtaaatcaattccagttaacttaccatctcttaaaaatgggagaaagcaaacataggacgtgaaaagttaaagatgcgtgacatactggagagtaataagacatactggagagtagtaagtgcacacgtggcaattaagggttgtaatttagatgtaacacaagaaaaaaagtaaaattactgtactttattgctgtatctatgctttcccagtatagctataatactacaaggagccacagagtgccaccttctggtttaaaactgtggcaccttatttcttttgaaatgtcactttataaggtgtatgtagaaagcaacagcagcagttacaaaatgttgtctgagtgattctgagagctcaaaacaaggatccgcgtataggctgaagaaaaagacgttcagttaacagtgcgcgctgtagaactttaacacaagtcttcaggtggaattcctgtgtaaaccttagtagagatgcgactcacggagaccaaaagtaaaaatctctttaccgtttacagtttagtgaggtggtctgcattctcgcaaacggacttacaaagtacaagaaatgttgcgtgtgagtattaggcatagaatatttcattttcttacggaaggagcagcaggggacaggaaacctagtggacgccccgccaccacctttcccgaagatgcacacccccaggaacggcagtgcaagcctggcagcaagccacccttacaattctttttggttgtttaaaatacaagcgctttctgacatctcaccctagcgtgtgagccccactcaacctggcaggatacaacccacgtcctcgtttagttttccccttggaattatttacaggatgcctacagatacggtacaaactagtatgaaattaatgatagtttgcgtttccagacacgctcccgtggttaaatataccacgccaattccaaagaatggttcaaagttaaggtgactcagaagcattggcatccacagccgcagaaacaggcttctcgctgactggggtggagtcgccgactctgtcctcaacggtggtgggggccttggcagtggggggcgtcacatccacagtgagtgaggaggcagcgtctgcctttgcagtagttgtggcagggtcagagggtgcgttgctggtgggcgggagggaagacagcagctctcctgagcttgctgcagaagagctctctggaaccaaggggaatgacgggaggaactcggatggcagggggagaggtgcaatgccaggtaagtttcggggaggcatggaaggaagaggtggcagacctgggtttacaagttctggtaagccaacccctggcatgatgtgtggtgctgggaggttgaggttgaggttggggaggttgggcagtcctgctggtaaaggcatcagacctggtaatgtagtagctggattcattggtggcacagaagtgagggactggtttacttgtggtggcaataacggtactgttggtacacctgtactgagaacactactgacagctggtggagttgagctaatagaaagtccagtcagactctgttcaattcctgtagttcctggtggtgacaaagacgggggattaactgaggacagctggacctctgtaaacccatctttaagaggtgtaataggtgtaccagccatttgtcctggaagagaaattttctttccttcctcaaatgggcgtgtaggtattcgatgcaaataaccatatccaatgccacatcctaggctgccttctccaccccatgcagaatttggtgtaataatcacttctcgacagttatcagtgtctgtgttgtacacatacagtttcaatggttttgcttcatgtgtttcgataaggctgatagatcttcagactcattcatgactgtatctgctccaattatatatacctggtgtctaagacctgccagtgc

SEQ ID NO: 48213 - DNA, 2159 bp, Homo sapiens
  misc_feature (1)...(2159): n = a,t,c or g
tttttttttacatttacaatttactgaatgaattaaatcacataaagttagttactttacatcatcatatattaactgtgcttgacgcacagtaaacattcaatccatgttattttattaccgattttcctcaaaggaaaaatctactaagatacttacttacttacttaaaaaagaccagggagcaaacatatgatcattttaattacagatgattgaaatacagtgcaacagatgagacaaatacaatactgtaccagtttttaaaaacctgaaccataacggcttcgcattctagtacacttacttacttaaaacaaaaattgcttagataacaaaactatacttcaagttgttttagaaacagttctgcgctaggaacatacaaaggaaaatgacccgttgtgcttctttaaaatcgaatgagagtctcctctagggtcctgctgacagagccccccccagcctccgccaggtgaggtgcacagggcccactccaggcaccagctccccccaacttggcttctctggtttgtcgaaggcatcatccagtccacactatgtttaacagtcctagtcagccaggggattacatatttctgggaagaaaatggcaaatgtccccattaaaaaaaaaaatcagtatatcaataatccagtatatccattcataaataagctttcagatatgttaggaacataaaagctattgttgaacacgacttagcaacaaatcccacatatgataaaaaatggagaattgattttaggttatcaaattaccttgaataaatctctctggtatcttcttatagaaggataattttccgtaagaatcaggaggttcccagttaaaaaaaaatccattctttctctctctatgaaaaaacccttaacatattttcaaaaataataaggtcaatctgtaggcctttgcctggaatccagtagtttgaaaccaaccagctaacactgctatgcagtcacactggggtttgacctcaggggccgctgcagctgcctctgcctctaaaggctgaattcctgcagccagtggcggggtcggggggcagctgcagcaacaggcacggcacatgggaggggcatggcctgctggggcaggacccaggtgtgcaatagtcatctgtggcatgtcacacagaggagctcagagctatggcgctcaagtggattgaaccaattggtaagttagttaattcctgcgagaaccgacggagtcacagagctcaaagtcagtaagtaaaggttcaggagcgggaagagagggctgaccagctgcggtcggctctgggaagggaaaaccaagggaagtgcgtgctatgcttttccaaaccaaagccacagcacggtggctgctttcaaatatgaacaggcagccacgcgagtaagctgagttgaaggaattgtgataaaatgagaaatgatttcatacaggcaaataacataagaacagacttgctttgatccccagcagctggctgcggtaaagtgggggtgggagacatgggctagacagccccaggagcgagtgacagggcagtgctccttgaaggagccagaggccagcacctgtgcacagcctgccagaggcctcggtttaccctcagcggggctggaagactgagcatggccgcttggtgccatccccatgaatgggctgagccgccccaagaggcgagtaccagagtgaggtgaggacagaacacgttgcccttgaaattgcaccacagaaaaacgagcatgaggtttgttggaaaagaatttctcccacagtacagttgagctgatcccccctcaggtgactattctaaacgtaaaaaaggacataggaaaataaaggcctgtttctcttctctaaaaataccttatatgtacacaacagtaattgttaacaggaggaccccgtgcatgaagaaaactgtggaacagagggcagtggcctgtcttctccccaagtacttcattcaagacagttttcaagttgtggccaagagctgagggaagccacggggctggcaatgcatcttgaagtgagtggtgtttgttgttactgaaggatttaagttggaaagaaatggcgtacagctttcttgaacctcagtactgcattccgttcacttagtttcacccangctgcc

SEQ ID NO: 48214 - DNA, 1005 bp, Homo sapiens; identical to SEQ ID NO: 5699

SEQ ID NO: 48215 - DNA, 1277 bp, Homo sapiens
aaaaaagagagcaacatatttgtgtaagtttgtatatgtgtagggctgtgtaggtatgtgtatatacagccatattctaagtgtatatttattaaaatagattgcatgttgcaatacggttttctgaaaggggtctcattgactattaaataaatgactactactaaacttgtctgtagtcattaatcttaaaattacctgaaaatctgatgacagctgccttccctaactttaatgtattaggttggcacaaaattaattgtagtttttgccactattaatggcaaaaaccgagattatttttgtaccaacataatacacctttcatattatgtattatcttgcttaatgggttttatcttgattatccagttacttccatcctcttcccaatgttaatttgcaatagttttaaaatgggaacaaatgaatcaatcatcagatagttaaaatgaaattaaatcagctgcctaataatttatggaattcattggaatgtgcttaaaatgctaaagtgtatgtcattgaacatgaaatcttttttcaggcacatacattgttggtattgatgactttttaaaacctgtgggataaacttgcactgcacacggaagttttattcttgtatatttagatttgtatgcttgtgagtaaaaatgtgcatttgtaaatactgtgtttttaggttgaatcaattaagtcttaaaactgtaaatttattaagcttgttgccagtaggtttaagaaaatcatgatctcacatgcctcactttgacatttatcatgccttttattaaaaatatcccttaggaacagtaagtttgccttaactctctgcatggtttaaaaagccattggttttgtgtgtgtttacagtaattatggcagatgactaaatgagttgacacagtaaaattacttccatatggtacagtaacaacctaactcccttctacctgatgtaaccatttacaaattatagttattgtaccagtctttcaacatttcagggttaatctgacctatgcagaattctagtgtgaatttattgtgaaaatgctaaatgaaacaatttgtcagaaattatgtacaattttcattaccttcaaaatggatcttttgcactgtctgagagtatatatttttgcaactcaagacttggtactagttttaatacttaacacttactgacccaacagaagtttggaattaccttgcatataaaaattgaggttgaataaaatgaaaaattgttgttttctgttacaaaaaaaaaa

SEQ ID NO: 48216 - DNA, 1690 bp, Homo sapiens
tttagaaattgattagctttattaaaataaaaatttaaaaatcacaaggtgactcattcattctaaagtgaggccccttttcccttctccctatctgcttaatccttacagaaaagcgaaacaccaaaaacaagacccagggcgctcataccaggccttgctcccagcaggaatttaaaaccaaggataagagatgcctttgtcaaatcttggttccatgaaaaacttaccaacgcagctttttaatactcctatttcatccccctttctggaactctccctgctcccttctcatcctggggtttccatcctgtgtcccctcgggctgtggagctacgatgcctgcctgtggctttattaaaaagaaaacagtcccggggctttgttcttggttgttgctgcccaggcaggagagcacttttatgtggatttctgatttgttgcaacagttcaatgggactttttttttccttctcaatcaacagagtttaccaatgtttccaacctctctaataataataacctgagaaaacttacaatgctgacttgcacccatgtggtaatggagcacaggtttccccctaagtttggtaagactagttaggaaaaagccaaatggataacttacatcataatttgtaagaatctaagcactctttgtaaaatgggggtgagaaattaaaagtgggctcccaagcccctctcctagatccttctgaagggccagcgccagtcctgggtgccacagctcacagcccaactggacagccacgatgtcaaaggcgtccctttcaggaccacagccctcacctcaacccactttactgggaatactttagtctccaaaactaagacgtaacattctttaacttttaagaatgcctttctatagacagtatcctgaattagacatctagaattagtgcaatagaagatccaatataactttatattactttacagttaacaaacctttacacatagcacagaccctgttcagaaacgttcctatatatttacaaacacactgttgtacatatatacatgttaacaaaatacagggcaatctaaaaattagattcatctcagtacatgtttttaaacgttatttaaccaatacctttaaaaattatttcccataatctaaaataactccctgcctcacaaattaatacgatttccatttgtacttttcctcatgaggatttactttccctcattccttgacaacttccccaaacccgactccggttctgcctccatcgtcagctgagagctgggcctctttcctcctggtgggtctgcgctgtgtcgggagcgcccatctcagcagcggggcttcaggagtccagctccagcggctctcggttttcgctgagtcttaacataagctgctggttcatagtagaggctctctgcgtagattatttattgtgacaacttgacagcaaggacctcagatttcacatggaccatgggcttctggtggaaggggccggggatggacactccactgctcgtgctcacggctttcttggtcacctgcacatacaccttcccatggtctttggagacaaggcagtggtagaggtcatcgtatttgacttctaggaaaatggcttctcgatccacgtagtctccacttttcaggaagtaaacagctttggaggagatgagcacgcagtagctc

SEQ ID NO: 48217 - DNA, 564 bp, Homo sapiens
gcacgaggtggagcgaagacggaatgtgtctcctgctgggggccacgggcgtcgggaagacgctgctggtgaaacggctgcaggaggtgagctcccgggatgggaaaggcgacctgggggagccgcccccgacacggcccacggtgggcaccaatcttactgacatcgtggcacagagaaagatcaccatccgggagcttggggggtgcatgggccccatctggtccagttactatggaaactgccgttctctcctgtttgtgatggacgcctctgaccccacccagctctctgcatcctgtgtgcagctcttaggtctcctttctgcagaacaacttgcagaagcatcggtgctgatactcttcaataaaatcgacctaccctgttacatgttccacggaggagatgaagtcattaatcaggcttccagacatcattgcttgtgccaagcagaacatcaccacggcagaaatcagcgcccgtgaaggcactggcttagcaggggtgctggcctggctccaggcagcccacagagccaacgattgactgcacggcagaggcgca

SEQ ID NO: 48218 - DNA, 761 bp, Homo sapiens
gtatagccacaaagaacaaaacaaaagctagtagcatcagtttagatcataacagtgtttcttcctcatctgaaaactcagatgagcctctgaacttgacttttatcaagaaggaattttcaaattcaaataatctggacaacaaaagcactaacccagtgttcagcatgaacccatttagtgccaaacctttatacacagctcttccacctcaaagcgcatttccccctgctactttcatgccaccagtccagaccagtattcctgggctacgaccatacccaggactggatcagatgagcttcctaccacatatggcctacacctacccaactggagcagctacttttgctgatatgcagcaaaggagaaagtaccagcggaaacaaggatttcagggagaattgcttgatggagcacaagactacatgtcaggcctagatgatatgacagactccgactcctgtctgtctcgcaaaaagatcaagaagacagagagtggcatgtatgcatgtgacttatgtgacaagacattccagaaaagcagttcccttttgcgacataaatacgaacacacaggaaaaagaccacatcagtgtcagatttgtaagaaagcgtttaaacacaagcaccaccttatcgagcactcaaggcttcactcgggcgagaagccctatcagtgtgataaatgtggcaagcgcttctcacactcgggctcgtactcgcagcacatgaatcacaggtattcctactgcaagcgg

SEQ ID NO: 48219 - DNA, 2992 bp, Homo sapiens; identical to SEQ ID NO: 5715

SEQ ID NO: 48220 - DNA, 725 bp, Homo sapiens
cccccccgaagccatgtcactgaaaaggcctgggggggatggtatatggccctttccccaccaggcgctaaggggaacacccccttccccaggtcttttatttgtttaagttatttttgcacaaatgactcttttatatttaattcgatttcattgcctcccttcttaaagccaacaggctcagtttacaaacctgtgagctactgttggctgctgccctccttcccagtgaaaggtacaaagcaataagcatcatgcatcctccccttacccctccaacacccctctgcctctggctcaggttgctcaaagcacagatcctctcttaccccgtccccaggtttgaaacacatagcctcatttcaaggtgtagccaggttcccccgactttcctctgggatataaaaaagggggtaagggggcaacagagagccctctgggcctctcctcccatacacactacactgccccttctccccccatcaaaacgctcagagacgttgtgatgatgcgactgaggattatgcaacgtggtccaaccggagcggccagcatgaccagctgtccaggggctgcctcctgccttttcttttgtaaagacaagacccttgggagttttaattctgttttgtacttccctgtggggcctccactgcttttctatgggagacactcttaatttaacagatgagaatattttgaaactctgaaaaaaaaaaaaaaaa

SEQ ID NO: 48221 - DNA, 1874 bp, Homo sapiens
ttttttttttttttttccagtccacagcaccttccattttattgttttatttacaaacagggtgaagtcaaagggaaagtcaggggatggagtcagtctgggccatccgaatgtggagtagttcttgggtcaagctctaccatgaaggccacctcttacatatccttttcctgccccttggtaatggccccttgattcctcagggcagcctcagctgctgtacctgaacacttttatgagggcagatggatcctggggtaacaggggtggtacgagggctggggcccccctcaagtttgtgtaaacctgagttccgatcacacgcatgatttccttcttgtatcttggggtcctgagtattaatgttgggcatcgcccacctgaccatcctcatatacaaagaagaatcttgtgcagacatggtcggacacagggcacacccagatgttcccatgcttctggaggtccttagatgtaatcacttcacaaagtgctatacagtttagattccgactctgcaggaaccgtgactgaatggatcgggtctgggggatggtattcatcctgttgtatctctggaccagctcatccttggagggcatcctgtgctgtccttttcccattcctgcagtttggtgtaggatgcattgaccagcccattgcgcaggatcgaatgccagttctcaatgtgggacccatggaaggcaaaggtgctgccatagagcttcttggcggtccggaaccgagcctccttggcaggagggctgctcagcaggaggaactggtgtgaggtgtgcatgaacttcagcctgctgagaggtagtttgacaatgtgtgacctgttgctagagatgatccactgcaggagaggatgggccagggggatccaacttgtccatctgtttcttgatttccaaatatgagccctgggtcatctcccgaatagacatcacactatccagagctttctgaagccgctcataattcttcttcttagggttaaaggccagagtcttgggatcagtggggtccaccacagagggataaggctcaaagatgatgctctttctaggggactctaaagctgccctacacatggccaccagcagatccaccacctctgctccagtggccacctcctctgcagctccagacatgacgcccagtgtgtagaaggagaaaacgcatagttcacgagtacagacagctggcttcagcatagatccattttggaagacatgctgctcatcacacaccacacagtactcattcaatgttggaatcctctgttctgcatacttcatgatctgaacgaggaatccatactccagagtgggaatgttcttgcagtgaccactgacctgggggctgggagggtagccaaacacttccactttggggttcttcatggtacaggagatggaacggttcatgaggcgcccaacccgaagctctggttacacctagtttgcctttcagcatggagtcctgtatgaatagggaaactgggagacttggggatgggtgaaaagatgctgaggcccagctcggaacttcttgatggtaccacttgccttgaaccaactgtgcctcttctcctgctgggtcttcaagaaatcattgctcagatgtttccattgttgggatgtaaacatacccaggatctttttcaactgaagacccagcccaaatccttccttatttgatggctggaaaacctcaatggatggttctggtccatctaggtactgggagagagaaaatcgcagcctcaacacaataggttcctgtccggaggaccttccaggctgtagagacttcctcatcgaggaagctgatgttgatgtggaggtcaatgtccacgtcatcgatag

SEQ ID NO: 48222 - DNA, 1637 bp, Homo sapiens
ttttttttttttttttcacgtttccaattgagttttattctagaacaaatggttttacaacaaagctgatcttaaatagtacatttccccgctgataacagcgccatcttccttcgacccccagaccaagggatcaaagctactgctcaattgagtttgacatcagctaccgacttttaaggaatctagaacaaagttctggagccaggccagaagtggtaaaagattcagttagccccttcctctgtgctgtgctgacagggagggagccagtgactggacaatctatgaccccaaagtttgtggaacgtggggcttcagctgagggtggggtagtgtgatttcagcagtgtctccacctccctgacccctgcgctgctttgctctgttgtcacctcccgcacagtgtcgggacactgaccggaagccaaacctgtgcctggtggccacagacaagacacacggatatccgtgaaccttgctgctgtgccctcaccgaggccagcgccccacctgctggaacagccaagccggagcagttctgtctggggccacagctggctcagcctgtggactcaggtgttatccttgaagaagttacaacaaattctcaaagaataaacaatgggcttaaaaaaaaaaaagggggataaacagaaactcacagtagctgtggctcaccatgtgcccaggcactgtgccaagcacttcacatttagtgctcattacaaccctatgaggtaggccgtaccactatccccactttacagtgaggaacaaacaggctcaagagtgaagtccctcgcttgcttagtatctcaaagctaagctgcaagcaaagatggggctccaaggtctgtgtgacctgagctcttggttatccaatacttcaaaactgtcacttaggaaagaagagaacatttttagaaataggagaaaacccaacagccacagtgattgtcaaagagctgagggggcatcagaccaggttcgggggcaccagaccaggttcagggccactgcgtaactgccaatgccctgccccagccccaggagacacgcagactccactgccctagacgagtggccctgctgttaataaataaataaaggtcaggcacaatcctacacaaaggccccagaattcaaaccactgtcttgtttctcagacttttgcttaagagcccagtactgggtggactggggaaatccctgatttgggtcaaaataaatatgccagttctcatccaaagcttacctgccttccctcctccttgagctgtgcctggggctttctgttgccaagaaatgttaaggagccaactccccacgagaagcctgtgggctctgctattccactgtagcctagcagggagctgacaggccaggcacggagttcctacaatggctgtagccagagttccaggtcagggaggtggggaagaaatgcctcctttaggacttaactcctctttaacttcagggcatgtttattctgaacccaaatgagtggaggaagaggtaggcaacaaaaggaagagaactttacccccaagtcattgagttggggtaagggagctccaggatattgacatccccacccaccatccccagagaggatgatatgatccctttcc

SEQ ID NO: 48223 - DNA, 2861 bp, Homo sapiens
tgaatcgggacctcccgccccttccaaacccaggagaggacgtcgacccaagtctgaatctcagggcaatgctaccaaaaatgatgatctaaataaacctattaacaagggaaggaagagagctgcagtgggtcaggagagccctgggggtttggaagcaggtaatgccaaagcacccaaactgcaagatttagccaaaaaggcagcaccagcagaaagacaaattgacttacaaaggtaaaaatgcatttgcaaagggagaaaatgaaggccaaacagaagcaggctccagcttctgcaaaaacttggattcacaaatgtccctgaacagaaaatgaagctcacttcagaacacacactctctgccttgaaaactaaagacgactattacttccttttcacatgaccacaagtcctctgatggaaatgtacagcagaaactcttgagagagaggctaaaagcaactctgttctcccccttcccctagacttttcttacgaaaagtcaataattaagcaaattgcttaacacttggttccagttcctgcctatctggagtttaaatgcgtaatacaccattaatttccacgctgcagtttttattttaaagaaagtaacaagatgtctttacactgacactgaaaattcatccattttagagccaggaattcccatgttacacaggaaaaaatagaagtctactgaattaattttttaaaagaaaagagatcagattaaatatttctttgtttttccttttggaaacttttatgtataattctttctgcctgcctacttttctgcaaaaatgagatgtacagatttcggttccctgctatgaaaagtgatgtggtagcaattttataaatgttgctttctgatttttatcagagtgagaaaattaaaattattgatttgcaagtagtaaacagttcatattttgatttcccctcattttagtttaatataatttgcaataaatgtacatattgttgtttgtttcataaagcatatcactttaaaatggtttttactcctgtgattatgttggaatatttggaattttaaaggagtaaagactgtccagcatttggttttataatgtttgtcaccagatttttattaatgtaaaaaaaatcaatttttaaaaaatagttggactttggcagcttttaaggaaagttggaggtgttttaggattgctatcaattttcagcattgtgctatttggaaataagtgttttgcttttgtctgatggtctgggctcatttttatgtttattttagaaaactgttgcatcaatatattatgtttcttggcattgttcagcataggtaatgtgtgcactttatgtgtacacataatcatatttaagttttttgcataaaataaatgcttctagatgtcatggcagtctttttaatctttttatcatatgctttcttgtgaattttttcatgttaaagagctaaagtcataacatgattacagtcaactctccattatctatataaaatagtgactaagcctcaggtttttaattttgtgataacaaaataacgaaggcatgtaagacctgattctggaggaacatgaaatttgtcttttctcatgtccagagttctatcctgcccccactgtccactgtagggtcatccgcaaagccctagcagaatgtgctcactccatttccttacacgtttctagcatgggtcagaggaaacaacatttgtgttataacttcgtcttgataggctgtagtgtacatgggatgtaaaacaaacaagtgtatcaaaggtggatgattctgttagagtgaagtttgagagtaaatgtcacttacgtttctcatagataatcaagagttggctgtgtattgactgaaagatgggtaattattttaaatatgcatttacacacatttaggtatcagaagatgcttagggaacaatggataccaatgatagaaaatgatacctttacaggggcagaaaaatccccactcttccttattgcctcttcagaaccctttagaaagtataaaatattgcctccaacatgctgaaaaagagtatctatgcataagtatcagagaagtccctcaagcaatcagtaggtgtgttctatttagagagagtttaaagttctcttagcatcagacaacttgattcctaaggtttccagtgtgtcaccaacaaaaagtgcattgatagggacctttgtctcttcctccctttgattaattgcccggcatcacagtttactagattaccaagtgttacatcatattaaataaaatgtagcagaaccatctgcatcaatatattcctgtttagatttttgcaggagagaagttaaaaggatttgctccttgtatgatgtaagtggcccaccccaattttgtaacatgatgcaagtgtctggcactaagggaagcaagagtagggttgtggaaagaccaagctgatggggagggacttgtttacgggaatttttttagttttccttttcaaaggaaaacattaaaatcccttaggaatttggtattcacatctcagagaactacaacacaaaagtgcagacttatatttgagaattaatgttaaccctttgtgtctagtttgaagcttcttgtatttgtctaaaacaacaagccagaattttgtatctcctttgataaaaagtgtgtataatgtaaagtagttttgcatattcttgtgctgcacatgggctgaatttttaaattttttttaaaaacttgaagcagaaccttgtaatttgtgtaaatgacaagtgtaaaactcctaccataaaatgctaaaaatatgcactgtttcaaataaaaccaagaaatgcagc

SEQ ID NO: 48224 - DNA, 443 bp, Homo sapiens
  misc_feature (1)...(443): n = a,t,c or g
gcacaggtaagtgaaggcctccgggtacccaagtgctgacaggccttagaagaccaaggaccgacaggtcctgctcccccagagctcaggggtgcagaccccaggcccgcctccctcagacctaagtaagagtccagactctagctgcctcctccctcagacccgaagtctgggcccccagcccctcctccctcaaaccctggagtccaggcctcagaccctcctcccttacatccagggagtacaggccccacccctcctccctcaggacccagggagtccagttccccagccccttcttcgccagacccaggagtacaggtgcttattctctgaaggtattcgatcaactgggctctgattacctgaaatacaaacccattttggcagtgactccaattccttnagccctggggctgaagggcaactacaggggcctgggg

SEQ ID NO: 48225 - DNA, 1394 bp, Homo sapiens
  misc_feature (1)...(1394): n = a,t,c or g
ttttttttttttttcccttttataaaatatttattctaaaaaaaaaatcacactgtacaaatttagatagaacattatcaatgctcagatttataaaaatgggaacagaaagactaaagctagcgaaggaacgtacatttctgttttgtctttttaaattaggaaggtaaaagtgattttttcttcaggtgcagtgatagtaaatgtctagaagacatccgaagagccagaaataaaaagcacaggagccgcctgcagactctcagagttctgtcttcacccactgaatccgaagtggatgcgtgtggcgctcccgcagggtggcctggccccgtggatccacgccgaacgctcaacgagattcccaaggctggctgtgtacagcctaaaactttgtgctcagagaaaaaccagcatgatgggttcatcaactcctgtttctcaaacaaaatgagttttctgtacacttgttacaaaggtctgtacaaaagcacgaagctgctgtgaggtgttatttccgaaagagttaaaaatggatggaagggagctgttcgtacagttccgcctgtacattcacagagggaggacaccataaaaaaaggactcactcagaaattccagaccggagaatcctggcttcttaaaagattattttgaaagcttggaataagtttcagctctgccatttcccaaaccgcttcgcccagcatcgtcatagttcagcttcctctaaaactatattctccctttcttacacgcaaactaccaggaaaaataaccgcaacccagtgaaaactaatggggcttctgtgaatataaggaacgaggcagggagaagtcgtaaaagctgngggctcagagcccggagcgcccttcacattccggggtggccgtggcggccacagtcacagccaggggtgccaggcggggtccatgcggcacagattgtccaggctgtttgccgcggccaccagggtgttcaccttgctttccccgccttcgaactgggcgaggttgtgcaggcgggtcatgatggcggtgacggctttctgaaccagggacaccagttgctggctgtccatgttctctggctgcccggcggccgagagaggagaggacgtgtcctcttgtgtttttttgtgccaagcaatgatctcgtcccggagaaccgttttcagaatgccatccaccttaaagtttggctgggcgaagcaccgggcgaccgcaatcatggacgctgtcaacgggccggagaccccgatggtggtcagaaactcagaaatgttgggcgtgagtcgaaatgggacaggacggttggcatccaggtctccagtcgcgtcgtttatgtcaaatcgaaagtaggcaacattcagtttgccagtgtcctgagcgat

SEQ ID NO: 48226 - DNA, 967 bp, Homo sapiens
  misc_feature (1)...(967): n = a,t,c or g
cagtatcccccccaacatagaacaggaaggtctcaagccagccccctcctccagttcaatcaccctccctcacatccacccagagacngtccagacctgtggccacttccatgccctctccagaccaggagacacctgctgctgacctcgtggaaaacttagattttgacattctgatgcttcggaagtggtggctcctcctccttcacccctccgccacctgtgggcctcctctctgcatctcaagagaacaaccagatctttgggctcctggggtgtgtgccatgcaatttagacgaagtgctttgaaaatatgccattcagtctctgactgaggaaaataagtctgacctgataggtccgatgtcatcagctcttcaacatgagacaaaagaggggattttatgttttgagtccttagaatgatataataattttctgaattgacatctggatgttgaaattaggatggtgcaaaaggggtccagggcctcaggctgggcgcagcagcccagctcccaacgacgcagaagctgcttcaaaaccccctcaacaaagaggggcacatgcaagtcaccaaagtgggaagccttcaccaaggccacacccaaagtctactgattgtctgtccaaagttcgttgattcctggccatgaacaagcacaatagaaaaagacacagggtcctagtggctacaagtcaatgtgaattggcacatggtctagcagttttaaaatctgacagtagagtatggcaataggcaagggcccaagaagtcctgagatgggaggtcagcgctctaactgggctcagtggaggtctgtgaccagtgtctggacactagctacaggggaccgggcagaggattctgggcagaaggaaaatgtctaaaagtactttgggagggtaaaggacaggggccttatttaaaataaagactgaaggataataagtgtcaaaaaaaaaa

SEQ ID NO: 48227 - DNA, 2023 bp, Homo sapiens
tttttttttttttcagactgagctcctggcacaggagcttttccatgaaaagtttattagaagggcacttacaagaggaagagagggaatgagaggacacaaatctttaacaataggggtacaatgcttaaacaggtgctctgcttttaagatataaaagttagaaaaatctaaaacactataaatacatacatgctttttacaaagttattaaaaggtcaggctggccgaatagtgaaggtaatcaacacagtcaatgttctattccccatccctccacacacatcagagtccagaacagccgagttgcaacagcagcagtgaaggtgagtgaaggcttcttggatagatggctccatctctctgtaatgctttcacccctagcaagggagtggggcttggttcagaggacccttgtggaagggcccagatttgactcagagctgtctgtttttacacgcggccacttgtttagccagcctggtttggtgtttctggatgctgagccaaaaagccactacaccctccaccaacattcagaactggctgtgccccaactcttccagccactgtccttgggaggagagacctttccaactttcttaaaaaaaattaaatagttatctgtctgaatggttttaagaaattattacataaatataaaaacaccagaatactagagtatacattacttctgcattaaaaaaaaatccattgcagaatcactgagaatttctcaatccagtttacatgaggcaagtttcttttctatgatagctgtgtttttgaaaagttgcctgtttagcccatcatctccccaccatcacctccccatgggagatgcttcatcatcattttggatccatgtcctcttgcgtacgtttttctgctttccctacccacttgagaagcggctgatgctccttaaactgtgatgaaaatacattgtgaagacggttacctgaaaggggcctacaagggaacatctttgccacacaaagacagtacagcttcgctgtgttgaggtttggttctggtaaaatggggacacgtttattttgggggaactcccaactctagccaagtcacacagtaagaaacagggtccagggctaaacgggtgcaactctcttgctgctggtatcccccttggtgaacagtcctacaagcagcctgcagattcttctccctacatctcctgtaaggacgaaggagtggtgtaacctgagctccggccctgtggagaccctcatgaggcctgaggctaagaatgaaacagatctttgcttcttccccagattacttacatacgtgcatgccatgcacacactacttcaaacctttctgtagtcttgagtaaaagcatttagcctggaatatgtccaaactctaggaagccaaggggagatggagaaaaataaacaaactaagcacatgatatgtgctatagctcacttcagtatattaacgatggtttaaaaaaataatcaccatggtcaataaaaaaaaaaaaatacaacacagacaacataaggacaatggagacgtctgccagcagccttgccctcatgtgtgctcttcctaagagtcaaagtccctgctcctgactctaggcttgtctcaaaatgtcaggtctacagcctgccaggaaggtggccaactgagatgatgttccagcacaggcctgtaatccaaaccggctggggtagctacctacgtatgtgctggaagcatctaagttactaaattgggaagaagcgaggtggggaggggagagaggaaagggaataaaagttggctccttggaaggtgctgaagacaaggatctgtgtcccagtgctagctgcacttgggtcagtctcagcacaagctgcaaggtgaagatgtcatggcggggagcccaggcaggggcaacacacgcggtcgtgttgactaggtgaacgccacttaaaactgctatccagtcaccagcactcctctagaactgccctggtttcctcttgcccttttcaactgtccttta

SEQ ID NO: 48228 - DNA, 1241 bp, Homo sapiens
tttttttttttttttcagagtgggaaacgtgtttattgtttgatcagtctcaggcctggttggggggtggaaggcaggactggggtcccttccccaacaacagcgcagaagccccaggaagatggcgcagattcctgacgacccacagccaccttttatgaggccagagactttacacaccacactccccacctccatccagtcaaggctctgccatggaacagctgatatctttaggctagaggactccattctgtgtaggggctcattcccatctcagctccagaacacggaggacctgaagattactcacggattcctccttcaggcagggctctgcttttgagatgcggctgctctgtgtctgtgtccagggccctgaacaccagcctcaggctctcaccaggtgtctggacaggagtccaggctccctgcaaagtcctgtggtacctgggggcacccggcagcccggctcatggatgcttccaccgcgtgtgtttctgcagtgtgttctgctccataaagcggcgagggcagtgtggacactgaaacgggcgttccccagagtgcacccggctgtgctgggccagctcacccgcatcccggaagcggcgagggcagagcgggcagccgtggggccgcccacccacccgccaggtgaatggaatggtgccgtgccaagctggtggcgcgcttgaatgccttcccacagatgtcacactcgaagggctttacctccgagtgggtgatgctgtgtcgctgaaggtaggacatgtactcgaagacccttgagcacacggggcagctgtagcactttttctggcctggagccccactggcccctggctccctctgtgactcctcgtccaccagcactgtgtaggggacaccctgagtgtcaataagcaggtagtggttgggccttggaggagatgaagcctggggagatccgatggaggaggaaggtccaggttctggggagcggcaagtccgacggggagggccctccatggtctcaacggaggaaaatgccagaggctgagggcagggggatggcagcaccagcatccggagggctggctgaggcccagtgcagcagcctctcaggtccgggcgactccaagcggccccgggctaccctcgcagttgcaggcggcggcgagaaggggacctctgggtgtgccccaggaactggggcgccggccgaaagagagaagccgaagggagagaagagggtctag

SEQ ID NO: 48229 - DNA, 2228 bp, Homo sapiens
tttttttttttaaggatttccaactaggttttattttagtttccaatattatgagcaatgatacaggagtaactcaagcaaatacatcaccttaaatacatcagagaaaactcactgtgtcagcacgtcttgcgctccagcaaatgaacataaaaacaacaatgtcagcagcattaaagtgcttttggccatacttctttcagaaagggtctctccctcagtggtataaatttaattttacgtattgaagaagctcaaaatttcattcattccccaggggctacattggaaaaaaaattcatgtttacgctaaagaatttttttttttcaaaaagagcacaaaatccattggaattgtgtgacagtgattttccctgacatgctgtgaaagtggcccctgtccattcagggcccggcacacgccgggaacatccacccacagcatgtccacctggcagagtccatcacttcgccccacacaacaggacagactgagggctttaaatacaagcaggtatgtgaacaggacatcacctgtgatgtggccaccaaacagtgcacagaggctaccaactcatttcctcaaagatgagtgatggctgggctgctgggcccctgccttgtgggctgctttttgggagaggtgttgcttatttctaggaagcgatccaacttgtgccacacaggatttgtcacccaaactgcttttctcacacagtcaacaccttggtgacaggcatctgcccccacttcaaccagtaacaatcccaaaactcaacatcagcataaagacaagggggtcagtcgaaggttctggagatcagggagggtggaaagatggacactgggttttccacattgtcccttggccaactgcagtcactggcacaggaaatttagtccagggcacttgggacaaggttgggggtggggtggaaacatgtctcttaaagggcacaacagggatgcaatcaagcctagtgggtgggggctctcagacccatgagcccctcgcagaacgaggccaagtggacggcccattctccagctgtcctgtgtgggggccatgcacctcagccagccaccaacgtccccaccttccaccatccatccttctactacatccttcaaccacctagaccatgccatcttccaaaacagatctacacaaaacaggcctgcacaagtccaggactgacactaaagcaaaggacacaataatgagaagagaggcaagtccctccttgtcccagtgactgccacctgctctgccagctccccatacatccaacagccctcccctctgagctactcccactcctccagctgcctcagcagcatcctttctaccacccccagcacagggcccgcctcagcctaagcccagggttaactgagcctcaccaccaagacgtgtctgaggctctgcaaatgggatgaagcactgagccaacaggcgagatggacacacacaagccacagtccttctgggacagactctctgggaagaaactccaatcgtcccttcacacctgcaggtgtgctgggctgcaaggagggcaggtgcgcacaggctggaggaaggtgggggtgtctgtgtgataccctcaaaggcttccatgaggcattgtgcaatgctgagatcctgaggccttatcaagcaatcaaatgaaccagagaaagctggaaaaagcctcaacttaactccttggtaccatgctgtccatagctgtcgctgaaagtgtcctttgggggtatgagccagctcttccagcaacagcaggcaaaggtgggggaaaataagtagtgctggagggctcaaaatggtacgagactgggtgcttcattctcttggcagtggccagggggcaggagccacacgtgcccctgggggagcccacatggcacttagggctggcagcaccgcccctctccacgcagactccgcctcaggtgcccactatctgctgggctgcaggtactggtgtgtgaacatgttgagctcactgtccaaccaaccggctttattcctgagcagctttgctttgctctgaagtgagtcaagaacctcaattttcttgttcatggcggcaatttcctgctccaggttctcccgggtgacgtcaacttgctgacacagatgagcaaaggtcccagacagttcctgctggacttggtggctgcagttggagccagtgtagctgatgacaagctgcagcttctcgctg

SEQ ID NO: 48230 - DNA, 621 bp, Homo sapiens
tttttttttttcacagttaaataccatgtttaatcatcccacaatggacagtagtgcagtagtagaaattataagtgtctctttaaaaagtcactcccccaaagtttccattccccaatacccagataaccatggtggaacagggccagggtgagggggactcaggaagtcttggttccaaggagatgaaagtctttccaagtcaaatttgccttgtgagcagccaagagcccaatgagttgatgcatacgcgctcactctaacacgcacacatgcaagggacacagaacacatacagatggagggacagagaggggaccacagcggggccatcgcacacatgcgctctcatgccacaacattccagtccatctggggctatctcctctggggacagggagcggtggcctaagccccgaagcagcaggtgccggtcagatggagaggagggaggccgtctgtccagcctggctgctctgacaagggccctggcagcgagagaggccacccgccatccctgacacagtcaatcctccctaatctcgggccggatgggagaagggagtggggctccagtgttaagggggggccagatatcatttctttttctttttttttttc

SEQ ID NO: 48231 - DNA, 1558 bp, Homo sapiens
  misc_feature (1)...(1558): n = a,t,c or g
tagattttaaaacatttatttgccattcactactttgcaacaattctcccaatttggtttgaaaagagacaacagttgacttttgttcaaagtccaagtaaagagagaggccatgtttggagtgagaatcctttaataactatatttatttccagagaacaataaatacagaaattgcaagcagtatatgtaacagtaatattttctttaaatacagaatcacctacttttatacaacttaacaggcaaacatgttattttgttgttgttgtttggaaattagcattgggaaaagctatataacagaggaaattccaagtaaaatcaaacagtgttcactcttaactctaaacacagtgctcccactactggttctgcattgaggcggaggggaaggccagaggcaggcttagcttcgggcggcacgggtctggggctgctcggactggagctgcttgccaaggtattcccagttgtgcaccatgagcttctgcacggccagcagagcattatagcggacctgctggtcttcatgatgcatgtggttcatgaccagctgcttcccaccgagctgctcgatgacccgtttgcctcgtggataatgccgcacatattctccaacatcgtgagcagcaacagctaagacttggggatcatctgacacttccaaaagttttgtcaagattttcaagagttcataattcttctcatttaacctcacagcattctctctccaaaatttctcagatttgtgcacaggactccattccaaccttccagatttaagttctgaactgtattcatcaaatgaactaaggtcctggacactctctccaagtttttccaaaagaaatttgatatcttcgctgatatcttcatcatcgtacttctgctgttccaagttctccaactgtttcagaactttgcactgaatcatagccagggcatattcttggcgagtttctctttcagttgatttttctaaaaagttacgaaatgctgcaagaatgattcttgttactttctctttgacagactcctgaaggatatcagacagaactggaatgatattatagcgccgcagggtgttcacacatttgaggactgaatgccaggagccatattgaaaaaatcatttgatactggagctgaaagccacacttgttactcaacactcccattatgcaatttaccccatctgcttccacccaagcaaagcggtactcattgacccggagcatcagctgcaaacacccggccacgcactgcacatactgcgaactatcacttgaagagactgttcctgtttcaacagcaacaccgctaccacgcagtttctgtgaactcagctgagtttttatccaattgaaatagtaatttaagtcactgccttccatcagttcttttccccaagctgctaacttggcaataattcttgctgccatatgaacagtgaagggatcctggcgattcaacattggcagaaagtagggccacgcagtgntcttgctacatcttgcatagtcaaagaaaatgctaacacgctgatgattttcct

SEQ ID NO: 48232 - DNA, 1365 bp, Homo sapiens
ttttttttaaagcttaaaattcatttattgtagtgagcaagtttgtaatgaataccagcaggtggtgctcaagccacagttgtctaagacactgggtttcacaggaagttaatctcaatctcagtatatgcaagtaaactgactcattcctgcttccagtgggaacaatttttcagttaaatcttgcttccttgcatgtcaagaattctctactggtaaatcttacaggtgtcaactttcattatcagggcatctattggccatctattaaaggccttacctgttttttctgtcatccagcaaatcttagactatttacttgtgtaaacattagatagcaaagaaactaaggacaaaaatctctagttcaatttagacttgatacctcagagcactggctgatgggaaggcattttatctaattcagactcagatgagggaaaacgataacacttcattacagacttgtctatggccaattcaagtacctttgaatcttgagcaatacacattgccagtcactttaagaggccttatctcttgggctgctttaactcctgcttagcatgtccttaagaacacatgtcctggccaggcatggtggctcatgcctgtaattccagttctttaggaggccgaggcgatcacctaaggtcaggagtttgagaccagcctgaccaacatggaaaaacctcatctctattaaaaacaccaaattagcacatgcctgtaatcccagctacttgggaggctgaagtaggagaattgcttgaacccatgaggaggagattgcagtgagattttgccattgcattctagcctgggcaacaagaactccatcttaaaaaaaaattttaaaaaccatcacacaaacagaaagcatgtcctttaattttacctatccttcaaacttaagcaaaaattttccttttataaccaaaaaaaaacctttagacacttttacatatgggaggtcaggcacaagtgctcatgcctgtaatcccagcaggaagatcgcgaaaagcatttttcaaatgcacaaatgcttaaagattcaggagtaagtgggctattacacctgttaagcctattaccatgtagtttcattcctagtgaccaagtagacaaactgctaattatcaaagcataaaaggtattagactctgcaggagaaaagcaatgtagattagtctaattttatagctacttcaaattgccatctttttctattagaaccttgttcctattctgaatagcactcaatagaacttgtgaaaccatcaaactggcataaagcttactccactgacttcaaaatggacccttccactcatagggtggtaccctagccactacacctaattt

SEQ ID NO: 48233 - DNA, 662 bp, Homo sapiens
gcaacgccacccagagcttcacggccccacggacaaaccaggacatccctgctcctgccaacttctcccagaggggctactatctcacactgagggccaaccgggtgctgtaccagaccagaggccagctccatgtcctccgcgtcggcaatgatacccactgccaaccaacaaaaattggctgcaaccatcccctaccaggacccggcccctacagggtgaagttcctggtgatgaatgacgaaggacccgtggctgaaaccaagtggtccagcgacactcgcctgcagcaagcccagggcactttcgggctgttccccgggcccccagagcccgggcaccgtggtcatcatcgccatcctgtctatcctcctggccgtcctcctcacggtcctcctggctgtgctcatatacacctgcttcaacagctgcaggagcacttccctatcaggcccagaggaggcagggagtgtgagaagatacaccacgcacctcgcgttcagcactcctgccgagggggcttcctgaggggttccagaggggcccacgtgtccctccacctcctccctggcccaggctgcagagcctgagctgggacacgccctgaagcttctggaccctgagagagattgtttcttttctttactatttttttttttttt

SEQ ID NO: 48234 - DNA, 1593 bp, Homo sapiens
tttttttttttttttgcaagttttttgacttttattaaatctttacaaaacagaatacaaaattccggcattgacagttggtgtaaaggaaaacttctgagctccgtcagttcacctggtacattggaattaaagtgcttggatgtttttcccccactttaaaaaaacttttcgaggtttttttttttttttgtcttttaaaaacatcgtaacattaacacatggccgttcaccgtcccccagcgatgggagctggcctggggcccagggtcctccaggatcttcactcattcacagtaacggttctgaccagtcctccaggtcgcacgtggatgcgacaggggtggggagggaggaggaagtgactgtcccaccttcagaaaaaaaaaaaacaaacaaacaaacaaacgctgctagccactcagctttagagacccgatggctatgggcgcctgcagcgggcgggggtccatttgcttgttctttgatacaaaaaggcagagaatcccccgttacgaaacatggaatcactgacaggcgagaagtgatgggggaaaggggtgggcggaatgccccaccccccccaggggtctttggaaggggcagtccacagatatgggcagtggggaccagggaaggcagagcacccccacggccaccggactgtgaccatcatacgagattcaggaggggcagcagggccaggcagacggtctccgaggcccccacccccaggccccccgacattcaagtattcttcaagaacagggaagcaaagtccatcgatgtgttgtttttttttaaggaaaaactaaaaaactaaacaggaggaagaatcccgaccgcggatttagaagccagaggggctgccccagctgtggagctctggggtgcgccgggaagggcgggcggtgaccctagccgcgcgcacttctaaagtggaaccctgtattgcatagaacgtccccacccgcggggagggggcagcagcgtccgcagcccccgggggttggagcatggagggtggggggactgagcagacccccgcattcctgggtgcccgaaggaaggccgaggccgcagccgttttcctgaaggtggcagaccaaaaacactgccctgggggtgaggattcggccagaccccggggtctgggctcagctctaaggacaaggacggagctgacggagcttccaggtcaggcccgaggggcggcgcgaggcaggacgtggctacggtcagactgagccctgagaaagggcactcgggtgccccaagggggtgtcttcaggaccccccacattggctgacagtgcctgtccagcccctctgcctgctgcggtggaaacggcttcgggccaggcggggctcctgctgtctcaggccttggtgtggaggggaggggcagcggcgagcccctggggtcagctgcagtttaaggtcaaggtcggaggccgaatctggccaccaggagtcctggacagacagacgggccttgcaggaagccccgattgtcaactatcatggggacaaggcaggcgcgggtgaagggctgggggatcccatggggtgggtgggtgagctgcctgccac

SEQ ID NO: 48235 - DNA, 573 bp, Homo sapiens
cggacgcgtgggcggacgcgtgggcgggtggtcaggaagatggcggcctctggggcggagccgcaggtcctggtacaatacttggtgttacgaaaggatctatcacaagctccgttctcctggccggcgggcgcactggtagcgcaggcttgtcacgcggccaccgcggccttgcacactcaccgcgaccacccgcacacagccgcttacctccaagagctggggcgcatgcgcaaagtggtcctcgaggccccagatgagaccaccctaaaggagctggccgagaccctgcaacagaagaacattgaccacatgctgtggcttgagcaaccagagaatatcgccacttgtattgctctccggccctaccccaaggaagaagtgggccagtatttgaagaagttccgattgttcaagtaactgctgctttgatgtgtttgaatacgcaggccacccattccaaagcatcatgtgttccttgcagtgtcagcttgctcccgtctttcagttgtgacaatttcttgagggttaagcacatgttcatattaaagttgtcattaataactaaaaaaa

SEQ ID NO: 48236 - DNA, 1587 bp, Homo sapiens
ttttaaaacacattaaaaactttattgtaagtatcaacatctaaatttgcatcaatttgatacatcgttgctcattttgcagaacataacagttgcacattgcaagagtcaacttgcttcgggtcttttcatgctcatggcggtccacccctgccttccctctccctgacctgcatcctgtcctccacagtctgccctgcctcctgtcgccacaggttgaagacccaagccctgaggagaacctgctgccagggggctggctggctgcgagccaggagggccaggcagttagccctgccacagggaggggcaggcaagggatcgtttctcctcttcctgggctgagcccgtgccaggccagccacagagtgccctagtcagcccatgtggctccaggaagcctgctgttgttctactccatcccatttcacccgcagcctagtggctaactccggatactctgagcaaaattaacccaagtttcatggagaactccagaaccttgaaccagtgcatggttatcaccattctttgttactagatgtaggagaaggtactgcagagtcctctggcctggaacagcttgggggaggattcagctccctgtttctccctcactcccaggagattcgaaaacaagtttgagagaaaaaacagtaactaaaaaagtccatgaagaaggatctgacatgtcctttgtgaagtaacattaccctctccccatcacgacgcaggagatgacatgttacagtaagagggttacagcaattccccatctggagtgccattcaactgcctgcagaaatcttccattttaatgcattttaaacacattcaaaacgagtgctgactctccaacctagggaaaatgcccaataaaaaatatagatagaaaatacatgctaatgtaatggcaaacttatctccacactaaaacggcaacagtcttgcggttgagggcaggggtgcggtggaacctccctcttcccacaagaacatcagcaccagagatgctcggtccccgggctgatctgatggtggggaccacgcactgtcactcggctgccggtccggtcccagtgttggcctgggactatcagtgctgcagcagggaagttggtggcgacattgaggtcattgtttgaagctctcagggcttccaaaagcatcacctctggaaaatcccatctccatgagccggggcgacctgttcctcagaaacttctagagggggcgctgctggctcagactgccgaccgccctgatagtttacgttttgtcgctgacgtaaaggaggaaaaagacgattccaattgatcattcctccctgctgctgtctctgtcgcctcccttgtgcaaactgagagaacatcagctgccggtccagcagctccattctctgctgtctctggatgtccagcgtggctcccatcccaattctggcttcgctggtgggttctgaagaagagaagatgggttcaagtgtccaagaaaagaattttgccatccagctggggatgcagagcacctgatgcacctggaacattttgctgtcgtagcacatgaccgacataagtccacttatgg

SEQ ID NO: 48237 - DNA, 1330 bp, Homo sapiens
  misc_feature (1)...(1330): n = a,t,c or g
ttttttttttttttcagaagcaaggacatgtttattcagatccatggtcgttacaagcttcatttttggtcacaggccctaaaatgccattattctcagtttacatcaaaatacaaagcccaacatttacaatttcaaaaacattaaagcaaacccccaaaaccccacaccgaaaacaaaggcttggtttggaaatcaccactgagatgctgttctccctcgcatgtcgcctgtggggtgaatgaaggtgaagaccccgtgctggtttctgtcagagaatctgtagttgtatattttgaatacttaagtaccactgaacggttgccatgtctttgagcacttgatgttactgaagtgacaatgcttctgaccatctttggctgcagagcagaaactggcagaatccgaccccatcgacccagcagtgtccccaacgcctgaggaccagcacccatctgtgacaaggcacaggggtccgcgatgttggccactgctttgggtgatgtgctcaatggcttggggtcctgcggtgaagcccctgggctctgggagggtcttaggctcctgaaacatggaattcctacggcccagtcttggaacagctgggcagaacatgaagaacgcccctcacagtgaagaatcaggacagccactctctggttttctcacaactctagaaactttgattctttcctggagtgganacttaagccactgtcctggtcccacacagagagaggaagcgccacaacccactctgccaacctcaaggccagccagtggggaggcccaggccccaggtggctgttggcaggctggctcccaagcttggtgcagcagagtagccaaatgggcactggaaaaaaggccccgagagctggcttggccgtgagtccttggcggagggagggaaaggccgggcgctgaagctctgcgctgtcacagagcgtagctgttgaagccctggcagctactcctttgctggggcccacctgccttcctttcttggttgcgtttcctccagatgcctctgcggctgcaggaaccccactccagaagcctgaggatgaccgtgttccctcctggaggggcttcccaggtcctctcagcccaagggtggggctgtgtggcaaatccctccagcctgctctgaaggcagctgccaccttcagggctggtgcagcttcccccgctcggtcagcagtgtcatggcagaggcgtagaggacgtagcccagggtgagcagcagcatgcatgggaggggcccgacgcagaacagagaggccacgaagaaggccagcagcagcgagaccagcgtccggtaactgcc

SEQ ID NO: 48238 - DNA, 2420 bp, Homo sapiens
ttttttttcccaaatcattatattcttttatttatagactctgagagcaaggacccaagcacagcctggtgctcttggatagagaagaaagcagctattgtccacactcagaggttgctgaggtgccctcccccactgatctggaatgatctacactgctagtgaagaggagggatggcaagctgactaaataagaaggcagggaaagaaagtccgctttagttctgagggctgtgacattagatgagagtggagccctgggcatgtcagccagccttctgtgtaacgcccgcccaggtcccattgtgtctgttctcttggtcctccactgttgcccacatcttcctccaggctgcttaagtgcccctcctggagtgcatgagtaggtcgcgttgcagcccagcctccaggctggaggtcagtctggctgtgggagggtcggtcagcagagtcaatttgttgaaaacacctctgccaaagtagtcagcaatcacagaaaagctgtcattggagcacctgaagctgatgctggaattgatcatggagatctcgtttctgttccctgggcccggatcatatccatgaccttccggttttcagggaggcaggtggggcagtcagcatcactttccgagtaactctcaaagcagtgttggtggaaggagtggccacacaggaagtggactgagggcaactccaaggcactgttacagatgctgcacttggtcttttggaaaatcttaggactggccttgagctcttggatctcctggcggatacgggtggtctcctctcggtaccgccgcacccgcagctcatcctgtgcaatctgctgggctctgtttctgtagtttttggaccaggtagtccctgatgacggagagtgtggctgtggagttgtgggccagggtctgcacccactagaagaggtggcatgaggttcttgttctcgatatgcttgaggacagctgccacatactccttgcagtcctcctccttgcgagcgaagtagctgagggcctgctcccacaaggaggggtcctgctccccatggcgctcacacacgctgattgacctgccggtactgctcgtgctgcatgtggtagtgcatgatctgctggaacagcttcccctgctcataaaggtaaaggacaccatcctggaagtcgtgcatctggcacaggaccagggccttgtcaaagacgtcacagaagcgaccactcttcagcagggaaatggcctctgcgtgaagcttctctttgacctgtggatccttctcgtgggcccagttctgcagtcgcagctcaaggagtgtgtcgtagatcccctggggtgagtctggctgcacttcactcatgtgctctaggaaggtttcagtctcgcgggttattggcaaagatggggatgaactcctcagagttggccctgcaagcctggggcctccctatcgctgcggccttcgaggctgggccgataatcaagtacaaagtcccttcagcaactgagttgtctgctctggtatgtggtgcatgaggatcttgccgtagcgcttcatgttgctctctgcctgctcaaaaggcagcttgccgatgtatcgaagggcttcctgataattcttaatgtcttctagctggatcttcaggtaccactcatgatgtgcatggttctccgccagatacagggcatgggagtagtagccagctgccggaggaccttgatggctgtctccacatcaaagtggacttcactctcactctttttcttgatgaactcctccagcttcgagctgtccttgagcttggtatagcagttgaggagcagggtggtatggtcggcattggccagggattgtcggtgcagggtctgcaggtaggcagtcaggttgtgaatgcgctgggcatccagaaacttgcggatcacgtaggatggctccaactttccaatggttcggatatattgctggacagccccatcgtggttgcccttgctgtagagatggtctccatactgcatgaaaatctgggccagcccatcactgtccagatgctggctcttggcaaggttaatcgccatctcaaataggttcttcttaaacagcatctccagtttggtctgtgtgtccttctcctgcagtgcgtggacccgcccatcccgcgtcagcacgtacagggagccccactcagcaagcacatccactacatcctcaaagacggtgctataggctatgaacttgttgcacaggtcatagatgtttagaatctgcttgtcggagctctgtgaatccctgctggtaaactctgacttgggagaaaccttccggtcacgggagacaatgataaggtagcctctaaaccagtgggcaatgagcttatggccctcaaaagcgaagcagggcccacgttcatcaaggctggtacaat

SEQ ID NO: 48239 - DNA, 1759 bp, Homo sapiens
  misc_feature (1)...(1759): n = a,t,c or g
ttttttttttttttttcattccaattcatattcagccagtgtttattaagagcctactacacgccagacactttacatgctgatcacatttactcctcacaaccatcttgtaagggagacatcatcagtgccatttgaacaaatgaaaaactgaggctcagagagattcaataccttatccaaagctctccagacaataagtgcaaaaacaaggatttgaattcagggactgtttgattccaaatctggaactttctgggaacctctggnnnnnnnnnnnnnnnnnnnnnnnnnnnnnnnnnnnnnnnngcaccatgtcctgagctgctgcctcctggactcccgccagactgcacctgacagacaaagccaactaggagggaggggagtgagggagaaggtcccacaggtgaccaatgcctggccccttcatgacagcaggggctagggctgtcccacagggactagagagaggtgtggaaggcagggactttcccataatgctccctcctctcagtgcacaagtgtgctatgttgagaaatggggcaaaagaacaaacagtccttgccacagagggagacaggcagcagccttatcaaacaagataaggagacccggatgatgtgccttttgaggccccctggtggtggaggaggattgagccaggtgaatgggaaaggaagaaaagatgaacccatcttggagtgttgtactttggttgctggagagccaacagtggagactggagacaaatatttaagtcattccggcaggccccatgtacgtgcctcacaatctaacaccgcccaccttggccagaaaggaaggcttcctatggaggtgctgccctgctcagtctgtcttctcaggctttctccaggacttgcgggtctccaggaagatcttgaccagggacaggaggatgggcacagccataggcaggaagagtgggatgtagatggcaaacttctggtcatcagggaaataaaggaggtggaggagtgacgggtcaaagaaggcaagctcagaggatgtcacagcttcctggctggcgacaaaggcagatgcccaggtgcccagacgccaactcttctgccgacttctggacggcagctacagccttgtacacctcagatgccacgtcgtccttaatgacaatgttgctgatcttgcccagaagctgcgcccagggaggtaagggtggtggtggctgtggcccaggttctccactgaccgagcccagagcagccggtctagctcccaggtcattagcccttcactcgtaggccctgaaagcaggcattttggaggcagctggggctgagcaatcccaaagagcaaccgcaactgtgccaggaacacctccatcactcgcaccatgtccacctcgactctcactggcagcactgaggcattataggttttggagtcaacattatataccataatgccaccccagcggggactatggaaggcattggtggccactggagcgccatccttgtcctgaatgtacagcggtgagtgtgcaagctcaggcacgtagagtagaaagttgagcacagggtacaaggaggcagcactggatcccagccgggactccactgggttgatgacatgggggaggctgtgcatgtccaaatagtagctggaggaagctgagtcaaacgcggggattcacccccaacattgcatagtaaagaatctgagagtccacagagaagttncagcggcaccgagggcattcaggaaaggttg

SEQ ID NO: 48240 - DNA, 1125 bp, Homo sapiens
tttttttttttttttttgcctttgccaaaataaggttttattttgaaagtcatttgatgaaagtcatttgaaagacactgaggagggaaggaggcctaagacccaacagatgtaggatccagatctggattcgtgccagccccaccaatggtctgtcaggccaagaaggtgctttctttggtaattcatgttttttaacttcctggagaagagatcttttcccacaagccatcttcattttttttgtagagtagggctttatttccaggaaacagtgtgttagctggagatgggtgtttttttaaaaacatcaaggtagatctaatatgttcaacaaagtggggtggctcagccagaggcgaagtggaaagattctctagtatttgcttgtcatcttggtgcaaccagaaatccacatgtggaaatggtgtccaggagtacgggtcctatacgaagttgttctgtctctgcatcataaatgctaatcattggtcctcctgctaaagttcgcgcagcacgaagctgctcctccggaccccgatcttgaaaggatgctctgtaaatctctgcagtcttaatgttgacagcaatgccatatattactggaaagtggttttcgttttcttcccggtcatttaattctgtcacacataatgtcactaagtgaatgtcatcttcttgcctgtcaaattcactaagaagttgatgagtgagtttttgtgacaactgcctgtcgtcactgaagcctccaacaaggtgtacttccagcctatgagagcagcgtagatctcaccttccacattgagcgtggtcagaaaaggattttatggagttcatgatcaaggggacctcagctttggtgtcggttccgtcacaatgtgtcaagcaggtggccccattacctgtgtgcctcaggaccacaatgtgacaagtagtggcatcatcagaacccagaatggagatggagccatcctttggggaggtcactgcaagctctctttgctgaacatacagaaggccctggggtcccacttgttgaacagactgacctctgagaagtctggctctttcctccaaaggcgggtgggctcggacgaggtccccggctgactgcggcagccgcac

SEQ ID NO: 48241 - DNA, 423 bp, Homo sapiens; identical to SEQ ID NO: 5786
  misc_feature (1)...(423): n = a,t,c or g

SEQ ID NO: 48242 - DNA, 743 bp, Homo sapiens
atttttttttttctggttttgctagtttatttcaaaaattacaattgtttgagtcaaatctatacttgatattcattgttgggtttctttaggtcattctgctgttctctcagtttcccaggtgttttgtgtgtcttccttgtgctattaattttcctgtggccttgttggtcagatccacagaggtaaatgcaagtgtttttccttgcttcagaacatgtgctgtaatcactatatcttctcctaattttgcaggtgacatgtacgttatgttcatatcgacactgactccggggtgctcccctttccgtgcatagcagagccattgttgatatgttatctactaacgtggctgtcaaaccgccgtggagagtgcctattgcattggtatgctcttcttctactttcatttcacaaatcactttcccaggagcagcagagacaagagtaatctttcccaaaactctctcaaaattgcgagccttggtcatggcctttatcacctcccgcagagactgagtcatgctggtcatcgtggacggttttcccagcctttgggctttgcgcaagaacgaacttcggaagagctggaaagtccagaagttagtgaaagaaggaggacacaaagggcgaagagcccgcacccttctccgcccctaggagcgcaagaggccgggagtcaggcgagctggcagccccggtggtccgccgaacgcgtgggcggacgcgtggcggacgcgggg

SEQ ID NO: 48243 - DNA, 1097 bp, Homo sapiens
taaagatcaacaaacattttattaattctgattccttttatcatgtgcttttttatacaaagcactttcaaatacattacattatcttaaatttataataggagtttctttcggattcagtttaaaaatgacaaatagcattcgttgtgcccaagttagaattacaccaaaattaccatgtgctggcacataccatcatcccactggtggctggaaaactgggttgcaggagtgtctgtcactgagatgggccaccaccccagtggccatatggtagagatgagggaaggatggactagaagcaagctgggtctttctgggtcgtctctactcctttttcacttcatcaccgttttccccactgagcttgaacacaggaatctgctgaccatccttgagctctaaaaagacctcgtcaaggtgccacctctgaaaggggccacctctggatgagtggacgtagagaaggccctctgatttggatccagagacaggaatcttcaacttggcatcaacaatgtccacgaagttttccctgtcgatgagcttgagataatggatgttgagaggagggcccagagcttcctgtgcctcgggatggctctgcagctgctccactgccaacttgtaatataaagccctggaatgaaacttttgaatgaggtaataccacaaatggcaaaccccccggcatagaacacaccgtggaaaaggatccttgctcccagaggcattgaccgcctgcttcctgcatacttttgccacatcatagcacaactctcttgaaaatcatcaaaggcaagttgtcctgtgagcaacagaagcaccacgctacaaagagcatgacgagttcttccaggcttgggaaagcacgggtaaatgcccgcggtcctgcgcgccagcggggagcagtagagacttccggcgtcggctgctcgcagggctagagcgtcgaaccgggacaaccggaggcttcagctcacctcggattgtaaatgctaacacgggtcctccggccggctgatccagaacttaggtcgccgggacgtgtggcttctgcttctcagacgctcggactcgcgccgggaagggtttcg

SEQ ID NO: 48244 - DNA, 2017 bp, Homo sapiens
ttttttttacaaagtgaactttttaattaaatccaagtacatcttcagaatgtttctggagttgaaaggcacagtgcaaatagaaattactacaatcaacaaaattgattttaaaaagtatttttagcacaaaaaagttttctttatatcatactaaattcagagcattacatcattcccagaatacctagtttgaagcttatttttttttccattcacttgcaagctggattaagacattaactataataatatggaatgttcagcatttatgtttggtaaccagatgtatatggtttgtataaccatactttagaatttagttcagataaattggttttggtatactttgactacagaaagtgatttcaacataagatgtgatgaaggaagtctcccatgaaaaacttagtaaggatcaactgatgctatggacaaaacctaaaaaaagagatttgtagatgctttcaaggctttgactatgaaatatagaaaactggatgggcattcttactgaccggatgcttacaatttcaaatgaagaaactactagccaactctaaaaattggattagggaaaaaagtgattttagaacagtcttccatttaaaaaatttttcactgaaaagaaaatatggaataatttaatatattcaatgtctgtgaaacacaaagtagaaagtaatcttttaaaaacatggaatacatatttatttctactttaaaatctccatttatatcttataagctttgaaatgcaagtacagctttaaagcatcataatgactaattataggtgaataataatacagacagtctatattctaggaggcagctgtaggcgttttaattggaaataagcattctgagataatgataatagcagtgtagaaaaatgaagttaaaaaaattcaaagtgttgagaatcctcctgtccttctgggatttttattttaatcatctcctccacagagaacaagcagtactttcctgtagtctccagatgtgtcacccttgatgaacgagtacagagactttccatagagtctcttgaagtgtgcccggatatccaacatgtcaatttctgctcgagaaaccatcactctgatgagggtgttatcatcgggtgcccaagcccttcatcgatttatagagcttttcagcaaaatatgcagatttgttcctcatgcactttactatagccagcagagcatcttcaaagctaccagatgtttcagatttaatactctgttcaatatccttctgtgatatccttttgtattcatcaaacacatgcaacaggtgatttcggttccgggaacagagaacagttagaaatttcacctcatctgtcccccatttcttctctccagcctcatacaggtcctgggcatcctgtctcacgagagcatcgtccagataatttccttcatccctcccaccagctgacagagacaccagcactcgctggaacatgaacgatgtgtcagagcgaatgtcatcttcaaggctccgtccatattgctgctggtaggtttggcttatgcgccggatctcctcaggggtccgggaggccaggatctcaattaggcagccctcatcagtgccggctcccttcatggcccttcgcagctcttgcacgtcatacagcaccgtgggcgtcatcatccccacaatcacctgctcgaagttgccactcagttctgacttcaggtcgtctatcaagtccctgccgatggtgctcttgtaggctgtcctgatctcctggcgctgggcggtgttgcggtaggcaaggacgctaataatggcgtcttcatcggtgccgagccctttcatggccttcctcagggtctgggcatcttccatggcattgaatcctgaagcagctttgacagtacctcctttggttgccatggccatgactctaggtcaagatcagagttcagccacccaagcagaagttcttcgaggccggcgtgcgctcctcctctgcggctgcggaggtcacaccctactc

SEQ ID NO: 48245 - DNA, 1807 bp, Homo sapiens
tttttttttttttagtaaatatatgttttatttgtcaagagtaaatgtcagttttatttagaatattcaagtacaaaaaatgaaaatgtatatatctatgactgttaagaaatgttagaaatcattaaaatgttctgagaataccagtaaggcactgaatgcaaataccacctgaaatatgaattatgtgcatttttatatctttaatattcagatgttcatagttattttcttaaaaagtatttttaataaaatgattcaaccttattatttttaccctggaagacagagtttaaacaagtatgtaatgaaaagttttcctaatgaaagctgtgatacactcatgctcaaaggtactttatccttaggaaaaaatagcttatatatctggatgttttaacttttaaagatattttgtttcaccacagtaatacgtcagccataataaggcataataaagcatgaagtcatcatattaaataatctgacacaaaagcttaagatcatatcaccaattgggtaattgtataaaaaatttttaagttctataaaactattaagaggttagagttttagctccataatacatcccaaaacatattccccaaaatttttagcatatataaaaaaaggttcatcttggaatataaatgtaatcagatagccacgatattaatgggttctgtattttcagtggcactgacttcgctctttggtataatgcactgcagtgacaatagcttggtagcaagagaaaagatttagattcatcacagaacagcaacttaaaccatttctaacaacagtgaatatatatgaatatataggtacaagctgagtatcccttatccaaaatgctaggggacccagaagtgttttggatttcaggtttggaatatctgcatatacacaacgggacccgactctaattacataattcatgtttcacatccaccttatacatatagcctgaaagtaatttatacaaaaattttgtgcaagaaacaaaatctgtttaaactgaaccatcagaaagcaaaggtgtcgggtggggaattttccacttgtggggtcaagtcagtgctcaaaaagattcagattttgaagcttctggatttcagatttttgaattagagatgctcaacttgtagtatcattcactctggcttatgtattgaccttgtacttgaaagtacttttccataaatatcagtaactgtggctgttcaccaaatatagaagtgataaaacaaataacagcaaaatcaaagcacacttctagtttttttttaataaagtttgcttgtgatgatgaccttctgtgctctggaacttctgttttacaaaaaattggagttcttacggtccttgtccttcctcaggttgctgcctgttgccagaaaggactggctgtgaaatatctcggaggtagctttctttttagagaaagcaattatttcttcttccaaaagtcttctcttttcttcaagcttcattctctcttcttggtgaagtctcttaaggtgctcaaatttggcctgtagctctctctcagcttctttcaatatggcttctttctcctttactcgctgcacaaacatctgtttcatttcttcttccttcctctgacgttcaccatggaactcatgtcttttggcttcataggtctcttgaacactgactggcttgttttctgggcccacatctgtaaagcccatttcctccagtttgcagcgcctgtaaagctcatagtgcctggtatgggtctgctatcgcaggtcctccatatttgtacaaatgagcattc

SEQ ID NO: 48246 - DNA, 625 bp, Homo sapiens; identical to SEQ ID NO: 5812

SEQ ID NO: 48247 - DNA, 873 bp, Homo sapiens
gacgggagtgagctggggagctgttgatctttcactatacaggctgggaagtgtgttgatgaccactgagccaggcttttctcaggagcttcaatgagtatggccgacagacatggacaaggagctgtgttcaccatcggactcatgtgcagtcagcttttttcctgttggtttcatttgaataatcagatgctggtgttgagaccaagtatgattgacataatcattcatttcgacccctcctgcccctctctctctctctcctctcccctttgtggattctttttggaaactgagcgaaatccaagatgctggcaccaagcgtattccgtgtggccctttggatggacatgctacctgaaacccagtgcccagaatatactagaatcaccgcatttcagtggactcctgaagttgtacttgtgtataattgcccgcgtcgtgcataggcaaagaaggattaggctgttttctttttaaagtactgtagcctcagtactggtgtagtgtgtcagctctgtttacgaagcaatactgtccagttttcttgctgtttttccggtgttgtactaaacctcgtgcttgtgaactccatacagaaaacggtgccatccctgaacacggctggccactgggtatactgctgacaaccgcaacaacaaaaacacaaatccttggcactggctagtctatgtcctctcaagtgcctttttgtttgtactggttcattgtgttacattaacgacccactctgcttcttgctggtgaaagccctgctctttaatcaaactctggtggcccactgactaagaagaaagtttattttcgtgtgagatgccagcccctccgggcaggcaagggctctgaagattt

SEQ ID NO: 48248 - DNA, 2019 bp, Homo sapiens
ttttttttttttttttttctcttaccagctcaattttaattttaaagtgacaaatgtacaggtggaataaaattttaagcgacaccctccaaattccttttatatgacaagaaggagctgaatgtaattttacaccattaccaactaaacagtagttctttagcaataattaggaagtcacagcacaaaaacgacaccccagagttgtggtccatttataaatagattttcacctagggcttcgttggaagaagtgattttatatctatcctcaccaatggtcaaagtgggcacaggtgggctgtttctatactttgagcaaattatgcctcactagctggcaatgttttgcgggaacctggtccgtgcaagctggttcaccttacctgcatggtctgatctgcacttttgaccctcctaaggaagatccctggtctgagtgaaactctcaggtgccatgtaaccaaataagggtagggtagatctgacaggtggcctctgctttaacccagcagcttacaagttttttgtgacttggggaaaagaaataagcagtaatggctaaagactgaggtaacccctaaagttcgaattgtagtctacctgtcatgaataaaataatgactaatatccctccaaacaagctataatttacagtagtagtccattacaaactgtaatccacagtggaactcagcgaagttcttaccaaaacatcacttgagcaggaaaccctttgtaatatggcctgtgcaatgagaggaacgatcctttggaagggagctcaatctgggagaatgaggtggaaaacactggggagttctatgcctttgcaaacccctcaagtcaccccggattactggtcagagaagctggctgtgccatgggccaaaccagcagcattctcccttggcttctgttgctgcactgaggctgccggggacacagaaggatttagttttctttacaagtaagccactttggtgggaaagcattgcaaaagttgtcaacagaaaatcattaaaaccctgaagaacaaggtgtgagggtcacaggcaaacagttatcagcatatgattcaaacactggtttgtcctcaccacagagcttggaaggttcagaaaacttccaagagagatgatcagacactcacgttccatccactgaagggcacagaacagtaggaactaagttggccctgttaagcaggcacatgcagccatgtccgatccacggatgtgcttttattctttaagaggatcatctagaatcctcagaaatgttatcttagcagccctgagatcatgccctcaataactctgccaagggaagaggggagaaaccacagacctagagatgagtcaggatgcccactttgtgccttggggtttgctaggggggctaagctgctaactgggctgtgccttattggtgacactgaattatggcaaagccactagaagcacaaagtgttggtgcaatcactgacatctcaaaagtatatcctgaaaatagaaatgaacagattccatatgcagactagaggtgatttatacttaaaacatttaaatataaattaagctataacttaagttacaaccaaaagaaaagccaaaaagacactcagcaattaagaatgctgaacacatacacaggacatcccaaacacaaggccattaaagcgatgtcattttcattgtgccaactttacattcatcatgtgctagtccggtggggccacgctgccccgcaccacgtcatgccgtctggcactgcactccagcctggggcccgtcttcgtcctcctcgtaggcctccctgtgctgacgccagttctgctcattgggacaaaactccttcagctccacctgatccatgtcatctgtaatcctcactttctgtcgaggagggagtaaagcttccagctgaggaagcttttccagagaaagccagtgtttttcaggaaagattactaaaaactgtatgatcagaatccctttttccaggggtgctttgtac

SEQ ID NO: 48249 - DNA, 592 bp, Homo sapiens
  misc_feature (1)...(592): n = a,t,c or g
tnnnnnnnnnnnntttgganaacngctttncatgactacgaatttaatacgactcactatagggaatttggccctcgaggccaagaattcggcacgagtcgaacagcagctggcacaaactgacgggacattatccaccctggagtttcagcgtgaggccattgagaatgccactaccaatgcagaagtccttcgtaccatggagcttgctgcccaaagcatgaagaaggcctaccaggacatggacattgacaaggtagatgaactgatgactgacatcacggaacaacaggaggtggcccagcagatctcagatgccatttctcggcctatgggctttggagatgatgtggatgaggatgaactgctggaggagctagaggagctggagcaggaggaattggcccaggagttgttaaatgtgggcgacaaggaagaagaaccctcagtcaaattgcctagtgtaccttctactcatctgccgcagggccagctcccaaagtggatgaagatgaagaagcactaagcagttgctgatgggtatcctgataaatctggcttgcttctaagctcctttgtgggcctttttcct

SEQ ID NO: 48250 - DNA, 1245 bp, Homo sapiens
tttttaggggtatcagatatttattatatacagtatatgtacacatataaacatacacacattatatagccaaaagattacacttcaaaattaactggaaatggtatttcgagtatttttagcacaaactaactagaggatgtgctctagctgtccaagcagcaataatcataaactctgaacttggcttttttttttttttgagattctattcatagaatcattcttcgaatgccacattcacagcaaaatttggcccattctacagggtatttagtcccacactcatggcagaattttggtaagtttccaggtgaatgtccttcaatgcctttaatatttccaccattaagggaagatgcacagtccccatctggcctggctatgtagctctcagtatatgtttttcttttgtttgtaagcacacctggggcaggatttcttgccaaactaggtggtgtggaatttcggggtttgacattagctcctgcatgaggggctgctatccctttatgagagggagacaaggtctgaagtttgtttcccaaagagctgctacttgaagacactttacctgaaggaacacctacaacagttttgccagcgccacttggctgcggtaatcgtgaagatcctgatgatgcagttccaggagaatttgactttttaagtgcgggtggcttatacacctgtgtccgagaagttggttttcctttggtatctgtagaaaatttccctttattactaatacgtgctgcctgttctttacagaaatttatatgtctatcagctgcattttcattgaatctcctctgacaatatggacaattgaatataatcaggatcataagaaggtggaggaggaggaggaagtttgccaccctctttgagggcctgatcaaggcctttagctgctcttatggtagcaatgaattcttcatgtttccttctccaattagatggtttctttggtggttctggcctcggtttgagaggttttactgttggaatatcagttccttcagctctctgtctgcttgaatcaaaagtcttccgttttttagttgcagtcttctggcaaatgggtccatgtttttttaatgctactggaaagaatgttcttccacaaatcttgcaaggtaacaattctccaacttggacaacacctccattctcttccagtccctccatcgcgccacctcctcgagctcagcgagactccttcaccagcgcccgccaccgccc

SEQ ID NO: 48251 - DNA, 1886 bp, Homo sapiens
tttttttttttttagtatttgacattgagatatttattttgtgaaacaatgcaagcgattttaaatccccacatactatttgattaagtgcaacatggtacagtcatgtgtaatctctttacacgatagtgcatctagtccttagcctttagttattgcacaacaattataaagaccagtgaccaggacacgtggactctgacaggcagatcggcctacacaacgaaaaatcagaacagtacaccaactggaatggtcaaacaatttaagtcaaatgttttaatggtgcaattaaaataagggttcaaacatgttttcaatatattaatttctttaaagtcatgttcaggcaaggtgctgtttaaaaaaccactattagctttgtccacacatgtaagttatcaaaagttacccaaggtaattttgacgttgaatgcagctttaaacaataaaaaaatggtattaggtttacttctcgaagcaaagagagcccccaaccttgtaaactaaacattctgacacaaatgcacaaaattaagttggcaacattaattttgagatgtagtgtgatgctgagcaaacttttggtcttgactcttgaaataattaaagagagcagttctccgttttggccttcaggaagggaaatctgcccatggaactctcccaatcagattaacaaactgtttcgattcccatataaacctggaggacacaggaaacgccagatggaaaaactggctctggctttctaaccccatcccatctgtatgagaggacccatcctgtcatgtgcagtgtttgatgttttcacatacgctcctgtctcaggaaaacattcaagattagctaggcccccaggtggttgtacctcattggtgaaaggcttgggatggtttgatctcatggctttgcctgatgttcacataaatcccactgtccttacccaagctgatagcgtgttgtgtgtgtactatggctacttgcttcccaaatgcacaatttaatgtggaaaataagttgctctgcccatctcttctgtcaccgaaatgaaaaggctcacagaattcctctccccaccctccagacacattgcacactgacattctctggaagtgtggaaggccgcatacaaagtatagaagtgaaaaagtccactgtgcaccggctgcctgaagaaaagctttggaggagtagaggaggcaagttgttcagctttgctcttactgtgctcatttgctgccacaaacatgggtagacttttaaaagccatggtgtgggtcacgtataacttctggatccaccatgattcttccatggtctcctttgccaaatcaaagctttgcagcaggcaatccagacagttgtcactagatgcagggaatgacacctcacagtggaatgggcactggcaggcagagggcagaagcagtcctttaagaaacagtagctgtggcacagaggccagtgcctacagtacagatggcggccaagaaccccacacatccagctcgatgtcacaatatggggaacatctgacatcacccatcatggctgatcagcagcctcccacaggtgggtctttcaggaggcaggaagtagagcgagggtccatggctgagtgcattatagtgatataaacatcatccatgtttggcatgacaaaaactttctgaaactcttgctccagtttcttctctatccagtctgtcacatgaactaaagtcacttctctctctccaagttttggccgagctttcagctccacatgtggtggctttcggaaaccataccatactcggtcagtcgggggtggtggaatgttgaccgccaaggttcctctacattcttgtacttcaacagtgagcagcaggggtgtgttggag

SEQ ID NO: 48252 - DNA, 1210 bp, Homo sapiens
aaaactgtatgttctttattgtcctaaaattgcatagtacttttgattgtgcacgcttttaaatagagagcagagttgcccacttgaaactactctcttgcatgggatatttcaagctgttttactatgggcaaggagcagggaccaaaatgctgccagggcttaaaaagagccgtgatcagattaaacagaagttggagaagtggagggatgtgggccacacacgagaagaaaatgttgaaggaggctgagatttcaattggacttataggaggcataggtggatgcaggaggggctccacggatgtcagagaacaggattcaggagcagcctagagaggaaagaaaaggagaaaggagtccagagggccaatgccttgtgctcacatctgagatgaatgccacctgccaggagcaagcctggacacagagcatgggtagctaggatgaacagtttggccgttatcacggctacagaaagccacatactagaaaaataacttaaaagctataccagtcgtcattataaatatcttgtctttttaaaactaactctagtgttggttataaaaggttcacagttactctgaagagagctgtatctctattgcacagtagtggagaagtctgctctgatccccatgtgtaaacaatgattcccttctcctctggcgacttcaggacacagagaaacagtatctgctgtaagcaaaagcacttgggtagaaggcacgtggaagctgtcaagctctacaggagcacgcagaacatgtgggatgtccacttctcttcccatgtagcatccctgctgttgggacaggtctggaatcagatgaaaggtggtgatggtcttgtcacggtctcagcctcattccacagttacagacttggccagatttctggggaagtcaacctaaaatgaaagaaagtgactgttcaggaccccaaagatctcagcaacatgctacctctcacagacaattttcagagtacttaaaaacaagagacagatgttcaccatggtcaccaacctagagacctgcgtcttggaggcagattccttagtccagaagcctcatttaaccgtataaggtttagtccctcaataaacatttactgtgcacctgatgtgtgtcatgatctgttaacatgatttaaagaataaggttcatgcttttaaacacaggtaacttggtgtgtactgttaaaa

SEQ ID NO: 48253 - DNA, 1308 bp, Homo sapiens
gactagttctagatcccacaatgcaagcctccaccccacgccagagcaatgtgaagctgtgagcaaattcattggcgaatgcaagatcctttcacctgctgatatcagccgttttgcaacatcgctcgtggacaattctgtgccattgttgagggcggggcctagtgacagcaaccttgatggaacggtgacagaaatggccattcatgctgcagccgtccttctgtgtggacagaatgaactcttggagcccctaaagaatctggccttctccccagccaccatggcgcatgcttttcttccaaccatgcctgaagacttgctggctcaagctcggaggtggaagggtctggagcgagtccactggtacacttgtcccaacggccatccttgctccgtgggagagtgtggcaggccgatggaacagagcatctgcattgactgccatgcgccgattggaggcattgaccacaaacctcgggacggctttcatctggtcaaagacaaggcagacagaacgcagaccggccatgtgctgggcaacccgcagcggagagacgtggtgacatgtgaccgagggctgcccccagtggtcttcctccttatccggctactcactcacttggctctgcttctgggagcgtcccagagttcccaggctctgataaacatcattaagcctccagtgagggatccaaaaggctttctgcagcagcacatcctgaaggacctggagcagttggccaagatgctgggacacagtgccgacgagaccatcggcgtggtccacctcgtcctgcgcagggttctccaagagcagcaccagctctctagcagaagtgaggaaagggccaagggctggccggggatcacacagcacaacggcagcgcaagcaggctcgctgtcttgtggccaccccacacacagccagtctgagctctgtctgtgctgttgctggaaagaatgagagaacacacagagagaaaaccgtgtctagggaaggcgatgcctggggctggaaaaaggaagcactctgcttgcccagaggctggaaggagctgctctgttccctccattcacccctgcctggctaagcactgcggtattcgggagcgtctgcacgcaagtgttcagtgtgcatatatggggagtcttcagttccgaagtcagccacgtaggtcattcccctaccatgctgggagcacgtgtcgtccacacagagcgtgcgtgtcaaaggatcaatcaccatcacagttgtgtgctgatttattaaatgtttatatgtccacagttatgttaaaaaaaaa

SEQ ID NO: 48254 - DNA, 431 bp, Homo sapiens
tttgcgagtaacagtgagctttattttcatgtcaccgctctaggttcattcacctgttgccaacaacatgagggagtttctccacagcccttgattcctgaattgttcaacaaatcaacagtcaccaatacattgacttaaggagtaaacaagcagcttttctctacacaccaccgggcaccccaggaaggcgcagctccctgctccacccccgcctcttggtgcctgtatccagcagaaggacccagcaggaggctgaatccaagcactgctctcaggccactctatcctcatccctggatcctccagggaacaagataaaaaaaaaaaaatcctgttttcctgctttccaaaatggagggccttaacatcaaccaaagttacaaaacaaaaacaaaacacaggagctagctgggcgcggtggctcacac

SEQ ID NO: 48255 - DNA, 1473 bp, Homo sapiens
ttttttttttttttgtttgtaagtaaaattacttttattttcataaataaaaagacaacccattatacacttttagttgaagtaacatgttagttgtcactgcctagtatgaaatccatgtaatagttaacaaacagttacacctctctataaccttcatgcaacttctatacatttgataattccccaaaatttcccaacatttccaaaaaaccattatatataatggggataccttaggtccacaaagtggtcaacctttgctgaggtcaacaaaaattatttaatatggctcatggtcaaagatgcctacctgatgtaaaggtaataccaggtattgctgcattttacagaagcactgaggcatattacattttccctttcggttttggggtgggtttcatccccaaaaatgtcaatgtgaaaatttagtaagtagattaataagcacaagtacctaaaagaaacaggtcccacagccacgagtagagagctggcatccagtaccgtttaaagttttgtcagtaagtggcacacaacaaacagaccagtgattcggtaataaggccacctaaaatacagggagatttaataagtgttttttccatagatattgaaataaaattaaatgtctgtttagttattactccacttattctggaaactgcagcttccaatatcaatattatactgcaagcagtatttagtacttctgtatgttaagaaaaaaacctcactgaatttatgtacctttttttaaggagtgtaaactatgatatatgatttaagtaatcacttatttgaatgcaatattgattcagataggcataatctattcatttttcataatgaaatgtatattcctatttcaacactttatgcagattttacttatttcttacagggactgctgtgtggattcaatggcttatctatgtaagtgtccagcacagtatctggcacatagtaagcttttagtgtatgctacttatttatattaagtgagtcaatctgtcacttataatagaaaaactatctaatgcctcaggagaataatcaaaagataaacctacagatgtgtgacttctgttaaagtattatgcatccactatttcccaaattactaaactaattgtttaaaatgttacaatctatttttaagatcatatttgttctctatgtttttgctatggcctttggcctaaaccaatacaattctgacaggacattatcagaaaaccacataaaaacaatgtacactgaaatcaggtaacaaaggcatcttactataacttctttaataaagaagtagagagttaccagtgtaattcaggacaacctactcatttaagtttaaagttttttctttacatcatgcaatatttgacttcaaaaaacattttccattctgtcttctcttatatataaacattaagagctattacaaagttctttcctctaagtaaaaaaccc

SEQ ID NO: 48256 - DNA, 1373 bp, Homo sapiens
gcataaatagctgttaaatatgtgactttacagattttgatatgttcagattgtaaaaaatgaatagtttatttcattaattgatgggcagtcaagaatctccctcccttcagtagggctgacacttaggagttaggtcatggttgtggttacttggcatggctaatcagattttgttctggtcagaatttgcccaagatcaatacccagcagaaactggagttaggctataaaaaaccattcatgtttccgagtgatcatttcagtcagcgattcatgttttacagtgtttagttgttgattattagaaaaagtaatattttcttccctttatgattacatcattataaatcaagtccttccatgaacacatttaaggtgtgtggagatgagatgtctgaatccatttggggatgggctgcatttttggggaactctatgcctgtccagtgaagagtgcctaaaacattaattatagatcaaagatgttctgttgagggacaaagcttgatggtcatcaaacacaaggctttgtaaaaatacgaccacctattccacttactggatctgtcaggtgtgtaaaacttctctcgccagttcatcatgcttccatgagccctcaggactgggatttgagccttcctggctctttatcccttgggggcagacatggaaccatctctgagggaccaggtggatgctgaagctcacccagtcagggcccctctcctagctccttttacactgaaattaatctgaaagctttcatagccaaggctttgcctaggtgctattattccagctgggcccaaagagaagtcttgggccagattgggattctcaatggattttatagacataattcccctgcaaacttaaaaaaataaataacccctactttataggactaattgtttgaattgtatctttctctgtatgttaaaccagatttaaaactattttataaccacaatatgtaatcagagcaatatagtgttttcagatatataccttgttttataccttatgtaggtgcccctacataaagggtggcatgcccactggctggggtaaaaatttaaaccccctcattgcctttggggagtgaccttaaggcccttttgaagtggagcttttgcactttatactttttctgtgaactatgataactatatttgatattaaagctgtaagtggcattttcagcgaaatgaatatgtacatgtttgtgtctatttccaaaatgatttctgaactatctgcagtgaaaatgtatctgatggattgtagagcaaagcacattgcctaaattcatttgttaatgaattgggtaccattgttattaaaaatgcgtaaagtaaaaaaaaaaaaaa

SEQ ID NO: 48257 - DNA, 1108 bp, Homo sapiens
ttccacaactaacagacttaaaataacagtgtccttcgtattaatatctgtgccattcatttagaattagcagagctaatatggaggggctgaactagtagccacatcttgttcatcacatagactaatagaaaggaggctgtgggctaaagcagaaatggaacttccggatctgaaattagccaatataatgttcttttgtatttgggtatttttcatcttaatttttacagcatatactcttcttaccagtatccttagaatccaaatgtctagataagttgaggacacatacctgcattgttgagcttctctactgggggacgccccggcattattttattcccaagccaggcagaccggcccagacaggccaggctgtgggctggttccagaccaactgctatggtggaaaatgcagcttccaggtcccactaccctgacatttccgtggaaggaagaacctggtggctcgtggaggaaaccagctttctatgagaaaggactgaaggattgcgcaccctgcacaagtacagattgaccaggaaaagacaagtgtcttctgtgtgtcacagggaaagccaggagtggccttctctgcaggccagcaagcctgcagcagcaggtgcccccacgtcaggtgctgactgtccgctgtccgctcctgtagaaggtagggagcacaatacctagggactaagggatgttcgccggttgtggtttgtttttttttttttttccttgggttaagaaatcaaatttggcaagaatttaatcctacaagttgtattatgctttgaaaactcccatcccctccctaagaatccttaaaaaacttgaaatgctcgcccaaatgtccccatgggatttttgacccaaaagtaaggtgataactgaagaaatttttagttctttgatcacttcagtgacaatacccattaatgaatcttctccatccaggatatggaatccagcaccacagtgcacaggtcagggctcggagggagcctctgtgcagatgtgctttctttacagtggctgtaaaaagtttgtatttattatgtataaaatgttgaataataaaaaaaatggaattatgaaaaaaaaa

SEQ ID NO: 48258 - DNA, 902 bp, Homo sapiens
  misc_feature (1)...(902): n = a,t,c or g
gcaggacactctgcttcccctcttgtagctgaacttaactccactgaggttttctggggcccgagatctcggttcaggggagtccagcaacaaacattagaccagggttggaacggctggcacagtaacatcaatggaaagggacagagtttgagagttcaaacgtgatgcactcagcagccaccgccagcacatcctccacaccgtctcgtgcaggggcccacccatctctgtgtctttccagcacacaacagtcacccacactgggcattccattcagaggtgggagagaggaggacacccctcctggcccaggagcagaggccatcaaggtgtccccggaacttagagtagatacattgccaaaagtgatacctcaatctcagggattctggccttggaacaacccactcccaaatgagggccgtacaagnccaaagtcacccctctgaggcaccgtgtggtgatgctgatgccagcccagagttccttagcaaaagttgatggatgggggacaagcagctgcctagattaagtaattcctcaaatttgtaaatgtcagcagtggaagaggagcagtctcttacccatctcttgctcaactttctacccccacgcttctcagcacaatgtccttaagcgttattggcgctcccaaaatagttgccaaatgaataagtgacctggggaaggaaaggaaggagggagggaacagaagattgcctgaaaaaggaggagagagttgggtggaaagaatgcattgagctgtgtgccttggttgcaatgcctgtcctgtgaccagaaaatgcatcccaacacatgtcaggctgtgtctagcaggtgggagggagtctggtggagaaatggcattggaccacatactctctnnnntggtctgttcg

SEQ ID NO: 48259 - DNA, 355 bp, Homo sapiens
gtaactattggaattctactgcgagatctagggctccttacccaagtacatatcctgtaagaccagaattgcaaggccagagtttgaattcttatacaaatggagcgtatggtccaacataccccccaggccctggggcaaatactgcctcatactcaggggcttattatgcacctggttatactcagaccagttactccacagaagttccaagtacttaccgttcatctggcaacagcccaactccagtctctcgttggatctatccccagcaggactgtcagactgaagcaccccctcttagggggcaggttccaggatatccgccttcacagaaccctggaatgaccctgcc

SEQ ID NO: 48260 - DNA, 1263 bp, Homo sapiens
  misc_feature (1)...(1263): n = a,t,c or g
gagcagagcctactccagcctcccccgtccaatgtatgaaagccccagctgatctgtaagcctgggagcgtgataaatgcttagtagtgcatgccatggagttccagggtggtttattacacggcaatatctagctaaatacatttaacttgctgcagctctctggatccagcctggttaccaggaagacaaaaactgggctccaccaggaaccagtcttctgccttcccaaccatcacctctggctgcatcagcgatctctcccagcgaaatagctgcttggtcttgtgtgaatcctgtactttaacacagtggaccaagtgtcagtcattgaaaatgaccatgagtaaccctgtggactctctgcagcttggttcctttgccccttaacaggtgggtatgaatcgtgtcttcagtgccagggctgaatgagaaagggcattcctttttgaaggaatctgatactaaacacaaagcatgagaaaaatcaggacttgttggagttatatttttaaaatatatattttaacagttatatatattagatataatatataatagtatatataaataatactatattgcccaggctggtctcgaactccttagctcaagtgatcctcctgccttggcttcccaaagagctaggattacaggtgtgagccactgcgcccggcctgttggagttctttacatttattttataatcaatgctgttttattaaatgcggattttattttggattacaggatgtagaatgccatatttttcttagatcatagggcctttcacatttgtaatttggccttgtatgagttaccctgcaatccctttgttttccccataacccttccaaaggaaggccgcaatagaaacacaaagagaaacaaaataattaggattattttttaacttctaaagtttcaaggttttggcataagtctggtttaggaggcacatttggcctaggccctttccttcccaccaagggggaaagtcttcctctagacaagaggcagagggctcctcagagtcagatcctggtgtgggctctcacgtgctgctgctgaatcccagggaaggagggaggaagggcagttgacacccaaaataagggtggggaactgtcagcagaggaggtctgtgtcatgtttttcagcgctggggttggggnggagcccagggagagcaggaagatccagagatcccttcgccccagctcggccatgtgtntttttgggacagagcctttaggtnggcct

SEQ ID NO: 48261 - DNA, 510 bp, Homo sapiens; identical to SEQ ID NO: 21258
  misc_feature (1)...(510): n = a,t,c or g

SEQ ID NO: 48262 - DNA, 6972 bp, Homo sapiens
gcagcgggcggcagctgcggcgcaaccggctccggagctgcctggcgcggccgggcgggcggcgccgctcaggctcgggctccggctgggcccggcgcggcctcggggctgcccatggggcgcggggggccgggccggtgacgccggacgcccatggacgcctctgaggagccgctgccgccggtgatctacaccatggagaacaagcccatcgtcacctgtgctggagatcagaatttatttacctctgtttatccaacgctctctcagcagcttccaagagaaccaatggaatggagaaggtcctatggccgggctccgaagatgattcacctagagtctaactttgttcaattcaaagaggagctgctgcccaaagaaggaaacaaagctctgctcacgtttcccttcctccatatttactggacagagtgctgtgataccgaagtgtataaagctacagtaaaagatgacctcaccaagtggcagaatgttctgaaggctcatagctctgtggactggttaatagtgatagttgaaaatgatgccaagaaaaaaaacaaaaccaacatccttccccgaacctctattgtggacaaaataagaaatgatttttgtaataaacagagtgacaggtgtgttgtgctctccgaccccttgaaggactcttctcgaactcaggaatcctggaatgccttcctgaccaaactcaggacattgcttcttatgtcttttaccaaaaacctaggcaagtttgaggatgacatgagaaccttgagggagaagaggactgagccaggctggagcttttgtgaatatttcatggttcaggaggagcttgcctttgttttcgagatgctgcagcagttcgaggacgccctggtgcagtacgacgaactggacgccctcttctctcagtatgtggtcaacttcggggccggggatggtgccaactggctgacttttttctgccagccagtgaagagctggaacggattgatcctccgaaaacccatagatatggagaagcgggaatcgatccagaggcgagaagccaccctgttagatctgcgcagttacctgttctctcgccagtgcaccttgctgctcttcctgcagaggccgtgggaggtggcccagcgcgccctagagctgctgcacaactgcgtgcaggaactgaagctcttagaagtctctgtcccacctggtgctctggactgctgggtgtttctgagctgtctggaggtgttgcagaggatagaaggctgctgtgaccgggcacagatcgactcaaacattgcccacactgtggggctatggagctatgccacagaaaagttaaagtccttgggctatctatgtggacttgtgtcagagaaaggacctaactcagaagatctcaacaggacagttgaccttttggcaggtttgggagctgagcgaccagaaacagccaacacagctcagagtccttataagaaactgaaagaagcattatcgtcagtggaagcttttgaaaaacactacttagatttgtcccatgccaccattgaaatgtatacaagcattgggaggattcgatctgctaagtttgttggaaaagatctggcagagttttacatgaggaaaaaggctccacaaaaggcagaaatctatcttcaaggagcactgaaaaactacctggctgagggctgggcactccccatcacacacacaaggaagcagctggccgaatgtcaaaagcaccttggacaaattgaaaactacctgcagaccagcagcctcttagccagtgaccaccacctcactgaagaggagcgcaagcacttctgccaggagatacttgactttgccagccagccgtcagacagcccaggtcataagatagtgctacccatgcattcctttgcacaactgcgagatctccattttgatccctccaatgccgtggtccacgtgggcggcgttttgtgcgttgagataaccatgtacagccagatgcctgtgcctgttcacgtggagcagattgtggtcaatgtccacttcagcattgagaaaaacagctaccggaagactgcggagtggcttaccaagcacaagacgtccaatgggatcattaactttccacccgagaccgcacctttccctgtatcccaaaacagtttgcccgcgctggagttgtatgaaatgtttgagagaagcccatctgataactccttgaacacgactgggattatctgcagaaacgtccacatgctcctgagaaggcaggagagcagctcctctctagagatgccctcaggggtggctctggaggagggtgcccacgtgctgaggtgcagccacgtgaccctggaaccaggggccaaccagataacattcaggactcaggccaaggaacctggaacgtatacactcaggcagctgtgcgcctcggtgggctccgtgtggttcgtcctccctcacatctaccccattgtgcagtacgacgtgtactcacaggagccccagctgcacgtggagccgctggctgatagccttctggcaggcattcctcagagagtcaagttcactgtcactaccggccatgatacgataaagaatggagacagcctgcagcttagcaatgccgaagccatgctcatcctgtgccaggcggagagcagggctgtggtctactccaacacgagagaacagtcttctgaggccgcgctccggattcagtcctccgacaaggtcacgagcatcagtctgcctgttgcgcctgcgtaccacgtgatcgaatttgaactggaagttctctctttaccttcagccccagcactcggaggggagagtgacatgctggggatggcagagccccacaggaagcataaggacaaacagagaactggccgctgcatggttaccacagaccacaaagtgtcgattgactgcccgtggtccatctactccacagtcatcgcactgaccttcagcgtacccttcaggaccacacacagcctcctgtcctcaggaacacggaaatatgttcaagtttgtgtccagaatttgtcagaacttgactttcagctgtcagatagttatcttgtagataccggtgatagtaccgacctgcaactagtaccactgaacacgcagtcccagcagcccatctacagcaagcagtcggtgttcttcgtctgggaactcaagtggacagaagagcctcccccttctctgcattgccggttctctgttggattttccccagcttctgaggaacagctgtctatctccttaaagccgtatacttatgaatttaaagtggaaaatttttttacattatacaacgtgaaggctgagatctttcccccttcgggaatggagtattgcagaacaggctccctctgctccctggaggttttgatcacgaggctctcagacctcttggaggtggataaagatgaagcactgactgaatctgatgagcatttttcgacaaagcttatgtatgaagttgtcgacaacagtagcaactgggcagtgtgtgggaaaagctgcggtgtcatctccatgccagtggctgctcgggccactcacagggtccacatggaagtgatgccgctcttcgccgggtatctccccctgcccgacgtcaggctgttcaagtacctcccccatcattctgcacactcctcccaactggacgctgacagctggatagaaaacgacagcctgtcagtagacaagcacggggacgaccagccggacagcagcagcctcaagagcaggggcagcgtgcattcggcctgcagcagcgagcacaaaggcctacccatgccccggctgcaggcactgccggccggccaggtcttcaactccagctcgggcacacaagtcctggtcatccccagccaagatgaccacgtcctggaagtcagtgtaacatgacaacgccagggtgaacacacgccacttcccagctaggagtgcactttatgggactgtgactggactcttccgttctggctccagccagaccttcagtggtcctgcctggccgtggggacatcagagagtgtcatcacgcagctggccagctgagttctgttgttgttttcatgccgcctgtgatctcagattcctgcttttctcaccccgtccccatgctggtgtccgacgccgcttactcagagccctggcctccctccccctacctcacacgctgctcatgaaagtttccacccacgctgtctccacggaacagcctccgtctgctggctcttcgtggaaggccatttgtctttcaggtagacactcagcagccctcacggtcttagtgacgtgtgtgcctttctggtcacacagctgcccagtttcctgatcggggtggatttgtgtcccctaaggggtaaaacagccgtttaccgcagatcctctcattgtgcttttctagaataacacccttctaggggaggcgggtgggggagggagggatcataaccccttctgtgccttgggatgccggagctgggggacctggaggcccatcagccggagccacgtgaaaggtactgaagaaagctgagacccggctgtgaggagcgcctcagcggtgaggtggtttagggataaatgtttctggaaccctgtggtcccccataatgttgatagaatatcatatgcactgggagttaaatatatttaatttaatgatcattatatatgtgggggttaatatgttgtttttctgtccctttaaagtctttacatgtaattgtagctgtataatcgttatttttcttttgcatcttaagtcttagaaattaagatattccatcgtgaggatgagagaggtcctcagtgtgtttttggtctggttgtagggaaggactcaagtcctggaatgtcctccactggtctactgagttgcagtcacactgttccaatggattatttgctttcggttgtaaatttaattgtacatatggttgatttattatttttaaaaatacagactaactgatgtaatgtttatgtataagttgcaccaaaaatcaaggacaaaaataagtgtgtttgtttttacaggtgtgaaagtcacagcttgtaaataagtgttgtatgtattaaaccttttccagttctccaaagcgatgtatttttgtacacttgaaatagagtactcttaatttactgggcaaatgtgcttggaattgaacttgacaagattagctcaagcagatagagtcgggtccagcagtggcgtggccctcgtgtgaatccccgtggatgtgcaagttgtggagagaaggagcaccgggttcctgcccagcactgtgcttgcgggaggcggtggggcatgggaggaaggaggcacagaccggggaaatatgacagccgtcatttccagtattctctgtgttgtcttttagctcattcaataaataaaggtggtgtgatttttttttcctcctgtctttttcatttgtagaaactggagacgtgtaaagaagataaataattgtgtaattaaactttccagaaatttatcttcctcatgtgcagtttaacaaacttggtcaaactagttagcaaattagaacttcagaatctaatgatagtttagggtttctaaaataaggttttttattgtaaaaattgacgattgccctgcatttctaccaagtcctgtgaataaagagatgggagatttgattccgtcagaagagactgtaatccgtgtcgtcagcctgggagccttccccagtgtaatgtagctttctctcttaccttctggaagagggaatgtttcatttattactgtttgattttcttgtatctggttctactcccaggatgaaattatccaactacatatatatttagaggaagaaagtgaaggggaaatttaaaatgtttacggcgcttaattgcctggaaatgaaatgaaatcaaatttatcagtttttttccccctaattacccaaaagatcttttgcaaactatgttacatgaatgcttctgcctctttaagacaaagaagaatgtcacccaaaattgtcatttttttcttaatgttcatcataaaagtcctaaaagagtaactgtaattggatgtttattgtttttatctaaagtaaggtgtatgtgtttgagacaagctggttttgttgataaagagatgttaaataattgtgaagccagatatgcaatgtgtatctaaaaagcaaggaatttgcagccgttttacaaatatctgtggaacatgtaaatactgtcaaatggaaaataaaataagttataatttttgtgaatttcatgggatgtcctatgattgggaaaaattataactcttctgattctaatgtggaaattgttgtatttaatctgaaaatgactttacctacaacagttccattgtcagcacagcctaggagggtcagattcctgtattaattactcttagtggagatgccagatatcccatacagaattagcagagaaaatacacacaggcttctattcaaattttctttagtgcttaaaattaagttttaaaatgaaatcagacactgcaggtttgtatataaaatgaaaagctatactactttttataaaagggcaaactgggctgatgtaaatgttttactttcaactgtgttctttaaaataaatcctacctggtttttaaattttatttttcatgaaaatgctcctttctctacatttattcatcctatatacatcaggctgtaagaccccccccagtcatcattaatacaatgtgttgggattctgtgactggaaaaggtgacaagttggtgactttgacactgcaggtattccattttcatggtttactatgaaaagtcatttttcatattatgtaatatattgttagattaaaaccattgtattaagactttaaaatgtaagcattgtaattctgaaaatacacattttaagaagagaaaaaaaaagtcgacg

SEQ ID NO: 48263 - DNA, 1292 bp, Homo sapiens
  misc_feature (1)...(1292): n = a,t,c or g
tttttttttttttttcactgcatggatttttaattaaataccacttcataatgttatttgcacctagtactttttttttttttaaataagacatgccataagtcgtgaagttaacaaaatataagcatccgcacagaatatattctaaggtgacttcatttacaccgcttctcagagaaacacacaagtaaccttttgtctgcctatcagccagtgttgaaacagctttggaattcacatggaaggctgccgggctggttccccaacactagcctgatggagtcctgtatccgcaccgtgccgtcaaactggctggtttccactagaaaagcaatggagagtcagctctcccttctttacccagcgttcaactccacactgcaaaaactgcataacctgaaccctgctgtgatggcaactgaagtttaaacccaagtttggtgaccttgctttaggtacctgggctgctcaaaaggagaccgaggtgtgatatttaacattgcttgcaacattcaagagggcttggggacgtcagagccatgagtaacaataacgaaccagggctatgagtggaatcctgatgtaccccttccccatcttaacagccagtgctgcgtatggccatcagcagacagtccatttataccactggacaaagattgggaggaaccagcccaagacagatgatggctccacacccactgtgcttcctgactactcaagtgacctacgtgtggcttccagtcaggaaactaccatttaactttctgctcagccctttcatggctcaggttggtgggatgatgccactgctccaaacccgaaggcaagggagcttcccaggcctcagcagccagttcctgggtggcactgtccccatgatctgaagcagacatgaaattacaatacgcttttattcactcatctcaagaaagctggctggcccgaagcctaaaaggcccataccnnnnnnnnnnnnnnnnnnnnnnnnnnnnggcagagtaagtttgggagcatatatatgcccaaattattaatgatcacccgggtttgacacatctaaatagcctccctgctcaccttctgtttctccctcctacctccactcccagctttagnaaaatcatttgggaaaggagaaatatataaatagcagtgaaaacctgattttaaatttctggctttttgttttttgttcttgcaggctcggagaaggtaacttattcccccttctgattcttcctccacactgaacaagccctccttttcaatcagtgctggtcctgcccttc

SEQ ID NO: 48264 - DNA, 465 bp, Homo sapiens; identical to SEQ ID NO: 5899

SEQ ID NO: 48265 - DNA, 393 bp, Homo sapiens
  misc_feature (1)...(393): n = a,t,c or g
gagccgggacgttgtacttcggtcgcggggctggctgaggtcactacctgcacagccgactgttggaagttctgcggtataccagctgaatggccttgaacaagtcccatctccactcggagcctccgtttccgcatctgtagaatggggatatgtgggcctaactcacagcgttgtgagaattcaacaagaacacatcaagcagctgtgaatgtagcaagccggcatttgattaaatgttagttttcgtcctaagaaaaatagctaatatttctgagcacttacggccgagccctgagctaacatttacttcctcctttaactcccacaacaacccaatggggtaggatctattattatccccatttcacagnttgcgggaattnaaggaca

SEQ ID NO: 48266 - DNA, 2925 bp, Homo sapiens
ttttttttttttttgtcctcattctggtttttaatggtcaaggtgacaacagtgtacagtttttccagacccatatgtaggttccataatctccacctgctggagaaaacaccgtgacagatgccattgccccagcaggccactgccggtgtgggaactttgggatcaaaagcaccaagccaagtcccttgctcaggatgggtcttggttgaaaccacaagcccttctgcagttctaggtggatgtagtgttggttcttggctcattgcaggggtgaagcaggaaagagaaagagactggtgaggcctgcttggaaagaggattgaggcacattacgattccaaaccaggagatcctgagtcagcactgattctgtctctggtttgtttaatacgggaaagggttccatccaagagcccaataggcctcctctcccaaacctgcatagcaatcaaacttataggggtggtggagggtctttaccaggctaggactactgcctatgtttctgcaagtcacaagtcagcaggtcaaagaacaagtgtgaagcagaacctgcctaagcaaagcccaagtagtgacactcacttccaaaacatacccagcagaagcctcctgcaagtaccaacagtgacaggtgcttgtagcacagaaaactcaccccttcttcaacagttgatttgatttgcccacacatcactaatgaacagctcggtggcattttgactgtttatcttatagggcaagataccctgattctgaactcacttaggatgggttggcatgagctgtatcctagtgaaaaaaaatatcccacctacctcctaggtccactcaagacttctgcacgtggagtaaatcaagccataatggagcccctgagaatccccaggaggcgagcagtctggatggtaatggaggaaagggccaggcaggccaggtggaaacagaatcctcaactggcccaagacctggcaagattagataccccaggggttgagtaaaaggagcacagggaaatatttattttcaccttctgaagacactgtgtgcatggagctctgacttcccacttcagggaactctggctgccgcccagttttatctgggcaagtgatatattctcgtgggaacaagtggtggcgaagcctctttctacacatttcccctccttcctccagtcatctgtggggctggcgggtgggacacactagtgaataagcattgtgtgccacaagtttttatgcagagaagatggaaggaagtttcctcccacaggccccaagataaatataattttaaagcaattaaagcctgcttcagtgggagagtttccgtacaacatgctggtgatattccttcaatttttttggttgtttttattttttttttcattaaagtccattgatcatcacaaaaacccaggaaatgcaactaaggagaaaacaaacgtccaaccaagatctaagaacccagagctatggaggagacgttgcactggactgctgggtgtgcacaagggggcaggaggggcgatccccatggggcatggccactggccatgggaaacacaggagggaggccaggcagctggctgggcggttatgttaaccgctgcacgatgacagcattgagcaggttggcttccttcagggtctggctctcatcagccagctctttgttcgggaaagtagtcatgaggataaagctggtggcagccatggctggccgggcatccacgatgaagagtcggatgtcgctgatcctgtggctgtggttaaatttctgcaccagcctcccgccgtctgcaagccgaatttggatgtttgtggtaggctctgattcgtcgattaagatggaagagctggctttggcttcattttctgcctgttgggctggagagctggtactcaacacctggggggcagtgctgcccagtttctgaccctcgccagtgaaggctttgaaggctcctttgggcttcacaaagtcctcgtcccgatggtcctccatatccaagttcacctgtccaccgtgagctagcctccgaagctctgctggcacctcccctctgcggatagactccagaaactgggcattggatgggtcttggtagcttctgagttctccattatccaggctgaatccactcttccagagtttcaatactacatgaacatcttggctggaatgctgcctcttttctcctgccacataggcagactcttcctctggtgctgccccaaggcggtagccacctcctgcaaatggtctcggtttactggtctctccagggctcttggtcactcgctccacagctacagctccatgctctttggcacctttaaagagatcatccaccagctcgttgggacttttcttcctgggagggccaacaatctgctgtccacttctctctgagcccccagcataaaacctgctcctctggccttcctcttcctcctcatcttcatcttggtcattgaatgaggtctctgaaggatgtcactctattatcactgggggctgtgcctctggacactgaactgggggttgcctgcgaaatggtcacaatgtcttcatcccctccgtcctcataaaagctcgctagcgcgatcttcacccattttatcataccatcagtgcaggagccgaccaccatacacctcagtagaagtgtctcaccttctgccaccagcatggggccctcgggctgtagcacctgccagtcattcctgctgctctgcccagaggcatctgaggggacaaggaccagtgccagcagcaggaagcagggaggcaagtgggccaggcaggtgggggccgacatcgtggagcacatggcatcttctgtggtccccaagacttggggctcctctgctctcttgtgagtgttggagttgaggcggggcccgtggacaaggc

SEQ ID NO: 48267 - DNA, 872 bp, Homo sapiens
tttcaacattaaatgactatttatttttcaggtttaaaagatttcaaaatacatatgtacaagataaataaactacacaaaaattatgtcatcaaatatatttaaaaaaaaattcaaggtaggcaacttagatcaccttggcaaagaacacattaactaagatgaaccagggacaagtcccctaaacatcaggatgaaatttcttttctatgcctactagctgactggccttccttttctgtgttgagttgtgtactctggagtcaccagcctctggtagattatcaagcatctcttcctcatcagccttttgtttctgtcttgcatgcttctctgtccactgtctggcattcttgaggaaggctggcttattatatttaaattctgaggatatgtcagccatgagcgggtcatcagggttgggttctgacatgagcagctggaatagaggtccaacacagttgcgatgttgagggatggtctccaagcaccttttggtggcaatttgagaacatccagacaaatccttccagcagaatcaatgtttggatgataaattggagtgagaaatcggatctgaggaggttcaaatggggtacctcctcaggaatgataacttctagcttaaaaacacctttctcataaggtgtgttggctccacctaatatttgagctcgcaggtcatccatttggtctttatcttgccaacatgtgatgcctgggggtggctctgtggctaacatgtgcagctctctcttcagacgcgaagctctctgcatgatccccaagtagaaggaaccacacacagttcactgctccacactaagagctgcctgggatgcactgagctgacacccctcacaacgcagcaa

SEQ ID NO: 48268 - DNA, 428 bp, Homo sapiens
gtggtcattaaatgtttaagacactcaaaaaggtagtagcaaaatgaactcacatgtactttcccagcttcagaaaaacatcaccagtacagctacagccccgctgtgggtcttttcttcctgaaataaccactgcgctgaatgcagcatttttgttgaaactaaaatgggtttctgaggaccaaataggacatggagttccaggtataagttgggcccttggcttcttgccctgcctaccagcctgaacttgtttgagggcagggtctgctcttgcctccctcccttctgcttgatgccttgtgtacttgggcccttcacaaatgttgattagattagtaatagctcttacccagggctggtcctggaaagcaagtggcactgtgtattctcaaagggacagagttttgctttaaaggacatttggg

SEQ ID NO: 48269 - DNA, 880 bp, Homo sapiens
gggccaaggcggccgctgatgccaagaagcagaaggagctggaggatgcctactggaaggacgacgacaaacacgtcatgaggaaggagcagcgcaaggaggagaaggagaagcggcgcctcgaccagctggaacgtaagaaggagacgcagcgcctactggaggaggaggactccaagctcaagggcggcaaggcgccgcgggtggccacgtccagcaaggtcacccgggcccagatcgaggacacgctgcgccgagaccatcagctcagggaggccccggacacagccgagaaagccaagagccatctggaggtgccgctggaggagaacgtgaaccgccgcgtgctggaggagggcagcgtggaggcgcgcaccatcgaggacgccattgcagtgctcagcgtggcggaggaggcggccgaccggcacccagaaagacgcatgcgggcagccttcacagcctttgaggaagcccagctgccgcggctcaaacaagagaaccccaacatgcggctgtcgcagctgaaacagctgctcaagaaggagtggctccgctctcctgacaaccccatgaaccagcgggccgtgcccttcaatgcccccaagtgagcccagaacttggggagccagttcacccacgggtggtccaggtcacgactctgcacgcccttaggccaggtcagctgcgagggtcacagagcgttccgggggccaaggcgccgggccccggggccatgctcttatcaccagccacccgtcctcccgccagagggtccctgccccgagtgacaccccatcccctcccatcccccggcgcgtgtgtgtagagcctcagggctgagtgcccaataaaggtggcggcaaggctgcggtgaggc

SEQ ID NO: 48270 - DNA, 793 bp, Homo sapiens
gctgtgttttgatttaatgtgcttatcaacttataatattgaattaatgttaatagtgtcattttaggtgaactagacttcattgaaggaggtgggagccttatggagagagagtatatgattatctctatttgtatttaattaccatttcatctaaccattcagaacatatttcaagaataattttaattcaagttgtagataaaacttactataccattttcattttgacgctttccaagaatgagatacacggtattttaaagacaaagattgatcttacatgttactattaaaaaaaacacgataattttgttctacatttatacttttaatttttctgtggataataagaaatgccaagagtcgattgtgtccatgctgggcaagtggcctaataaattgccttttatttggtggcctcagagtggcagttaacatcttgctattctgccttgtggacttgaggtggaaaggttcatggaattatatccttgcttttggatgtgcaaactgaggctcagagagtttaagacacatagtcactttcaccaattaaatgatgaagctgccatgtaaacgtatttcatcacactcccgagaccttcttctccagtagtgttttcaagctttttgagcatgcagacactaccatcaaaaaattatgtagagacatacttgagagttacagtttaaagaaaaacaaggtgtaattatttggttattagtagcatttacatatgcttgaaaacttctgctatatatacagtaagattaatttattctaacaatg

SEQ ID NO: 48271 - DNA, 2345 bp, Homo sapiens
ttttttttttttttttttgtgggagaaaaattatctccatttattttgtttcatatacatccatagttgaattttaatacaaaagaaaaaaattagaatctgacaaatgtttacaaacaagataccttcaaatagattttactcactttagcctggtgcagagtaattgacaaattgtactgttatattcaaggcaacagagtctgtagtccaggaccacttagcccaacctttatgcaagcttaattttaatctaccatgaacaataaactcattgttgattcccagttgtgtgtgtgtgcacatgtgtacatagcagctcctttcatagaaagaaaagacatctagaggtcgtcttgtacttttaccctacaggaatcatggataagatacagatgattatatgtaaccggggctggattttataagaaaaaatacttagctgacaaatgagggcagcaataaaaaagcgtcttttttgcaacaataaataaatacagtcaaaagttttctgtgagactctaaaccagcttcttcactgaagagcagacgtggcatttccatggagttacacttgaccccatagtatctttttttcttgctttctttttctttttttttcaataaacaaagttttctcgcttctgccacaatagtaaaaccatctgatcttgacaagataatggtgtcgttgactttgcttttttcttgtccgttggacaaaattggccaagaatataattggactgttatgaccaataaaaacgaagtttaggtcaagtcttgtcaggatagcctgactaaaaacatctggctccttaatttaaaatagttcagacaaccagattcttgctgtgttttatgttaggttaacacgctgaactttaagaagctgtagactgcagtttgttgttatgagacctgctagctttgaagcctttcaatttctgtacaaagaatgattcgagaacttctgcacactggtaaaatggggagtcacttggattgtagtaacgacagttatcaaaaattttggtcatatctgccacaaattccgtcagcttttcataatatcgtctttgtactctttcttccatggtggcaaggtccataggttccttaataacaccataataatctggtgcatcattagggtctactggttcaaggaaaggccaggccatcttatgggcctgtaaggaacggagcaccctcttcaacccctcataatccttctctgttagtggcgtgagcactgtcatggcatcctctgttgactggcactgtggacagacatactcatcaatgagctctgcctcactttgcaagatgccaacgcagcgcccatggtaccaattctgacaccgatcacagccaatataaaatttagattcatcataaggcgttttacagatacagtaaagctttgtgtccttcttagtttcctttgaggtagtagagatcattttctttttcttggactttgagctggagtctttttcctcttcccgcttcctcttctgggaagcagcaggtaaggtgggcgtggacagaaggcctgtgtgttgcacagcaggtggagggggaggtgaaggtggaggggctggaggggctggaggagctggtgtcactggggggcagggtgcagctactgctgtggcctgagccaactgcatcaggtctttttctttcttaattttcaggtctctcttcagctcttcctgcacttcaatttgcagatccttgtccaggagtgctctcttcttcaggatctcggctctgagctgctctttgtgcttgaagagcagagctgacagcttagtggcattctgcttgctacgtttctgctccacactctcttcacgcttccgtttttttgctgcctgtttttcttctttatctatcttatccaaaatatacttcatcacctggttacagacaatcattctttgattctcttctctttcagctggagtcatgctctttttctgttttaaatgttctattacagcattatgcttcatcaccacctgtttctgaatgatttcactttgattagaagcttggagggtgtgttcacgcttaatttctatctgttgctgtttcttcttttgctgctgatccctgagttgctgaaccctttgcaactgctcttgcacactggctgcctgcactgtaaccacattctgaatctggtgagtctgcacagcactgctttgctgaattcggataggtaactggagtttgatttgctggggcacaccactttgctgagcctgtatctgagccacaacctgtgactggatctgagagagaacctggacttgttgttgcagctgaggcac

SEQ ID NO: 48272 - DNA, 638 bp, Homo sapiens
aaggaaagggcaaaaagcaaattaaaatccgacaatgagaatgacgggtatgtccccgatgtggaaatgagtgactcagagagtgaggcatcagaaaagaaatgtatacacaccagcagcactatcagcagaaggacagacattatcaggagaagcatcttggcttcttgatgcaacagagatgatgcggaagccctttgggctcgtcattgggtttgctagaggagagctctgatgtgggggagaagcagaaacccattaatcctgagctacacaaacacatttacttgcaattcagattaatttttttccagagtcatttttaaatcatttttgtgagaagtttgtgttatttgcaacttgttgaggaaacagaagagtagattgtaaccataagacactgctaagactagaacccgaactgaacactaaaataaaaatgaaatgttttaaagaaggcaaggcttaaataagcctcatgaatttttatagccctctgcattcttcccaaagcacaaactcatggttacctgaatatagggaaccagatatggttcttgagaaaccctcatggtaccattcacagcccataaagtttattttctaggactgtggtagatcttgaaatcatattttat

SEQ ID NO: 48273 - DNA, 1402 bp, Homo sapiens
  misc_feature (1)...(1402): n = a,t,c or g
agtgattataaatagtatatttacctccaaaaaatttaacactgtgccctaatgcaagaaaaatctgtggtataccaatgtactgatgttctgtagctctttactgaaggcctcatgtcaaaggcggggaaggaaagcaattctgtggctctgcacttctacccaagtctgaagagaagtgagccaagttaaatgaaggtcaaggatgctcctcctggtcctctcaggggctggtaaagtcttatatgacgttttctggggagtcattactctgtccaaagtcgaggtagctcagaggccttcagcgcatgatacttccagaaggccacctccccatcatcactgcaggaggccagtagccctggctccttggggttccaggccacacagttgacatcctgggaatgggcctgatgcaagtgggctgtcagggagaaggtgggctgctgtggatccgagttgggatcctcctgaaacacgcggatcgcgtcatccccacaagctgtggccagagcccctgtcagctgacaccaagcaatgtcataaatggtccttgagtggaagccggacaaagtacagatacatttccaactggggtcagagccgctgcatgccaccccttgttcattgcctggtagatactgacgccagatacgcacagtacggtcatcactacaagacgccaggcgctggccactcgggtcaaaggccaagctccacacagtggattcatggccctcaagggtggcacagcatacccagtcatcctcttcctcccggtacagcttcactgtgtcatcatagctggcagaagctaagagctcctgacttgggtgccaaaccacatgcttgacatcctgtgtgtgggagttgagaacactgacacattcatacttcatcctcttcatcaacttcccagacccaaacggctcttnatcttcggcttgcaaagtggcccanggagntttcccagatggggncccaagccaactgactttgacccncattttcatggccctcgagagtggttacacactcaaagtcatcctggttcttcttccaaatgcaagtggtagcatcaaagctggcagaggccaggtaattaccgcagggggaccaggctaccttcccgcacggtgcgctggtggccttcagaaaggacagacttgcagatccagctgtcaccctccgtgccccagatgcggattctccggtcgccgccgcacgaggccagcagggttcccgcggggttccaggccaggaaccagcagcgggagtccgggtgcgccgggacacggcccagcagcaccagcgagtccttcatgtcggcccgacgcagggggaggtgggggcgggcagagtccgctgagcagacagcgggtctcaccgcgcgcgtctgcgt

SEQ ID NO: 48274 - DNA, 2050 bp, Homo sapiens
agaccacagagccctgggttgtggaagaggtggctgttccctgtcatcagtatgcagcgattgctctttccgccgttgagggccttgaaggggaggcagtatctgccgctcctggctcctagggcagcgctagagcacagtgtgattgcatcaggcgccctttgaggccagggcaatacagcaccatctctgaagtagctttgcaatctggaaggggtacagtgtcccttccctcaaaggctgctgagcgggtggtgggccgatggctcctggtctgcagtggaacagtggctggagcagttattcttggtggagtaactaggttgacagagtctggcctctcgatggtagattggcatttaataaaggagatgaagccacctacaagccaagaggaatgggaagcagaattccaaagataccagcaatttccagaatttaaaatcttgaatcatgatatgacactgacagaattcaagttcatctggtacatggagtactcacaccgaatgtggggtcgccttgtaggccttgtgtacatcctgcctgctgcctacttttggagaaagggctggctcagccgtggcatgaaaggacgtgttcttgccctctgtggcctcgtctgcttccagggtctgttgggatggtatatggtgaaaagtggactagaagaaaaatcagactcccatgacatccctcgggtcagtcagtaccgccttgctgcccacctgggatcagccctggttctttattgtgccagcttgtggacctcactgtaactgctactccctccgcacaagtgcctgaaacccaccaactcctacagttgagacggtttgctcatggaacagcaggtctggtgtcccttacggccctctcaggggcttttgtggccagggctagatgctgggcttgtttataactcctttcccaaaatggggagaatcctggaatcccggaggacctctttaccttctcccccaatcctgaggaatgtttttgagaatccccaccatggtgcagtttgatcaccggattctgggaatcacttcagtcaactgccattacaagtgctctacttcctctctcggagaattccccttcctagaaggaccaagatggcagcagtgactctgctggctttggcgtatacacagggccctgtcttattcaaccttacttttaaaatcagtgatttggatgaaggcatcagaaacatctgatttgaggatggagcaacccaatattgctaatataatagatgacagtggcaactgaaaacagtcccagaatgaccccatcgagatgaaattaaacagattagaaatgtaacatactcatttaaattaaataagttgtataagtttgggctgaagaaacctggccttatatcatttcatataaaaaagacgggattttagttgtcctcaggttcaatatgaaccaagtagtattcatgttgttattatatgataacagaaaaattagtggtacttcaggttttatcagtagaagtgtcacagccatagtcaaaatacccctaacatactgcatttcactctgggtaccaaatttaagcaagatattgatggccactaagtgtgtatccagaagaagagatcagaatgatgagtccagaacccctgtcacacagggaataggtgaaggaactagggatatttaactggagcagagaacatctggagagagagcaagattcctgtccttgagaagttgaagccgtctcatgcagaagagggaatgagcttccattatgctgcagagctggcagcaatggatgaaagttgcaggaagttagttttagttctgtagaaggcaagagtagggtagaccaaatcaaatgctcactggggtcaggctgatggagacagtaacactggcgagcacttgccccagctcggactatactgctgagttctggtctgttgctgccactctacaggtccagggttgttagatcttctgggtttttgttttgctttttgaaataaggaaaataagcttatcttaagtttattttccttatttc

SEQ ID NO: 48275 - DNA, 1767 bp, Homo sapiens
  misc_feature (1)...(1767): n = a,t,c or g
ttttttttttttttaacaaacatgtttattagaaaagtaaaaaatattgcataggtcttaatacttgaacatcaagtgtattcatgaacagtgagtatcttatcttcatgtaaacagttctagatggaagacccagatggcactcctcccggggaggggttccagcccccaccctctcagcccctcccctgccagctcaactctgcagtacacgatgggggaaggcttaaacgcagctgccaggtgtaatttttcaagtgtcaaagatcccaagtgatccctgacacccaccccttcctactcttacattcatgcgtctgtaagatagctgcctacaacaggtcagtagtgatgctccgatcagaaaaacaagatacaaaacaaacaacaaacacacttggtcccttcagaccagtaagatacacaaaccacctccacgacctccgacctcccccctcccttccgggctgctctgaggagcacgtgcctcttccttcaccctgggccaggctggggcgggacagacccagctgctctctggatgtcacaccactgttaactgtcagtaacaaaaataataaggtacatgctacacacacatccagctggaagccttgttggcccctaagcctttgtttcatgctacagtactgaggggtatgtgtccccaatgcacagccacccgcacacaactcaatgagcttcctgggaaacactattcccccaccatcaccttaggtggctgcctcagttttccaaccactggaatcagtccctcagctcctgcctctagtctccaccccaaaagttcagtcgtctctgtcttggacgcactgtcggccccctcaggttgaagttcaacactcctcaatgagcagctgttccgagctgtacagcttcttcttgatgactcggaagccagtgctcagcgtcagggactggctgaagccagggaggaagggagagttggcggagctaaacagcccctggatcttgggccagagtcgtgagtccaggcgcagcacgagggtcagctggaaggtgggcaccaggctggggtcgagtgccagctggcccacgctgtggcagctcttgccctgctccacgcagacgtccagcagcgccccccgcaggccgcacggctcgctgtaggccaggcgcagtagttctttgcccacctggcttaccaactggctaggcatcagcaggcgcgcagggcgtcgagagcccagccgcgcctgggccaggctctcctgcagcagctgccatcaggttggcacacaagtgttcatcctcagggtcactgagcagctcgaagtcgggcaaacgacaaccccatccagttaagccgtgtctttcctccggcccgaagccacttgttgcttgcttgtccagggacttcgcagtccgagcttctccaggctcgtggagcggtcaaacccctcctcccgggtcgccgaccccccaggctgagcgcggcggccgatctggggtgggagttcggggcaaggaccgagggcgaagaggaggtggacgaccgacgagaagcggtcccaaaggctaggcatggtgaggacaaggagccagggcgtttgctgatgaactcagagtgccggagcgtagaagccgcagctagcgcggtcagcgagaactgctaagacaagtgcgtcctgccgcttgaatgggtgtgcgaacccgtgccaaccaccgagagccgcccagacccgtcccaggtccacgctcgcacctcccccccnnntgcccgaa

SEQ ID NO: 48276 - DNA, 669 bp, Homo sapiens; identical to SEQ ID NO: 5933
  misc_feature (1)...(669): n = a,t,c or g

SEQ ID NO: 48277 - DNA, 2026 bp, Homo sapiens
ttttttttttttttttttgacagaagtaaaaatatttattttatcttaaaaatctggtcccgcaaaaaggccaacacttttttcagttcacggtcttgacctttcaaagaagaaatctttcaactgagaggtgagttaataaaaggaatgtcagaggtgctttcagatttcttataaaccagtaaaccaagcaaccctggacttctagtttactgagctccttcttctagccattcacagttcctgaaggagaaaagaagttgtttgcagataaggcactttagaaaccaccaaagagaaaacccaagtctgccaggagctgcactgtgaacatgtgagccgagagggccaccagcagacagagtgccaactcccacagctccatgacaacagcatccaccttcctgccccaacactgttccgtctggcttccagcacccgccttggctctgtgttgcctacctggcctagaatacatggaaaccagacaactggccagagatgaacactgctgcctgaagctcagggcagctgcccacagtgaggaatcccttcagaggccccagctggggccaccgcccgagggagcagttccttttgcaaagatgagttagtgcggatcagcacattagcaaagcaaaatatttaaacatttttaaaagctgctaatccttccaatttccctcctgattgtagctcaagctgcagcctctaaacctgctaaaaatcaggaagaaacccctcctctggaggggcagatggactgaagtggctacagcccagtgtgggtacggaaagcctcccgctgaactgtgatcatgtgacacctgcagaccctgggaagggctgatctgaatcctggccagcaaaacttcaaccttctttctttttgcttggggggcttgtgtttaatacaggtcattgcgatggaagaagtctcagagtctcttctcacatcaaagaggacagatggggacagggatccctggagcttttcttctcctgtgttctggttgcatacttgaatcccaggaaacagtgtgaacacggtgccaatttactgccaaacatgcccggtttgtcaacagagccagacaaggaggagaggagagattcatgccccaaacacaggccagctgaggagggcttcgtcctccttcctttggcccagatgagggagcgccttgcccagaagtcacatgaggaaaaaccgtgctcaggtcagaactggacccagcctgtgcctggctgggtctggctggaagttgatcctgtagatttggtaaagtctccccagatgtcagcagtggcaggattgggctgtggccagggtacaggagcacctcctgaactgggagcaactgctggctggacgagggatccccccacagccaactgctccccagggggagggatcagggtggaggttttcccccctgggggagggggaagcaggctcagccctcctgtgctggcaggccggactcggggattcccagctgctccttccttcttcttcatgtttgcgatgttgagcttgatggtctggccctccttgaagcccaggtccagtttagggccttggtctgggttctgggcttgttttgcaaattcacactgctgtttcacccacttgaaatggtcctgcaatgcaacattgaagtcaaaggcatcacctcggtccccgaagccaattccaataaacgcccgtcgcccatttccatcttcgatgcggatcacgaagtacctgctggaatccgtcacactctccacagctgtgccaggaaactgatccaccggggcctgagcaaagagctcccctgacgtcctgtcctccagcttgatgtaggccatctgtccctttgcagtgatcctcagccggccactccatgatggctggtccagctgccactccgcagccctgtagccacggttggtagcccgcggagggatgcggtagacgtggacgtcaggcttgacacagagcaccgactcgtacccgctctcctccatcgcgacgcctgga

SEQ ID NO: 48278 - DNA, 1397 bp, Homo sapiens
tttttttcacagaattagtcattttattttaaaagtgcacatattttattgaaagatatccagtttcagctttgaagatataggctcaaagtctgttcttggctcttccagaaattctgcttctagagtgttcataatttcaaccaaaacttagaaagtttttctaaatcagacttttcaacctgctgaacagaactcatgtctatacttcgatgtttattttggcagcatttgtctctgtgaagcatatcaaaatcactcaaacatcaaaactgctgatctgatagaatgatttattttcccattacaggtaagtcatgaatggcttgttctgaggtatgtttctgagctatgaaggacacctactagaaagctccacacttgaagggttctcttaaggtggtaacattttatggctggacagtctctgcaggtaccagattccccgttgtatccaactgcatacatttacacgtgcatgcagacacagggcactctgcatggtccctgaaccaactaagcatatgtccagcatgtccaccgtgcctgcaattatgacaccatgtaaaccagttgttaaattgggctaattttttgtccttgctcaagtccactttttcatctgatttggttcctccaggacagctagaaactggtgttcccatattaatgagacaaagcgcacatcgaggaagtggttttcgacagccaggacaacttgtgactttagatttcgttggtgagccactcacaccatactgactaaaacctctgccctgatgaggcacagctgaacagctgtaggagattgacttgccacagaaattgcaactcacaaaaacttgtgctaaaggcttggaactgggatccaacttactcctgtgaatatcaaattcagctcgtttatgccaaaacctccaggcatctaataaatttctataattctcaatccagtactgaaccctttcatctttaagaacatctaaaggtgaaccctgtaacatacagtaacttgctgtttgaacatctccagttctatcaacataactctccattaagtccactccatctttagtaaggcctgtaagcaaaattccttccaaatttccagcctctttcatttcattggtcaacttttcgatgtatctatttaactgagtatcactaaggaatttacaagcaaatgccactctgtcacgtactgcaactttgttttcatacaaaactccatcgtaagatcctgtttcacttgtcagaaatgcaaacatgacacacaaatacgggttatttagctgtaatcgcagtgtgctacacatttctctccaaagggagttcttctcatccgtataacccgataaagccattgctaccacattgagattcagatctcctttttc

SEQ ID NO: 48279 - DNA, 746 bp, Homo sapiens; identical to SEQ ID NO: 5938

SEQ ID NO: 48280 - DNA, 576 bp, Homo sapiens; identical to SEQ ID NO: 5939

SEQ ID NO: 48281 - DNA, 493 bp, Homo sapiens
  misc_feature (1)...(493): n = a,t,c or g
cctcgtgccacagccggcgacccggagccgagagcgggcggcggagcctgagctggacgcggccacgccggcgcggcgggatatgtggtgcctgtcataagctccagagagctgccttccacaagaccagcagaagagtgggcaaacatgaaatccaatcctgctatccaggctgccattgacctcacagcgggggctgcaggaggtacagcatgtgtactgaccgggcagccctttgacacaatgaaagtgaagatgcagacgttccctgacctgtaccggggcctcaccgactgctgcctgaagacttactcccaggtgggcttccgtggcttctacaagggtaccagtccagcactaatcgccaacatcgctgagaactcagtcctcttcatgtgctacggcttctgccaacaggtggtgcggaaagtggctggattggacaaacaagcaaaactgaatgatctgcagaatgcaancgccgggtncttcg

SEQ ID NO: 48282 - DNA, 2059 bp, Homo sapiens
tgtaaataactttccaagacctttctttatttcctgagatgaataaataagtggcaatggggtgtggggatgtggtgaacacagaacaggaactggcagcatgcagctggcaggagggagctgtgatggccccacccctgtgaggaccacctaatcctaagcaggggccaaagctctagcagccaccattaaggaaaaacttttgaaattcacacattgtgaagcctgccagtccccgccaggtgaagagctcatggtatccaccttcagggctactttttaccccaggggccttgtctgcccgggcctgggtacctgggctgctctgtaaggcaggtaggggtgctttaccccactctcaaaaataaaccaagctgtcctgagtgtccagcaggagggcagcccaagctctgggggcagcgtgggtgggaggaggtcctacaggtggtggccgcgattatctgcccttgatgaagccctccagcacacggtcactgcgctctgacaaccagtagccagtcatggccgccacagccccaatgaagatggcggtgaacaccaagtcgcccttagcagccagcgtggccagtgcacagatgatgatgccaaagaacatctgctgcagcaccaccaactcgtcttctgtcatctctgagaagaagcctgctgactctgggatctgctccttcacacagatgccttccatctgcttgtagccctcggcacagatgcagcgataaccgccctcggtgttttcacactgcttgttctctcccggacacacctctgtctcacactcatccacatcgagacacttggagcccacctgctgatagccagggctacacttcttacagcgacctggccctgcccccatgcagcctaggcaggccttggcacagtctcggcactcataggagccctcagtgttcacgcagaattggtcagctccacagttggctccctctgtgccacactcatcaatgtctacacacttgaggtgatgccagggcccagcccttcttgcattgcaaacagtttgattcctcaggtcctgagcatcgggcacaggggccaaaacaagccgaacataccagatggctggcgttgcgttctgcctcaaagtagccaaggccacactggccacaggcctcacccccgtagccggcttggcagtcacagtgcccgctgccccctcgtgtcccttctccttcacactgcccgtagccaccgcagggcctctctgttcccccaggacagggaaggcaggagggcccgaaggtgcctgcggggcagcagagcttcagggaatctgagcacagccactggaagaggtccggggcctcctgctgcttgtgaaaccaccagctctccaccagctcctcactcagctccagcaggcggtggcactcgaagtctgacttgctgcacacaccctccagcacctctaccaggcgggtctcactgtctttgtatttggacaaattctcttcctcccaggcagtgtttccacctccaaagttgtcccggatggttctctccaggcccttgttaaagctgtcaaccagtccccggcaggtatgacacggatggggctgaggcgggggagaagactggggaggtggagagggctggagccagataggtcctgggaggttgaggaagaggctgaggccccagagcacagctgggactaggcccttcgggggccatggggccatctttacccaggctggggaccctgcagatagagggcgtggagaggcttccactgaaggagtccaggcccccacgcgagaaagaaaaaggtctgttcctaaggtgccgtggcgctgggatctgcgttattacaagcaaaagaggccaaactgggtattgcaggggctgtggggatgggtggggaaaggcgcataagatgcaattccagaagagaaataagttatcctcgctagcatggggtggagaggaaagtggcctcgctccttgacaagggggcagaagtcagcctcttgtctgagggtctgataaagaatattaggggccggatccgcagaattag

SEQ ID NO: 48283 - DNA, 1078 bp, Homo sapiens
  misc_feature (1)...(1078): n = a,t,c or g
tgttacaggtgtgagccaccacagctcgnccaacatgtggctttcagttcttacttgaagacagctgctctagctagaaacttcctatcggcatctgagccagctggtagagggcattacctcccccacccccaagaacacttcttggaagttacacacaatacataaacttcaatttcaaacagttgcttggtcccactagccatgaagctggatgggacgtaatattctatctgggttgtcatgggccaaattaacattttgagattctgttaggaagacgagaattggataatgggcacctctaacagtgtctgtcagagttgacatacattgtgtatctcctgcaccaaagcatttttgagatcaagtgttcttccagctgagcagaaatttggaaggctattcagtgctgcttagtgtagcagctaataatgttccaacttctatatgatagtttgctttttgttttttgtttttttctagagacagagtctcgtttgcccagggtggtctccaattcctgggtttcaagcaatcctcccgactcagcctcctaaatgctgggggtttaccagggcatgaaccactgtgcccagtctatatataatagattttagaagaaatttctgccactcagtgactgctttaaattctagagacagaggctgagagaaacttagtagcctgcctgcgcatactgcaagtacagactatataacaagttgaaagagaatcaccctggtatataatattttaaaacatgaaaaaggcattactattgttctggtctaagtactctaacaggacgatgatttctaaccctagcatcatgacatgtatatagtgtgttgtaagacatttgccagctaatagttacagtactgaagcttgtgaatacgttaattgagaaaactttaagcaggttcaaagttatcccatgatagtggcattcttatttgtatatatgtgctttccttttttatttgtatcaaggcatttaaaatgaatatatgtaacatgtacctaagttttaaaagcataataaaatgaacacatctgaaaccaaaaaaaaaaa

SEQ ID NO: 48284 - DNA, 1762 bp, Homo sapiens
ccgctggaggtgtgtccatggcggcgcttgacctgcgagcggactgcgacttcgctggtcctgcagctgcttggggacctggaggagctggaggggaaacgaacggtgttgaacgcccgggtggaggagggctggctctcgctcgccaaggctcgctacgcgatgggcgccaagtcggtagggcccctgcagtatgcttcccacatggagccccaggtctgcctccacgccagcgaggcccaggagggactccagaagttcaaggtggtgagagctggtgtccacgccccagaggaggtggggcctcgcgaagcaggtctgcggaggcgcaagggccccactaagaccccagaaccggagtcctctgaggcccctcaggaccccctgaactggtttggaatcctagttcctcacagtctacgtcaggctcaagcaagcttccgggatggcctgcagctggccgcagacatagccagcctccagaaccgcattgactggggtcgaagccagctccggggactccaagagaaactcaagcagctggagcctggggctgcctgacatgcgcgcaaagaggcagggcagcgagcacagctgttctccgacatggctacgtgatctcaggccttcttccttcacaattagctcttgcccctaccccacgccagctaatgccccttctgtgtccctgctctgcatgtttccattttccttaggtgtgaagtttgaagaggcaaacagtaattttgaaagccactactttgaaaccattctaaggcctgagttcccataggacacactcacataggcaggtacacgttagtcaacaattggaactgcctcttggatcactcagctgtgctttcatggctggatgatggaacactgtgcgaagagagatgggggccaggaagtagcgcttcatgcttagtacatcctccaaattgtctttgctggaggagaaaaccgtactcagccaaaagatcaggacaatatgacttgagtccacaaggacacaaacacctgagtaagctgggcagcccttggcagggtctaagccaggaagtaaaaatgatctggcctagatatttaagggaactctaggaagaggcctaggtttttaaaatcctgtctctttgtcttaccataagaggctgagccctctcttcatttttttgaagggccacttgtgttttctgttctgggaacttcattcatttttctactgggttgttgatctttgcagtaatttctaggagctgtttatgtttggaggtaattggtcctttgtccatatatatgagatgtaagtcttattttccagtttatctttttgcttattttttttgactttttattgtaaaataaaacatcaaactgcacagaacagttgaatagcttaatgaataactacagtaaaagctatggtaaccactacccaacttttgtgttttttgatcattatttgtacgtacagttgaatgtatccagctgtcacatgattctgaatttgggtttgtaactgataaggcaatcagggaattctccagcattttcaagaacctctgtggtttcagttgaaatgtccagtgagtcatgtccagcttttccaccatcctcccacgtgctgtatgtcggttaatgctgcccttttgttttgctaactcccagtgtaaacctaatgtaatttgggggttttcattctgtttcgtggacattactgtcaatacaccagtaccacattgttttaaaaaaaaaaaaa

SEQ ID NO: 48285 - DNA, 3075 bp, Homo sapiens
ttttttttttgctaaaacttggaatttaatgaattttactcactacagttatactcattttacattaaagtaaaaaagaaaatagccaggagagtaattcatctccagaaagcagtttaaagttattgtttttattatttttatttgctaccaatatttttattcgtaagaaatacaaaaggtattacaaatatacaaactatttgctctttttgcctcattcaatttagctttcacataagtgaacacattggacagtgatatttcaacaccaattttgaaaaaaacaatgaacttcatcatctgacaataaatacctacattttcattctagcacccagtaagacatccagtttccaaaggattattggtatgcaaccctctgaattttctgacatgttacctttgccactgcaacagaaacaccactgcagttctccctttcccaataagtcagagtaaggggcaggtaagaatggctatctgacttcagaaaccctgggtcacaaagcatcccttacttgagctacttttaaaaccagatttttaatgatagggtacttaaagttttggtggtccttgaatgacatattttacgttacatatttaccctacttttctattctcctcctcagataggaagggtatagataaactggctatattttcatctgcctcttgggaaaggagcaagagcattcagctcagagcattcctgaaagaacagtaagcccttaagagaataagctttcctttcctttccttccttcttttgccttcaagagggctttctgtgtgtaatggagggatggttgctagagtgagacagcccttcccctcttgctatgtctataccatacctgaggccatttttcttagagggcaaaaacgttagaataggtaggaaggttcttgctttcagagagctgtgctgcacccacagggtggacccgacaggccactgtggtaactctcaatctgtgtacagagaaaagagaagcaacatctgatacaaagtcacctgccaacattcttataagactgtgtcccaggcagtgaatttccacactgcttcttgggtctgcagaactcaaagcaccaaaacagagcattctgtagcaatataagcaaacggaataagaataattatgcacctttaaggaacatgcacccttataagtctgtaccctgatatgaaaatagcagaatgaatttcaagtatgaagaaatacagtaaaagtgtggcctgtagatggagagaaaacagcagcctggaatgtggtttatattcttgattagtttttctcttggtaccacagccaaaactgaatgctctgtacaatgacttggtttaaaaatcaagatgcatacaaagatgctagaggcatttctaatgggtgcccatgaagcacagtctgtgccccagcatcaggaacccatctcctagatgaatgtggcctaggtcaagttgggagtggtggcccaggcctagacaggccacacctgtggtcccatgatgtggaggaagatggagagcaccatgtggacaagcccaggatgggtagcagggaacactttagtggtagaaaggaagagatacaggggacagagatgtagaggtgtggggatgttggtcatcttgggctggttcacacagcctagatgagtatctgatatacacaatttctacatttctagaaccatgatttcaaacacagaaactaacaagtcaaatttccaaattagatttttttttttttactttcaaaacattttctattataagtcagaaggaaaaaagcttactgtatgtgacagtcttcctgaaacctaagagaaagttttaaccaggccctatggcaatgcagaaacactaatacattttacagtgaaaacctactttaacacatctcaaaatgataatcgtataaaactttctagttctaatttgcactctacgtgaaccaatatttttcttttcttaacacatactgctcttctataccaaacacttgccctttaaccttcagataaaaacctcaaataccaaaaaatgcaacaagcttttgaggtgttgggaattgttgggttgttaaaatcccttttattttataataaattatacaggcaatccttgctttttattaccacactggattgcttctgtacacagctaagttgcctgaagcatggaaacttggacttctccatctgacacgttctggaagcctcaaggcacaagctgacagttctgcttctacagaaaaactctcacactgctctcctctcaacagtactgcctgttcccactactccacatgacacctacgagggcactacatcacgtgagggaagcttcttcatgagggcagacaagaggaggcaccacccaggcactgggtctctggccctggcatctattccgagggccaccctggcacagtttctaaattaaggcatatctaaaatgcttttctacctttagtttttatttttgctatatttttgcactctactatatgcatatttaataaaaacaactacaaagtcctttactttaattcctttacataatgataaaacacctagatacccaaaatactacatctatatattcaaatctactaatcatgttacaaatgcatgcagcttatttgggggcttagtctaatttttattttcttaggtccatcaataccatgataatgaacattagatgcaaaatcctaacactttctgccttcagttgtactttcacaggactagtgtgattcagaaataaataacatacatgaataataatagaaataatttatgcaaatgtagaacaacttgaaaaaaaatcccccgcctgtcaggtgctgttcctgggggtagctgatgctataaattccatgtactaactaatatatttactacaggtaataggaaaacaaatgaataaaaagtgaggaactatgatatacatgtgtatatttttgcaaacacaggatcagaatgaaaagatatatcatgcactgtgaggtttaagaaatgtattactgctgggatttgttttattattcagactttaag

SEQ ID NO: 48286 - DNA, 704 bp, Homo sapiens
  misc_feature (1)...(704): n = a,t,c or g
cgctaaggtcattgggaacacgagacatacacccagctgtttgggattcagtgaactgggaattgtccactacttactttactatggcaactctacagcaagattatgctccgttatctagaaaagctcaggagcagattgagaaagaagtcagtgaggccatgatgaagtccctaaaatactgcgatgtggattcagtgtctgctcgacagcccctttgtcagtatcgagctgcaaccatccatcacaggctggcctccatgtaccacagctgtctgaggaatcaggttggtgatgaacaccttaggaaacaacaccgggtgctggcagatcttcattacagcaaggccgcaaagctgtttcagctgctgaaagatgctccctgcgaactgcttagagtacagctagagagagtagcatttgctgaatttcagatgaccagtcagaatagcaatgttggaaagttgaaaacactatctggggctcttgatataatggtgagaactgagcacgcattccagcttatccagaaggagctggaggaggccgaggaacgtgcggatatcgcagaatctcaagtcgaacgaantccgcgctaagactcgagacttcacctccagcaggatggtggtccacgagagtgaagagtgagccagcccttctggagcaggacagaagatatgcaaaatgtatattttcttgat

SEQ ID NO: 48287 - DNA, 1153 bp, Homo sapiens
gctgtgctgatgtaccattaataatttaagccagtggttcttggcaggtgatcccaagacctgcagcttcagcatcacttgagaagttgttaggaatgcatactagtgggccccgcccccagacatagtgaatcagaaaccaacagggaggcgcctagcattgtttttttaacaagtgctgggttattctgatgcacagtctagtttaagaaccactactttgggtaaacgttttgactgtttaaagtttatggcggtgaagtgggcgtcttcaaagactagtacttacacagtttagaagatttcaaggtactgctgacagtagtttattatgtcagtatacatacatgtgtagagatcataatttagttcccttcttaatgttacaatttcttagtttacttttcctaaagggccatagcataaattcttgattcctggtggaaatcttttctgaggtgtgggggtgggcaaggtgtggattgctgtttacgatagtgccttcattagttttagttctgtctgttttcattcattattgactcaaaggtattagaacaggcccttatctttttcctattagatttatttttgttttttactttatgtaagttcagaatccttttttaagtgatgactactgatgaaataatgttactagtagctgaattttagacttgatgctatgttgattaatatttaaatggtgaaagtaattaggcaaaataagcaattctgcttttctgttgctttcagaatttttaggctgtaaaattgtctcaggcaggaagtcagtctatatctctctcaagttcttattgtaggtcatttttttttcaggcacagctctaatttttaaatatttggtataacagcttctggcatgtgacctagttaatgttgaaaattaactgatgaaaacccttgtagatctgctaaacttctctataaattgctagaaatatacagagcaatgagatatagaaaacaccttagcttgttggttattaatagagctctaattttaactgtgaaatcatggagtttctttaaatgttttcctagagtgtttgttatcatgaacattagaaatagcattattccttttcttctaccacatgtcttgaacattcacatgggttaaagaagatgg

SEQ ID NO: 48288 - DNA, 2155 bp, Homo sapiens
ttttttttttttacaagtggcgattttctgtttattgctcaaaaacaagaattcagaagcaaaggtggagagactgtgggttggggagatggcaggaagggggcaaggccttgtcccagctctcccctttgtccttcttcttaccctcctggccggagtcaggcctagggccagggcatctgggaggggggcaccttcgtggccaagggaacagtagagctatcgggggcagtccttgaggggtgccctgggcagtaggggctgcaagatttgcagggaggcagagttcccctcccagaatccaaaagccggtagggcggaggggcaggcccttccgtttgggcaactgagaagaggcggctttgggcggcaggatgctggtttatttactgtaggatctccagggccatcaaagccccctcgtgggatagggagactatttacacagccagggaggagggcagccaggaggcagagaccgggtcccgtatttccctctgcccgaatgaggaggggaggggcgtcctgggtcctgcagctgtagtcttggggttcagatggaaacttcatactcccgcgtatccccagcttcatacagcgggttgctgaagtccgactccacggtgatggggctgtaggagtgggagcccgagaagccgaaaagggactttccctgaagcttggtgtagtagatgtaaacgccactgccgaggacaatgaccaagcctagaggcagcaggatgggccagggccaggttccccccttccagctgccgtgatggatctgtggtctgggtcacttccagttttcggttgtccaggagctcctcataggcaactttgcagagtgggggctggctggtccactgggaggggtggccgggcacacaggtgatggtgacctcgccgataagctcaaagccctcatagcagaagaagcgcagagactcgccccgcctggtagtggtgcttgtacagcgtctggtagccattctcgggaacccccgggttcaaggcacggctcgtacttcaaggcgcatttggggaccctatcgctccacttgggtgtgcctgtgtcccggctgtagcaggtgaagcatggctgccccctcgaggctgtaccctggcaggcagcggtactggacgtgggagccaacggggaagccggcgtccgaggcggtgcggtgcccgttggcaatctcgccagggtcagcacaagtcatgatcttttggcaggcgggcggcgcggcgctccaagacaggtcccactggcaagtgagaatgtcggagcctagcagctcgtagccaggctcgcactggtaggtgagcaccgtgccccggatcaggtccccgtgggatgccgttctccagccccactccggaggtggcagctcggggcacgtgtcgttcctcgggacctctttgaagtgcaatacgaagccctggcccaggcctggatttgggggcccgggcggtgcctgaaactgcagtgtgaggtcgggcccagaggagagaaggcggcggcgcggctgaggtccccgcagctgggcccaagactcgggcgctgggaccgtccccgtcgaacagcgtcagcatgtccccttcccgcaacattcaaatatctcaaacttggaagcaaagatgcgcttctccttccctggaacgtgcaacgccccacacgcagtcttggcccgggctaatagctctggggccagtcgggagaagaggaccacgccagctggttccgacagctcccctccacacatggctttgcaggccggctctgtgtcgttccagtggggttctgtgggatccacacattcgatggcattggggggccccagggggctccagggcatatcctgggaggcacgagaaggttgccagtgccccctgggcgatactcagggtccgtggtagtgacatttccatgtgccaggaagggggcgaagcagcgatcctcctcaaaggcttcaaatcgaaggcttaacagcaggggattggcaggtgtctctgacagcagctccacgtagagggactgggcgtcactgatgagaacccgctcggggacatcgtccatgtccgaatcatagatcacgggggataggggctgccccctgagcgcaccatcagccggtcattgtcctcatccagc

SEQ ID NO: 48289 - DNA, 1587 bp, Homo sapiens
tttttttttttttttttttatattcgtaaacatagcattttattaacaaaatgtttacacccttcttacaacaaaacagtgatttagcatgttatactctataaaagtgtattatagaatattcaagctaaaacaatattatttaaaagtatggcaaatcaactttcatttgcaaactatctactatgagcataggcatgaaaacaaaaatcttacaacaaaaaacaaaaggtctagttttcttttgtcagcatctataaacaatacaggcatcatatggtttacatacacttaggtccagcccaaggttaaggactggcaaaaataaagtcttcaaacatccacagaaggcttgggcaaacccaccactgcagcattccatgacaggtaaccaggccatgtgtcatgcagtaagtccaagggccataaatttgggctgtttataatagtgctacaaagcggggccaaaactgtaagcaactgaattttacttccgtaatagatgcttttataaaaaggcacaaatatcttattcctttcatcaggtcttgagaaggcatgacattcttaggagaaagagagattgctggtaggacggcttagcttttttttttgaaaaatgtctaggctcattgccatagctgtttttcttcaagacttttaatttggacttttacacgcttaacaaatgctttattacaaattcagcgaagttctgaccacttatgttaactatcttattaccaatggtaaaacaaaacaaaacaaaaaaccaaaacccattttgttaactggccgtgttcccacggtaagcgagcgctgctattctctttctgaagcagcggagttcttcacctaacactggcctctgtgtttcttattttatttgttttaatgctctggccggtttttttttctttcaaaaatgttaaattaagagttgtacatgtctttgaggtgcctatgatattttgatacctgtatcgaatgtgtaatggactgaatgagggtaactgggatttccttcacctcgcttatcttttctttgtgttgggaatattcttattcttctagctgttttccaaatatacaatcaattattgttaaatgcagtctccctactgtaaaaaccgaaatgctggaactaatcccttcctatcctaactgtaatttctgtgccccactaaattcaacttctgttccatccccaacccccaggcctgcgcatttctgactgtgcttgttagaaaagccccagctggagggggtgagcagtccctgttgctgtgaccacggaaggccgcaggggaaggcagattacatatgtgaaggaggtgtctgtggccatgtgtctttaagggagagcccacagaaaaatgagcctaagggaaataaagcgagaagtctgcttcaatcacagagacggtaaggtgtaaattcttaagaaggtcagaggaatgattgacaattatgtgagtgactcacaaagtgaaatgatggaaagactgaactgcatgagagttaaaaaaaaaatcttttccagggcaataaagctctgtctacacagcgtaacgaatggtttaaaaa

SEQ ID NO: 48290 - DNA, 1452 bp, Homo sapiens
  misc_feature (1)...(1452): n = a,t,c or g
ttaaggagttcacaagaaactgatctttactcaacaaagttctacacaagtggaatctcacgccacctcggcgccaatccccagcacagcacagtaacaaatggacagacccgggagcccgcaggagagacgagggtgaggagggaaagagggactgtggctcaaggccagtctgggtccacagccctgggtaggggagaaggttgagaagctgaaacttcattgtgcaaaaaacaaccaaaaataaattaaaaaattaaatagtttttttttaaaaaaaaaaaaaaaaaaggaaaacgagaagaaccaggctccccttccctgaaggtgtttgtatccccccatcttgagtagcgaggggttaccaatcccatcagacagccaatccatccacacaccccaagacccagcagaggatgcttcaaagaactggaattaccagaaaattaaaaggtatttttaaaactttttttttttttttttaacaaatggcttccagagacctgctcgagtttcatggggtgggcgtgcagggacacccagctaatttatggaatgtgtactgagtgccccttggaatagatgcagggcctgaccctgactatggaaagacacagggcttggatggagggtctggcgcccaggagggatggatggagcaggccccaggatgcgagactccagtcagactccaaaacacaaggggctccccaaagaagtagaaagcagggaaggaaaaaaagggaaaaaatgctaagggggtctgcaaggcccagttttctggccaactgggaagtaactacacccccaccctctctaggggagccccttccaccttgaccatgttcccagactattccggaaggttctctagaattgctgacccagtctagtaggatctctgggctcactgggtactatgatgagcaggaagtcccaggggagatggaatagggaacaggggacacaccacctttcccttccaccaagccttggttttcctttttgctggcaaaaacctgtgtcctctgtcatcatcaattaaacggcccctgccccaggccttgagttaaaactggggcctgaaacgtgagaagggggtttcagaagcacagagaaacggactgcccctgaagctgcttacagagagagatgctcggggtaggtgccagtagctctggctacacccagctctcttcaggaaaaaggtcccaacccagtgtcttcaaaagccactggagcacacaggaaggagaaacggtgacctctggccagccccagccactccagtggttctcaccctgcgagctaggctaggataaggacggagacaccaccagctgaggctgcaacaaagctggcagggagtgtgtggagtgggtcccaagcatgtgcgtgccgncagggcgactcccaaggtcaccatcctcctnaccccgccccgagatcccg

SEQ ID NO: 48291 - DNA, 1443 bp, Homo sapiens
tttttttttttttttttgacacttaagtattagcattttatttcaagcacttatgctcatccttgagtttaaaaagtctaacaaaatctaagaacccgggttcctttaaacatgtttacctacttgtggagacaccaacaggaaccagcaaaccattgtttatttatttacataatgtatctcccatggagacctatttggcttaccactcttcataggcctaggtacaatctcatagaggcaccctagggatttcactgatcaatacctaatgggcacctaaaagtacctatggcttcttttcttgttccatgaatccgtgaaagtctgcagatcctcccagctctagaagcagtcatgttttttaccaaaatcagcattttgctttatggaaacacaggcaacatctgatagcgaagagggcattaagatttgacttaaccaaaattgcctgacaacgaaaaagtcatttcatcattctgcttggcaatatagtcttcagaaatcaactgtgataaaaagcaggaaataactgttaaaattttagcaactcctaaaaggctggaaggtgggtttaacagtttattaggatttataagtgtcattttaaaaacagtcgatttaaaccatgtagaaataagtatgcaaaaagtctgcaaaacaaaacatactttaaacatgtttaagtagatagattatctgaaattctggatttttcagtcacttcattgttatgctatggcagccaagtaatccttaacttcagttggagtaagcctcctaaatccagcttcattgcagattccaacttctatgttatcctctgtcatttgcccttcaaagctttccctttagggttaagatggctgtatgaatggcatcttcaagttccagatcttcattatatcttttctcaaggaaagtcttcccattcacatagttctttccccattgctgtagctttccaggcaaagtaagctccagatggatctgactgaaataaatatggtcgtccctcattccaaccacaaataagtaaagaaactccaaatggacgaacaccacctgactgagtatattcttgcatcacagaagctactctctgtacccagctgagctgtaggaatgggttcttggtacacaagatagtattgttgagctagttttcgagctctgtgcacaagcactctgtaatcgggggcccatgccactgtacaccaaacctatatgcttggtaattggttctactttgtgtaacacttcgctcatcatacagaatggatttctgttttttctcagttgctaataccacaccatttgcagctttaattcccacggacggggctcctccagctacagcagccaaagcatattcaatctggacaagtttaccagacgggctgaatgtagtcagcgaaaagctgtacccggcggctccgccat

SEQ ID NO: 48292 - DNA, 2078 bp, Homo sapiens
  misc_feature (1)...(2078): n = a,t,c or g
tttttttcgggtttctgcatttgaaacatttatttcaggaaatacattttcaacactttgtcatttatacaaaaagacaaatttctcgggaggcacgtagcaaaaggccattgaggaacagagcctgatgaaacgaacaatttttcaaagtctggttacagagaaggaaagtgaagcatctcaaggctgggatgctgctgcccacccccaccccaccccgccgccaagtgacattgaggctgggcaggccacatggcctgggccctggcgctggccactcatttccttcaaaatcttggttttggcaaaaacatggcaagtcgggcaaagtaaactgtctcgccagtgggggtggtgaggggtccttcctctcttgggtggggagggagtcagacgcccagtgccccaacttccatgcacacacactcacactcatacactccttctcgctgaccttctcctggctgcaagcagccagcccggtgcctgcagatgcacctggtgatgtgtgcacctgagtggagtctcatcaggcccctctttctccccaggagcaagacaggtaacaggaagcaggaagggactttggtcatctgtgccctgcaaagacagcccccatgggtcccctcgtggggacagagggtgaggggccgggccgtgctgccacgaaaccttgctcttcagctgtggactgtgcacccctgacgcccgttctctcctttctaggggttcgttaccatgggctctgaggggaggggcccaggcacgggtagatcaacagagtcaggctcgcctggcctcccacctccccagctcagagagtcagcaaggcctgggcccaggaggggtgagtggcaggggtggctggctgggcattaatgtaactacagcccagtcttgggccaaacccagacactagacagacagacggacacgcatacacatggacacacacacacttccctggtcacttgggcagggcaggcgccgggcagctcacgccactctgaccagcccaagccacggcccacacgtgcccccgccaaccttccttctggcacctttccatggctccctccctcagctcctccaccagactcacttgcttagaccttttcaaaactgggggatgagggggtaggggtcatctctccttcctttttatcctcaatcagatcccagcgcatcagcagcacctgcagcccggtgggggcgggggtggcgtgagagggggatggcagggagatgaagacgcctccctcattccagcctgtccccgcatctggccgagcagtctgcggatggctgagataaaggcactttctgctccaggaggggcagctgccagggggcttggagtggctgggcagtcggtggcaggggacccctgggagttttctacccttaggagcagggcaggggtaggggctgagtgatggccacaccatgtggcgggcagggggtcccaggtgctcctggtggggctgcattctcccctgggctctgacacactccaggggacagggccgatggggatggaggggagcgtgcagcccactgggctcctctgcaagtgcgaggcctggcccccaccccaaggcctccggcactgagaaccccacacagacggatgatctgcacaccgaagctgctcttctgagccctcggggagccaggcctggggacagagggtcatgtcaattcagtgggtgctctcaccccctgcctgtggctccagtgcagcctccccacaacctcggcggaggccgcggcctcatcactgactcactcggagggaggccccttcccttgtttcctggcagcatgtcgaaggggtggggaacgatgacaaatggagaaaatcatataaaataaaatggggtggtgggagggcctgggggggggacggaaatgacttgggggcaggatcccgggggtgggcagggcggcgtctacatctccggggcttctggctccttctccttccacncgttggccatggcgctgctgccctcgttgaggcgcttcacacggtacgcctcgaagtggatgctgctggtgatgtccttgatgttctg

SEQ ID NO: 48293 - DNA, 615 bp, Homo sapiens
gtttcgaaccgtggggtctgggctgctcccgcggagggcctgggcggacgcgggatgctgggggtccgctgcctgctgcggtccgtgcgcttctgttcctccgcccccttctccaagcacaaaccttcagccaaactgagcgtgcgggaccgtctcggggctcagaacgcgagtggtggagcgcattaagatccagggatggattcgttctgtccgatcccagaaggaagtcttgttcctgcatgtaaatgatgggtcatctttggaaagccttcaggttgttgcagattcaggccttgacagtagagaattaacttttgggagttctgtggaagtacaagggcagctgataaaaagtccatccaaaaggcaaaatgtggaactgaaggcagaaaaaattaaagttattggaaattgtgatgccaaggatttccccatcaaatataaagagaggcatcctctggagtacctgcgacaatatcctcactttaggtgtaggactaacgttctgggttctatattgaggattcgcagtgaagcgacagctgctattcattctttctttaaggacaggggctttggacatattcatactccaataatcacatccaatga

SEQ ID NO: 48294 - DNA, 1091 bp, Homo sapiens
aatgagaaaggagagtatgaggtggcagagggaattggttccactgtgtttcgagcgattctggattactataaaacaggaataatccgttgtcctgatggcatatctattcctgaactgagagaagcatgtgactatctttgtatctcttttgaatatagcactattaaatgtagagatctcagtgccctaatgcatgagttatcaaatgatggtgctcgtagacaatttgaattttatctggaagaaatgatcctccctctcatggtaggctagtgcccagagtggggaacgggaatgtcatatagtggtgcttacagatgatgatgtggttgattgggatgaagaatatccacccacagatgggagaagaatattcacaaattatttatagcacaaaattatatagatttttcaagtatattgaaaacagagatgtggccaagtcagttttgaaggagaggggtcttaagaagattagattgggaatagaaggttatcctacctacaaagaaaaagtaaagaaaaggcctggaggcgcgcccagaagtgatctacaactatgtccaaagaccctttattcgaatgtcctggggagaaggaaggaaggaaagagtcggcatgtaggacttttcagtgtgtaaagagtaaatctattcaccaatcttgcagcagctgcagcaggacattccccggggccagctggtagttcatgcatcccacttccacaagttggatggagcttggatattcttccctatccatcccccttctgggcaacagtgacctcgatcctgatgcacagaatccaatgctgtgatgctgatcttccttgaaaccatagcatgctactcttcacagtgacgttgtactctcctcattctgcactgcaagggccactcttcttcattgtgagatgcacataacaatgtttaggatattgcagtgtaggcttttttaaagaccaaaggtagctgaatggtttttttttaaatgagtacaactctagcattttgaagttccagttgtaaatgtatttgtttaccagtaggtttgtgaaattggttctttgtatgggggatggccttttt

SEQ ID NO: 48295 - DNA, 694 bp, Homo sapiens
gtttttaaacaaaaacattttatttcaaagggcagataagtattttgctagacacaactgaaaaaaacagccagagaacaattggagtttgtcttaataaataacaaaatgccatttatgtctcttaaacttcatatgacacaatacacatcttaaataaataacccagtctgttgctatgtattaaaaacagtcccaggtgtggtgtgtgttgtggagcgaagccggttgctgggcttggacccgccaatcccagtgccggtggggagaccgcttcccaaacctctgctgtgcccctgtgcctgagctgaacagcagtgccatggccccggaggcaagccaggaaggccaggggctgggatgacggtgactttggggcgctctgtggctggcaagcctgggtgccctccaaccggaggtgcttcctgcctcctcacccttggcttctcgacaattagtttttaggtcagtccgaaacatcatgggtgctggaaaagcctctggggcgatgtggtgggtctgagctccgtcttggtttccaacctggttgtcggccttcttgatgttgtgtggcgctggctctctgcttctctgctggccggcactgtctggtgggctctggtgtcctgtttttccatgtggcacatacaggttctctgaagccacagccagcgcagtactcgctcactttgat

SEQ ID NO: 48296 - DNA, 454 bp, Homo sapiens
  misc_feature (1)...(454): n = a,t,c or g
atcttagattattatgaaaatccagccatcaaagaggatgtatcaacattaataggtgatgatttggcatcttgcaaagatgagactgatgaaagctcaaaagaagaaactgagcctcaagtgctgaagtttagagtcacatgcaacagggcaggagagaaacattgctttacctcaaatgaggctgcaagagattttgggggtgctgttcaagattattttaagtggaaggccgacatgaccaactttgatgtggaggttcttttgaacatccatgataatgaagtcattgtgggcattgcattgactgaagagagtctccaccgaagaaatatnacacattttgggacctacaactcttagatcaactcttgcctatgggatgctcaggctctgtggatcctctaccttatgatattaatagtcggatccaatgtgtggaactgggcaatac

SEQ ID NO: 48297 - DNA, 2415 bp, Homo sapiens
ttttttttcactaaaatactttcattagtgctcatttattatttatgtagaaaagtttaaaatgctcccaatgagttcatcagttatcaagctcacatgagttaggcccactctcctttggtttttcatctcataataagtcagcaaaagttgacatttatcttactagacatttcccattaggccctaactgaaacagatatcaaacaccctaggattctcttcagtggcaaagtatctgggaggtcacaggcaattttaggaggacaaggctaggtggcaatctaggtaattttcatagtcgcagaaactgaggcctagaagtgatttgtacatgtgagcagctagaaccaggacaagaactccagaacctgggaccacgtgagagtaaaaagaaagggcaccgagtacaggaacaacaactgacacatttcaggtggaaaaaacaagtcacataactgaaaaccaaaatcacagttacataactattttatattagcttcctacatataaagtataaaaactcagctatacatgttatgaaattgtacaaacttacacttgtttatggcctaaaatttgtataaggacacacttatacagatttcataaacaatggccatttttagaaaaagttatatttgtccctgaacataatattcataatttgctttcaaaacaaactcgaagtaaggattggactttaagcttccaagctgatccgcttgtagcaggtctttcacctccggtaagtactcactgagctgaatgccatcttttaaaagtttctgtaagatcttcacaaatatactgtctttagatacttcaattggatcatctttgcccatcagaactggaccagttatctctctgaagagctttgcaaaggatttccagttttagatcatttatatttatatcttcttcctcatcaatatattccaacaagtccaaagctttcttgaaatcatattcattagctcttctattttcttcacagatatatagaccaatgagttgtggtgcagtcaatactggcatcgcactgagatttagctgtttctccgccagcagctgttccagggtaaggggtctccctgatgcaagtaagaaaagcgctccctgcctcaagcccatttccttcaattttttcttgtagcatatcctctgaaaagtctgaagctaatgcagccaatttactcaagccaagaagggttttcttctttgcaaagtaacgagtttccatatttgccaaacccagaagtgttgcatgagccttttctaattcttggctattaatttcatgtaaccagctgagatgttcatgagcttgcaaaaaatttgccaactgtccatgctgagaaatgggctgagataataatttgcctcgctttcctttctccagataccaacggaagagaaagtctgaaaaattctgatcagcaaactgggtcatgtagcgctggagtcggctctggttgtcagtctgctcacacatttgtaccaatatatcaaagtcacagtatttctctgctagagaagcagcccacaggtactggcctagtgaaagaagaggagataagagatctgatcttttctgtaggtattccatctccagattgtcatatctttcccgattactggatttatccacagacttaagctgagaaacataaccatccaggaagcaatcgatgcagggctaccagctgctcggtcacgatgtttcggaggttgctgtctgcctgtggataagccaccttcaggacaatctcatgctggcgtattattaccgttcggatgccaccaggaccacttgttgccgtccatggaacatattcaggttctttttctagtgattcttctcttctatacaaagagtttctattttggcgataatgactagcagcctgcagcatatccttgagaatattgttcacatttgatcaccacttcagcccattcaatggaatccataggtgcatccctcaagacttgctccctcatgctccagtaagcactcacagatggtatctacttgggatacctccctgaaaaagacatctgcaggagtcaggttggatgggatttcatactccctcttgttcaaagcaatcaatatggctgtgttgacaaggtcagaaagccgggagtggtggttcttgagaacaatggcggctgacagcttttcggcatgctcacagagcaacagtcgagtggccatcggtgtccctctaactggaaaactgcctagacgtccaaataagccaacttgatgaataaagtccataagaaaagagtgagctttcatcttgtcttctagctggtgcaaggataatcagtgacgtattgctgaacccaggtgcttcctcagggacagactcagccccccgtgggtcaaatgctgggtagtcc

SEQ ID NO: 48298 - DNA, 1244 bp, Homo sapiens; identical to SEQ ID NO: 5988

SEQ ID NO: 48299 - DNA, 945 bp, Homo sapiens
gccagaagtgcaaggacaagcaggctgctgctaagtgagctggcaccttgtggggctcttgggatgggcgggcacccaagccctggcttgtccttcccagaaggtacccctgaggttggcgtcttcctacgtcccagaagcagcccccaccccacacatgacccacaccgccctcacgtgaagctgggctgagagccctttctcccatccattggaggtcccaggagtgtcacccatggagaggctatgcgacatggctagggctggttctgccatctgagtttggtttcctggaatgaaaaggcattgccatctccattcctctgccctcttgagccagcacaggaaggtgaggccctgggatagcgcgcctgctcagataacacagagctagttagctagtagcaaccgtgttttctccagatctgtctagatacaaaggtcagaaatcttatttttatacttttatattgtggaagaacagcatgcaacactcacatgtagtgtgtggatttacttgaacatgttctttttaacatgtagttatgaaaatctccttttttgcctctactggtgaggaaacatgaggatcagaggccacatttttaattattgttagtgtatttggaagtctgaattggagatgtttgtacctctgtctaaacagttcccttgagaacttccaagcctccggcatcttttcctggtgagtgtttctcctgtgcttggttgtgtataatggagctaactcctaagcggtggggtgaatgtggccgccttagttctgaagctactccagttatgttctgtttcttcaagctgtgatccagaaagatttttgtgcccccagatgcctcttgataggagaggcacatactccaaatagttgggttcttcagggaagctattagaaactcaggtgacttgttagagcactaacttggg

SEQ ID NO: 48300 - DNA, 973 bp, Homo sapiens
ctgtgtaggggtagattttcgctgcagtgttccccgagcctgttagacgcagcgcgccgggagactgagagaggaaaggatagaggaagtgctgccctaggctgcatgagtcgaagcaagcgtgtttccttcccgccaggcaagtgcccttagaaaccgggccccgcccccttcctggcctgcattcccatcccctctcccggggcggaggtgaggacctccttggttcctttggttctgtcagtgagccccttccttggccatgaagctcgtgaggaagaacatcgagaaggacaatgcgggccaggtgaccctggtccccgaggagcctgaggacatgtggcacacttacaacctcgtgcaggtgggcgacagcctgcgcgcctccaccatccgcaaggtacagacagagtcctccacgggcagcgtgggcagcaaccgggtccgcactaccctcactctctgcgtggaggccatcgacttcgactctcaagcctgccagctgcgggttaaggggaccaacatccaagagaatgagtatgtcaagatgggggcttaccacaccatcgagctggagcccaaccgccagttcaccctggccaagaagcagtgggatagtgtggtactggacgcatcgagcaggcctgtgacccagcctggagcgctgatgtggcggctgtggtcatgcaggaaggcctcgcccatatctgcttagtcactcccagcatgaccctcactcgggccaaggtggaggtgaacatccctaggaaaaggaaaggcaattgctctcagcatgaccgggccttggagcggttctatgaacaggtggtccaggctatccagcgccacatacactttgatgttgtaaagtgcatcctggtggccagcccaggatttgtgagggagcagttctgcgactacatgtttcaacaagcagtgaagaccgacaacaaactgctcctgggaaaccggt

SEQ ID NO: 48301 - DNA, 1970 bp, Homo sapiens
tttttttttttttttttttctctttggagtatctttttaatgacttaaacaccagcacggagactcgccatgtaaaccggcctcatttctgtgctctgtgctttgggagggacagggacaccatttcccacctcggctgagttaaaacctgtcttgtaaattaataaataatttcctaacacggcaaaaaaaaaaaaaaaaaatccaaacgagacctagtttccatccagggacaggatatttctggacactcccggtcactgctcctcctaagggcctggccgtggctactgcagggaggatgcagtgagaatggcttccctgctgctgtttgctgctgtctacgctggccaagaacctgctcccgtctgcctgggctgatggagtctcgctcttgacaaaaatcttgctggggcaggtcctctggcagccccagcaccttaccctgagtcacgggaacctgagactttgtccaaacctcggctggaaggctggtcttggcactcgacgtcttagctagtggatttatcgcattaagactggtacttgggcctttttcatgatgacttgggtctcaatccttggagcagctgaaagaacagctcgggccccacctgtggcatgcacccccacaatgaaaatcagaggccccacgtgaggtttgccaaggcagagtggcctgccagttttaactcggggcactatggcaatgcagaccccaaacccaaattgtgcccagttctttgctgggtggcaaaagtgttttccagggctttggtgggtcactccctgatttctgtttggaagcacagttctctctctaaggagaatggaaacttggaaaggcctgtaaaatcggaaagcctgtaaaaggccgtagagtggagatgtataaaaatgtacggtcacccatgttttaggggttgacaccgtggacttttatctcgctcaccaaattcctcacacatacagctcactccctgtgccctcggccatctcaggcaccacaaaatcctcactgcttgaaattcacttatggagtccaacaaacaactttcttaaaaaaaaaaaaaaaaggcagtaaaatctcagaatttctgtgaaagcttgcaacctgcccacttattaaataaacagaacaccaaaccaaccgaaagctatgcaagtggccaggctgcccctggcaaaaccctgcctgtctgccagggactacggtggcacgggagcagggcgcgatcatgctggaagaaatgagaggtggtctcattccctgaatctcaaactctcatctcaggagcccccagtcctaacactgtattccagcggctggagttatctggcccaggtaaagggacgagggaaggcagaccgtcctcaacttcttcctgtgtttctagcagggaaggaaacgcaatggcttcagtccctccgcctctaggtaacaaggcaaaggcctccctaacccaggcagacaggatgtggggaaggtcttgtgtcttttcctaactcagaatgagtgagcgggctcccggagaaagactgtcctcttagcacatgaccccgcaggcttctagcaccaaaggctcgctaacacctccgaccctgtctgcaggtagaggggatgggaggcagaacccttctcctgattggtgcctgaaggaggcaagaacgagcatctgctatgccgcagccggatttcccccatctcagcaggagaggggagaggtgagggtgcaggcgttctgggcaggtcagtgcagttcgatgaacgcctccagatcttccgggatgaagcccttgtaagggatcttgttcttatccagggcctgggctgcaaggcactgcagggtcacatagctgaagggctgcatggtacccctggccagcagcttctcttccagcagcgtgtaggccgtcttcttgaaggcgttggtggcgtccatgtgggcccctgctcatcgtgccgaatt

SEQ ID NO: 48302 - DNA, 709 bp, Homo sapiens
gtagacatgactggcatcagactggaggtgaagttaccatttcagtatatgctaaaaactcacttccagaacttagccgagtagaagcaaatagcacattgttaaatgtgcatattgtatttgaaggagagaaggaatttgatcaaaatgtgaaattatggggtgtgattgatgtaaagcgaagttatgtaactatgactgcaacaaagattgaaatcactatgagaaaagctgaaccgatgcagtgggcaagccttgaactgcctgcagctaaaaagcaggaaaaacaaaaagatgccacaacagattgagtgggagatggaaggaaggctattacattatttccgaatttttaatactgtgtgaagtggtggcttgctgctgtaatcttttgttttgttgttgtgttactgaatgtggcatttcagggttaacattaggttcttaaaagccaaagtcagtttgtctttttgtgcctctcatctttcttttgtgttatgtaagattgattattcatttctccctactggtaggaaccatagttgtgtcctatacttgaagaggctggaaagtagcccataaccataattgcagtatttctttgtatttctctgttaagcaaagaaatattaaggaacattttttttatgtttttgtattattccataattagtaaagcaagatgaaatgtcaaattttaatcagtttt

SEQ ID NO: 48303 - DNA, 1895 bp, Homo sapiens
ttttttttttttttgagaataccagttcatatttaattactactaatcacagtagcactgaacatggctctagtgagtgggcctcagtcagttcaggcagctaaagggagggggatttcctcctagtcctctccctagagctaaatatccatctgggaaaaattaggctctggagcacagaggtatttttctagaggaaaaagaactgaactcccagcactaggtaaaactgcaaaaagaaaaacacctgtgcccaggcacttagctacaaggccacaccagaaaagggaaagctgggtcctggaagcttcaggacaggaactcttccttggtcaagttttccccagcacctagcacataggaaggtgcttgatgagtgagtgttaaatgaacctgtgagtgctcaggatgatttcctgataattgggttcaggaatctactgggaggagcttaaacctagaagttccctttttgaaagtctcaaatatgggttccctaacttagagaagacagatgatgtgggaaggaggcctgaggagaggatgcaggctggcagaagggagcagggtgcatgcgagcccagaccctgacacccttccaagggtggtgactgggtggccactacacagcaccagcctgctgcagagttcaaaactagaaggggttacatgaaagtgttcccaggatgtggagctgccctgggctaagttcagtcacctgccagcctctgccgttcccatcaccacagagcacctcagcaccactcgcctgaggaacgggctctgtgttgcacaggcccatgcctgacggcccacccagaaacacccatctgctgacctctgacctgggaacgagtgagtggctacaacctcagctgaaccccacatggtgacatcttccagcaaggcaaggacatcagcacctcacgcccatttacaggcccctcacatgagccactgctccttctctttgatgaagtgctccgcccagcggcgtgtcagctccaggtacaggctgggctggtgaggcaggtagtccaaatacaggcgggtgggtgtcttcttgggaatggccttctcaatctgggtgccctcgtgccactcattgaaggaggtaatggaaacgatctcgggcctcactgtcagggccgcctgcagggccgtctcaatagtacttgcccattgaccctgttgcgcgtaattgtggttgttcccagggccgaatgctggtgtctatgtagccaggccccacactggggatgaacatgaggttgttggcatcacaaaagttcttcacagctttccagttctgatgggaagaaccaaaggagaaaccattggaggcaaagtaggtgtacatgccgtcaaatccggcggccaggatatcgtgggtgtggccctcctccaccagcagcgctatgaagaccccatcgtagggcgtgttgcggatcgaatggggcccgtttggtgtcaggaggtgggcccaggcctcaggggacgtcaggtatgagtcgtagatataaaagagtgggaggctcttgcccatgctgttcttatagcggtaaaatgcaccatgggagccatacgtgtcaatgatgtacttgatgttgtcatgtacagtgatgtcatcccggcccttgtagggttggatgtggaaggccacctggatgctgtactgatgggcggtgtccagaatggcgggcaccaggtcatctgagggctccccgttatcatcagccatgccaggtgggtaccaggacaggaccaggcaccgatggcggcttccttgagctgggtcatactgtcccgcagcacttcggggtcccgggagctgtagggccccagctccgggtagaagctggagcccaagtcgtctggggggctgtggcggccgc

SEQ ID NO: 48304 - DNA, 990 bp, Homo sapiens
aggccctgagctttgtcctgaaggaaaatgactctggggaggtgaactgggacgccttcagcatgcctgaactacataacttcctacgtatcctgcagcgggaggaggaggagcacctccgccagatcctgcagaagtactcctattgccgccagaagatccaagaggccctgcacgcctgcccccttgggtgacctcttgtacccccaggtggaaggcagacagcaggcagcgccaagtgcgtgccgtgtgagtgtgacagggccagtggggcctgtggaatgagtgtgcatggaggccctcctgtgctgggggaatgagcccagagaacagcgaagtagcttgctccctgtgtccacctgtgggtgtagccaggtatggctctgcacccctctgccctcattactgggccttagtgggccagggctgccctgagaagctgctccaggcctgcagcaggagtggtgcagacagaagtctcctcaatttttgtctcagaagtgaaaatcttggagaccctgcaaacagaacagggtcatgtttgcaggggtgacggccctcatctatgaggaaaggttttggatcttgaatgtggtctcaggatatccttatcagagctaagggtgggtgctcagaataaggcaggcattgaggaagagtcttggtttctctctacagtgccaactcctcacacaccctgaggtcagggagtgctggctcacagtacagcatgtgccttaatgcttcatatgaggaggatgtccctgggccagggtctgtgtgaatgtgggcactggcccaggttcataccttatttgctaatcaaagccagggtctctccctcaggtgttttttatgaagtgcgtgaatgtatgtaatgtgtggtggcctcagctgaatgcctcctgtggggaaaggggttggggtgacagtcatcatcagggcctggggcctgagagaattggctcaataaagatttcaagatcctcc

SEQ ID NO: 48305 - DNA, 1234 bp, Homo sapiens
aaaacttttttttttttttttttttagaagtactctgatttttattgttatacaacatatatatataattgtttccccaaaatatgcacaattacatgtgtcaattttaaaaaatgaatgaagactataatgtaaaacctatagctgtaaaattcctagcacaatacagaagggtgaagcttcatgacaactgggtcgtgggcaataatttgggggacgtaggcatcaacgggatgaggacaacaaaaggcaaggggaatacacatgggtactgaatcagtgtatggaaaaatatccccaaacaggacaaagcagaacatggaatagatatatgcacattgtagtattagtcacaaacatgttacctggaagcaaatgtacccttaaggatgagtagattcagcaaacagggcacgtacaatcactggggatagcattcagccttaaaaataaggaaatcttgaaaagtactacaataaggacaaatcttcaaaacattctgttaagtaaaataagacagtcaaaaaggaaagctgtataattacactcatgtaaaatatttagtcaaactcaaagaaaccaagtgtcatagtctcagcagtgcaccaagatgtaacagtctctcgtagtctgagataacatccagagttctttgttctacctctaaggagattaaggagcgtgaacacaaaggtgaggttggagtgaaagtttaataaggtgaaagaagaaagctctctgccagcagagataggtgtctggaatgggagtatccactgtggggctggggtccagggtttttatggactgggaagggaaggatatgtgcctagttcacaggctgtcttgaaaaacgtgtggctcagcttggcccaggcctttggcccaggaccaatcaggagctgaagggatgattgatagatgctgcttagcttggcccaagacttaccagaagctgaagtgaagtgtggccgaggaccaatcgggctgaggtgatgatacacagcagctggacttacagtcccgttctgagtgcattggatgagaggacttcaacagtaagcttgtatgtgcataggaaattttaaaaaaaccactcgtttatcagaagttcacatttaacgggcttggaaaacggctcagctgctgcctccagttcatcttccgctgtcgaaagcgtttcagaacttaaactctcagattgcctcagtgcgctgctgtagttgtcaattag

SEQ ID NO: 48306 - DNA, 1790 bp, Homo sapiens
ttttttttcatgatatacaaaatgattttattagatgccaaatttttattaacaccattttatttcttttgcagctttaatttttaacattataacatttactggctcctctgggtgactaaatatcttcacatgcccactagctaaaaagaatttctaagtagaactcaactgaaactgcaagctactgctctaagaaatgcatacttatgtttatttgctctcctatataatcctgtttacaaatagcataactgcaaagatttatatgtaatttctaaatccttcaggttgctctaccattcatcttcttatgtctggcaagataaacactcttagtgaacactttgctgcatctcttaaatgagatttgtctccagtttatttcctatagaataagggatgcacttggaactgaaaaattccttcaatttctaaagtttccacattcatacaacttttctcctgtaggagtttgcaggagattcctattgcctatagtctttcccacatttgctacatgtacacagatttttcctagtgtgagtatacttaggtcaattaagggattaatactgacaaaggctttcccacatttattgacttcatatgatttctctacagtataaactctaataaaaaaatctgcatcattgctaaaagtctcccatgttcaccaccttcatacaacttttccccagtatacatttttctgatgttaaataagggaggatctatgaatgaagtttaccgtgataaacactgcttctcttctgtaagatttctcacatgtatagggattcatatgatctaaaggcttttccacacttaccacactattgggtttctctccattatgtactctttgatgggcagtaagattcgagcctttgctaaaagctttcccacactcactacatttatatggcttttctccagtatgaattctctgatgtacagtaaggtttgaactacagctgaaggtcttcccacatttaatacattcgtaaggtttctctccagtatgaatactgtgatgttgaagcagggacgacctatgactaaaggctttcccacatatactgcattcgtagggtttttcttgcgtatgaattcttagatgctgaatgagaagggacacaggactaaaagactttccacagttcatacattcatacggtttctctcccgtgtgagtgctctgatggttagtaagtgatgagccatggctaaaggccttcccacattcaatgcatttgtaaggtttctctccactatggcttatctgatgtcgtgtaagggatgaaccatggctaaaagtcttcccacattcacgacattcatagggcttctctcctgtatgaattctccagtggcgactgaggattgactgtttgccaaaggctttcccacattcactgcatgtatagattttctctctattacaagtctggggaagggtaagagatttgctctggttgaaggctgccccacttttattagaatttaaaagtttctttccaccatttattctctcactttttataactgacttttttgataaattcttctttaatatatcatatttgtgtgaattcccttcagcagaattgttttgtggttcagaaagagtagactttgaatgaaagggtgcttctaaatgtgtcgcattctgtatattccaaattcttattagaatttgaaaattcataactttgttttacaactttttccattgttactgggttggggtgaatcttcatcataaatatccttctttgttctcgcga

SEQ ID NO: 48307 - DNA, 648 bp, Homo sapiens
agcacagtcagtgctgatttcattatttgaactcaataccccagagtttacaatgttattaggagctttaccaaaaacttttcaggatggtgctaccaagcttcttcataatcaccttcgaaacactggcaatggaacccagagttccatggggagtcctttgacaagaccaacaccacgatcaccagctaactggtccagtcctcttacttctcctaccaatacatcacagaatactttatctccaagtgcatttgattatgacacagaaaatatgaactctgaagatatttatagctctcttagaggtgtcactgaagcaatccagaatttcagcttccgtagccaagaagatatgaatgagccattgaaaagggattctaaaaaagatgatggcgattcaatgtgtggtggtcctgggatgtctgacccaagagcaggaggtgatgctactgactcaagtcaaacagctctttgataataaagcttcattgctccattcaatgcctactcactcctctccacgctctcgagactataatccatataactattcagatagcatcagtcccttcaacaagtctgccctcaaggaagccatgtttgatgatgatgctgaccagtttcctgacgatctttccctagatc

SEQ ID NO: 48308 - DNA, 1462 bp, Homo sapiens
ggcacgagggcaatcaaaatgcaaacaaaagtgatagagagagtgtccaaggaaaccctaaacctgcttttgccagagattatgccaggtctaatacagggttatgataattcagagagcagtgttcggaaagcttgtgtcttctgcctggtggctgttcatgcggtaattggtgatgaactaaaaccacatctcagtcaacttactggcagtaaaatgaagctactgaatctttacatcaaacgtgcacaaacaggttctggaggagctgatcccactactgatgtttctggacaaagttagtgaagctcatcacagcgaaccaggtctctcaaaagaaaggacagatagaccaccctcatcaatgaaaggaagttctcaaacacatcctttggaacttactattgtttcccagttttagttttttgtttcgtttcgttttgtattttctgtaacagaggactatcctcagtctgcatgtaacttttatgatagttattccaaattcaaggaggaggcagtattaacatcaactgatcgacacaaagtaatttttaatttaattcatcatttcacatgtttgtactttgtcttcccattaacctttgccagtgttatgattgtataaatttttttaaatgctggttaaacaggaatgcttaaagctttaaaagtttaacagtctaaaacatttttgcttttattcaactgcagaataatatttttattgctactttgagttttgtttcgtatcatgtcctatgctagaaatatttaaatgatgtgaaacaaagcaggactaatttgaactacagctggactccgtttgtgtgatggtgatacatgtcattagttgcaacttctttggggtgatctatagtttgaaaactaaaacctcaaagacagatgttacagaatcagccagttctgtaaaactgatattgtctattggttattgatcttgccatctttatttaaaaccatgtcccttctatgatcccttaagaaagctgcaccaaatcatctgcctgttttttcttgatacttactgaaatagaaggttttattgcagggtttattttggtttgtttatatctttgttgtgaatgatgcttttttgtatttattaatatcaaattcacttatgaataaacttgataatggaaacggacaaaaaaaatcaagtgcgtgtgtgtccttgaccgtcttctgtttctcacgtaataaacaaattatcgagacatgggagtgaccagcaccttttctttaaatggtggaacctggtttccttttaccatgaaattgtcttacttgaaaatattgatcctgatgagagagaagatggtgccaaggctgtctttgtataatgggctcaaattctctacctcttcagggctaatacttttaactgagctgctgcctatagtgtccttttggaaaactacttaaaggggtgattttc

SEQ ID NO: 48309 - DNA, 1778 bp, Homo sapiens
gaaagaagctagagggaggtcaggagaagggtaacagggaggatgcaaagcagacatctaccctggtcaccccaggatcaggatatctgtccttgtttcatgttgaattcaaaaattggatctcacttaggctttgaaggtgacagccatctctgatagctgagcataagtaaagaaaggtggagtgccgatgcagaaaggaaaatattcagctttcctctcttagatcgcactttgaagatggccttttggagacaatctgacaggttaaaacaggaactgttggaattattctagctgtaactacctattggctatgtgttgattggaccctagaaagaaaaaataatttttcattttagatcttgattgaatttaagatgtatttatatgcctacaaaaggtctgtcttgtaactgttgtataaaataaacctaatctatggtttcatttttaatctaaaaaaagttgtgccttaacaatagggcattgtatgttaataagggaaaacaacctttttagtagatgggggaaaataggaactttttgccattaaaacttaagttcttttgatgtttttaatattatagttgggggagattcattaaaattaaattgaaataaaattatttttgcataacctagcatttacaactaaagtatgttttttataagaactggcatcttgatgtatataggtctgaaataatatttcatcttttgatttttaattttaataatattagaccaggatagatcacagttttacaaatcttagttttaaataaattatttcagtgtgctgttagtcctctacagtcattttggtttaaaaagtgactatttatttatggtagcatatcaataatttattaatgttaaaaaatactggtgtatgacattaccaaccagaacagttcctgggggagaggattctaattgattggcagttctgagagggcaagaagaatggaactttatacttcaaaaggaggttttggttttaccaggtactgcttatgtaaatcgtttatttttatttcatcaaagcctgggcaagtatatgcattccaatttaccattggcaaagctttatttatttttaaggttggatgttgaattaattttgtgggaaaatgagatttgtaagtagttttctttctagataagataacataaaccaaactttcagaagttaaggatgatgaataatattgaaatgacttgttatatattgtaagggttcccttaagtatcataattaacaatttgtggaaattgaaaaagcataaactgtgttatttgattagtaatatgttcccttaaaattcattttgaggtgtatgttatacacacagtaaatttttgttcaggaatgacttgctcattctgtgtttttaaaaataggaaataaggcatagtgagtcatcattacatcaattaaccaaaaaatatttcatcccctccgtcactgaaattatctacttcagccacctttcttattctccgtgttaggagggcacgtttatggactttttaatttccatgtgccatattgtccactaccggcagtagccaaacgctagctgtttcagtcccacagaagagacagtgctctgccatgatgacagggcactgctagggctggtttttcttgtttttcccttttgggcagtgtggacttcaggaactagatgtatatgcacaagggattgagtttacactaaaactaaggaaatggagttttcaatctatgttcttgcctcttcatactttta

SEQ ID NO: 48310 - DNA, 552 bp, Homo sapiens
ctctgcggattggggctccagcctgactgacccgacagtgcgggtggcctagggggaggcgctcagagtaggaacccgggggtgcagacgggatctgccggatccccaggctcgtatttttatccaaaagaaggacctggaggaggatgagagcgttactgctgcacacctaaagtcaagggggagaagcccgaggaagattgaccagttttgtaattctagcaacatggtccatggatcagtgacattcagggatgtggccattgacttctctcaggaggagtgggagtgcctgcagcctgatcagaggaccttgtacagggatgtgatgttggagaactacagccacctgatctcactgggaagttccatttctaaaccagatgtaattacgttactagagcaagagaaagagccctggatggttgtaaggaaagaaacaagcagacggtatccagatttggagttaaaatatggacctgagaaagtatctccagaaaatgatacctctgaagtaaatttacccaaacaggttataaagcaaataagtac

SEQ ID NO: 48311 - DNA, 1573 bp, Homo sapiens
tttacaaataaccaaaaaattttatattttcctaccttgaacacatttcttcaaagggttagcttgaaaaatacatgtctaagattacagaatattcaatagttacttttagggttttaacattattttagattttaccacagagtttaccaaaaaaataacaacaaaaaaacctgctaaacatcaaataccacttgtccactgggaacaattcagctttctatcagttgagttggttagatcacattaagttgttatgtatagggtattggaccagaaggcctacaatgagatacagattttacactaagattgaaaaaaatttatcggtaccagctctttttctcttaactttctacactaagagaaaaatacattacttggcctacatcttaaagcattcaaaataggccctctgtaagtttttaacaaattgtatttgtatttaggtctttaagaaacaacctgagatgatggtaagtgtctcattcctcatttgacaaatgaggacaaatcactccttgagaactaaggtcatttcaatccatagcacccctgacctagtgccatgattcaaattcacaactcttgatagctaagactttgactgctccaactagcaaatcacatatagccattccctaactttgtgtttcccaaatctagctgtgaatcagaattaccacaggatgccttagccctacccttgatctactgaagcagaaaattactgccttaattctgtgtgatacaggtcagcctgccttttaatatttggatatctaaagtgagagcataaatgatgaagagaccagtttataggactatttctcacaccgtcatgtaaagttggtatgtgtctttgctccattaaagtatttctgacctcaatcttaaactttgctttgtcaaacaaaatcatgctgatttcaaatccaattagaaaataagtatgtacagtaaaaagtaaacttgggcttcaattaatgaaactttaacagaaacatggctagagaggaatctcctcctataagagaaaaaaatgattcacaacaactgcctactaaatacaactggaagtgcctttccctattttgtaaaatcgaatgaaaaacccacaaaacacatccacagcaatacaggtgaggcaagggtctatattcctttctattacaggtggggtcttttatatgtctcaaacctgaacaaaatacaggtaacaatctaaattcaatcatgacaataaaatactttccattttccaagtctgatggtaataaatatttacattttaaaaaataatttttgttcttttttttgttttttaaaaagacacaacatgctcaagggtacacagaatatggaaaaagtcatcacttcatttgagagatcaactggtaataaaaaacaatgttcttacatattaaccaattcaagagtggtatcaccagggagtctaacatggtgtttacttcaaagatgatattcaagtatgttatttggaacactatttctaatgtatctataaagaagcaagcactgctatctaatttttatagtttttagtatcttc

SEQ ID NO: 48312 - DNA, 869 bp, Homo sapiens
ttttttttttttttgccagaacagagactcaagccaggtttaatgatcattgtctagttttcagagcccagaggctccaagatttgccagcctaggtgtacacaagtgggaggaatggggtcttggacacgggaggcctgcttgctttgtcagcagagctacgaggaagtacagaggtaagaacacacagaaaactggatccatctgctttgctctccccagctggggtgtaccctctcctggcccctttcttgggccccataaatacaaaataataataataataataattacacagattgtagagccctgtcatcctctgtctccagggacacctgcttcctgggagacatgtctggtttatgggtgtggggtagggtaagaggaggtggtgatctctcggccttttcttatacccacacctggcagttttcaacacagggttctagtgcgcttacatatgctgattattcaattctccaattaaaaagctacctttgggttctatcacctgaaaccacgggaagaaacaaatcaaatctcctgggtaaggcagccaggtacatctaccaggtggtctcaaactcaaggccaactagtggatatagtcaggagacttaagagccacagggccttttctcattccctaaactgggtaggaattatgaagaaaacggccctcccagtcctcaggagctccatcacgatgccccagaaggcctgcttcatttaacgctcactttaaagatcttcagagccctagatggtgccaagcggggagactgcagcatggagatgagattttcccagatttcctgatgagtctgaggagggagtcctagttcctatagctccagtaacaaaattcc

SEQ ID NO: 48313 - DNA, 1739 bp, Homo sapiens
ttttttttttttttccttgattcaactgtttactaatcagaaagggcggtatagtcggtcctttttctactgctggcaagtgatttttgtatattttattacaaataaaacaatattgcttgacagcatcatctgtcatcttacaaatatacaactacacagtcctaaagtaatagtatgtctctagaactgagcttttcttaaaaacaaacaataactatactattattaagtcctgcaccctaaatctatacagcagctttaatcaatgtggaaatgaaattatgatttattaatttacataaaattactttatacattaaagaataatttttcaaattgttaaaaaaacaaagtctgaagctgtcattattgggattcgtgggacgtggtttgctcttctatcacctgcttcacaatttctgccagttttagtcgatctactttatctgtgaatccacgaccattccagctgaagctctgcagagtatctcttaggagtttgcattcccggttatacttccaagcctcctgcattacttcattcagtttctcatcttcattctctcctttaccagcctgggggagaatacactgagcaatcacatctcggagtttttccaaggcaacattggaatcctcggctccattctcatggtcgtggatatagacactgtcctttggcttggtgccaagtaacttcctcttccgcagaatggggttgttcactgagtgcaggggtttgaggctgactttcagatcctggattctcatgttggccaactgttccgcgtgagcctgctggattcctgcaaccactgccttgtccatcatcagctgagcagaaggcagcacattatccagggcctcggtggaattgagccaggggtggtccagcactccctcgatggtgagtctctcctccggtttgaccttcaggagcttcctcacaacatctttggccatctctgagatctgactccactcttcctctgggaactcaaaactgcctgtcatgatctttcttcgcatatcctttgggatagtccggctgtggtgtttggagtaaaaaggagggtatccgcacagcatcacatagataatcacccctagggaccacaagtcacagctcttgttgtaagtgtagggcgtcggtgaggtaggtatgatgccagatttctccttctgatgccttctttgcgcctccagtacctggggtgctacataataaggggtgaactggggtgtcatcaagtcaccttggtcaatcttggcaaatccaaagtcacacaacttcactggggcatccaaagagttatccttaaaaagcagattttcaggcttgaggtctctgtgcgcaatgtttaacaagtgacagtgccgcagagccaaagctatctgctttgttacttggctggcttgcttctctgtaaagtgccggtgctggctgattctgtgaaatagctctcccccttccatcatctccattacaattaagagtcgggccctagggctggactcatggggaaactggacactgttagcaaacacttcaataatctgaactatgtttgggtgtgtggcacacatcatgtgcagacgtacctcatttctagcttttggacgatcaagaagaattttcagcgcaaaccgttcttgagtagatttctttacacagactctaactggaccactaattccagctcccagcttctgagtccaattgatactgtattctt

SEQ ID NO: 48314 - DNA, 2264 bp, Homo sapiens
  misc_feature (1)...(2264): n = a,t,c or g
tttttttgaataggtgctaaaatttacttatttacttaaaaaatctcctgcactgaaggaaaatagtataaattacattaccaaccttcaaaagttagcatgtaaagagtattctgtcttcaaaccacagcctctctaaaatagtctgtaaaaaattcataggtgaaaaacaaatctagggacctcaaatgcactgatttataatattcttaaatattaaaaaaggaaagtaaactagcggtgtgggtaagatgaagcaaaatttcagggatttagtacctttaaaatgatcatacaatttctttagaggctnagcagtttaagtagaaataaatactagtacacactagaagagaaggtttaataattgataaaaatgtacaaaaatattcaaatcagaaatgctttagaatgtgtaccacgaagtcaatacttctcagtgagtagggaaggcaaaatacttcctcaatagcagggaaaaaaaagcaagagaaagactgaatttagaaaaaaaagacaactgttaaagaaaatgtttaagtcaactttttttttttttttagacaaggatattgcaactatcacttaaagtctggtggcacattctttagtaggtccttaaggcaatatatttaaattaatttacaatttgatttgatgttaaagtttttttaaacatcacctcaaaatagatgctcaaaataatgccctcacaatagcctttgtaaaatgtattcagatgtttgataaaaaataatggtggctttatattacagtagtgctcattagcaccactataattaagggtctaccaagtttccagcaaaaccacctgtttcttaggagtttcaccataaaagatcacattggctttaaccagttgggtagcgcacaaaaaagcaatttttatcagttgctggtgctttttttgtactactatattatcaaaaaatttttcattagatcttcaaaatccagcttctataaagtaaatcaaatcacctcatgacttagattttagaacaaagtagagacatctgcagttatcagtaaattgccacctttaatccatcctacagtgccctgtgaaagggtcacagaaagacagttatgactgtatgaaaatatgattcttgatacagaatcaaaagttactttcaatttcctttgcttttataaagtccacggataacaatacttaaatgcactttttttttcctgtgatataattaaaacccagtgttatttcagttgaacttaaaatagagtccctggtctgaatcagactttaaatcatactgtaaacatatatttggtataatttattgatcatcatccagttgctccaaaagggttcttctgcgcttttccaattccccttcactcagttcgctgccagaagtatcccaattaccagaatcctttccagtctttttcttaggcgatttgtgttttgattctgatctttgtctagttctgtctttttcactttcccgatctttttcttttttatccttctctcgctcagcatcggattctggagagtcagatttatgtctcctcttcttacttttcttcttatgcttttttgactttttataacttctctcagactctgcactagaagaatgttctgaagcagaacgagactctgatcgctgtctttttttctttgaatggctatcatcatcatctgaatctgaccccgatcgagagcgggaacgtttcctatgatgttttttagatttcttagaatgtttcttgttctttgaatgatgatgctgacattcatgctcaagcacatgcataaaatctttaaatattcgttttctttcagattctagagttatgtcctcaaatgctggctcttttacaaatctctcacggatatcttcccagacagcatccaattctatcggaggagcagcttgttttaacatactcttaaatgcagattcttttcgtttcatcttccgagcctcttctttttctctttcacgttcacggggcttctgccttttctagtaaactattgaaagccaatttgatatttccagcatctaatgtagttgatcttttagttgaactgattatcgccacaaaatcttcaaaagtagtgtttacttcaactacaaatcctttatcctttagaatgtcttttattatcttcttctcgtcatgataacgtgctttaagatcctcaacataaaacttgaaaagatcaagtgcagttgatccaggctgaccaagcatattagtgaatc

SEQ ID NO: 48315 - DNA, 738 bp, Homo sapiens
tcatattcataggtagattctgttaatgtgagttggaaagaaaagaccaatttgtacaccagtcacaccacaagacagtttatcatataaaatacctcaattttttgtattcctcatttccacctcacaattgtactggtgatgaattttaagggtctgtcctttagcttataggtgatgtttcacatctggccagattcttatacctccattgtatacttgaaaaggttcagaattacaggaacagcagtgagaatttggcccactaccacgactcatttgtttcattcacattcctcacgtgcaacaacataattatattttaagaaaatgtaactttgttacatcaaaatatgttgtctagtaaaaagttgatattcagtagaacaaggatcatgtaaataaacatctatttcacatgtacccaaaagcatttaaaaagcagaatccagggcccagagcatgagccagggaggaggatgtttttcttcttttctctatttttccctaaattgtgcaaacataggtgagtctcttaacctttctgtgcctcagtttttctacctctaaaggggtgggatggttcttcaaattgtttctaaaacaccggcactttcagcagtgttctggtggcctgagatgagagcaccgtgttcagaagtgcctgggagtggcacagtggaaactccgcttgcacggaccatggagtctgctcaggaccatgctgtaggacacaca

SEQ ID NO: 48316 - DNA, 1117 bp, Homo sapiens
  misc_feature (1)...(1117): n = a,t,c or g
ctatgctacttgctgtctttgtaacttgaaaaagttactcaactccttttagtatcagtctgtcatgggtaaatgatttgctatgaagaatacagtaaaagttatagaaaatggagagaaaaatcgaatgacctatcagagtatagcaattgtttttggtcccactctattaaaaccagaaaaagagactggtaatatagcagttcatactgtgtaccagaatcagattgtaggaattaattcttctgggaactgagttccatcttcggacgttgattcttactgaaggacaacctgtgggaataggaaggctgggattccatcaggtttccaaatgtttattacacaatgtattttattttttggggcccaggcagtggactctttggattttggcactttttttttgaggggtccagagggggaggggggagagtcgagatgtgtgttaggccctcatatttgctgctttgttgcaagttgatataactgcgtgtaattatgaattcattttatcctgaatgtttgcatttcatactctgaatttcagtaaaaatcaaaacttaaaattctaaccagtcatatacactggataatttggtaagaaaactgtattttttttccctgaaattggataatgtactttcttctcaagattcatgacttgatagaacaatactttcagttatgttgcaaaggctcttgggcattttaaacaaaatgaagtatatccattttgaaacctgtgtatttctttttcggggtttctgcatgcagtggcagtcttaagtgccaaaattcattataaccccaaaataaccccttgatgaaggcttgctgtcttttactgtgttacacagcatccttactggatatcttagttgcttgtttgggcagcacactaatattacttaaaacactgtgatatactggagttttagttagcggaagtcagttcagggcattttagggctgtcttgctatactgaattgtagctaacaatcctaattatatctagtaccatactgagttattgggtatgaccctgtggaaacacacattattttatggtaaatataggggctaaagncttaatgtccccttaggcctgtggta

SEQ ID NO: 48317 - DNA, 998 bp, Homo sapiens
ttttttttttaccaagattcatttttaatggatttgatcgtcgggtgcaaatttgagcattatttacaagagctttctgtagagttatttctgttcaaataaaaccagactctcaaaatacaacataagcctgaacctacttgatttttttttctccctctagttaccaaggaatatcgtatctcagatgcatggcctactatcacactggtctttaaagaaaaaaaaaaatgcatggccacagttccaggcagttcctggtagctggatttagtggatttatatatgacagtacagtacatcatcagtttcacccacagggcagaacttgcctccattcaggcatctctttacaactggcagcaatgcagcattaagggtttttagccaggacctgctgtttgcagtcctgccccttgtagtgttactctgggtgttgcacactccatgattactagaagacaaacacctgaggcatgcaatctgcttggagtgcatctatttacatgaagctgctcacgggagctggtgattcttccagatatgggtttcgtaggttggcaaagagttatcacaccatcagagattttacccaatggaaagagagtagctgaagattatattgcaatgttattgtgaaacatttaactttcttaagtttaaagtgtactatctcctgcagctcaaatataaacaacgatgtatttctttgtagcagtatgtggagtcagaatgcggttttccaatctgatttaatccctgagcagctatgttaaaagttaactttttaaaaaagcccaataaaaaactaaatactgtattaaaactctaccacaatgttacagggataaacttatttctgtacagaaacattaaagctacttagaagctgtttacatcctttgcctctcagaaaaaaaatatacatttccggaaactgttcaggtacttaagctggacataaattaccccaagttttttctttttctttctttctt

SEQ ID NO: 48318 - DNA, 802 bp, Homo sapiens
gagaagatgctgctgtccctggtgctccacacgtactccatgcgctacctgctgcccagcgtcgtgctcctgggcacggcgcccacctacgtgttggcctggggggtctggcggctgctctccgccttcctgcccgcccgcttctaccaagcgctggacgaccggctctactgcgtctaccagagcatggtgctcttcttcttcgagaattacaccggggtccagatattgctatatggagatttgccaaaaaataaagaaaatataatatatttagcaaatcatcaaagcacagttgactggattgttgctgacatcttggccatcaggcagaatgcgctaggacatgtgcgctacgtgctgaaagaagggttaaaatggctgccattgtatgggtgttactttgctcagcatggaggaatctatgtaaagcgcagtgccaaatttaacgagaaagagatgcgaaacaagttgcagagctacgtggacgcaggaactccaatgtatcttgtgatttttccagaaggtacaaggtataatccagagcaaacaaaagtcctttcagctagtcaggcatttgctgcccaacgtggccttgcagtattaaaacatgtgctaacaccacgaataaaggcaactcacgttgcttttgattgcatgaagaattatttagatgcaatttatgatgttacggtggtttatgaagggaaagacgatggagggcagcgaagagagtcaccgaccatgacggaatttctctgcaaagaatgtccaaaaattcatattcacattgatcgtatcg

SEQ ID NO: 48319 - DNA, 1810 bp, Homo sapiens
gtggtggtggggcggcctgagaagatatcatggctgctgccacggagcttaatcgcccgagcagcggtgacaggaacctggagcgaagatgcagacccaacctctcccgagaggtgctctacgaaatctttcgctccctacacaccctggttggacagcttgacctcagagatgatgtggtgaaaattacaatcgattggaacaaggctccagagcctctctggcattccagcctgcattgctctttagtgcacttgaacaacacattttatatttacagccttttttagcaaaacttcagtctccgattaaagaggagaatacaactgctgttgaagagataggaagaacagaaatggggaacaaaaatgaagtaaatgacaaattttccattggcgacctacaagaggaagaaaagcacaaagaaagtgatttaagagatgtgaaaaagacacagatccattttgatccagaagtagttcagataaaggctggaaaagcagaaattgacagacgaatatctgcatttattgaaagaaagcaagctgaaatcaatgaaaacaacgtcagggaattttgcaatgttattgattgtaatcaagaaaatagttgtgcaagaactgatgcgatttttaccccttaccccggatttaaaagtcacgtaaaagtttctagagttgtgaatacatacggaccacagactagacctgaaggaattccagggtcaggtcataaacctaacagcatgcttcgagactgtggtaatcaggctgtagaagaacgactacaaaatattgaggcccacttgcggttacagacaggtggtccagtgccaagagacatttatcagagaattaaaaaacttgaggataaaatccttgaattggaaggcatctctcctgaatattttcagtctgtagcctgtgaacatacatgacacaagccctatgggaaagaagatttcatactcatcacccttctataataggatgaatgagccatctttaggaacctcacttggaatacagtcagctctaagagtgtccttgcaaacaggagaagttgagcacataccttacagaggacatagtacattattcatcaccctcaccatcatgctgggagtacatgcatgagcttttctgggaaaagaagaaaagttcaaccacctcaacagaactattcactgggtggactttgattgagaaaattaggtgccctcaaacaagccctcctcagaaaatcaagagaagcagaatccatggcaacccaccaccttccatgaaaaactcctctcgtccttgtcattttacttttttgtatacatatgtgtaacttacactgttattaattcaacggatatatatttatcaatgtagacttctctgtgaagtcaaggtttattttcacatgagtccagcttgcagcaagtaatcttcaaatattccagtaagttttgaaataatgaatgcattgaaaatagcattgttggaatttattcccttctgttttaaaggaggtattttggaaattgaaaaacttaatttacaagtgctggtacatcttttttcttttgtggaccacaggaaggaagatttattttgatattgatactttaaaaggactttatatttgtaacattgatgttaaccagtttattagtttaaatcagtactttgcatataataagcattcaacaaaaatttattgactgaaatgaattttaaatgcatgtgtatgaacttgtttttcttaatctttaagatgtcagtattcatgtaaataaacaatagatccagctttatccctt

SEQ ID NO: 48320 - DNA, 1572 bp, Homo sapiens
gctgaaagcttttcagaagagctggtagatgaagctctgggtgctgtggctgctgaacttcaggatatgtgcgaagattatgcagaagctgtgttcacctcagaattcttaggaggctgctacataaaggctcttctgagggcgaggccattttgtgtcacactggagaagggatggcaccaccctttgttttggcccacaggaaattttcatcctcagctgtccatccaggcccagaaggtgctgcccactgaaaggaaggcagtgccgggggaggtcatcctcactttgcattttcttttgtcatggcaatggttctggaaatgtatgatgcaatgtatcacacttatcagtgcccaggcaacacaacttgattatggcaatattttcagaatgtgtacttttcctattgaaataccatgttcattcctctggctcagtttggtgatgaaaatgttttgaaagataatcgatacgtatatttcacacaaggattcaggttgctgttgaacccttgctgggcattgataccaacacaagtgcggctactagctggtcccatcacgggggcccctgttttgcatctttggcgatttcctgtcaggacctctggccctactaggctgtagactcagggagagcacagtctggctgtgcttgccaaacctctcctctgctgcagtttattccaaacaggagccccctggctgtcagtgcacaataatagacacacatttcttcaacgttccattcctaggtgattttcacatttttagttcctcagcatattttattgctgtgtgttgacacaatctggtataaaaaactttctctggattcagaggaagtttgaggaatcaggagaggaccaggccttctccagtgcctgggtgaaggtacagacctcgctgtgtctccgatgaggtcagaagtgtctctatttcataccacaaaggaacccaagtgggagtagggaacagatggatggcgcgaagacctctgtgtctccctagagaaaggaagaaacttaagaaccatcatagcctggtcctccaacatcttacagatcatgttttccaagagaaaagcctgtgttttcagaaactctgaattcagaaaaagaaacggaatgtgcgtaagaatcaggccactgcctggaaagactttctctcaattcgtagcctgaggctcagtgaaggaaacatgcagaaagaatgcctgagacgcccccagggaataagggaactctttataacctgtccagtgctgtcatctgggatttttcctctgaagtacaagaatttcaggtgatttaagctgcttgatcacacttatttgtgcaaaattgattttccatttaatgttaatgttttcctgcttaattttatataacttcagaatgtaaagagcttcaaggtaaattacagggtgtttaacctggggagttaaatgtgtacacttgaattaataggagcaccggttgttgctagtataaagtaatttgtgtggcagtttgtactgtgctgagtttttaaaataaacccaatattttaaagtaaaaaaaaaaaaaaa

SEQ ID NO: 48321 - DNA, 5453 bp, Homo sapiens
  misc_feature (1)...(5453): n = a,t,c or g
tttttttttttttctttaaatagttcacatttattattgataacaataaaaaaatcttttaaagactatcagtattgtattaccaagtgaggtaatatgtttacaaaacatttacagaatttgatatgcaaataacaaatttaggaaggaaagtgaattaagacataatagagggagaatcaaagaatcattagtactaagaaatgggaaatgacagcagcgttttaaaagagtggcaaggtactaaaggtagaaacacgatgcaaactgcatactcaaaccatagctgccccagaattcccttacaaggggagtgagattggattactcgggaggaaaccctgtaagcatttgtgcggtcatgtgctttgagctcttcaagatgcactacagtctttgggtataaaagaatgccactcccgaatcaacttaaaaagaacagatcttcagcctgggagggggcaggggatggctgcaattcaaacagttctataaacatctctgggcacatgaggactgttgagtgaagcattttctttggcagctgtcagcaaaatcgccatctgagacacagagaaagagaaagagaaagcagggaccaccttcaggcccttgtgatttgggaacaggaagcaccaggtggaagcagcacagacgcgctactacaccctacctacgaaccctacctacgaaccctacctacgaaccctacctactagccctacctactagccctacctactagccctacctactagccctacctactaaccctacctactagccctacctactagccctacctactagccctacctacgaaccccacctactaaccctacctacgaaccctacctactaaccctacctacgaaccctacctacgaaccctacctactagccctacctactaaccctacctacgaaccctacctactaaccctacctaccagccctacctacgaaccctacctactaaccctacctactagccctacctactagccctacctactaaccctacctactagccctacctacgaaccctacctactagccctacctactaaccctacctaccagccctacctacgaaccctacctactaaccctacctactagccctacctactagccctacctactaaccctacctactagccctacctacgaaccctacctactagccctacctactaaccctacctaccagccctacctacgaaccctacctactaaccctacctactagccctacctactagccctacctactaaccctacctactagccctacctacgaaccctaccgcgctttccggaagcaaaggcttcaggtaccactgaggagctcgatctctaagagcaaacacaaatgtggtccaaaggcaggtgatcacagcacaggccctgggacgtctacagtgtgcaggcagccactagggctgacccgaccgggcaagagggctgctcggtccctcccccgccctcctgatccctgcacggggcacacatggcctccacacagctctccagtcacgcagcacccacacagtgccttcagagcggagctgagacggcacaaccaggatctccatgcctaccacgcacacagttgacagccgcgtggggtttggcatgaaaaacacggcctctgctgcacacagaaacacgtgttgcatgtccttatcgtggaggccatcccctatgcaacttctggacagattctcaaataacctgcttttcccataaaaagctgaaaaaataagggcctgtaccagatagagcaggctttaaaatcaggaattaaacaaaatgtaaaaggcaaacaaatcccatattctgatttgcttctgtgaagattccttcattactcaaactaagtttccactcaccccgtccccccagcacccccaccgtcatgcacacatgcacacacacagcacatgcacacacacacacgcatgagtccacaattcccatgtacaaagaagcaggactcctacatgccacacgccaccctgaagtggatgcgagagctgctgcttagctactaataaaaccccatggacagtgtcaagtggcaaatgcgacttgctggttccaagacggcctcctagtggctggaactgtctgggctctgagacaatgagcctccagagggcacagaggagatggcctacactgggctgggagctgactgcaggtgagaggggcgacgcacggaaggaaacgggaagaacccccccacccaagttcacatacagaaaaatcctgctctaaaaagtatcaaaaagatttgaaaaggaggaaagagaaagtaatgtttaacgatggcagcattttcctggagtcaccaggagtccctgagagcccctcctgagcccccggccccactgcagacagtgggtggtgtgggtgtgtctggccctgggacaaggtactccgcaggcaacctctgaatcctcagaggataaggacctcaagggctggccctaagtccacagaccatcttgactggcgggaagcatgggggccgtgaggcggcgtgcgggccatgaggcagcttgggggaagcgagctggcagcttccgtcccaggtgaggaggggccatctctggaggatgtcacaggaattcattcactaatggacaatgcggagttcgttggaaaaattttttgcatcaatatctgagaccacgtcaatcctttaattggtacagaaactacttttctttcaagagagcccttgcgctctggttggattttgtgcacaacgtatacaaaatctatggctattgagttaagttaggatcagagttaaaactacctgccaaggtagttttgggatcaaacgactacgtttaccatctgagagctatttgctatctagaggtgagaggagtctgtacaatgtcgccgctgggtgggcgggtgcagctgggctgtccgaggaggggcggccgtcccctctgcacactaggtgcaggcagcgcggcactacctggagatcatggagctggagtgggactggctggaggaggtggtggcggcactcagctgggagaagccgctgtggctggactccaggctcgtcatggaacctctgaaatcctccgagccgatcacctcggtgtagtacatcactttacacttgtgcgaagagacctgcagggacgcaagcacgtcgtccacccggggaaggctgctggcggcgcacgcaggcatgctgtggaatttccactgcaggatgtagaagcccggccacctggtcacatgggaaccctgcacgctttctccttctttgcagatcagaggcgactccaccatgctgtagtcgcggcccagctgccagactttgtctatgagctgcacattgttcccacccggagaggtgatgctgtgggctcccagggagtcctttttgggtggttgtggcgacctcttggagtgatagatgttaaacacaatgtcccctttgcacacgtcgaaatcccaagtgatgactgacgaggcatccacaatctgaatgagaatctcatgtggggctcctttgaagacgcttgcagactggtagatggtctcagtccagagcttcaggtcttcgttctccagctcctctgcagtccggtacagagatttggggaccagtccaccctctggcacttcgcacatgcactccccactcaggaaatctggaataatctctttgtcgatgtaatccagcaggcctccaggaccctggtagtcatttcctgcataaatgaggaacttccttctggtgttgtcatcaatgaacggactaaccagcgtccagagcacaggaaataccctgggcgcccgcaggatgagaaggcggcccagtgtctcagggtagttggcctccaccacctcgatgatccgcagcagcgctttcacaccaggtctccacaagtggcgcatgttcagcccttccaagtccaccaggcaggtccatgagctgataggccgaccaaagacttttgtattctcttcgcatcgccttagccgttcttcatttacggagagaacgtatctcagcagggcttcctccccgagcgctctcaccaagcctttggtgtccatctgccccagcctgagcacgtagaggggccgcccatctttgtcgtgatgatgccagcctcccgcgtagtaatcctgaaggacctgaggaggggtccaggtttcaagaatgtagtctacctgatgctgctttctccacgtcaaagactgacacatgatctctctggctttgtcaatattaaaatcccgtgcacggaggaaccgaagaatatgctcatcttttggaattttgcccttgtgggtctcctggagccactggcgaagtctaatgaggcagctctcctgcagcggagtcaaatcgcccaggtatctcttgatgtggtcggcatctagtttgtcgtcaggggtgcccaccacgggctcaggtgcactggggctgctgagggcatcaccactcagcccctccttgagggcagcttctgggatgacgacggccatggacgctgcttgtttcttggaggatgatgaagatgtctctgaagagggcgtgatggaaggcggactccaacggggcacaaaggttatgccttcttcttctaattggcgaaggtagtattcgatgatttcctttccttttttaatgttgctggtatattgtttcattgcaattttttccactgtactttcaaaaccaaagaaagatttaatatctaaacttgcagactgttcaaaacaggtccaatcttcattttcagggtgaacggtgtagcagcaatgctcattaatgatgacccgattggaaaacgtttcattataagcctcaatgtgcaaagtacgttcccgagaattcagtgagtttttctggacaaaataaacataatcaactcctgcaatcttcttcagcagtctgggtgcatctacatccaggcttgcagcgcctttcaatgacatgaatagccccatcttcgctcttgaattcactcacagtgtcactgcccacgaacatcggaatcaaaggacatgtagggaacctcccttncataggcagccataattaattcaaaggggtatttgtacactctcactggggactggtatttttgcaccatgattgcaatgcaacagcaaccctctcacacctgtcttgttgaggataatcattaagaatggtactttatgctgaacatggtgagaggatattcaaacatacaaaactgaatatcctcaaggagcccgaagtctagctcttgtcagaaaggccgggcctgggacacggggtggcgaggggcgctcataccggcggctccgcggggcagtctcggttccactcgtccgcgaccgtagctcgaccgccggttccggggagggggccggggaggcgggagggggaaggggcgcggcgacggcacttg

SEQ ID NO: 48322 - DNA, 2011 bp, Homo sapiens
  misc_feature (1)...(2011): n = a,t,c or g
tataatcagaaacttacagtttattgtgaataaaccactcaactttgagcagatgacattgcctcaattaactttttcgttgaagaaaaacaaagatatatggtaaattcatgaaaatactgtgtcctttctcttccaccctttgtagggcagaaaaattctgcctgacctttcccatcttcctgatgatgttaacaaacgacagccactgagggcacaggagggggctctacacaggccaagagctacaggctacagtctgagcacagaaaaccctccagctccagcatccagggccacagctggacacaagtacagaacctggcagccctgcagcccagacaatgcccagggtgtgatttagggtgcagagctgcaactcagatcctgtgccatggcagtatcacaggaaggacttgacggagaggtgaaggctccagacgccaggatatttattccctgtgccaatacagcattcacacctgacctccaggtcctgcagcaggtactctcctcattcacagttagctccccactgttccattctgggttcatttgctatactcctaatctgttctcccaatccaccccacagtctctcccttgctggggacaacacaggaagagacaaaacctgaggaaggaaaaagggaacctgcaaccagccatggacctcatgatcccatgagtcacagctatcctctgtctttaagaatgactgttttatagcttacatggtacctgggaaattgctgacttgcagctgaaatgtatgaataccaaagaatttctatcacaatattcacagatctctgtatcagctctacttggaggtcaagcaggcttgggagagtatagactgctctgcctgccctagagtggaagcattgaacaaagccacaaaaaccccagagatcacagatctaacttttcaatggcccacaggaccaggttcaggacaggtaggacaccaggcaaaccacttgttcccttgcgcttcattgtgcaaaagctggtctgttcctctggccagaccctccttagtacaggatctcggaccacaaaccaaggagtctcgtggccttggattcccagaccctaggatggtatccctctgacagctggaaccaggcaagggggaacacacctcagcctcagagcagcctctggacactctccaggtaacatgaaaataacttgtgcaaacacagcccccatgccagaaagtccagtgccctaggaagggctatcctgaattctgaccctgatgtttgccaaaggagaatgcagcaagacagtgtcaggtttggccaaatgtgaccctgctcagagctataccacttgaatactggcacaaaagaaaggaccaaggtaaagcaaatttatttgggaggaacaattcccttcaaaagtagatccctatctttaggagacaaaaggcaacactgtgatgaacccacaccccctagtttggggggccacaggccccaaccccattctgctgtgggctctagcctcagtagccagatccaggtaaacctcagtttcaagaataaaggtgagccacagacatgcagcaccaccagagacaacaacaccccgtggcaagaagaccatgttctggactgtctccgtactgccacggtaaggcaggaggcatgctgtgaccccttgtgctccatgcccattgcacaggccagttcaattccctaccatctgccacccatgctcttctttgggactacaactctggccaaacgtgaatatggaaagcagaggcccagggccctcttgcagaacagacattttgaggtgggtaggcagcatatgttacattctaagtaaaacagctagagggtaaaacactccaatgccaatttattttcaaaaagggctctgtgttatcctatagttctcgtgccgaattcttggcctcgagggccaaattccctatagtgagtcgtattaaattcgtaatcatgtcatagctatgganttcagagnttccaat

SEQ ID NO: 48323 - DNA, 980 bp, Homo sapiens
taatttaatacgactcactatagggaatttggccctcgaggccaagaattcggcacgaggaggtggaggttgcagtgagctgagatggcaccactgcaatccaaggtgggtgacagagacgctgtctcaaagaaattgaggtcaggcttccttcttacagaattatttttttctctgtagtttgcctcattttttcacttttttttcaatgagaatcgaagtgtttcttttgggtttttttttcccccttttaaaatcaacaggaaatgtttcaaaggagggatgaaatgcttcttggcttcctcagcacttgggcaaggtagacctcataggcaaccttgaaaaaggactttcctttaagcctcctaggctaaggcactattaagtgccctcttgggtagaggtagagttaagtattgagtgccagtcttgacgtccgtatgcctcagtttttcctcatatataaaaagcagtatacatacctacccttttctacctcatcatttgttgtagggattaaatccgggagagcaattctgaagcctataaatttccttgaagagatctaagaacctattatgctcttggtgtaccaagctctggggtatatattcagaatacctcatgttctggaagctgagcactagctcccctttattgcctgcctggcagagcctgtttgattactgcaggcccttttacccatgcttctagtttaggtattctttctttgatatgaggctcttgaccagaaaagagttctttctctaggtgttctgagagaagtttgtaaatttggatagtacattctatcctgataaaaccaccttgctgtggtcttgatgtacaaaaaaaaattttttttttgagacagagtcttacttctgttcacccagggctgggaatgcagtgggcgcaatcttgggttcactggcaacccccgacctccggggtttcaagcgatcctcctgcctcgacct

SEQ ID NO: 48324 - DNA, 426 bp, Homo sapiens
gctgggagtacttggtcaagcacctgagcaactgggggctgagctggttccgtgtccacttgtctgagacatccacaagaaccacaactagaagatggcaaggcaggaagaaggaaaaggaaatggtcactcttcctcctgccctgacaaaaacttccatggtatgagcttggcttttgccccccaaactaccaaggaatgaaaggccatgacccctgtaaactgggcttaaggttcccatcctgaacctaaccaagatcagcagattccatgctcttccatggatcttccaacaaagagagctccaggtgatgcctgagggacagacatacatcagtcaggaaaggtcttatgactaaggcatttctgatgagggatgtggtatggtaaaggggttttccagcccctataatggaatctccccac

SEQ ID NO: 48325 - DNA, 2814 bp, Homo sapiens
tttttttttgtagggaaaaaaaggtttattttcaaggatttgtgcagacaatggtgaataaaaaattgtatttcaactataaaaaggagctgacttcattccaccctggcctacagggtttatggtgatgccagtttgaatctgaggcaatactgctatccccattcctccacctgtaaaagattcccccagaggaataacattctataacttttagtcaaaaatatgtaagacacatcaaacaaagtaatgagttaaacaagtttctgcttatctgcttagggaaagtcaagaaatgaaacaaatgtatatttgtttctggctgtaaattacctttaccttgtgcactttttgggtacattctggtatgaaaacctctcaaaatgtaacaacacaagagtttgggtcaagacgacccacccaggaggctgtaaaaactggtttgaactagaactgtggaatggaactagtttaaaatatgaagcagctctaaacaccaagcttagagacatttgccctattagaaaacaaaaatcattaaagctacaaaataacaagtgcaaacatgctgaacctgtttcccagggagtgacattcccttctgccaacaggtccccaaactcacaccccacaaggtgtaactctctttcctgttcccactagatttcctttctctcatctcaaaggtcctcagaaatgacaatggaaaaaccgtatgaattgttgaaatttaccctgtggaccaattcctggaggggataacaggccacaactctggagatgattagacatgcagtgtttacttgatgacttttctgtatttctagaaaccctcaaagcattaaactgcctatttcaaaatctaaacttcctagcagcttttattatttggagtaagcagacagaagacaatttactgccacacaggaatcaaccacagctaacttgtccaccattaagttttacggtaatggacaattcaactggaagacccatgtctatgcttgcttataataatttaattttagacctactctttttttttaaatagagaagttctagacatccaacagctgatccttccatagatataagcagggaatggagaagtcttcctgccaaatgctgagccatctaaaatggtctgctcaggagttactaactccatggcaaagtacttcagtatcaattgcaaagttctgttttcttctacttcaggaaacaacctcatttgatttgtggaccctatgaactgtccaaacacactgatgaatatcagcaacttctctcatttgaatttctcatgtccttaaagtaaatagaatttccagagacaactaaagagcaatgcaatatgaagaaaattaaaatttggctaagaaaaataagtaatcaactaaaaattgccataacactcagacttaaacagaaaataagtttgttgtcttttataagatgacaaaacttcaatctaacatcacaagttcttatactagatgaatttactagtatatgaatcaatatactagatttctttcttctaccccaactgcaaatatactaaacaattatttcttcaatagtttctttttcccctagtcgtggcatttaaaactgagtaacagtatttagcactaagtaaatttagaaaatataaaaaggttttacgaaatagcaatagttgattcatttttcatataccatctgatcaagtgaagtctccatttgaggatactggtgaacagaaagattttttcttgtctaagccactgctttctggtctcatcacacagataattctcaaattttatgtaggcccagattttcttggcaaaactctcaagataccagcacataacacagctacttcatctgttctctttttgcaatgagcactatgcctctcttttatgttcccggatgggtacatgaaagataaatttctaaagccaaagaatttcttggcatttcataactgtttcccacccagcatcccctccccaatttgccagatccaaatcaaagagtgaaaagaagtcttgaaaattctctctcttcaaaagaagtctgaacacagcctagttccttccctaatgagcctcagtttgaaaagatcctgatgaggagctgaagaacaaaacaggatgacaggtttttatgaaggaggtatgtaatcttatcaccgaggggtgtaatttatccggacattatatgcactctgccaaggactgatttacacatagatcaaaggaagctggctttctgtagtcccctgaagcataaataatgttcgtgaccatgagttttccccacatatagcaggggccagattgctgttggtgtcattcctggggacccggattgaatttcagctgaactcttccttacactgggttcaggtctccaacaggttcttcatcccccggtcccccttggtttggcaagttgatgacttgggtgctttggaattcatttttataaccaggacgtaaaaggccattacaacacaagcaattgccacagcagcatgcagcctggttccaatcacagcggctttgtaaaacacaccccaaacacccttcttctctgatagcaggccagggttttgagacgagggtactttcttgaagtagggcacaggtgcaaacaaagagcaaaccaaacaccagaatcccatccaaggagtacacgttcgtcatggcggctggccctggacctgggtagggggtccgggttcagtggtaatagcggcggagatgggggagcggcccgcttaacacttcccgatccgggccgaggtgactggaagaagcc

SEQ ID NO: 48326 - DNA, 1922 bp, Homo sapiens
tttttttttttttttcggtttgttgttcagtgtttattaagtagattcagtcttatatatgatatacagattcaaaaggaaaaggattccacatacttatgaaatcagtgcatttagcaagtaataccatggagataacagctcgattaacagctcattggtcttttgttaagtgagggagagagggagtcggcctgtgctagtcattccacaaacaaaacagaatttagtcacatcacgtagagaagacacattctaagaattaaaatattaagccacatttactggtaaaactcactatatagaacacaaataatttttatagagagcattgaggaggaagtcctcacctgcttagaagagccacgttaagttgcataggtgcatatctgtaaaaatataatttagaggtgaagccattaatagagtcacctttaaaagttggtgccatccactgtttgccttaagtgcttactatctggagccatgtgcccctcaccggaggtgggacctcatgaaggagctgcccccagaggaaccctgaagaaatggcttgtactatctgcactgaaagtcttaaatctcatctcagatatggaactcatgctcttccaaaacatgtctaaattatgccagaggactaaagacctcttgggttgtccctaaatcctggatggcttgatcctgaaggcaacatgagtcattctgaccttcccactcccaggctgcccagggaagaactacattcatcccacagctctgccagcaaagtcctgccttcccttttcctctgtccatgcagttacccgaccgagcagccaataagaggtctctcttctgactcctgctcctaaatggaccacataattgaggcatatgggccatctaccaggtggaaagtgtttttcagccaatctgagttctacgtggtataggttttttgttgtatttttaggtggaaaccgtaggtaaaaagtgagaggtttttgtttgtggctttgctaagcagatgagcttagtgaggtgcatcttcctcctcaagagcaagtcttgcagaacacacagggactgggggcatctgtacatgtaaacagtacactttcactgagtccaaaattaggagcaaaaatacaaaggttcacattggtcttaggtagatacaggcgaaaaaggattgagctgtttagctcagaaacaacaaaaacaaagtttctaaagcaccactaaattatataaaaatcagaccatggacggattgaaactggtattctggtgaaatactttactattttgtaaaaagttttacaaaaaattacaaattaaaagtatcaaccctctgagttcaaagcagcattttgaaaatgaactggtagttaatcctgtaaccacccttagagttgtaagtggcccttgggaatagggatggatgggttccacctgtttgaaatcctcgaaaaccctcctaactccctgcctgtccccctccccgtcagcactgtccttgggaataaactgtcctttgtaagagtggtgacggtaaaatgaatttcagatgggttacacacactatcacttgtctacctgatgatccaccactaagaccaatgcccacttctctgatgctacccttcttgtgggattagcctcctgcaaagactctggaattggagtatcctactcttgcatttcctttttaacttaggatcccaaatgatcactttgtgccctgaggcccttcagaagatttttaaatggctgtgggacaagggctttgggagctccttttgggagaaggcagtccctctggtgagggtgagacagcagtgagcttagttcatcagaaccagctctttggtgccctccaagtcgggagtagggggaaggggttgaagctgcatcttttaaaacaaaagcaaaccaag

SEQ ID NO: 48327 - DNA, 747 bp, Homo sapiens
attggctttataaacaggactgaagaaaccagaagcaacaaagtgtgtactcattacatttagagagaacactagaaaaataactgattagttaacatccggttactttaggctgcctttttttgtgctaaggattaaagccgagagaacttcatgatcataccagttgacaatttaatcctgcttatttgagaaattgactctctcttgatttctcaggaagtcagatgacaacttagttttgtcgatggctgttgtaaaacctcggttcttgtctccttagtttaaaagaaattaaacaagagacacacagcaaaggagatgcagcatggagcgatttgttgcaaaagaggcaggatattctgaaagtgacgtgcagaatagacagtacactctgagacaggattcagggcgggctgctcgtgaggatgggacagcattgacttactggggagactcccttgatgacagccttacacggttattcataaggaggcaggaagaggcgctagcagtaagcatgttctgggtggtcttcggggtgcacatgtgcagcagctgtacctgcttgcttgtatgttacatgtctcattaacatctgaaatctccacccgggagtgtgttttttactattataatgagcaaaggttcagtctgaggacaggtaaaatcaaaaatgtgcaccctcttacgggggaaattccttactggagctagtttggcttgagtgaactggactacagtgtg

SEQ ID NO: 48328 - DNA, 831 bp, Homo sapiens
  misc_feature (1)...(831): n = a,t,c or g
cagcggctgcgagaggcggcggcacgacgacggtccctcagcccagccaccatgagcaccaagcagatcacttgcaggtattttatgcatggtgtgtgtcgggaaggaagtcagtgcctattctcacatgacttggcaaacagcaaaccgtccaccatctgcaagtactaccagaagggctactgtgcctatggaactcggtgcagatatgaccacacgaggccctctgctgcagctggaggtgctgtgggcaccatggcccacagtgtgccctccccagctttccacagtcctcaccctccttccgaggtcactgcatccattgtgaaaactaactcacatgaacccggaaagcgtgaaaagagaacattggttcttagagaccgaaatctctctggcatggctgaaaggaagacccagccgagcatggtgagtaatccaggcagctgcagcgacccccagcccagccccgagatgaagccgcattcctacctggatgccatcaggagtggccttgatgacgtggaggccagcagctcctacagcaacgagcagcagctgtgcccctacgcagctgctggggagtgccggtttggggatgcctgtgtctacctgcacggggaggtgtgtgaaatctgtaggctgcaagtcttgcacccattcgacccagagcagaggaaggctcacgaaaagatctgcatgttgacgttcgaacacgagatggaaaaggcctttgccttccaggcaagccaggacaaagtgtgcagtatctgcatggaagtgatcctgggagaaggcctctgcttcttnagaggagattttgggttctct

SEQ ID NO: 48329 - DNA, 704 bp, Homo sapiens
  misc_feature (1)...(704): n = a,t,c or g
tgcacagcccggtagaaagggtttatttatgcgcaacggttcacacaagccttcctgaaattccactttacagtaaataaagctgtgcgtgttccccttcccatgcacaactgcgtatcaatctacaactgtcatttaactgtgaaaaaatagagcgtctccccttttgtcatcgttctgggtaacatttggagtagcatctgacagaacggagctgctcactcctggaccggttatttggttaaaacccaaaatgttaggtcgaaagaatcaatcgtcacccaatacaaataaatattgcgttatgaaagagacgggcagagtcccacggtatccctttttaaagcggcatttccagcacagcagcgtggcgctcacagagaccagcagggcgcagctctgggatgccacatgggacacagctgcaagtacccgtaggcaccgtcccgccgcacgcgtccctccaccgagcgtgaggatgtggcgcagggcacgtgcactccgtctgcgacggggaccggttcgtcctgactgcagaatgaccccgtgttcaaaaacagccgctcccatttgcagaccacatgggccctggctgggctctcaggtccgagggccagcacctgctttggtgaccgcagctgntcggacgcccggcaaggagcgtgatgtgcgcagccncccgaggacgggcttttctgtgctgc

SEQ ID NO: 48330 - DNA, 757 bp, Homo sapiens
aattgttttctgccaaagggaattgtctaacttcagatttctacattgggttcatacttactgttttatatcagaaataaaaaaatagcttctgctttttcatatgaaatcttggtacatcagaaagaattcctgaaaatttataatagaatgaattttattaatgcagaaaaataccccagggtgttaaaatatatgaagtgtgggatatattcttatagtttgtaaaatgtagtcaaccaatactgtcttctaatttggtaatttatttataaaattacttaaacattaggtaattatatttgttaggatttgaaattatttgtagttaaattgtcatgctgtttgaaataattgatacttgtctacgtaatacattttactgtatgttttgaagatggttataatttcactttcaaaatttaaaaaatcaattttaaatgttttaaaaacatatagcttagggatttttttaaaaaaggttttcttagtaaaaacataaatttaaaagcccctgagttctaggagagggcttattgaattgctataagaaagctggagttactttgataagtaataaattataaatagcactgatctataatgctttatttctatcggaaggtactttttcttctttcatcatcagttttagccagttagtaaatgggaatactcagttttagggatttgatttttgtttggtttaattttctttcaaaaattaaaagtatatttctaaaagttttccccagag

SEQ ID NO: 48331 - DNA, 467 bp, Homo sapiens; identical to SEQ ID NO: 6135

SEQ ID NO: 48332 - DNA, 564 bp, Homo sapiens
cactctctgagaggaccggagtggaagatgggtgggttaggggaagggagaagcattaggaggggattaaaatcgatcatcgtggctcccatccctttcccgggaacaggaacacactaccagccagagagaggagaatgacagtttgtcaagacatatttccttttgctttccagagaaatttcattttaatttctaagtaatgatttctgctgttatgaaagcaaagagaaaggatggaggcaaaataaaaaaaaatcacgtttcaagaaatgttaagctcttcttggaacaagccccaccttgctttccttgtgtagggcaaacccgctgtcccccgcgcgcctgggtggtcaggctgagggatttctacctcacactgtgcatttgcacagcagatagaaagacttgtttatattaaacagcttatttatgtatcaatattagttggaaggaccaggcgcagagcctctctctgtgacatgtgactctgtcaattgaagacaggacattaaaagagagcgagagagagaaacagtttcagattactggcacatgtgggat

SEQ ID NO: 48333 - DNA, 480 bp, Homo sapiens
gtcttcacacataggcaagttacagtccttttaaaaagcatctcatttccctataatggaacctaatagccaactttttcatagaaattgctagaagagtttgatcaactataaatcgataaagtgtttataagcatagtcagtgtgacacagaaaccaatcttaaaattgaatttaatgttttatcatatcagattaaatattttctccatgtcttatttttactggcaacaagttagaaagtgggaacactttgattaatgtcttaaaatttgtgggccctcatttggataaaggcagcaatcctaaggactttttttttttttaacataatctgagaatttctctgtagagcagagactttcaaaccttttggctgtaacccacagtaaaaaacgcatttatatcaaaccttagaatatgtttaatgaacaatacttaccattctgatgctttttattggtttcagtttttaaaata

SEQ ID NO: 48334 - DNA, 805 bp, Homo sapiens
ctttaaaaaattcatatagatcagaggttacatggccaagattgaaacttagaggagtatagttacataaaagaaggcaaaacgatgtataaatgaaagaaattgagatggtgcacgatgcacagttgaagtgaacttgcggggtttttcagtatctacgattcatagatctggaattcgcggccgcgtcgacaagacctggtggggcaagtccgtgggcatcatgttgaccgagctggagaaagccttgaactctatcatcgacgtctaccacaagtactccctgataaaggggaatttccatgccgtctacagggatgacctgaagaaattgctagagaccgagtgtcctcagtatatcaggaaaaagggtgcagacgtctggttcaaagagttggatatcaacactgatggtgcagttaacttccaggagttcctcattctggtgataaagatgggcgtggcagcccacaaaaaaagccatgaagaaagccacaaagagtagctgagttactgggcccagaggctgggcccctggacatgtacctgcagaataataaagtcatcaatacctcaaaagtcgacgcggccgcgaattccagatctatgaatcgtagatactgaaaaaccccgcaagttcacttcaactgtgcatcgtgcaccatctcaatttctttcatttatacatcgttttgccttcttttatgtaactatactcctctaagtttcaatcttggccatgtaacctctgatctatagaattttttaaatgactagaattaatgcccatcttttttttggacct

SEQ ID NO: 48335 - DNA, 860 bp, Homo sapiens
cacgacggagacagatgcgaggcggcggtcaggtgccgaacccacggccaggcttccgtggccagcagccctagaggaatggccatcctgtccctgcgagcccctgggccctggcaggcgatgcaggtgggatgctatggaatatgatgagaagctggcccgtttccggcaggcccacctcaaccccttcaacaagcagtctgggccgagacagcatgagcagggccctggggaggaggtcccggacgtcactcctgaagaggccctgcctgagctgccccctggggagccggaattccgctgccctgaacgcgtgatggatctcggcctgtctgaggaccacttctcccgccctgtgggtctgttcctggcctctgacgtccagcagctgcggcaggcgatcgaggagtgcaagcaggtgattctggagctgcccgagcagtcggagaagcagaaggatgccgtggtgcgactcatccacctccggctgaagctccaggagctgaaggaccccaatgaggatgagccaaacatccgagtgctccttgagcaccgcttttacaaggagaagagcaagagcgtcaagcagacctgtgacaagtgtaacaccatcatctgggggctcattcagacctggtacacctgcacaggtgggccgagacccagacgaggagtgaggaatgagagagaccaaagttcctgcctccgctgggctcacattcagatgtgagctatccagtgtggtggccactagccaaacatggccagtcaaagttaaattaactaaatatgcatttcctcgttgtactgtctacattggacagggctgttctggatgagaaattaaactagtgaattac

SEQ ID NO: 48336 - DNA, 453 bp, Homo sapiens
gaaaaactgatcagtcaaatacagccagaggtggaccgagaaagagctgttgtggaagtgaatatccctgtagaatctgaagttaatctgaagctgcagaatataatgatgctacttcgtaaatgttgtaatcatccatatttgattgaatatcctatagaccctgttacacaagaatttaagatcgatgaagaattggtaacaaattctgggaagttcttgattttggatcgaatgctgccagaactaaaaaaaagaggtcacaaggtgctgcttttttcacaaatgacaagcatgttggacattttgatggattactgccatctcagagatttcaacttcagcaggcttgatgggtccatgtcttactcagagagagaaaaaaacatgcacagcttcaacacggatccagaggtgtttatcttcttagtgagtacacgagctggtggcctg

SEQ ID NO: 48337 - DNA, 2456 bp, Homo sapiens
tttttttttttgggggtaggctctttattagacggttattgctgtactacagggtcagagtgcagtgtaagcagtgtcagaggcccgcgttcagcccaagaatgtggattttctctccctattgatcacagtgggtgggtttcttcagaaaagccccagaggcagggaccagtgagctccaaggttagaagtggaactggaaggcttcagtcacatgctgcttccacgcttccaggctgggcagcaaggaggagatgcccatgacgtgccaggtctccccatctgacaccagtgaagtctggtaggacagcagccgcacgcctgcctctgccaggaggccaatcatggtaggcagcattgcagggtcagaggtctgagtccggaataggagcaggggcaggtccctgcggagaggcacttctggcctgaagacagctccattgagcccctgcagtacaggtgtagtgccttggaccaagcccacagcctggtaaggggcgcctgccagggccacggccaggaggcattccccgaagccttgctcccctggtgcagcagggctgtgggaggtggtgacattgaggccagcctctttcaccagcagcttagcgttcaccaagttcacatccgcctgcttggaagcctctttcaggaggccgacaatgactgcggggcttaggcagttcccagcattcttcagggatgttccctgtgttatcacctggatggtccctttgggggacccagcccaggctcgcatcagtgtccccagagcttctgccagaccaatccaaggcttggtgtgtggagagaaggcactggtaagggcctgggcattcacaacccccgtgagagatttccccttcaccatgtccacgaactgaacagcaatttcctccccacagcggctctgagcctccttggtgctggcacccaggtggggacagctgatgacattctcatggtccaccaaggcccggtcccgtggcggctcttccgtaaacacgtccagtgcagccccggcacactggccagactgcagggcccggagcagggcgccttcgtccacgatccctccacgggcacagttcaccacacgcacccccttcttgcactgggcaaaggtgttgtcattcagcaagcctgtcgtggagggcaggagaggagtgtgcacagtgatgaaatcacagagaggccagatctcctccaggggcagctgctgaacaccaaaggaggccgagacctctggggaaatgatggggtcataccctatagtcttcatcccaaaggactgcatccgggtagctacctctctcccaatcctgcccaggccaagaattcccagggtctttccattcagctctgttcccatgaacttcttccgctcccatttgccgtccttcatcgaagccgtcgcctggggaatctgcctggccaggcacatgatcattccacaagtgagttctgcggcactgaggctgttcccattgggggtgttcataaccaagatgcccttccttgttgcggcctccagatccacattgtccacacctgtgccagccctgcccaccacctggagtttctcagctgcgttgatgacatcagcggtcaccttggtggcagagcgaacaataaggccttcacagtcctgcagctccgctatcagctcctctttgctaaggttctgcttttccaccacctgcagccctccctcttgcaagatcttccggcagcaagggtccaggctgtcactgatgagcactttccgcagatttgcaaaagccattgctggagttggcctcggaatcggccgctgtgagtagaagtacctaagccaagaagctgcggttcggcctggcgcgctagagtaactgggcagtattctcgagtttgcatctcagaaaggtttattatcaattgaaggaggtaacatgtagcctttgctggggacaaagatgcaacaagtctctgccccatcctaggtgctgccccgtgtagggctcttcccaggcccgccccccttgggcagcctggtagcgctgggctggcgtggcatcctctggctggatccttcgcggctgctgcgttccgccagggccaatgctcccccgagggcagcgctgcctttgtttctccctcgggtctcgggcacgctcgacgtgggcagagacacggccgcagggtcctggggctcgctcgctagcctctgcccggcacacatggacttgagcatctggaagacggcgaggggggccacgttcagcttcagcaggtccaccaggatcttgaacacgtcggggtcgataccgccgcccgccgcctgagccagctcgtacagctccatctcctcggtgctcagcaccttcttccgccgcagcgccagcttctgccgggccgcctccagccccgggggcgccgccgaccccggcccaggccctacgccctgcgccgccatc

SEQ ID NO: 48338 - DNA, 3138 bp, Homo sapiens
  misc_feature (1)...(3138): n = a,t,c or g
tttgcttgttacgtttcacatgtattggattaaaaaaaaataaaggggagggggagttttcaacgtcattcaggataactattttcctggtataaaaagacattattctcaaacaataactttctaaaaaaaaaatacatcatgcaatcaaagttttaaaaagtttcactgaatgtttcaaacctctgggaacaaatcatgtagtaaccattttgaccagtttttgcctgaataaacgcaaaatcttgcaagtcaacacagatgcaggctttgctgcaaaaagaaccgctgatcagagccaaaaccagtttccaaggagggcacctgccagaaaacaggggcctcagcagagagccagaatgactccgtgtgttggcacaaacttctacgcctttggagtctgtggcagctgcacacccagcagcaccacctctgcccaagcaaaagccagtcctttactggagaaacagggaacatcacggttctttctcctcaattacttttaaagtcccattaaactaaaaagcaacaaaaaaatccagaatcccatgcatctgcagctgtaattaagacttgcaaaatttcacgtcatctaccccttaaagcctgtctgtttcttgcactaataatggaagcacagttttgatacctttgagagttcactctctagctaaaccagccacaaaatatcgcattcccaaacaagaacccaccagagcattacaagaggcgggagaagttaattcagcgcaatatacaattccccacatgttcccaacgttttaacatgctcgcaataagaaaaaaagccggtttctctggattcagatgtggtgaaatcgttttcatcactgtcaaaggcatcaaccagatttgggagtttgttaaaaggttaaaaattcatacaaaacctgctgtaaattaagacaaaggtagattaaaatgcgtcattgtctgtctctttaaataaagtaatgctttccataaaaagcaaaggtgggcttttgccttgatgccgaacaacgctgtctctagaattctgtgcaattctgcacaaaaatacattctctgaaaaaattgttttccacttattgtgaacttcaataggaccaagttcaaaggcaaatcacgataaaaactgccattgtcttaaattctgcaggctaagagtttcagacaagctgcggtgaaaagccacggttgagaaacccagtgaagcacagggacacagcacggacactttgggttttggagttggaggaaattggagtaaaaagttgattttgtgtgcaatacttttagacgctctaggaagacccaaaatcatgaatagccgtaagcagtctgtgaaaaagtcactgtagcctgctgtcgcagagttgcctccgtacccatagcttccatacccagcaccggcattcatgtagcctccatggttggcgccaccaaatcctcgcccgcgccctcgtccccggatgctcccgcctcttccccgccctcgaaggttggggggtgggggcacttcgttgtgcatggggcctccccatgccgaagccagggttatgtggcttagcagcaaatttcggtccccctctgacgggtacctggggctctcttctttttgttggcatcaagggcgagaggggtgtcagggaaaagcttttctagggcagcaagagcagcgtaggccttcgccacctttttgttggaaccagcaccttggaacttctgtccatccacttcgacctccatgacgaagcgcttgtcgtggctgcccccggtctcggagatgagctcgtacttgagcccacgcctcttctcgttcagctccatgactgggttcttgccgtgctttgtcaggatcggcccctgctgttttacgttctcggcagtggcatctgagggaaaggccgcactaggggtggagacagcttctaccactggggcaggggccaccactggctggcttcgcctcggtctcctcagccgagtcctcccccttgctcgagtccctgccttcagcacccgtcggcaagcccatgtcctgtaacaccttaacggccacgtgcagcttggccgtctttttggagggcccagaggcctcgaatgaattgccatcaacctccacagacatggtaaagatgggggcatggacgggcccagtctgggacaccagcttgtactgcagccctggcttcagctggttcaaccgcatcagggcattcatagcctgggggggctctgccttctcctctttcttctgaatcttcttcttctttttgctgggcgacttctcctccccgtcctcctccattgggcgtttcatgggcgtaatggcataggtggtgcttggtgggatctgaacggtgtagtccactgggttttcattctttggtttcttgggcatcttggaaggcagagggtccatgcctaggactttatggagctggccgaaggcagcgagccgcagtgcgtgctgcgcactctgtgtgatatcttcccgttgctgtctgtctagatgcccaatagcatcagtggcttctttttcacaagggtcataaatgccagaaccatctggcatcacgatgcccgacgccaggcactccagcactctccgcagggcctcgccagcacccatcggtctgttggccgtgccaatggatttctcacacaggagctcgagaggccagcctcggaggggaccccaggtgggcacgcgagtgcacaggtccctcaagacccggatcacaatgacacaagacttcagcccgttggctctggcctggaaccacttggcgtgtcggagggacgccaaggcagcaagcatttctgcctgtccagaacgtccggggggtcgttgactgatagcgtttctccagctaatactttctccatttcttctctgacaacaggggatgtcaggtggatggtcagggacaatggaggctcttttgtgttttttatcacaatcgcagcatcgtcgacagattgcagtatttcgtacttgtcttctgttacagcagcaagctggatggccaggttgtcggccaccttgtccaggagggcggttgtgggcttctccttacacagcagcaccagctccagatccaagtcccccttgagtaggagnncctttgc

SEQ ID NO: 48339 - DNA, 3270 bp, Homo sapiens
  misc_feature (1)...(3270): n = a,t,c or g
gtgatctgcaagtcctgggagacgcacagctaagatgcccggacatcctggaagctgggaaatggtgatgtgactcttcttcagcctgcaccctccaaaagaggattgtgatgtatcactggacccagcacctagatgacgtgtgattgtgacacatacctctgctcagaatgtgagcgatttgactctcctgcctgggcccagtacacagatgggattgtgacatatcgctggacccagcatgtagatcatgtgaccctatactcttgccttggtgctgtcgcagagggcattgtgacatatcactggtccctgcacccagggaccattgacatttatggatgtggccatagaattctgtctggaggagtggcaatgcctggacattgcacagcagaatttatataggaatgtgatgttagagaactacagaaacctggtcttcctgggtattgctgtctctaagccagacctgatcacctgtctggagcaagaaaaagagccttgggagcctatgaggagacatgaaatggtagccaaacccccagttatgtgttctcattttacccaagacttttggccagagcagcatataaaagatcctttccaaaaagcgacactgagaagatataaaaactgtgaacataaaaatgtacatttaaaaaaagaccataaaagtgtggatgagtgtaaggtgcacagaggaggttataatggatttaaccaatgtttgccagctacccagagcaaaatatttctatttgataaatgtgtgaaagcctttcataaattttcaaattcaaacagacataagataagccatactgaaaaaaaacttttcaaatgcaaagaatgtggcaaatcattttgcatgcttccacatctagctcaacataaaataattcataccagagtgaatttctgcaaatgtgaaaaatgtggaaaagcttttaactgcccttcaatcatcactaaacataagagaattaatactggagagaaaccctacacatgtgaagaatgtggcaaagtctttaattggtcctcacgccttactacacataaaaaaaattatactagatacaaactctacaaatgtgaagaatgtggcaaagcttttaacaagtcctcaatccttactacccataagataattcgcactggagagaaattctacaaatgtaaagaatgtggcaaaggctttagtatattctcaacccttactaaacataagaaaattcatactggagagaaaccctacaaatgtgaagaatgtggcaaagcctttaactggtcctcaactcttactaaacataagagaattcatactggagagaaaccctacaaatgtgaagaatgtggcaaagcttttaaccagtcctcaacccttactacacataagatagttcatactggagagaaaccctacaaatgtgaagaatgtggtaaagcctttaaacggtcctcaaaccttactaaacataagaaaattcatactaaagagaaaccatacaaatgtgaagaatgtggcaaagcctttagtgtattctcaacccttactaaacataagataattcatactggagagaaaccctacaaatgtgaagaatgtggcaaagcctttaactggccctcaacccttactgaacataagagagttcatactggagagaaaccctacaaatgcaatgaatgtggcaaagcttttaactggtcctcaaaccttactacacataagagaattcatactggagagaagccctacaaatgtgaagaatgtggcaaagcttttaaccggtcctcaaaccttactcgacataagaaaattcatactggagagaaaccatacaaatgtgaagaatgtggcaaagcttttgacaacaccccaaacttttctagacataaaagaaatcatatgggtgagaaatcctagaaatgtgaagaatgtgacaaagcctttaagcggttgtcacacttgattgtatataagataattcatactggagaaaactcccagaagtgtgaagaatgtggcaaaacatttaattaattctcataccttattgcacaggaaagcattcatacttgagaaaaattgtataaatgtgaagaatgtggcaaagcttttacccaatcttcaaaccttactacacataaaaaaattcatactggaggaaaaccctacaaatgtgaagaatgtggcaaagcttttaaccagttctcaactcttactaaacataagataattcacactgaggagaaaccctacaaatgtgaagaatgtggcaaagcctttaagtggtcctcaacccttactaaacataagataattcatactggagagaaaccctacaaatgtgaagaatgtggcaaagcttttaaactgtcctcaaccctttctacacataagattattcatactggagagaaaccctacaaatgtgaaaaatgtggcaaagcttttaaccgaccctcaaaccttattgaacataagaaaattcatactggagagcaaccctacaaatgtgaagaatgtggcaaagcatttaactattcctcacaccttaatacacataagagaattcatactaaagagcaaccctacaaatgtaaagaatgtggcaaagctttcaaccaatattcaaaccttactacacataacaaaattcatactggagagaaactctacaaacctgaaagatgtgacagtgattttgacaacacctcaaactttttcaaacataaaaataaattatactagtgtgaaaccctagaaatgtaaagaatgtgacaaagcctttacatggttgtcacacttgattgtaggtaagataattcatactggagtaaacttctacaagtgtgaagaatgtggcaaaacttttaattaatgctcataccttattgcacaggaaagaatttttacttgagaaaaattgtatatacacaaagaatgtggaaaagccattaatgcctactcacatcttactcaacatcagagagttcatagttaatgaaagcattaaaagtgcaattactgtcaaaaaatctttcagaaaatataagcctttaaagtgaaggaagagtattctgaaggacaaccattacacatataangggggttgtattaccttttacttgccntcacaggtttcattggcacacntttgttactagggggaaaaccctggaggcngtttgctcccgcttttgtttcaaccancgggggtttttgtttggggnggattcngccatgttggtggattttgg

SEQ ID NO: 48340 - DNA, 1826 bp, Homo sapiens
  misc_feature (1)...(1826): n = a,t,c or g
gcgtcgacgcagaggcctccacagacaagcctgtggcagccctgccctccagcctcgagctggagttgctccagaggcagccccagcaggcctccctccacatagaggtggctgggccaattgcccaaacacgtgagacacacagggagctttatgtgttcatcttcctgctttagaacttgctcccggtcttggtttttctgaggaaaagcccacagtggttcccctgcccctcccatacctccctatctgccgtctgtctctttgggccctggtctgacagttttcatctgaggcctcctcgggagcaggagacttaagggttcatcccgaccttagttcacagagcctagctgggtgcatcccagccgcaggggggtgagaagacacccagagatggggggacaatgctcaggtgggggcctcctccgagactctggttgagaggaaagcacatgattcaagcctaccccacaaaaaaggagcacaaaatgctcagaaatggcccttcctccctgcagtgacgtaggacaagggaaagggccacacccattttcaaaagagtggactgaggtgctctgctcaatttggggtctgctttagtgacccagacactcaagtccagatggagactccaggggggtccttctgcccctctggccagcccccacccagcactccccatcaccccatgtaagtgtgtatgccagggctgaggctgcctccaggctcacccactgccccactgcatctttgccccaaataggtctttgtccagtggtactttgttcatgagcagcacaggccatcttgttggacactgtcactttgggccttgccaggtctcacagaatcacatcgctgtatttattgtataatattgtgaatattggaagttttgagtgagtgctgtctagaaggttttggagtgtggatgctggtccaagaaagaagatgtgccctggcctgctggaaagattgtgaattctagagatagagccgttagcatccatctcctccctgtaactcttaggaaatgcatcaaggaccattatagaaagggttcccctgacctaaggatgaaatcgacctagggttaatcatgacagctgcatcagttgtattggatgcaagtcaactctggaggtgagtgcccgcaagcagttcccctgctttgaaagaagatggtcagcccgctgcttcccccagcggccacagctcctttgagtgtggggggtcacagccaggatgtattcctgacaataaggatccttttattttcatttctgcataatgaaagagcctttcgatttattagaagtggtttttcctccctacatctttaaattcttggttctctttagtcctcatcccttgaatggacttgtcagctacctccccaggaggagttcagaagcttctgttggccatcacttgagtagatgacaagctgtaaggtatctgctgctaacgtggctgcttctccgagagcacattgaggtccagacagatccaaaccttggccctaaaaaatgtgtgctgtaaagttacttgatgtatatttattataattatttatggttgcatttaacaaacttttcattcaatctgatgctatttacaccatgctgtgtaaaggaagctcactaaaggaaaaaagtcacaccaataaataaccttcatctaattttgatttaccttaagagttgtgtgatcatctactcttgctgagcaagttcaaaggctggcatgcttggatggctctgatatttaagtgctgccaagtggctnggaattaaagtgtttctaattattntggaaaaaat

SEQ ID NO: 48341 - DNA, 957 bp, Homo sapiens
atttataaaactttaatgagggagaggccctaactcttcctcagctctaccaactactgaaaggaaaagctggtgctggggagccctccacaccactgactgatgaatttcagcacgtcctggcacactgggctgtgggaggtcttgatggccataaggaatttattccagttgtccttgttagcagccttccctggccgcttaaattcaattttgttcctcagaatggggtatcctgtaataaggcagggcagggctcgaacaccagtgctcgctgccactagggaggcctcgtaggcgccacgctcatcccgaggcagaacctgctccagccgctggtccatggagactgtaagcacccagtctcgaacctcttctctctcagcctccggtacatgctgcttagctgggagtggcacctcaaagggaatgtctgtatcctgaaaatcagagtggtcaaggccatctagagtcccttcctcgattgcatcggtcaggtccaaaaagcgattgaggaagatgaatgccatgttatcccagccaactgccttggcagcaatgcctgcttcatagaaggctttgtctacaggtagtagctgggtgtgacgcaagagtgaaacagaaagcctggcagccacggtttccagctgtttgacactctgggctgcagagcgcgtggcatagtaatgagcgatcagcagcatcgtcttgaactcctcatgggctggagagtttgcctcactggacttcaccaggttttcacacaggttgaagaggacatctcgaagatcagcccagctatgataggcctcggcacagttggttccaggagagctcaccatgtcagtgaagatccttttgtagatattgaagttctgtgggttagcaggggctccgtgctgtacatacagggccaatgcctgggcagagctaccctcccggatcaagtgagttgcc

SEQ ID NO: 48342 - DNA, 1254 bp, Homo sapiens
  misc_feature (1)...(1254): n = a,t,c or g
ttttttttttttttttccaggtacaacagcaggttcttttccaattcctcaaagcgctgcatggggtgggggcagagacagaagagaatgtaaacattgggttccaccccctggagctcaagggaagacccttacccagatagggactaactggaggggtggaagggaacaaggtgaaaggtatgggtcctggtgagacaaaagcaggggggcctgagaacacagagcaaggtgggtttggagggagcacagcagggtgcaggaagggagatgggggacatttcctattccagtgcatgtccccttaaataaactgggtacaggagcattatggaaggagaaccaaaggacagaagacaaagcgagcacccccaccccaggccaacgccatcctctgtacacaattacaacacaggtccagaatgagagccctggccaggaagtgggggagacagggagggctgaagacagggaaaaggaagccagctccacctcatggtaaggggagctatggagtgtaagaatctgaaactgctgactcccatcaccaggagtcacccctgggatgacaacgggccattcaggacagcacctaggaggggacccagagggaactggggcaggagcgacagagaccccagctgagcctcatgggagatgagaggctccagactcatttgcagctgcccatctgtcctgcccgtgtagggatcagcagctggcgaggagatggggaaccaagccactttccccagcaagggacagcctgacaaggtgctagggggtggcaccttgggccaggcctgttcttggctgagggaaagaggggggccatgcagtccagccccagggcagaggtcagaagtaagcgtcctgccgggcctcggctgagggcctgtccccaccatcatgggggcctgggggcccatctgcctttcgacgcagcgaaagcttccggccttgagccttcttctcctgcttctgccgctccttctcctgcttctctcgctccttttcctgcttctctcgctctttctcctgcttctgccgctccttctcccgctccttctcctgtttctgccgctccttctcctgtttctgccgctccttctcctgcttccgggtctccttgctggaacccaagggggtgctattgccagtgggtgagggaagggatggatgcagtccctcagcagtgaccacaggccctgggcaggcccagcactgntctgcggacggggggcggcggggacc

SEQ ID NO: 48343 - DNA, 1282 bp, Homo sapiens
ttttttttttttttatggaacaagaattcaatttattctctatttataaaacatttttttaaagtgccttgggtataaaaatctaaatgtctgcggtgtgatcagtcaggagcacgtaactatcactcttcgcatcctttggtcactgggagatcctttgggggctgggaggtccttctgtcccaggctaaaggaaaagcttcacaagggtaagagccacagaaccctcgggcaagaaaggccggtcagggagaatgaatggtacagagaggaaaggaaggaaagggggtggaacagaggtagaaggcaaggaagggatgccgcactggagaccgatggggacactctaattgtgcaagagggaggatcttccttcttgaatgctgaacacagctagtctgaaccttccttggaaagtccagctgtttgcccatgcatagggccaactctccctgcaaagcagcaaatgtggcttctatcaggaaggaaaagtatccatcagtgtgacaagaggtcaccttcgaacttgcatgaactccttgcgcagccacaaagagtcctggtagaagtgaggatcgcctagtcttacggctgtccgtttatagaagtagcagtacaacactgctgctagtctctggaatacaaacagcatttgaagtccatctgtccatatgaagctgttggagttttttcccagcgtaaagtttcatgacccccagaccattgaagggaagattcctgagggccaaagtaccacacttgtccaggatgatggtcccctttgaaactttatggaaataggaggttgacccaggccagccctggaagacgaaggtgttgaaagaacatgaggaaaaatgatgatgatgttgaaagaggactgcaatatccctggatgatgaagagcacaagctggatgacaggagtcttttggagcagttctgagaaggaattgacaaagaggtcataggacagcagcaggaactgcagagagagcaccaggctgtagttactggtctggagcatcttccttctgttttctcgggcccccaagggcacatcccacagttcccagaaaaaccgctcctggctgtctccctaccactgagggagaggcttctagttcctttgaatgagagctgtttcccttgctctaaggcaagcacctagggcagtattcctcacgcttcccaatccacttaaaaacgaggcttccttggcaaacaacaacaaagcataaaacccaagcccaaaacaacagcaccaaaaattctgacttctg

SEQ ID NO: 48344 - DNA, 1192 bp, Homo sapiens
tttttttttggtaaagacttttgtatagttttcctgatgccctaatttgttccatttaatttctataaatattcaaaggacatggaataggatctgttaaatcaactttattaatcccattttaaatatctttcatatgcttatttttctgcttgatcagcaaataatgaactaatcactttcaaactgctagtttctatacattcaattatctgagatttctattggcttttacattgtttgatattatacgttttcaaataaatattcatataaatgtctataggtcttatagttctgttgtaggctacacatgaacagcaaccaaaaagaggaaaaatcttctttgtccccatgctttttccttgaattctgcacttttcatattaacattagcccttgctttgtgatttgcctttgctttattttaccctgtcttaatcttaaccttcccaaatatttccatacagggtgcacctctcctagacaacacacagcggagagtgtgcttcccatgtattcaatcttcgtctcttgaaaggagaggtgccctcattacacttcactgtgacacaggatacccttggttttctgtcacaatgtgtcttgctgctgtctcctctgataagcaccacactttctttcccttctctgcccttagacagcagaaaggtatacatacccatttatagttctgaagctgttcacgtttttaagcttaactttgctattcatttcaagaataaaacttgacatttttacactgagagaaaaattcttgttttattctaaggggagaatctcaatactcaagataaagaaattcacacattttattttctacactcaacagcaacacaatgggaagagtcttggatttcaaatgctattgctcagactgtacatttcctaagaactgacgtgtgcactggctcctaaccacatgcacaacagcgaagtcttgactgtttctaaatgacccgattccattaacagtcctgttacactgcaactgctgttcttggacttattacaggtccatagtctctcaatcacaaatgttgaaaccaaaaaatcccaaacccaattttttttccctaaacttaatgccaaaagtaatttagcaacataactgacctgaactgatgtaaagctatttacagtctcatttgatcccacttagatatatttt

SEQ ID NO: 48345 - DNA, 891 bp, Homo sapiens
ttttttttttttaaaacaaaatacattattttatttcaattccatgattttaaaatgctttttatttttttctttttgccccttttacaggggagacgtaaagctgtcccagttatcaaaaaattcaaatctccttttcttctgtggactggctgtcaatgagctttcatccagggtgtctcccatgttctgggaactacttccagatgttcctgaagcacttcctgggtcaaaggactctgctgcttccaggagctccatatcacttccttctttctcaaaggacttctggaataggtcgtagatcttctgctgctttgggtccttgtagaggtaatcagtggattctgtcatttctgaaaaattggtctcagaaagcccggcttctgccagaactttaatcttctcttgaatcaggggccaaaggtagtcatcagctgtgccctttgccacgaggtagtgaatgcccacggagctggtctgtccaatgcggtgaacgcgggtcctcagcctggatcagcacccctgggttccaaaacagctcagcaaacaccaccaggtcagccgaggagaaggtgaggcccatattggcagcggtgatggacagcacggccacagcatgcctctccgacagttggaactgctggcacaggtcctcccgctcagctgatgaggtggagccatcgatgcggatgtgctgcacgtgctttctctcaagctcttgcgtaattgcgtccaggaccaccttatggtgtgcaaatactaaaaacttctctcttccactttccagtaggtccaagatatattcactgcatttgacaatgacaacaaaacagattaaacatatactccttatgttttatgtgtctctggtatgttactgaaacattc

SEQ ID NO: 48346 - DNA, 1171 bp, Homo sapiens; identical to SEQ ID NO: 6226

SEQ ID NO: 48347 - DNA, 2488 bp, Homo sapiens
tttttttttttaagttgaacagaacattttatttctcagcaattctatgcgtacaaattaaacaatgagatgaatagagactttattgagaaagcaagagaaaattcctatcatcaaccccaaggaggactcaaagtgaggctggaagaggacttagaagagtatgaaagtactctaagattttatctaagttgccttttctgggtgggaaagtttaaccttagtgactaaggacatcacatatgaagaatgtttaagttggaggtggcaacgtgaattgcaaacagggcctgcttcagtgactgtgtgcctgtagtcccagctactcgggagtctgtgtgaggccaggggtgccagcgcaccagctagatgctctgtaacttctaggccccattttcccctctgaaaataagagggttggatcaaacgatctctggggccttagcatctcaaatcctgtggatcctcctacttaccccttagagagccttactgggaagtcagtcattaatgatgtggccagttatttggcaagtggtaagagcctatttaccataaataatactaagaaccaactcaagtcaaaccttaatgccattgttattgtgaattaggattaagtagtaattttcaaaattcacattaacttgattttaaaatcagttttgtgagtcatttaccacaagctaaatgtgtacactatgataaaaacaaccattgtattcctgtttttctaaacagtcctaatttctaacactgtatatatccttcgacatcaatgaactttgttttcttttactccagtaataaagtaggcacagatctgtccacaacaaacttgccctctcatgccttgcctctcaccatgctctgctccaggtcagcccccttttggcctgtttgttttgtcaaaaacctaatctgcttcttgcttttcttggtaatatatatttagggaagatgttgctttgcccacacacgaagcaaagtaaataaagaccacaaatgttcaaattctaagccacttaatagcgttttgtacattaaaaatgacaagggttattatacaagtagccttttaaaaaattctcacacagaacagctttgtatttagacttaaagctgttgctactttgctagtgacgtttgtgttaacagtcagtgctctaggccattgattgattgattgtcagaatcagaagtgactacacaagagcattagccagacttttcagtgagaacaggtaacaggctggcaccagcacttggtacagcacgtggacaggacgacggaacccagagttctctgtctctccttcacagcagatggactcttctataggtggctgttaatttacacaaagttatattccagaatcaggaagccccgctgtcgccaacacttgaaggagaactatgttccagttttggtgttgaacttctcacgaaatacctactaccaaaaattgtgacaccttattagacacttccaaagtaccccccaaaagctgtttaaaagaccattccattttttcctacacaaagtgcatactaaaatttcacaataatcatcttcagatgtacattttatttagtacatttcacagttttcagtattcagtccctcatgaacattttatagtcatctcttcggccctgttgtgaaatatgtgattccagttcaattcagagtgtatgattccgcttttcacgctgatcaagtaaatttatggtgtctcttttctgatcttcaacattaaaaacatctatgtttctgtcattccctgccagggctgcttgcttgtctgtctcagattctgcttcattttcatccatgttgtagtcatcttctcctctcagtttctgctggtttctcccttccccggcagcttcctgctcctcctcctgtccgtcggggatgacaagctggtctcgctcagggccctccatctctggattttcctggctcactgacagggcagcctgcacctgtggggtctggcccagttctccggctcccccgaagcctcttccacctacaggtctgtcttccaccacctgctcccggcctggctcctgcggcagcctgtccctctgaggctcctcattcaccacctggatctcattggtttcctctttctcaacttgtctctttgaatccaaaaccacttcggaactgggggctggtgtctgggacttgctgttaccaagcacgtttcccttcccttgtggcacctctgtgtgtggcaggcctgctgcctgcagcctgggctgaggctcactgagggcttggagctgctgtctctggtcgttgttttcactcaggtctctggaagctacagcttcattcccctttttggtgacctcttctattcgctcctcacactgttccttcacctccttcatctgattgatgcactggctcaggtcgtaggagaacttcctctccaggttggtctggttcttctgaaactggaggacatcctgc

SEQ ID NO: 48348 - DNA, 506 bp, Homo sapiens
ttgatgagacagaagttaccatccaccatgggttggcagctagggctctcggacttcactacactctccaggacaaaaccccacgagaacaaatgtgttcccctggtagctgatctaccacaggacagtaggcagagacaaaagcaagcactgaaatgtcctcggtttacccctttcctgaaggccctgtccaactcttaccaatggaaaggacactgggacactggctccaggctgtacttcctcaagtttctgtgctcctgacactttctggaaatagaaagggtctttaccttcacgtgggtgactcagaactggagaagcccctccatcttgacctgaaatcaaagcccaagacaccaaagccagaagagcagattctaactgacagcttgggggtgccctgggatcactaacagcttgggggtgaagggcacctttaggcccaacaacgttggccagccaaaacaaccaaaacaaccaggaaccacaccattgatttccat

SEQ ID NO: 48349 - DNA, 828 bp, Homo sapiens
tcggcagagctgcatagggctcggcgtagaaagaaaaaaatgtgatggtttaagtaaatgccacacatcttaatacctctatctgaatcttcaactccccatacaaatacataaagctgaacttgcttctataattgagatgggttacacagaaacttactattcccaatgactggataaattatcttggcacaaagaggatctgaagaaagtatcaagtccaagaatatcttactgaagccctttctggtagtaaactggccattgtgggctctgtataatacttaggcatcagaaaacggccacaaccctattacgggtcaagtaataattccttcccaattaataatactacagatgcggttttaattgcatagtcttttagaatcatgaaaaataatgagagccacctcttttcccgaagcccaggtttattctaacggatgccgggctaaggacccagccagcatgagctgtagcgtgacacaaatccagggatcagctgtcccaatctcccacattcctctttcacaatcactcaacaaacaggtcacacatcccctaggtccacgaactcatcttctcgtttggccaaatcgtcttcatctcccaaagctttcccagccactggtgggtaagacgggcttagaggaatgtcgctggagcagagcgagaggaaacaaagacgagaggcgggcagagttcctcagcaggcagggggcctcagcctggggggcctgctggctgtggtgtctctcgtcgatcttctcttgtaaactctggacttcctccatcatttccaagagtttgctcagagtggccacttgg

SEQ ID NO: 48350 - DNA, 1745 bp, Homo sapiens
ttttttttttagtaccacgttggaaatcagattgcttttatttatttatttgatagttaatgatagggagaggggtgatagaacaaatgggtattatcttttcttctttcctataattaattaaaatgaaattatggacctgtacaatttcaatagatatggatggataggataatattattaataatagtttttccaacttaagaccagttttttcaactcactggtgccctaacgtttctgattttgctatcaatcgtgaagaggagtttttaaattatatggttaaagagagaatgacttttggctgaagcatcttattttaaacaaagtaatattgagcttattgataaaataaaggtcagcccaagagtgtgtgggaataaggtacattttgaaagaaaagagaatgaggctttaaaaaaagttgttttctttctttttgttacagctaaaaatttccaatcaccattcacttcaaatataccaccttgattttactttttttactttgctttaggtaatttttatatgaatattctcaataaataattttcgtgtaagcatttattattttgagcattacagtttggaccccaaaatggagtactgtgaattttttgagagatgctagaagaacagaagaaacagtaaacttttaaggcaagacatctttctcctcccactctagcagcaaggagaagaggacatttgctctttaagagccttttaaaagtcacgtggaaaggcaagcactccaaggattttttgattccttttggctttggccaagaaaatgaaattattgagaacagccagcctttcataagatattgctgttggagggactttttggtgggttaaatattataaaatcattgttttctggtcaatacagagcagggagaaaataaaaataattgttggataggagcattttggtgggttttgcacagacttgcatcttgtgtcagaatgtgacatcaaaggctcagtttgatggggtcacttttctaacgtgaccagatgatgtgttaaggcaaaagccaaagtattttctccccctcaggtttttggaaatagaccaaacacatagttctcaaaaccaccttcctttaaccccaacctttgataaagtgcaggtcaactagcttgccctaatcacttctaaactcatcagtggagtatctttccatgtttaagtctccttctggctgcttctctgaattctcattacggagcaagtgtaggaagacccaggaatgcctggaatcatccagtcactgcatgggttcacttcatccatatcttcttttttttcagaatactctttattcctgtcttatttcaaatcctggtgtcatcagggtgatgaagggcacttcttagacactcgacaacatggtggaggtgaagatctgttgtaaaatctgagggatatccttggtatccatggcaacgaaagaccgaccagctggtaaagttctctgaagcctggttgcttgatcacctaaagagccaataaaaatggcaaaagcatttacttgagggtctcttgtgaggatttgagcaaacttagcaggatgtattccatatcgtgacagatttgcatcactcaagactatgacaaagtactcatcagcttcttctttgacaatttccttgatggcatgttctgtcccttctaacgtgtggtccccactcatgcagaactgagagtgggcatgcattgtcttcagaatttc

SEQ ID NO: 48351 - DNA, 2712 bp, Homo sapiens
cctaagctgaaacttaaatagttcccttttcgtggtagtggaattgtttttttttttttttttgagacctggagaagttagtattctacttcttgtgctcaagagctatggaaaaagggaggatttaagttagggtgcgatgggaggaaggaagcagagtggaggaggaaagggaacattaagggccagggagaaagcttttgagatagatgagtcaggtttgtattaaggggaggacaaaggcatgataggacttgtttttaactgctagaattgaattttgaagaatttttttaatggactcacttgtcatggccggttacgttttatctgaatggtagtctcttctcagataacaaagctgggctcagtgtttccttgtccatgcatttttaatgttcctctccaccaccctagagcaccgcaagaactggaaaacacacccctctctgtctgcctgggagagccacggaaattggcacttctctgagtgaagctgaggagaaggctgtaaatctgccaaaacagccttgaagtattcttttgtcatgaggaagtgacggctgctggagggaggtgaacaccacaaggagagatggcatctggcctgggccccgcctagcagcagctccacctcctaggccaggccctgtgggatgcgccactagaccaccatggacggatcccacagcgcagccctgaagctgcagcagctgcctcccacaagtagctccagcgccgtaagcgaggcctccttctcctacaaggaaaacctgattggcgccctcttggcgatcttcgggcacctcgtggtcagcattgcacttaacctccagaagtactgccacatccgcctggcaggctccaaggatccccgggcctatttcaagaccaagacatggtggctgggcctgttcctgatgcttctgggcgagctgggtgtgttcgcctcctacgccttcgcgccgctgtcactcatcgtgcccctcagcgcagtttctgtgatagctagtgccatcataggaatcatattcatcaaggaaaagtggaaaccaaaagactttctgaggcgctacgtcttgtcctttgttggctgcggtttggctgtcgtgggtacctacctgctggtgacattcgcacccaacagtcacgagaagatgacaggcgagaatgtcaccaggcacctcgtgagctggcctttccttttgtacatgctggtggagatcattctgttctgcttgctgctctacttctacaaggagaagaacgccaacaacattgtcgtgattcttctcttggtggcgttacttggctccatgacagtggtgacagtcaaggccgtggctgggatgcttgtcttgtccattcaagggaacctgcagcttgactaccccatcttctacgtgatgttcgtgtgcatggtggcaaccgccgtctatcaggctgcgtttttgagtcaagcttcacagatgtacgactcctctttgattgccagtgtgggctacattctgtccacaaccattgctatcacagcaggtgcaatattttacctggacttcatcggggaggacgtgctgcacatctgcatgtttgcactggggtgcctcattgcattcttgggcgtcttcttaatcacgcgtaacaggaagaagcccattccatttgagccctatatttccatggatgccatgccaggtatgcagaacatgcacgataaagggatgactgtccagcctgaacttaaagcttctttttcctatggggctctggaaaacaatgacaacatttctgagatctacgctcctgccaccctgccagtcatgcaagaagagcacggctccagaagtgcctctggggtcccctaccgagtcctagagcacaccaagaaggaatgagactcgcctccctctatttataactgtcccctccaggctgacagtggttcaaccctgaatcctaaaacttgcctttcaagtctcattttgtttctaactgagaactctatggatgatgatctcaaaaagcctttgtctctgggaaaggatgcgttatcttggtcttggaaatttcaaatgatgagggttgggggatggaagcattattccaggtggacgggatagaatccagcctctgcctggattagcccagggggatttggaaagcctttctaccatccttgaggatggtaactgagcttcctctgacagtgaccaaaggatgctgtatccttcagagctaaggcaagacagagagtctgctgttaattctcaaatccagcgaaaggctggacatctctaaatctcgtcttcctccacctcatgtgcatgcctgatctcaccctgacactcctgatgccgcatctgtgatagcactcgtgttgccttcacatggcaggctgggccaaccctgggtggaaggttctgacatttgtgttttcagaaatgtacatctgccttccagtcatctgtgcccttctagggaagatgtgcttgatatgttcaaattggatctactctgaaaacgaaacttggttttggtcctgtgaggactacttgtttgtccacctcctccaccaaaggaattaggaagttaagagaaggggaagaatatggaggataggagagggtgatgatgctttagcccattaaggaagaaaagttccccttactcttacaaaaggtgattgcaccacttaaaaaaaaaaaaaaaaaa

SEQ ID NO: 48352 - DNA, 556 bp, Homo sapiens
gaatagtggctgctaacctactgggttatatgacaaagactcaagcccactgtaaaatggggccatgatgcataatggttaagtgtaaggaaactaaatccagggtggctaaatttaaatacgctgtgctattgctagctgagcgaccgtgggcaaattactcaacatccatatgcctagtttcctcatatgaaaaacgaagatcataatagtacccacctcattgggttattgtgagggttcaatgtaaagcatgtagaatagtgcctggtacatagtaagtgctcataaatatcagctctaatcatcatgagtctggatcccacattggatgtcatacatggttgaatgaatggaatgcattgaattgtattggattgaaatgaattagagtaaattgaagtgaattaaaattgtgccagctcttgtttgtctgtcactgaaggctcctctctgggccagcaccttaaatggtataagggcttccctccctaagtcctacttgtcactgccatggcccccaggatgacttctctttacctccaagttacatagc

SEQ ID NO: 48353 - DNA, 632 bp, Homo sapiens
cggacgcgtgggctggtacatagtaggggtgtagtagtagtggtttccttttgttcagttgcagggttggggattactttaaggcttagactcaaagcgataggaatgaattgcttggtcagcagaagtgcacactgcacaccagcctcaagggacaaggtcaaccacgacacgtttgcaaagtgtttgtgcggggaagaccactctgatgtttcttacttaaaggcagggtcttccaactttgtctgatacggaatgacttgttacaatcatttcacaggcaagccaacactcaggcttttgactaacttgtctggcgtgtttctcaacaactccattaggaattcactgttagaaatctgatcttttctcctctgttgagctttacttgggcattttattgatttgatatcacttagtagaaacccattcaacaaaaggtatctcttcaggccactagtcaatacagcattttttatttgctgagatttttacttctattttgccccacatcagctggtaagttttataagtaagcaaaaagtaggagctatagacaataaggaagcagaatgaacctctgcaattcatatttatgtatgatttcacttggagtgggaggagatgttttt

SEQ ID NO: 48354 - DNA, 661 bp, Homo sapiens
cggagccggtgggcggtaggcggtgctacgggtagctgggtgctgtccaaaggcgacagggcgtcgttaggggagcgagtcgtgaccggttgggccacactcaacgtgggacgaagcttcgcctactgtttgactacgtgcgtgcagcctcccttcgatgtcggccctcgaaaagagcatgcacctcggccgccttccctctcgcccacctctacccggcagcgggggcagtcagagcggagccaagatgcgaatgggccctggaagaaagcgggacttttcccctgttccttggagtcagtattttgagtccatggaagatgtagaagtagagaatgaaactggcaaggatacttttcgagtctacaagagtggttcagagggtccagtcctgctccttctgcatggaggaggtcattctgccctttcttgggctgtgttcacggcagcgattattagtagagttcagtgtaggattgtagctttggatctgcgaagtcatggtgaaacaaaggtcatgaatcctgaagatctgtctgcagaaacaatggcaaaagacgttggcaatgtggttgaagccatgtatggggaccttccttctccaattatgctgattggacatagcatgggtggtgctattgcagtccacacagcatcatcc

SEQ ID NO: 48355 - DNA, 884 bp, Homo sapiens
cagtgcccatttttcatccagggagaacctcggggctgggacacctcctggccctcaccctgggtcatgtttacagtcctcagtgccccacaccggtggccccctgaggacacctccaccctgaccttgattttcccaaacgctgcctcttggtgacagactcagcccaaaaccccttccttctgtctctggagacccttgagcttggggaaatatggaggggtgtgtgtctgcaatcaaggcctctgcagctcacggctggcccggtgggctgggacttccgtctgaattttaaatacttagggttcatttttttttctctggcaacaaagcttgatgttttcactgctttagtttcctgtttgctggtgggaggggatacggtctgtgactctggacttgctctgggggaacagttgtcactgcccccggggagaggggcagcttgggctggagaagcacagccagagacagagcccctcgagagggatccttggctgcttcattgtcttccccccaagcaagccctgctctccaacaggcacctctggggtcttggtatggtccccgctcacctccttccagagtcctgagtggtgtgggtgtgggtggcacaggatctggggcatgggaggggttcagagcttcccagagccccgtgtcctggcagactcagctggtgggctggggtgttaaccccagtcctggcgtaggtttacagactctcaaggtacgttggccctggtctcctgggagagaggggtgagggatgtcccctaccaaagcacaaggtgggatcaggctgcctcctgggttgggtgtcgggggagctgtccggcagcctggcagggagatgcaagggctaaagtaaaattttgtcaagt

SEQ ID NO: 48356 - DNA, 431 bp, Homo sapiens
  misc_feature (1)...(431): n = a,t,c or g
ggcacgagggagctcccgctgctcagacagatagacctggtttcctgtaagattgacaaccagactgccaagctcctcacctccagcttcacgagctgccctgccctggaagtaatcttgctgtcctggaatctcctcggggatgaggcagctgcgangctggcccaggtgctgccgcagatgggcggctgaagagagtggacctggagaagaatcagatcacagcttttgggggcctggctcctggctgaaggactggcccaggggtctagcatccaaagtcatccgccttctggaataaccccattccctgcgacaatggcccagcacctgaagaagccaggaanccaaggttggactttgccttcttttgacaaccagccccaaggcccttgggtaacttgattggncccctcaagacctttggaatc

SEQ ID NO: 48357 - DNA, 809 bp, Homo sapiens
aaggaaaccgctcccgagcacggcggcggcgtcgtctcccggcagtgcagctgccgcttaccgccgccctctgcccgccggcccgtctgtctacccccagcatgagcggccctgcgcgttctacagcacgtacggtcaccggctcccgcgaacatcaagtcccagcagagcgagggtgacccgaatcctggatgggaagcgcatccaataccagctagtggacatctcccaggacaacgccctgagggatgagatgcgagccttggcaggcaaccccaaggccaccccaccccagattgtcaacggggaccagtactgtggggactatgagctcttcgtggaggctgtggaacaaaacacgctgcaggagttcctgaaagctggcttgagtcaagcctgtccagagttcccctgctggactccatcaccacactccccccagccttcacctggccatgaaggaccttttgaccaactccctgtcattcctaacctaacctgagagtccctcccccaatgcaggccacttctcctccctcctctctaaatgtagtcccctctcctccatctaaaggcaacattccttacccattagtctcagaaattgtcttaagcaacagccccaaatgctggctgcccccagccaagcattggggccgccatcctgcctggcactggctgatgggcacctctgttggttccatcagccagagctctgccaaaggccccgcagtccctctcccaggaggaccctagaggcaattaaatgatgtcctgttccattggcaaaaaaaaaaaaaaaaagtatt

SEQ ID NO: 48358 - DNA, 1005 bp, Homo sapiens
  misc_feature (1)...(1005): n = a,t,c or g
tggtcattatctgttgctacttttatatgtttgttcatgggctcccactgtttataaagtctatcttttcctgggaaaaaatccttatgcacaaggcttcggtctaccagcccctcttctcccaccccagtgacgacctcccttaaccgtgtttcttgttgatcttacagatagggacactgagacctgatgcagtccacagcagagttctggaggccccagacgcaatccccaggtgtcttggtcttccaccgtcccagccctctcgtgttaagatcataagacacacggttcttgatatacacatgataggggtcactacgcttgtccactttgcgggacggggtgtatcccaggatgaggctgcccacagttacagcaaatagaaacatgacaaagagaatgtacatgtaggagttgtcatcacggccaggtaggctggcccgcctctcttcagtctggttgtctggccccagccctggccctggccggcagagcaaattgctgtgaagagtggcatttagagccttcagcacggcatgcaggctctcataccaggtctccgttccattggtagtctccatagcaacagggattgaggtgggggaagactcggtagaagctcagactgctggcaaatccactggctctcagtcagtttcaggagtccctttgtggacacactaaggctcctccacccccgagcctcttcaggatgtctctggacacatctgggatctcagtattgacttcggagctgggaaagcccagagctgcctctcagnaaggctccgggggggccgtttgntcgntggaaggggggcctcttaaccagggtggccaagcgttgggacctgtnatcccnccgnggggggnatcagtgggntacggnngggggggggggggggnnnnnnnncnnnnnnnggnnnnnnnnnnnnnnnnnnnnnnnnnnnnnnnnnnnnnnnnnnnnnnnnnnnnnnnnnnnnnnnnnnnnnnnnnnnnccc

SEQ ID NO: 48359 - DNA, 1612 bp, Homo sapiens
ccaacttggtgtaacttaagctttcatttaactaaaacattcttttcttgcaaaacttatttttcatgatcatttttggttatttattatacttgattccaaaatagtacagccttgaatctataaaactgtgcagtcattatgccagaaattatcttaaatatataatgggtcaccttgctgttcaaagggtggtgcaaggtcctgcagcatcttacatctgtagcttgttagaaatgtaaactctcaggccccacaacttacttcctgcattttaacaagatccccaagggatatgtatgctcataaaaatttgagacactggtttaaatgaaaatggatataaggtatgtataactgggggtggggtgagggtaggaggcatttacaactcagattttatttattttgaaattatcaattgtataaatctaatttattaccaaatagggtcttttaaaaaatatttttatcgttgaaaccttgacaggtacttcatattcttctaataatttaaacagtccaataatgtggtatacactttgacatccaagaactcaccaagatgtttttcagagatttattctcgatttaactatcatagcatttaatgaatctgatttgtagttcaataaattgtgggttgaactacttatccctgtgtgaacattgaattactttctgtcactgaaactgaggtatttgggtgtggtaagtacttcgaaaattgtaatactgtttgggcattgtctaaattattaaaggttaaaatagaaaataaagtcagaatttttcttttccattccaaaggtgtacttagagatctctattagtattcattcgagatgacatagcagctcatatcatggttgtttattggatttatctgttctaattatataagtgtgtttactgtctgtgttttcacacaaactgctagaatttttaatgttaagacgaaaacatctgaagttctccatggcaaattgaatttttcagtcattttcttttctttttttggtacaattacttcatctggaatgtcttcattgaactcgttattctatttttcttagaattaaaagtggattaatgtgggtttttctgttcattttattgcagtattaaatgcttaagcttattaggaccataattcactttaaatataattgtatagaatatatttgcgtcgatcaaataattgcttcagatgaattcttagactcttgataatatcacacctaatttaacttgattttacaagctgtacaatccagttttagttttctattgtgataataacttttttcaaaccagtttcacatcttaatgaaataacattctctgactgcacttgcttcagtactctcttgcctgcctgtttttgacctctgcatgagttggattagatgtttttcttactgtcacttctaaatagaaaatgacagtgttataaaaaagggaaggatacaacctttgacatccccttgtgtctcaaaagtccacagttattcaaacaatggctttttttgtgatgagagtatttgttaaaaaaaaaaaaaagacttcaagaaaaataaaagttcggtggagctgcaaaaaaaaaaaaaaa

SEQ ID NO: 48360 - DNA, 1400 bp, Homo sapiens
tttgaagaccacgaatttaatacgactcactatagggaatttggccctcgaggccaagaattcggcacgagcgtggacaaggagaacctcaccatgccgggcctcaggttcgacaacatccagggagatgcagttaaagacttgatgcttcgctttctgggtgaaaaagctgcagcaaagagacaagtcctaaatgccgactcagtggaacaatcttttgttggattgaaacagctaatcagctgcagaaactggagggcagcagtggacctgtgcggacgtctcctcacagcccacggccagggctaccggcaagagccgggctgctcaccagccacacgacagattcactgcagctctggtttgtcaggctggcactactagtgaagttgggccttttccagaatgctgagatggaatttgaacccttcggaaatcttgatcagccagatctttattacgagtactacccgcacgtgtaccctgggcgcaggggctccatggtccccttctcgatgcgcatcttgcacgcggagcttcagcagtacctggggaacccacaggagtcgctggatagactgcacaaggtgaagactgtctgcagcaagatcctggccaatttggagcaaggcttagcagaagacggcggcatgagcagcgtgactcaggagggcagacaagcctctatccggctgtggaggtcacgtctgggccgggtgatgtactccatggcaaactgtctgctcctgatgaaggattatgtgctggccgtggaggcgtatcattcggttatcaagtattacccagagcaagagccccagctgctcagcggcatcggccggatttccctccagattgggagacataaaaacagctgaaaagtattttcaagacgttgagaaagtaacacagaaattagatggactacagggtaaaatcatggttttgatgaacagcgcgttccttcacctcgggcagaataactttgcagaagcccacaggttcttcacagagatcttaaggatggatccaagaaacgcagtggccaacaacaacgctgccgtgtgtctgctctacctgggcaagctcaaggactccctgcggcagctggaggccatggtccagcaggaccccaggcactacctgcacgagagcgtgctcttcaacctgaccaccatgtacgagctggagtcctcacggagcatgcagaagaaacaggccctgctggaggctgtcgccggcaaggagggggacagcttcaacacacagtgcctcaagctggcctagctgcctccaacacactacgtcagaaggacccgggtctttgaaactgtgtcttgaagctaatgtattaatgtgacatggaggaactcaataaaactcctgcttcactggtgaaa

SEQ ID NO: 48361 - DNA, 446 bp, Homo sapiens
ggacagaagaactttttagccgtaatactgaaattcatcgttgttctaatgatttgtcatctctgctctgaacttttcgcccaagataacaatcataaatattaatttgacaactaaaacaagaaatctgatggtaatgtggtgtgatttcattattcatagtctacagcacgttgcagcagaaacaagctccaatgacacagatccttcctcacaatcaagatatcaactcgaacaaggcttacctataactaggtgaccatataatttaacatccaaatgaagaggtttgaaagtgaaaggggacatgcagaaagaaaccaggtgggatgcagaaaaatgggagcaatttggcagtctccagaaaaccagaacacatggtcccaataactacagctaaaaggtgaatgtcagtatttggaagtttccttatagcagtaaactct

SEQ ID NO: 48362 - DNA, 458 bp, Homo sapiens
agcggctccgcgagcttctctccactttcccatagagaaaccctgactggccgctgagggctagctacacacacgccctcacgcccggcgagcccgcgaggtcactatcatatgacaaaggctttgccgcagttcatcttcctccctgtgtactttccatttgccttcctggaatcctgctgcatcacagaagctggaagttctgatgttccactgaaatcacaatggaaagtcttgacttgactggtcacagtaatgaaaggcagtaatagaaataaggatcattcagcagaaggagaaggggttggaaaacgaccaaaacgaaagtgtcttcagtggcatccattgctagcaaagaaacttcttgatttttcagaagaggaagaagaggaagacgaagaggaggatattgataaggttcaacttcttggggccgatggcctagagcaagatgttgg

SEQ ID NO: 48363 - DNA, 1239 bp, Homo sapiens
ctcggatttcctggaaccacaagtttctatttttctgtgacagtcactgtcctcaaggcttggcctgtcctgataggctgggtggtagtgcatcttccataggggtcaatggttctgcttttataccctctggtgtctcaccagaaatgttcttgctagcagaaatactaatgaaatctggaggtcttgactctttggtggtgtctgaggatttctcctttgacattttcttctctcttgatttcacttttttctttggtggcttggcatccaaaatgcttcccttgccacttgaggatgtgcggaccttcttgcgaggggtatctccaagtttctctatgccccagtctccttttgcgacggcttcaatggtatatatgacgctctcaatgtcagattccgaagactgcctctttttgcaagtcttcttgggtgtggatttatcatttccatgtcgatccattttgcttttcttctttttcttttttagcttttctggcttgtttaatgctgcgggatcctcaatgatcataattccatgaggatggcacatatgatcctttctactgggaacatcactaattattatcttgctactggcagaataagaaaaatcaggaaaatgactacatttgtgatcttcttctaactcttcctttctaatttctttgggatcttccatttttatagccattatgtcatctatttgcaatgcctcaaaatttctcaattccttagaatctcttaaattttccttagccgatttttcaaattctgcttccttctgtaacctagtttcatctgttttctccattttaatttctttttcttcctttcccttctctaattctttaattcttccaccatcggattcttttgcttttattagctttgattcttccattttcatcccttctgatgccaggcacatctctgccagttgaaagagtgcagactttccacagcgttttacaggctcagcaccacccaactgcgaagtgtttgaagaaatctctgcaaactgaaacaaggcagatgtttgacactgctttgtagaagcatcagagtgggacgtacttgaagatatctcggcaaactgaaacaatggtgacttctgacgtaattcaggagattctgaaacatcaggcctgcatgtgccagaggatacctctggtgtgccaagagcatgttctccagctaacagcagcatactcaggcctcccatttgagtaggatcag

SEQ ID NO: 48364 - DNA, 1009 bp, Homo sapiens
tggcggttttcttctctccaccctgctcctccgaagcgcggtgtccatcacaccaagcccgttactccctctgctctgaaatcttccccatcccgcagcctgcccttctccaggtcgctggagttagattaccacacttcctcctgcttccggggcaccatggtgaaggctgactgtcctgtccctatcacagacctgccagattcctctggtaaacctgcaggttccctctgcctcagttgtggccagggattctgaccaggagatgatgggaactagatggagtaaattagtgtcacgcaggaaggcaggaccgtgcagcattcaccaacctggattttggagtcagcgttcaaatctgagctctgctgtcttattgaggcggtgaccttggtttggataagttatgtaacctctctggccctctcaaaataaggataatcacggttggcatcaagattaagtaaaataatgtgtgtaaattgtaaggaataaatcacatgatgaatgttaagtactgggtttagtgcctggcacatagtaagtgcttaataaatggaggctattgttagcccatcctgagccaagcctccctccatctctgcaagagcagaggaggcatcggctctgccctgtatctctgattctcctttgtggaagagtcagtggcctgaaatactgggctttatctatctgtcttctacatccctgggtcagggaattgaagacagggtagaaagcatgggaattttgtataaaccttcatttggcttgaataaggtactggaaaccgaggaattgctttactcaccatccctaggccttaggggccccactcctcttcttcctcccagcagctggtcataacttcagtgacttctctctgtgtgtgcttggagagtccctgggagcagcctgcaggggcgggtgagagggggatctcccgcttcatgtttcttgtagtacggctgtaagaattgtggcagggccttctgttcaggctgcctaa

SEQ ID NO: 48365 - DNA, 414 bp, Homo sapiens
gaatttcaaagcctgctaacatccacgttaagagtccttgtccagttgtgggaaattcaaattctcagaataaaataagtaatccctcacagcagacagctttgtcgatggtaatgcacaattatgagtcttcaggtataaatataacaaagggaacagaacttcagatagctgtagtgtcaccgttagttctgtcagaggtcaaaacattgtctgtcaaaggaataacacctgcagtgttacctgaaacagtgtatcccgttattaaagaaggcagtgtttgtagtttacaaaatcaattggcagaaaatgcaaaggcaactgctgctttgaaagttgatgttagtggaccagtagcaagtacagcaacatcaaccaagatttttccactaactcagaaggaaaagcagaatg

SEQ ID NO: 48366 - DNA, 220 bp, Homo sapiens
ttggccccctaacagttatgacatgattacgaatttaatacgactcactatagggaatttggccctcgaggccaagaattcggcacgagagaaactctcttggcttactaacatatacttaaaataaattttttctttcaacaatagaaaatactgagatgtttttatttagaactgcctaaatgcctttcttttttttctttttttaggggctggcggc

SEQ ID NO: 48367 - DNA, 1150 bp, Homo sapiens
tggcccctacaagcacctgcaggacaagtgttggtgtagcagtacttggaggctttctttatgctgtgggtggccaggatggtgtgtcttgcctcaacattgttgagaggtatgatccgaaggagaacaagtggactcgggtagcttctatgagtaccagaagactaggtgtggctgtggctgtgttaggagggttcttatatgctgtaggtggctctgacgggacatctcctctcaacacagtggaacgttacaatcctcaggaaaacagatggcacactatagcccctatggggacccggaggaaacacctaggctgtgcagtatatcaggacatgatctatgctgtaggaggtagagatgacactacagagctgagcagtgctgagagatacaaccccagaaccaaccagtggtctccagtggtggccatgacatcacgccgtagtggagttggcctggcagtggtcaatggacagctcatggcagtaggaggttttgatggcacaacatacttgaagaccatagaagtttttgatcctgatgccaatacatggaggttatatggcgggatgaattaccgtcggctagggggtggcgtaggagttattaaaatgacacattgtgaatcccatatttggtgaacacagagaagacagtcttgtatatattcctctgtattctggggagctttgaccttggagctttgtacagcttgagaaaacattagaacaaattttattatttgccggtgcctcaacaaatggaaatacaatccaatgaaagtacttcacctgcaagatgcacaataattttcaactctgtgcagaagaatatttatttttggttttaatttatcatggttttttgttgttttcgttttgaacttatccttcctcccacaaaaaaagaaaagaagaaaaaattccaagcagcaaaacttactttgtttgtaaggtattcatttaggtttgaaaatactatttaataagggcagaagggctatatatgatttggctattatttctagacactccatccacatgattccactaacaaggattaccaggaataaaggtaggtatgcaaaatgtattagctacccattattctcgcactaaccaccagaagacttgaaaatcttaaaaaa

SEQ ID NO: 48368 - DNA, 1483 bp, Homo sapiens
agctctacgagaaggttttctccaggcgcgcggaccggcacagcgacttctcccgcttggcagggtgctcacggggaacaccattgcccttgtgcttggcgagggtgctcacggggccaggggctgcctcgcacatcggagtactaaaggcattagaggaggcgggggtccccgtggacctggtgggcggcacgtccattggctctttcatcggagcgttgtacgcggaggagcgcagcgccagccgcacgaagcagcgggcccgggagtgggcaagagcatgacttcggtgctggaacctgtgttggacctcacgtacccagtcacctccatgttcactgggtctgcctttaaccgcagcatccatcgggtcttccaggataagcagattgaggacctgtggctgccttacttcaacgtgaccacagatatcaccgcctcagccatgcgagtccacaaagatggctccctgtggcggtacgtgcgcgccagcatgacgctgtcgggctacctgcccccgctgtgcgaccccaaggacgggcacctactcatggatggcggctacatcaacaatctgccagcggacatcgcccgcagcatgggtgccaaaacggtcatcgccattgacgtggggagccaggatgagacggacctcagcacctacggggacagcctgtccggctggtggctgctgtggaagcggctgaatccctgggctgacaaggtaaaggttccagacatggctgaaatccagtcccgcctggcctacgtgtcctgtgtgcggcagctagaggttgtcaagtccagctcctactgcgagtacctgcgcccgcccatcgactgcttcaagaccatggactttgggaagttcgaccagatctatgatgtgggctaccagtacgggaaggcggtgtttggaggctggagccgtggcaacgtcattgagaaaatgctcacagaccggcggtctacagaccttaatgagagccgccgtgcagacgtgcttgccttcccaagctctggcttcactgacttggcagagattgtgtcccggattgagccccccacgagctatgtctctgatggctgtgctgacggagaggagtcagattgtctgacagagtatgaggaggacgccggacccgactgctcgagggatgaaggggggtcccccgagggcgcaagccccagcactgcctccgagatggaggaggagaagtcgattctccggcaacgacgctgtctgccccaggagccgcccggctcagccacagatgccctgaggacctcgacaagggtcacccccctccctcccacccctggactgggctgggggtggccccgtgggggtagctcactccccctcctgctgctatgcctgtgacccccgcggcccacacactggactgacctgccctgagcggggatgcagtgttgcactgatgacttgaccagcccctcccccaataaactcgcctcttgg

SEQ ID NO: 48369 - DNA, 910 bp, Homo sapiens
accccccactgttttattaaatcagacagtttaaagtgtatgttctggtatttttaattttcttactgggtccattttacttaaaaaaaaatataaaacatttttaatgtatcttagaaaaattagcaaaaaattgagaaagttgagcatattacattgtacaatgttttcatacgaatgttttaaaatcataaatatttggtttcccctcaacatagcacatcacaaaaatacatttcaaaaacttttttcatatataattcctgtaaatgatcatatccctacttattaaggaaaacacctgatgacaagcactcaaacactcttgaaattttctgtacagtaattacaaaagtaaaaccaagagttctgttggccctttaacaggtgaaaccattttaaatagtatcaaaatataattccaaatgggatatacttagttcatttctgtgctatctttgattcacaagtatctatcttagccaaagcactgtttaaaaggatattgcctcctagacatagtgccactgaaaaccaagatgtaaatcggtaacactatgcattaaacagaaagcttttgcacaaccacatatgtaaccgcttagtcgtatcaaggtccacatgtgaccagaaagcaggcagtccttaggtggatggccaggggccaggcagtgtgaggtctccaagaacccagggctagagcagctaagccccaggtcatgttatcagctacagctgtggaataagccaggtttaaagaaggacattctgcaaaagtgcaggacctatttcacaacttctagaagtagaaattcacatattccatcatgatccctcgtgccgaattcttggcctcgagggccaaattccctatagtgagtcgtattaaattcgtaatcatgtcatagct

SEQ ID NO: 48370 - DNA, 1319 bp, Homo sapiens
  misc_feature (1)...(1319): n = a,t,c or g
ttttttttttttttaagagaacctgaattaaatttttaatattttaaaaaaggaaagttgctgggaagctggtaaacagaaacagaagattagaggcctaactagaaagagacactggtgttagcagagagatattgaggggctgtaagcctaaggtttgaaatctaaagatagagtggaaaagggagtaggcacccccaccagcccctgcttgacatctgctttagttcattccagcaggaaggaggagaagggcagggaggtagggagcttctcagcaaagccagcttcagctttgataatctcacccacctaccccatttaaggagttccaggtttaagagtttaaaaacaggtggcacccagaccatcatttcaggagacaggaactcattccaggttcctagagaactcctatctcagacctgagggtttccagggcttcagctgagctcctctggctaaccagtagtcacttgatcagtcctgctgccttgaccccatctccaggaggggctatggccagagggagtagagggagtccagcccccaagccttgtgaggcactgttaggcagatagggaaaagaggggtccttagatcactggttcaaggagggatctggtaggggcagcatttcttctgggctggaaacagaatgggggtttcaagatggcagaaccattccattattggagctataagcccctagaattgctccatggcctatctcggtttcccttggatctcatctgctcctgaactgcacctgtcatggcaagtccatctccggcccccatctcccctgagccaatgtgagtcaggtgaaacaaaattcattggttccccaatcatggtccggtcaatccgtcttctcttcttcttcggctggggtttctctaccacacagcagcccagtttgtgccaaaattcactcatgttccctgatggttccagcttcactcctctgtctgaggccccaaagggctctttccctggtgtttggacaacccactcctcactctccccagatacaccaccaccctgggttcactcagctggatgggtccagacaaagtggaatccctggaacctttaactgagcagtgaaggtcagtgtctcagagcctgagagatgaacaggaccagagagagaggtgggcaggcaggcacaaggttatgtcttcctcagactcggaaccctgctcttctccaccatccagacgttcagctacagctggtgggggtgagggactctgctccgtggccgccagtgtgggcttcccgggctagctctgcggcgaggtggggganccgag

SEQ ID NO: 48371 - DNA, 718 bp, Homo sapiens
ttcggcacaggttgtataaaacaatatgtatatagttgcatcgtttggcctataacgtataaaatataatatatttgccgataacaggttgaagaagctgagtggaagcaaaactgtcttgtactaaagaactgactccagatggtaagacaaatccacaggaacaaatggagagaacgtgaaataggaaataagtttaatataaaaaaactataaacatatacttactcttctctcagcttcttttaaagatgtaaaattatattaagtaattataataatgtgtgttgggtttgtaatgtataggaataacatatataacaataataccacaaagcgggggatgggtttatataggaatagggtgttacattggaattaagtttagtgtttatctgaagcctattctgtttagttaagatgtgtatggtaagccctagagaaaccactgaggaaataacttttaaaaaatcaaaaatattattaaatgtaaatatcacattatgaaataatgcaaaagaaggaatggagaagcaaaaagcttgaggcatatcaaaaacaataaaatggcagtcataagtcttcctatatcaaaataacaatgtgcatggattaagcaatactataaaaggcagagatgtcagaaacaagtctgattcaacttcatgccatctatttgagacacactttagaagatagaaagagattaaaggtaaaa

SEQ ID NO: 48372 - DNA, 657 bp, Homo sapiens
aaagaagaagaaaaggaactgagaagaaaacagttccacgttgcttgaaattgaaaatcaagataaaaatgttcacaattaagctccttctttttattgttcctctagttatttcctccagaattgatcaagacaattcatcatttgattctctatctccagagccaaaatcaagatttgctatgttagacgatgtaaaaattttagccaatggcctccttcagttggggacatggtcttaaagactttgtccataagacgaagggccaaattaatgacatatttcaaaaactcaacatatttgatcagtctttttatgatctatcgctgcaaaccagtgaaatcaaagaagaagaaaaggaactgagaagaactacatataaactacaagtcaaaaatgaagaggtaaagaatatgtcacttgaactcaactcaaaacttgaaagcctcctagaagaaaaaattctacttcaacaaaaagtgaaatatttagaagagcaactaactaacttaattcaaaatcaacctgaaactccagaacacccagaagtaacttcacttaaaacttttgtagaaaaacaagataatagcatcaaagaccttctccagaccgtggaagaccaatataaacaattaaaccaacagcatagtcaaata

SEQ ID NO: 48373 - DNA, 1030 bp, Homo sapiens
tggccgaacacttgctgaagccgctgcccgcggacaagcagatcgagaccgggcccttcctcgaggcggtgtcccacctgccgcccttcttcgattgccttgggtccccagtgtttactcccatcaaggcagacataagcggcaacatcacgaaaatcaaagctgtgtacgacaccaacccagccaagttccggaccctgcagaacatcctggaggtggagaaagaaatgtatggagcagagtggcccaaagtaggggccacactggcgctgatgtggctgaaaagaggcctccgcttcatccaggtcttcctccagagcatctgcgacggggagcgggacgagaaccaccccaacctcatccgtgtcaacgccaccaaggcctacgagatgcccctcaagaagtacccatggctggatcgtgcagaagatcttccaggcagcactgtacgcagcaccctataagtctgacttcctgaaagcgctctccaaggggcagaatgttacggaggaggagtgcctggagaagatccgcctcttcctagtcaactacacggcgaccatcgatgtcatctacgagatgtacacccagatgaacgctgagcttaactacaaggtgtaggcatgcccactgctggacacgtccccgactcgtggccacatggagaaacaggcaaaccagaatcactgtgaatcaagtcggtgaactgcccctggcctgtgtcccccagagcagcccagggtcctgccagagtctgcaggggacagccctcgttttttaagtctttttttttttttttttttttttggtctattctaaaggaccagtaaataatgatcttacttccaaatctccttggaatttcacgacagcacagactgactttataccttcatttcagcgtggtaaaaatcgattaacacttctaatgagtcaagtcctagggttttttggttttgttttgttgccaacgaggaacacagctctgggggaatggtgtcatccacctcgctttaaaaataagcacatg

SEQ ID NO: 48374 - DNA, 393 bp, Homo sapiens; identical to SEQ ID NO: 6359

SEQ ID NO: 48375 - DNA, 1707 bp, Homo sapiens
ttttagcacaacactcatcttttatttatttattatttttttttactaaggcacatgacgtagaaatattgaggtacaaaatgcaaatttctgcataagatttttaagatattcattttggaaaatgaaggtgaacatcatctcccagaatattcagcttttagcttgttttttcttttggaccagttcaaccagcaacttgtacctagcgatacagtcttccttgctcttggacgggacacatctggctattttgtcccagcggtcagaggatccccttgggtactgctgcaacgccagttccaagaagtttctgttgattttgagtccacggctcctctgcagaccgagctctctcttttctcaggctctcctcgtcgctggactcgttttgttctgctatgtcaaagtccttctgccgcttggctctggacttctcctctggctccggctttgctgtagcctccaagcagcctggctggctttccgcctccgaggccgggcatcagtggccccggtctcctgctcaccggagtctccctcctgctcctcctccgctgccaccccctctgcgtcctctcgctgggtgatcatgtcatcgggcaaggtggtggccgttttgatgggcctggaattctgaactgtcgatttgagttcggagagtctaaccattcctggggagcaggtcactgaatccttcagttgcttggctttggttgtcacatctgtcacagatcgacccaattcgtgggcaatcttttcccatcgacctggagtccctcctgggaacttaaccatacttcttgtcagttggctgaggtcctcttctgtccattcaggtgcctgttttttctgtgttcggttcctgttttccaaccaatcatccatttgttcctcaatttcttctatggaagttccatgatcataagactgaatatatgtagtttctaaaggtgtgtatacaggaaattcaggttttggttttttaactttcttctgtttttgaagtgtttcaagttcagttctagtcagtgcatcttccttttccttcaatcttgtttctttatatttagcataaaactgcccagcatcctggatgaggtgaggtaatgcttttagtgtaaggcaaaaccaaatccccagtttgcatggaagcaaatcatgccactgtggtttcatcagcaatctttcatttttttctgaagcaccgagttttgatacatccacactcttgctgccagtcttttttttcttttctctcttttttctacttagtagttcatccagttgtttttccaggtagattgaccaaaccacagcataatgacccactgtgagaataatgaacaagagtaatgccagctcagcattgctcatttttctcacccgcctgtagtagaatacaggctgtcgccaatctggaagtccattgatcagaatatcatcatacctctgccttcgttcatcatcctttaaaacttcataaatggccaccaattgtctaaactgagtttctgcattttcatctttattcttgtctggatgtaaagttagtgaaagcttacgatatgcttttctgatgtctgcagatgatgcatcctgctgcaccccgaggaactggtagaagttgagctgcacctcctccactaagtcaaacaactccaggtctccgctctcccagccgcgcgccggctctacggcggccag

SEQ ID NO: 48376 - DNA, 1275 bp, Homo sapiens
tgtcaaaccgccctgtctgccgacatttcatgatgaagggcaactgcgcctatgagaacaactgtgccttctaccacccgggtgtcaatgggccccccctgccctagggaccatttgcctgccctgttcacacaacccctgtggactgcagcctcgctctttccaccctgttatggcttctgtgaggcccattttcccttttccccagctgatgaggagccggccccctcagttcccacttgcttgggttcctgggggttttctgatcactggtgcgcattgatgtacatattttcctccagtctggggaggagagagactggaaacgttcctgggactgctgaagaggagacccagttggcttcactttttgagaagattcgccctgtaaccccaaacccctttccagtatttacccttaatgcttgaggaacctaaagctggttatcctgggcgaacacccctacccttctattgcggggtccccacatgcacacagaactctgacacaggatcagctgcacttaagaaatcatcccagctaagttcattattcctcatggggtggggagatgctgaaaggggtattgtatatcccactgcactgagagggctcaatcagctggatttgagttctggaacacacatcatccccacccctcccccagcgtgggctcaccattcttagtcctttctcaagtgggaccttcaactttctgtgaacacccagtctgcgtcctgggtctgctaggttcgatgatggcgaactcgtatctgcatccggtgcaagttttagctggcagaggtgagaccggtggtgctggtctgcctttgccaactatagccagtctggagacttgataaaatacttcagtgagaccagcttctcatcaacttggggcccggcgtgctgggcctgaaagtcacactacatgcactgcctttgggagtcagctcactccctgctcccacctggaaccttgccagcgtgaaggaggcttccaggtacttcaccctgtcaaccacctctgaatccccaccaggcgccttcctgggtggattcaacaagatgattttgccctttcccagttctctccttcactttggcatcagttgttttctatgaaaacagtggattggttgggttttgtgcagggtcttgggttagagccaaaatggatttgaggatgagtatttttttttttggttttgtatattttgtacattaataataaacagtggaaagagaagcagcttatttaaaaaaaaaaaaaa

SEQ ID NO: 48377 - DNA, 6940 bp, Homo sapiens
  misc_feature (1)...(6940): n = a,t,c or g
tttttctatttcaagaagttattcataatataaagtagttccaaatgtaactgctgtgtttattacttgtttgcttttactatctagtaattgttatttgaatatattcaagatgtatatatgattggggaaatacatctgttatagcagtcaatttactttatatattttagccagaattgttttctaaattttggtattttgtaatgtccacttttttagatgtgaatttatatcactttctaaatctggttttatattttcgataaaaataaagatctcactaaatgtgtaagcatagatacttgatcagagaaggaaatatggtgatacaaatgtacactaactggattttctttgtgtaacagcacggaaaagaggcgcagggagcaagaaaataaatatttagaagaactagctgagttactgtctgccaacattagtgacattgacagcttgagtgtaaaaccagacaaatgcaagattttgaagaaaacagtcgatcagatacagctaatgaagagaatggaacaagagaaatcaacaactgatgacgatgtacagaaatcagacatctcatcaagtagtcaaggagtgatagaaaaggaatccttgggacctcttcttttggaggctttggatggatttttctttgttgtgaactgtgaagggagaattgtatttgtgtcagagaatgtaaccagctacttaggttacaatcaggaggaattaatgaatacgagcgtctacagcatactgcacgtgggggatcatgcagaatttgtgaagaatctgctaccaaaatcactagtaaatggagttccttggcctcaagaggcaacacgacgaaatagccatacctttaactgcaggatgctaattcaccctccagatgagccagggaccgagaaccaagaagcttgccagcgttatgaagtaatgcagtgtttcactgtgtcacagccaaaatcaattcaagaggatggagaagatttccagtcatgtctgatttgtattgcacggcgattacctcggcctccagctattacgggtgtagaatcctttatgaccaagcaagatactacaggtaaaatcatctctattgatactagttccctgagagctgctggcagaactggttgggaagatttagtgaggaagtgcatttatgcttttttccaacctcagggcagagaaccatcttatgccagacagctgttccaagaagtgatgactcgtggcactgcctccagcccctcctatagattcatattgaatgatgggacaatgcttagcgcccacaccaagtgtaaactttgctaccctcaaagtccagacatgcaacctttcatcatgggaattcatatcatcgacagggagcacagtgggctttctcctcaagatgacactaattctggaatgtcaattccccgagtaaatccctcggtcaatcctagtatctctccagctcatggtgtggctcgttcatccacattgccaccatccaacagcaacatggtatccaccagaataaaccgccagcagagctcagaccttcatagcagcagtcatagtaattctagcaacagccaaggaagtttcggatgctcacccggaagtcagattgtagccaatgttgccttaaacaaaggacaggccagttcacagagcagtaaaccctctttaaacctcaataatcctcctatggaaggtacaggaatatccctagcacagttcatgtctccaaggagacaggttacttctggattggcaacaaggcccaggatgccaaacaattcctttcctcctaatatttcgacattaagctctcccgttggcatgacaagtagtgcctgtaataataataaccgatcttattcaaacatcccagtaacatctttacagggtatgaatgaaggacccaataactccgttggcttctctgccagttctccagtcctcaggcagatgagctcacagaattcacctagcagattaaatatacaaccagcaaaagctgagtccaaagataacaaagagattgcctcaattttaaatgaaatgattcaatctgacaacagctctagtgatggcaaacctctggattcagggcttctgcataacaatgacagactttcagatggagacagtaaatactctcaaaccagtcacaaactagtgcagcttttgacaacaactgccgaacagcagttacggcatgctgatatagacacaagctgcaaagatgtcctgtcttgcacaggcacttccaactctgcctctgctaactcttcaggaggttcttgtccctcttctcatagctcattgacagaacggcataaaattctacaccggctcttacaggagggtagcccctcagatatcaccactttgtctgtcgagcctgataaaaaggacagtgcatctacttctgtgtcagtgactggacaggtacaaggaaactccagtataaaactagaactggatgcttcaaagaaaaaagaatcaaaagaccatcagctcctacgctatcttttagataaagatgagaaagatttaagatcaactccaaacctgagcctggatgatgtaaaggtgaaagtggaaaagaaagaacagatggatccatgtaatacaaacccaaccccaatgaccaaacccactcctgaggaaataaaactggaggcccagagccagtttacagctgaccttgaccagtttgatcagttactgcccacgctggagaaggcagcacagttgccaggcttatgtgagacagacaggatggatggtgcggtcaccagtgtaaccatcaaatcggagatcctgccagcttcacttcagtccgccactgccagacccacttccaggctaaatagattacctgagctggaattggaagcaattgataaccaatttggacaaccaggaacaggcgatcagattccatggacaaataatacagtgacagctataaatcagagtaaatcagaagaccagtgtattagctcacaattagatgagcttctctgtccacccacaacagtagaagggagaaatgatgagaaggctcttcttgaacagctggtatccttccttagtggcaaagatgaaactgagctagctgaactagacagagctctgggaattgacaaacttgttcaggggggtggattagatgtattatcagagagatttccaccacaacaagcaacgccacctttgatcatggaagaaagacccaacctttattcccagccttactcttctccttctcctactgccaatctccctagccctttccaaggcatggtcaggcaaaaaccttcactggggacgatgcctgttcaagtaacacctccccgaggtgctttttcacctggcatgggcatgcagcccaggcaaactctaaacagacctccggctgcacctaaccagcttcgacttcaactacagcagcgattacagggacaacagcagttgatacaccaaaatcggcaagctatcttaaaccagtttgcaggcaactgctcctgttggcatcaatatgagatcaggcatgcaacagcaaattacacctcagccacccctgaatgctcaaatgttggcacaacgtcagcgggaactgtacagtcaacagcaccgacagaggcagctaatacagcagcaaagagccatgcttatgaggcagcaaagctttgggaacaacctccctccctcatctggactaccagttcaaatggggaacccccgtcttcctcagggtgctccacagcaattcccctatccaccaaactatggtacaaatccaggaaccccacctgcttctaccagcccgttttcacaactagcagcaaatcctgaagcatccttggccaaccgcaacagcatggtgagcagaggcatgacaggaaacataggaggacagtttggcactggaatcaatcctcagatgcagcagaatgtcttccagtatccaggagcaggaatggttccccaaggtgaggccaactttgctccatctctaagccctgggagctccatggtgccgatgccaatccctcctcctcagagttctctgctccagcaaactccacctgcctccgggtatcagtcaccagacatgaaggcctggcagcaaggagcgataggaaacaacaatgtgttcagtcaagctgtccagaaccagcccacgcctgcacagccaggagtatacaacaacatgagcatcaccgtttccatggcaggtggaaatacgaatgttcagaacatgaacccaatgatggcccagatgcagatgagctctttgcagatgccaggaatgaacactgtgtgccctgagcagataaatgatcccgcactgagacacacaggcctctactgcaaccagctctcatccactgaccttctcaaaacagaagcagatggaacccagcaggtgcaacaggttcaggtgtttgctgacgtccagtgtacagtgaatctggtaggcggggacccttacctgaaccagcctggtccactgggaactcaaaagcccacgtcaggaccacagaccccccaggcccagcagaagagcctccttcagcagctactgactgaataaccacttttaaaggaatgtgaaatttaaataatagacatacagagatatacaaatatattatatatttttctgagatttttgatatctcaatctgcagccattcttcaggtcgtagcatttggagcaaaaaaaaaaaaaaaaaaanaaaaaaaggagtttgcttttgtcgggagattgaaagatgtttttgtttctttctttgtaaaggccttggatattgaaaaaataccaaggcagaacagttggacaatctatttcttgagccaaatttaattattcttatttttgtaatcagtcattggcttcttatctggatgaaggcttttggaggagaaccaaaacgacaagttccaagaagaagatgaagctccgcctccgccgcttagtcccaaccctgcccaggaagaagggcccgtggggctttgcctgtgcccgtccaccaaaggctgtcatgtgtctcgaaatcagcagccctccccatcccaatcccaggcagcttgtgtgtacaatcagcttctctagcaactctgtatctgttggcttcaagagaatattttgcctccacatatgtaccccttctcctttttttaaagatggatttaaaccaagatgcctccaggaaagaggacgaaatgagtatattcacagaggaatccaaaaaatacagtttgggggaaaatgcaataatttttgatgagatgggtgaaggacaagaagtgagttgtgtcaattattgtagatacaattttctgattaaatctggaaaaataaaaggcagcctgttttttctgcttttattgtattaacagctgaggtagctaaagttatttaaaataaaattaaatttatgatccaagtagcttatttttccctttaaatctcattgtaaatatatttgatttcttgtagaaattgatttccttctgtttaattttatgcttttattatactcttgatttttctaaatttgtgtgtgaaatataacattgattgaattgcagttacatttggttagtaatatttcattattttaataactgtgatgtcatgtatggatttactttggggttcaaatcaaaatgtcactgccagaaagagctgttccagctgatctagagcatactgccctagagtgtccctggggatcatctgaacagaagtggcacaggctacttgtacagagaaaaaattaatactcaaaggaaatcttcattttttagattgactttgggaatttgaattttcatcagtgcaaatataaatttctctatcctgctctgaggctaattggtaccatattttccctttgtgtcttgtgactctgccacatcccatctcatcctggcctctgagtcaagaacccagtgaactgactttctagttctagaagttccgctggcaaggccaggaaagcttgagaaaggtattgtggaagaagcaaaggtagacccccatcactcacctttgtctgcatccctgggcctgtgaatgatgacagcacctgacattctgcaccagctacctctgcctccatggcagagaaaaggccataagaacagtggaagaggagcatggactcagacttcaaggaagaagccatttccccaggtccttccttctgcatctcaccacccctagttacaaataactccattgaacagcatctattcagaaactatgccgaataaaaagattggtggaagggctcatgtggttagcaactatgaaacagaaataggacactcagttacaaacattatctcctttagtttttcagaaaatgcatccctgatttcattcatttccagcttgaaagccagccatattactctagtccctaccaaactgctctagaaggtcatttccattttgtttgtgatatttagacgcgcagacttcaggaagttcacctttaacttcagcattccagatgaagtttcctgactcagtgcttttgcataaggaactagaaaaaaaaagtaaggaaaattggagatgctaacatcctcccccgatcccaactgcaccttaaaatatgcatgtcaccttcaaggttttataattgcactgtttgttttatgtatgtacagattaaaattattgctacatttgaggaaaataaaattgcttgcttctatgtaattcctgtcattccacaggaaattcacttttccagctactgaatagaatttgtttaacaacctcatgggttgcctcttcatttacagggaagaaatgaaatgtacatctgcagaaattgccaaagcccaaattaacgagtattataaaaggataataaagcatccctgaagccaaaaaaaaaaaaaaaaaaaa

SEQ ID NO: 48378 - DNA, 584 bp, Homo sapiens
ctcggcagaggagggcagggcctgcgcctccctacggagcctttgtttctggcgaccgtccccacccggcctcgcgtcttcgtttctccgagaggcccaaggtgtcttcgccgcagcctctgtcgcgccgtgacctgtacaggtcgcgggagtcgtagggaggacgccaggacacccgggaagccgaggaatggactcagtggcctttgaggatgtggctgtgaacttcacccaggaggagtgggctttgctgagtccttcccagaagaatctctacagagatgtgacgctggaaaccttcaggaacctggcttctgtaggaaaacaatggaaagaccagaacattgaagacccattcaaaattcccaggagaaatccaaggactcagtgacctttgaggatgtggctgtgaacttcacccaggaggagtgggctttgctggatccttggcagaaaaaactctacagagatgtgatgctggaaacctataggaacctggcttcagtaggtgatgacgacaacattccttcacttagagaacaagttgcccatcaacgatatttcaagacctggcatgtggaaag

SEQ ID NO: 48379 - DNA, 1311 bp, Homo sapiens
ttttttttttttttcacaagtagctggttcacatctctttaatgagatcaaaggctcctgtgtatgtcctgcgggggtaaagctagcacagtcccccaatactgcccctctccagccctttcaggcagattctaggtaggcagggaggggccaaaggaacgcaaggagttgggactagggctgtttctggtgggcaagtaacccatccaccctctcaaaactacttatgggatgtccccttcactggaagacagccccatgggaaagatctgcggtacagactctgggggtagtgcacacggggagtagtcctccagatctggcagggtggcactaaccctcacctccttgactggctcaccctcaccggaggcaggacaagggcagagctcaataccggagtcgccagttaaacggcgatagcggcaggaggggggtgtggaggcaggggtcacccctgccccgggctcaccctcctgatgggggggggcactctggtgggaggaaacaccttccacatttgttccttcaaagtgggcagggcagctggatgaggaggaacagcaggtttgttcactggaagcagtcaaggggcggcctggggccacagtataaggggggggtggtgtgcctgggcggtgaaacccacatccctccgtaggctgggggccttgaaaggtgcctgaaggaagcgaaggtccaagccagtgaaccggtagggaaaggacccagcccccatggcatgcccccatgataggcccaacaagttgatttcacgctgccgctgctgttgttgcagcctgagtttagctcgtcggtggcggaaggcgcaacagcagctaaagaggatgaggacagtccagagcagccagaaccaccagagctcatagtagtaggtgcagcagccagtctccccgcagcagtgaccactctcacagaggtagggctggttgttcactcctgggcacagctctcgaagcagatgggattgctgtggatgataaaggatggcatccagggcgcgagtctgggttccagctcttctccaaattgctccctcaagagaagacgctgccggactctgctgtgacaataggcacatagaaaaagatcacaaataactgttgcaagacagagggagcctccctgggacctcactatgcctctggtcactggagagccaccgcaagcttccactgcagccatgggatgggttctatgaggctacaggcaaagtcagctgcatctacgttacaaagtttagacaaagagtggaagagacatgtttaggaacttcacagtacctttggc

SEQ ID NO: 48380 - DNA, 1134 bp, Homo sapiens
tttatgcgatcagaattttattttattttttgtttacacatcgaatataaaaatatagaaaaaggcttaattcatgaagttgctataggtttctctttctcaaaagtgctcacatgagggtcacaagagcacttatttgtcagacatttgtacactatatactaattctagaaatagcatcttcaggagaccccaaacctgaggatcacatgggaccccaatcatatcatctgtgtgaagagaccaatcctcagaaatatcaagaaagtgagatggctgcagaggttgagcctcctgagcccctgcttggtgacaagggacctgggtatgctcttcttcactgaagacacaaggtggacaatcgcagttgggcctttgactggactgtgacaagctgaacacctcgtagcatttctcatccttctgggctgtggcccctgctcttgctggctactctcatggagcagggcttggtgagccatggggacttttggggggcagcacatgacactgggatcacaaacttagatggcgtgcccttagaagagtagtgtatctcagtgctgtagataaccatgtcctgaaaaaacaactttggccctgatgccacattcagtaacacggtaggtgaaactggtaggcgtgtggctgaaacatggtttggggggcaaccccaggccccaagtgtagttccatggaaaagtgttacacaacaacatcgttgtttaagcatgaaaggggtgcaactgtgaccatgaaccagtctatggagcacagcacagtcattggactttgtcctgaaccggctgaaaacgcagaggtgaggaggatcatcagtcctatgaacttaaaaactttcatccctgcagccaatcagataatgaaccacaggaaacaggaagccgtccagtgaggatttcttcttctggcagctggggataatttgtcagtttcctttgaaatgtggctttgtgctcactggtgaaggcagctgccaaatttccaaagggaagaaggaacttgctgtgtctgtatttgcccccaggattggaaaaatgtatctcagtcactggaactgaagaggggtggcctttaccttcataggagagtcactctttatacaaatccttctgc

SEQ ID NO: 48381 - DNA, 1191 bp, Homo sapiens
  misc_feature (1)...(1191): n = a,t,c or g
caaggagactgaccaaaattatattaaaaggtttaaataaaacaagnggatccntgttataacatgaggaagagagctgccccactagatgtctgacattagataactcagagtcccgcctctccaacaagtctcccttactagagaaacggacagattctgttttgtgggatgggataaggagacaatctgaagtagagtttgacacaatattattctgcccatatgaaattctggtagccagggtgccaggtgtattcataatccagatgctgtcaattttaagcctgaagccccaagaggcgagcagtgtttaatacatcatctcttgttaaatagcagccacacagttggcggtacagtgaagcattccctgccatgtaggacacgccagttgtctataaataggaccctgccaggctttagtttgacccaaaactcattctcaggtctcctcaactctatcgttagagtccggtgtgctgtataccagcgatggacgacatcataaggaacggtattgatgacagcccggtcatagttgttgtacctgatcaaatacagctctttattccatgggtagatatttaagactggcccaatcccaatcatgtggttgtgacattctccaacatcttcaatatattcatgcttcaatggcactttactgaggagttcaaattcctcaggtgccttttgaagtacctgttctgctgcatagaatccatctactagcagtgtcctgccaccagttccttcatgtttaagacaatgaaacacttgaatgccacagggctcttgaaaataggtagtgtcagtgtgccgatccagagctagcttggtgtacgcagtgtcacctctggagaagtctgaagtgaaataccacatcctcccataaatggtttctctgattaagctgatcctttctgccaacttctctgtgtgctcttgagtgggagggacattttctacgaatgcaattccatagagcagaaagttttgcagaaacttcttcagtccctcgttggtttctaagaagctctggcaatctaccgatggaacttgggcttgctggtagatttcagcattccatagtattctaggctggatgactttttgtttctgcccttcatagctgtttttcaccagccaattcaaatcatatttagtcacatgaccatctggccaagt

SEQ ID NO: 48382 - DNA, 664 bp, Homo sapiens; identical to SEQ ID NO: 6392

SEQ ID NO: 48383 - DNA, 519 bp, Homo sapiens
gaccaaataaaataaaaccagaaaagagcagtgccggcctgtgtcccctgaattcctacaattgtcagattgacatggatgttccactgggggccgtgagctggaatcccgggggcaaaaagcctcactcttttagttttctgttctattccgatgatgctgacacttgctggttcatttggccttcctgatagcaaagaaagggctttgagactccaggagataattttccatgaaaaggagaagccttgtcatccacaactcagcgtaaggcagagttcaaagtgaagacttcccagagcagcccaggcactgttggtcctctttgcctgtctcatttttctccatagtgcttgttactgcgtgccttcatatgcatgtatgtgtctgcttatttttgtcttcactaaattgtaggcaccttaaggggagagggctttgctttcctcattgctctgtgtcaggatcctgcttaacctatagcacgtgctcataaacccagttgacagactgtgtgga

SEQ ID NO: 48384 - DNA, 1430 bp, Homo sapiens
attcggcacgatggggtgctaccaccgctgccgtcgccgccgccattttgatggcaggaagagtccggttctgggacagctggagacagtggtggtgactgaaataactttaccaaaggaaagctattttgcgaactatcttctccagcggagactggccaatgtgctttgtaacagagccagactggtttcctatctcccagggattttgctctttagttaaaagggttgtcaatcccaaagccttttcgactgcaggatcatcaggttcgggatgagtcttcatgtgggctgctgcacctccagatattatggcttttcggaacagtgtgggcctggatggaaactatgggaccctttggacctcaagatcagaggttccagcttcctggggaacataggttttgattgtcacctcaattggggacttgctttcacagaaggaaaagcctgggttcattaaaacttttgcctggatgttcttaggcagaaccttttttcaagtggaaagacattgagttttgttgatgggcacaatatgtggaatgaatttcaggggtaatgatgcacccgttggaaccaggaaattaacagtgcagaaacttactttgaaagtgccagagtagagtgtgcaatacaaacatgtccagaattgctgcgaaaagattttgaatcactgtttccagaagtagctaatggcaaactaatgattctgactgtaacacaaaaaactaagaatgatatgactgtttggagtgaagaagtagaaattgaaagagaagtgctcttagaaaagttcatcaatggtgctaaggaaatttgctatgctcttccgagctgagggttattgggctgactttattgacccatcatctggtttggcattttttggaccatatacaaacaacactctttttgaaactgatgaacgctaccgacatttaggattctctgttgatgaccttggatgctgtaaagtgattcgtcatagtctctggggtacccatgtagttgtagggagtatcttcactaatgcaacaccagacagccatattatgaagaaattaagtggaaattagcagaaatatccattcatttgctgtactatttgtatgtaatatttgggttgatctataaacactgtcagactaaagtttttaaaatatacttatttctaagtatttatttcagcatttatgaatttgcaacattggcaagtgatttgggattttaaaattgcaaatgttcatttattcatatcattgaatacacgttgaacacatccacattgtataggatgtggtaattagcttgtaaccagggtatgatctgctattgttatttctcctctttattggaaaaaggcctcagttttaattattttcttcccaaaataaatcacacatttggttacaaaaaaaaaaaaaaaa

SEQ ID NO: 48385 - DNA, 2365 bp, Homo sapiens
ttttttttttttttgtagaaagagacatttaatacttctgtttacaaaattcaggcgtacatttcagtttgccctggaccgtgcccaaagctgtgtgctcatctctgcgcccctcatgtacttctgacgaggggggtgcagggcagggcagagcagagcctggggtccggaggcttcactggaccacagggggaggggaatgtgaatgtggcctggcccagagaactccccatttcatcgattttgcattgggcgatagaggaagcagatgtcggggctgcctgccttggtctagaggagatggctggggccacttcccacagggtgaagtggcagcggctcagcaaggggagcctggccaccaggggctgggacatgcgctcactggaacctttgtgcttggccctcggcagcgcggctgtggtcccgtgtgaggtgtgctggggtgggtgtgggtggctggtggtggcagcttgtgccagagtgacacaggcctccctgggttgggatgggggcagttaaaaagctgaaaaggtacttggctttctgagggcggggcttgggaggcagggccctgcaggagaccatgttctctgtcctcaggcagatcccagctggcctctgtccccgggctgcaagctgacagcaggcccgggaggcggtgaggccctctgccctggccttgaggagaaggagtgcgtgtgtgaggcgggggtgcattggccctggagtagggccagggcccatcaccagcaccaggctgggagggatttaaaaccagggtcctatctctgagccaccccatggggaccctcgatcccatcctgttaaggctgcgggactcgagggtaggcagtgggccgggcccccgtcgggtcaggacggaggtgggggctgccccagaggaacattagtgtttctaagagcaccttagtgttgccccgcctcggccagctgggcgagaagttggggagcgggggatgtaagtggcgccatggagtggggaagggagccgtcaccgttgggagtcagcgctagtgtaaacaggcatccccacccacccagataagcccccccacccaagtgtggggtcctgctcagggagtacctcaagggccggggcccaggtggcgccggcaggctcagacaccgccctggcagcaggggctccgtggaatgcaggagacccagcagggggtgccggccagtgtggacggaggggcggggcggggacacgggtgagtcactgcggcaggggcacaagcacctccacgtagctgagcgggaagaagcccgactggccgtccagcatgccctcgtaccagttctcatcgatctggttggtcagcgtgatgacgtcgccctcatggaagcccagctccccgtcgttctcgggctcgaagtcgtacagcgccttgcagctcggctggtccaggggcggcatgctccggctaggggtccggatgggcttgtcggaagatcggaaagacgatgaagctgcgatcttgggggctgtggtgcaggggaagcccccgttggactgctcaggctctccaaggtcaaagggctcccggggcttgggcttatactcccgcttagggcgtgaggaagcttcccgcatcctgcgcttgagcttctccgccagctcgtccaggatctgcacggcctgccggtggtagtccagctgtgcatccaccagggccgagagctgactcacctgctcgatgtcagtctccaggaggttgtgcatgctggtttctgccacctccttggactcctcgaacttctccagcgcctggcgtagctcctcatcggggatcttgccctgccgcttcttcttgtagtcaaagtccaggcggcggccctccagtttcttcaggtggtgctggatctccttcaggtctttctcgcacaggttctggagggggtcaatgaagttctgcttgacctcgatgtccagggagtccttcacctctgccaggcgcttcatggactcgccggcatccagcaatgcgtcaccaaagttggactcgccgcccagctccttcccgtggcggatcatgcactcgcccagaagcccctccgactgcgggtagccggggttcttcacctggccccggatcttggacaccgtgttgagcatggtcagcttagcccgcgaggctgggttgggctgcaggtactcgatggtcctggccagcacttctgtcaccgccttgctggtgacatccaccttcttctccatctctttgaagtcatcatccagcttggtcccctcggcccctccgaccttctcactgaccagctggctcgccttgtagaactgcttcttcagccccgccaccgacatgctgccgcccgccgc

SEQ ID NO: 48386 - DNA, 870 bp, Homo sapiens
gagagttcttcccttagccctgactttacttgctgtgggaagagagatgagggtcagataggtgggaggactaacttccagggtgccaagaaggaagaaaagccccaggttctcttttcttattgaggaacgatccgaccacctcacaggcctgccctgcagctggaagactcggcgctctaaggcctgtgccgtgtccagctgtgactgtgcggtgggctccatctgctggacaaaaggggaactgcaccatggcacttggcccatgggaaagagggtgtggtggtgtgccgatacctcctcgcctgccctccaagccccagctgccttccttttggattcccaagcttcaggatgtgttccctcttccagctgtgggaccgctgtcccttatttcaacccgttagcaacaatggatagagaacacagtggctattaatgaagaggcccatgctggagactggaagggttcccttgtcctagacattgaggggcccagataagaccaaaaccaagcataagagaagaaactgtctcagatctcacggccaggcctctctcctgctgctgtttttgattttcccaggtagtgggagagaggaaaggagggaaggcaagattctttccccctccctgctgaagcatgtggtacagaggcaagagcagagcctgagaagcgtcaggtcccacttctgccatgcagctactatgagccctcggggcctcctcctgggcctcagcttgcccagatacatacctaaatatatatatatatatatgagggagaacgcctcacccagattttatcatgctggaaagagtgtatgtatgtgaagatgcttggtcaacttgtacccagtgaacacacac

SEQ ID NO: 48387 - DNA, 5274 bp, Homo sapiens
  misc_feature (1)...(5274): n = a,t,c or g
tcttgtctgttctgcctcactcccgagctctactgactcccaaaagagcgcccaagaagaaaatggccataagtggagtccctgtgctaggatttttcatcatagctgtgctgatgagcgctcaggaatcatgggctatcaaaggtaggtgctgagggaatgaaatctgggacgatagactacgaagcattggagaaaagacctatggacatttggaagataatgtgtggagtgaaagaatagtgtgacaggtattatgtggtctcgacagaaagtataacaaattgtggtttggtggagttcttccctcaccacaaactgaagtaagtcaaatttggtttagagggtcaaaactgagttgtgtattgatgaatagcacggtcctgctacaagccaaactgggggtgggggtgggggtgggggaggaagaatattttctggcaagcattaacaagttatatttctgggctttaattattctttctggaaaattagtaaaattaaaaactaaaaaccacacatagttttgttagaattaaatgaaaaaaaaagttattagccctgttcttatctgaatacatgatacagtagttattttttggagtgtaaatcctgtcggtatatattgagcacatatattgtgttgaagattactagaaggaaaagtcatcaaaaagcaacaatttaccccaggaaaaggggagggaaggcatgctgatatgagttgcctcatgggacagtgatagccattccctgccttcccatcttcatggtacagcagatcttatatcatgttaacttagtaatatttccaagagagtagaaaaataagtaaggaaatggggaatctgatattattgtctctcatctccagagcaacattggtgctgttgtaaagatgtactgtagaaaagtattcttcacccagcgtgacccccacagaaggtgtcaggtagacttggaataagcaaagtaataacccagctcccatacccatagtggcaattgtagatttctattgccccaaaagagccatacatagggatacttacctagaaagacagaggatcttcccttggtttgtgaagaggcagctagtatatttgtgtgtgtttgcatagatggaagtaaataaattcctaggtttatcaatacacagtcaaacatttaaaatctctcatcttggctgggcacggtggctcacgnnnnnnnnnnnnnnnnnnnnnnnnnnnnnnnnnnnnnnnnnnnnnnnnnnnnnnnnnnnnnnnnnnnnnnnnnnnnnnnnnnnnnnnnnnnnnnnnnnnnnnnnnnnnnnnnnnnnnnnnnnnnnnnnnnnnnnnnnnnnnnnnnnnnnnnnnnnnnnnnnnnnnnnnnnnnnnnnnnnnnnnnnnnnnnnnnnnnnnnnnnnnnnnnnnnnnnnnnnnnnnnnnnnnnnnnnnnnnnnnnnnnnnnnnnnnnnnnnnnnnnnnnnnnnnnnnnnnnnnnntatctcaccttatctttgaagactaaggaaaaaaaaaatctcccactcatcgatacactccacagaggcagcatactctcccagtgtagctttctcttttcatgttcattattcccttggtgttggttattctcaatgtcaatcgtaacagaacatcttccataataacagtcccaatttaaggagcattaagataaaaggtggaattgccaaggtcaatccagacgagaaccttctcatagaggtaaccaccgtgtgggtttggatgctgggaagcagggggactatgacgctacaaggtctcagtcttaatttttggagtacttcagtccccaggtatattttccatagatttggcccttaaataaaaagaagcttctgactctaaaatgtaaacagtgcttgttacagtcttgttgatatattaagaaattactcaccttatctcatttaatcttaaaaacaaacccctgacaggatcaaaaccacagcaggactacataataggaaaactatacataaataggtagaataatctgctcaggatcactaggtaagttgctgaataagaattcaagatgaaaaagatcccagagtttaaaacccaacctttcaaacagtgtttccttcttcttagagtacaatgttctgagaaagagatcctctggaattctggcctaagtgtatttaatgcccgggtaaagaaagtgagagaacatttctctttaggggctgctgctggatttctaaaaagaaaataatttctcagctagtaacatggagccaaacaacagcttcacaagactctgggttctttagccctcatctccttcaatccaccctcttataaccagtccttcttgtttttcccctcccagctttgttcagcagcatgcccttcacccagaccttgtcttgtcactcatccctactcgccatcattctttcattcctcttggcccaatctctctccaccacttcctgcctacacgtatgtaggtcaccattcccctctcttgattccccccgcccaactctctttctccatttcttgcctttcagaagaacatgtgatcatccaggccgagttctatctgaatcctgaccaatcaggcgagtttatgtttgactttgatggtgatgagattttccatgtggatatggcaaagaaggagacggtctggcggcttgaagaatttggacgatttgccagctttgaggctcaaggtgcattggccaacatagctgtggacaaagccaacctggaaatcatgacaaagcgctccaactatactccgatcaccaatggtacctccctctctgctgcactcctggacacgggaatccatagtttgaaagtagttgcttcagctctttgtgttagattattgtaactgattttccctccaagggcctaaccttgccattaacaagccccaaattctcatgccagaggtctgagaactttatgggtttgatcctatcttgttgtgctcaagtcttgtctctgtcatccatggtctcctacgaagtcattgccctaagttcatgctaggggagccagaagggaagtccttggatatcttatacctcaatattggctcaatctcttggggagggggtgctgtcagagactgttatctgaggatgtgacatagacttctcagggcacaatttcaactactttttcagctttagggtttttagatacgtttgtaccacaattgagcatgggagggagaggggtgagcctaagcagtgacggctgattctgtcacgtctgtcatgtgtcccccagtacctccagaggtaactgtgctcacgaacagccctgtggaactgagagagcccaacgtcctcatctgtttcatcgacaagttcaccccaccagtggtcaatgtcacgtggcttcgaaatggaaaacctgtcaccacaggagtgtcagagacagtcttcctgcccagggaagaccaccttttccgcaagttccactatctccccttcctgccctcaactgaggacgtttacgactgcagggtggagcactggggcttggatgagcctcttctcaagcactggggtatggaccaacactcaatctcctttatttcaaggtttcctcctatgatgcttgtgtgaaactcggtgttctaactgtttcataatatctgctacaattaatataactgtcttctcctactatccagcttcctcctttttttaatctgtaattctctcaatacatcattctgtcttcctcttctttaatctatgaataacttttctctttctaaagaaccctacatttgattctgagtgttacttcttcccacactcattaccatgtactctgccttatctccccccagagtttgatgctccaagccctctcccagagactacagagaacgtggtgtgtgccctgggcctgactgtgggtctggtgggcatcattattgggaccatcttcatcatcaagggagtgcgcaaaagcaatgcagcagaacgcagggggcctctgtaaggcacatggaggtgagttaggtgtggtcagaggaagacatatatggagatatctgagggaggaaaatcagggtggggaaaggaaatgtaatgcatttaagagacaaggtaggaacagatgtggctcttgatttctctttgctagaatgaatcagacattggtatcatctggtaccccaaagcttcagggtctgtcatccctttctatagacgggcaccttgatcacggctccagtcttagaaatcatctccagtacctaaaaccattgtttcacattagaatactgagtctagggatctagaaaatacattagaatatggagtctagggatctagaaaatactgagtctagggatctagaaaaataagcctcaagatttgggcacatcctagcttgtatttcctggggcaggtcatcagttcagaagcatttccagatcctggctcctttcaggttagggtcaattcgttgcatgaaatgggaatctcttagaggccaatgcctgcttttgcttctttagtctcaaatgtagtatgagaaactctaaaaaagggtaagacatggttgcttattatgttcagttggagagtaggaactaactgtatacagttagttcatgttggaaaggttagatgaacattgaaagaattttgcaaagtcaaaggattaagagagaagaggaaggaatctgaagcaaggagctcaaaacggatcttaaattccttggtaactatgtgtgtcttgctataggtgatggtgtttcttagagagaagatcactgaagaaacttctgctttaatgactttacaaagctggcaatattacaatccttgacctcagtgaaagcagtcatcttcagcgttttccagccctatagccaccccaagtgtggttatgcctcctcgattgctccgtactctaacatctagctggcttccctgtctattgccttttcctgtatctatttcctctatttcctatcattttattatcaccatgcaatgcctctggaataaaacatacaggagtctgtctctgctatggcccatggggcatctcttgtgtacttattgtttaaggtttcctcaaactgtgatttttctgaacacaataaactatttgatgatcttgggtggaatttttggtgtttaagccagttctttgggtggcggtggggggtggggagtcggtcctggggaatatatgtgatcctttcccggtaaaatatctgaatgttgaatttatcttataaattctagaattc

SEQ ID NO: 48388 - DNA, 1072 bp, Homo sapiens
attactcttgtttggaaaacttgtaatagaattctgatgattatgaccttctgataatgaacactttttcctttagagtgatttaaaaatttctgtatttttgaaatcagtactaattgtcatttttttctctcacagcttcatattctccaattcagcctcattctctaataaaacatcagcagattcctcttcattcaccaccttccaaagtttcccatcatcagctgatattacaacagcagcaacagcaaattcagccaatcacacttcagaattcaactcaagacccacccccatcccagcactgtataccactccagaaccatggccttcctccagctcccagtaatgcccagtcacagcattgttcaccgattcagagtcatccctctcctttaacagtgtctcctaatcagtcacagtcagcacagcagtctgtagtggtgtctcctccaccacctcattcaccaagtcagtctcctactataattattcatccacaagcacttattcagccacaccctcttgtgtcatcagctctccagccagggccaaatttgcagcagtccactgctaatcaggtgcaagctacagcacagttgaatcttccatcccatcttccacttccagcttcccctgttgtacacattggcccagttcagcagtctgccttggtatccccaggccagcagattgtctctccatcacaccagcaatattcatccctgcagtcctctccaatcccaattgcaagtcctccacagatgtcgacatctcctccagctcagattccaccactgcccttgcagtctatgcagtctttacaagtgcagcctgaaattctgtcccagggccaggttttggtgcagaatgctttggtgtcagaagaggaacttccagctgcagaagctttggtccagttgccatttcagactcttcctcctccacagactgttgcggtaaacctacaagtgcaaccaccagcacctgttgatccaccagtgggaatgcatttgaaccagtgtcatctgcacaaagttttttctcttaagtttatttaagaaaggga

SEQ ID NO: 48389 - DNA, 693 bp, Homo sapiens
tcgaagtgtaatgactacttttttaactacttcactcttggaggggacatcctctttgatgcgaatacacacaaagtgaagaagtttgttctacacaccaattaccctgggcattataatttcaacatttatcatcgctgtgagttcaagatcccactagccataaagaaagaaaacgcagatggtcagacagaaacatgcacgacctacagcaagtgggacaacatccaggagctcctgggccaccctgtggagaagcctgttgtcctgcacaggtcttcctccccaaacaacaccaacccatttggttccacattctgctttggtcttcagcgaatgatctttgaggtcatgcagaacaaccacattgcctcggtgaccctgtatggcccccccaggcctggtagccacctgagaacagcggaactcccctagggacaccaccacccatgcccctctgtcccgtggaactgtgcatcacatcctgctcagtgggcctctgtaccaccctgtgggttttcttggacacctggccagtgctgaagggctgttgtgatgttctgaggttgggctcaggctgggtgctctgccatgggctgagtggcccagatattcttctgtccatctttggcctgctggtgccagcaggggacacagactgcaaagagaagcacaaagttttgagccttgatt

SEQ ID NO: 48390 - DNA, 1443 bp, Homo sapiens
cggacgcgtgggttctgcaccagtattgtggctcaagactccagaggccacatttaccatggtcggaatttggattatccttttgggaatatcttacgcaagctgacagtggatgtgcaattcttaaagaatgggcagattgcattcacaggaactacttttattggctatgtaggattatggactggccagagcccacacaagtttacagtttctggtgatgaacgagataaaggctggtggtgggagaatgctatcgctgccctgtttcggagacacattcccgtcagctggctgatccgcgctaccctgagtgagtcggaaaacttcgaagcagctgttggcaagttggccaagactccccttattgctgatgtttattacattgttggtggcacgtccccccgggagggggtggtcatcacgaggaacagagatggcccagcagacatttggcctctagatcctttgaatggagcgtggttccgagttgagacaaattacgaccactggaagccagcacccaaggaagatgaccggagaacatctgccatcaaggcccttaatgctacaggacaagcaaacctcagcctggaggcacttttccagattttgtcggtggttccagtttataacaacctcacaatttatactacggtaatgagcgccggtagcccagacaagtacatgactaggatcagaaacccgagtagaaagtaagtcagcagaagagcgagttcgcccgtgctgtgaaagatgattttttaaaaaatgaaattcttgaagagctgcaccttaaaaaataagacaaagtgaaagtattgtattatgttacaaacaatgcaggctccttcctcatttaactttacaaccttgcgaagtgggtccaggagatttggagtttgtggtaaagccagtaatgggcattgtcctgcattcccttcccttcatggtttgcctcgatcctctctaagcttctatcctggcctgaataactcaaagataattggtctcagagatcaagccatatcctcaggccttatttccatcttctcatgattctgccatcatacctttgcttctccgctaatgaaatgagctggcaagacctctgttcattgtgaagtgcttctgaaagagcctaagaaaaaaggctcatctgaaagaaatggagaactctatttcgaaccaagcctgtttgaatgtgtgttagtctgatctttgatcatgtgtttcccatgtaatgggagtctcgttttttataatgtttctaacgttttattgaaaaacctatggccctccttctttctcaatagctactttcttactgctttttgaaaataatatgcaaccaaattatttcttaatgtcacataattaagtaataaaatgtcaaaagaaatgttggcaaggagaataaaaaaagttccaagaaaaaaaaaa

SEQ ID NO: 48391 - DNA, 1453 bp, Homo sapiens
gcgaccgcggcatcagccgtgggctctaacgcggggctgggggccggagacagacttcgcccaggtgacgggtagtaggggcggcgcgcttggcctcgtggggtgtaagacccacttgctgttgcccccggaccttgccgccacaccagccctgtcctggggcggaaccgaaggaaggtcgggccctgctgccccgccccgtccttcctccttcccgggcggtcactgtgcgtggctcacttttagagtttacttcaaccacgtggagcttccatggcggcctctcaggtcctgggggagaagattaacatcctgtcgggagagactgtcaaagctggggacagggacccgctggggaacgactgtcccgagcaagataggctcccccagcgctcctggaggcagaagtgtgcctcctacgtgttggccctgaggcctggagcttcagtgcctcactcacaccggtggccctgggcagtgcccttgcctacagatcccacggtgtcctggatcccaggctcttggtgggttgtgccgtggctgtcctggctgtgcacggggccggtaatttggtcaacacttactatgacttttccaagggcattgaccacaaaaagagtgatgacaggacacttgtggaccgaatcttggagccgcaggatgtcgtccggttcggagtcttcctctacacgttgggctgcgtctgtgccgcttgcctctactacctgtcccctctgaaactggagcacttggctcttatctactttggaggcctgtctggctcctttctctacacaggaggaattggattcaagtacgtggctctgggagacctcatcatcctcatcacttttggcccgctggctgtgatgttcgcctacgccatccaggtggggtccctggccatcttcccactggtctatgccatccccctcgccctcagcaccgaggccattctccattccaacaacaccagggacatggagtccgaccgggaggctggtatcgtcacgctggccatcctcatcggccccacgttctcctacattctctacaacacactgctcttcctgccctacctggtcttcagcatcctggccacacactgcaccatcagcctggcactccccctgcttaccattcccatggccttctcccttgagagacagtttcgaagccaggccttcaacaaactgccccagaggactgccaagctcaacctcctgctgggacttttctatgtctttggcatcattctggcaccagcaggcagtctgcccaaaatttaaggggacaagtagctccccccacgacatgtctccctttcttagaatatattaaagtcagagtctctgaggaaggaatgtgatttggcagtcagggtactaagcatgggtgggaactcctgccttataaaaattgtttttgtgttcttaaagataaaaaaaaaaaa

SEQ ID NO: 48392 - DNA, 767 bp, Homo sapiens
ctttcagtaagtctccttaactggcttccctttccctttttgagggtgtgaagaggacctgattcctggggcaggctcaggcagttttgctgatagaggagtagacaagcaaatgtgtggtaccactggcccctgcaggttctagttgtcttttagttttactggggccttcatacctcagggtctggtggcttctcttctctacccttttcttaagagtcactggtgtcataaagccccagaggatcaactctgtatatcagcctcatgagaactgaccttctcctgacctcattaatgctcttatttaaaagttctctaattaagctttgtattttgatataattagagactcacctgcctgtgtcttaaaaataactctcccagctactatctcacatgatctgtgggcccatcttgtgaagcctagtattaaaaaatatttttgtttttcagtggcgtgcattttaattctcaggccatagctcctaccattgaacagattgaccagtcttttggcgcaacccatcctggaggtaagccaagtccatctgattcctctggtcatcagtggcagttcatagcaataaacctgcccggtagtgccatcccaccccacttcctggagtcaggctcccataggattgtggggttggtacttgggtgtgaaggaaacatcctcccccttggtttcaacctagtaggccagtttagaaacaagccacagggaaggtgttgtcagtcattactccctgccaggctggttt

SEQ ID NO: 48393 - DNA, 620 bp, Homo sapiens
tttgctccgggtgtgggggttttggccgacaggggttcccagaaggagaccgctaagctgcgatgctgcgtcgcaggcgggaagcaattatccccgctgttggaactgcggcggcccatggggccccgggcgggaggacaggttcttctgcccacagtgccgagcgctgcaggcacctgaccccactcgagactacttcagccttatggactgcaaccgttccttcagagttgatacagcgaagctccagcacaggtaccagcaactgcagcgtcttgtccacccagatttcttcagccagaggtctcagactgaaaaggacttctcagaggaagcattcgaccctggtgaatgatgcctataagaccctcctggccccccttaagcagaaggactgtaccttgtaagctaaagctccatggaatagagattcctgaaaggacagattatgaaatggacaggcaattcctcatagaaataatggaaatcaatgaaaaactcgcagaagctgaaagtgaagctgccatgaaagagattgaatccattgtcaaagctaaacagaaagaatttactgacaatgtgagcagtgcttttgaacaagatgactttgaagaagccaa

SEQ ID NO: 48394 - DNA, 373 bp, Homo sapiens
tggtgataattttactgtcttaaaggtagaatccatgaacttggccttgccactatataggcttttgaattttgacaagccttggggggatgaaacctagaataagttatttatggcgttacgctttaatagggttgacacttaaaaccttgttttcataaatgctaccttttggttatgttgatctgatgaacagatactggctgtcattgaaagaaagttaaccgaatgttcagatacttattgggctcctggaacatggctgctctgtagcttcatgaatattcataatattcataaatatttgtgaataaatatttttagtatttccaatttataagctctttgaaaggagggaatttttttttttttt

SEQ ID NO: 48395 - DNA, 570 bp, Homo sapiens
ttatacacttaaaattaacaaacaaaaaaacaggtgctgggctgtatttggcccacggaccatagtttgctgatctctggtctaaacagagccctttgtatgtgccttttgcggaagtagactgtatttcttcaattttccatatactgcaaatggcaaggtgccctgttcaataaggaaacaaaggcacaccctgccactatacaccttttccatccatcttgttcctttacactgccaagacactccactccacctgactgccccatccccacccactttctccttatttctagagtacaggacataaacatctttgaatctgtaaataatgtgaataattttcctcaaaaatcaagctttcatgtttgaagaagagtttattgtgacttcaaacataagctgtaactggtaataagcgaagcagctatggaattatacaaggcaatccaatcaaacaacacggagcacattgaagcgcaaacatcaaattttacctttttcctcctaaaaactttattccctaattacatccatttctttctttggttctttctttttttttttttt

SEQ ID NO: 48396 - DNA, 568 bp, Homo sapiens
tgaaggactttttactacattaaatttttcttaagcccccaatatataaaagagatgaatatgaagctgctctgggggcgaacttgcagaggctttgctgttcagctcctttaacctttctgctccctggaacatatggagcatgtgctctgaaccccggaatcccgagaacagtttgaaacatgacctcgttgacacagaaggtttccctctctaggagtctaagagtctacaattggaattccaaagccaagcaggcatactcagtgggtccaatacaccaatggtgaaggagggacatttattcaaatctacaaagggacagagcacgagagagaaaagaagtgatttgcaagaaatgagctgattactttacctcacattcaggcatgcctataaaatgacagccttggtaggcagcaaccgcttgtgttaacgcagacgggtctgccagacctgccacacacagagacaaaggagagtttcagtcatgacacacactgtcctcctggcctatgtgcaggcgaccacagaccaccactgcttgtacacttggtgaccaaaacaa

SEQ ID NO: 48397 - DNA, 355 bp, Homo sapiens
attcaatcagtaatgaaaacttcccaacaaaggaaagccaaggaccagaaactttcactggtgaattctaccagacatttaaagattaacaccaatccttctcaaactcttccaaataactgaagaagcaggaacacttcccagctcattctatgagatcagcattaccataataccaaagccagaaaaaaaatcacaagaaaattacagtgcaatgtatcttatgaatatagacacaaaaatctttcagtaaaatactagcaacccaaatctaaccatatattaacgtcattatacactatgaccaggtgggatttatcctagaaatgcaaagttcatttaacgtaataaatcg

SEQ ID NO: 48398 - DNA, 637 bp, Homo sapiens
gagatgttcaaaaaacagatgcctttgtcccagtgtactctgacagcactattcaagaagcatcaccaaactttgagaaagcttatactttacctgtgttaccatcagaaaaggactttaatggaagtgatgcctctacccagctaaatacacattatgcatttagcaaactaacttacaagtcttccagtggccatgaagttgagaatagcacaactgatactcaggtcatttcacatgaaaaagaaaacaaactggagagtttggttttaactcatttgagtaggtgtgattctgatttatgtgaaatgaatgcagggatgccaaaaggaaacctaaatgaacaagatccaaaacattgtcctgaaagtgaaaagtgtttgctttccatagaagatgaggaatctcaacaaagcattttatcaagtctggaaaaccattcacagcagtcaactcaaccagaaatgcataaatatggtcagttagttaaagtagaattagaagaaaatgccgaagatgataaaactgaaaaccaaatccctcaaagaatgactagaaacaaagcaaatacaatggcaaatcaaagcaaacagattcttgctagctgtacactattatcagaaaaagacagtgaatc

SEQ ID NO: 48399 - DNA, 946 bp, Homo sapiens
  misc_feature (1)...(946): n = a,t,c or g
gcgaccgctcttgctgaaaggtggctgggagaggtcctggtcagagtcggagtcagagtcccaggagggacgtcggagggctcaggcactggtgcccattgtggcctcttaggctcgaggccttgggacaggcccccgagcacaaagtgaggctgtctatggagttctgcagcacgtgcacagcagacctgcaagaagacaaggagctgggggcgctgggagactccacactgctcagggtgtagacagcagtacagctaaggttgggggccgtggtggggtgagtcctagggggtgagggaagtctggactcaggtgggctccaaggttctggttggtcacttgccagatcccatttgggggaaccgggttcagaggagggtcaggggtcagactgcaggctgggcatcaccatatatcactcagttccttctggaggtcatccttccagcagccactggctccctgcggtatctcttcagtctccggacaggcggctgtctcatgaccctgctgcttcatcttggtcaggattttgcggcatttcacctgcgttttctgcattttctgaatgttcaccaagttctctgagatctcatcctcctgcgcttcttcaagctgctgaatcttgatttgctgcaagcagctctccttctccaacatggtcactgagtggttcaggaactcgaaagccttggtctgggcctgtaactggctcttgagtgactcaagttcacatcgcaggagcttctgggagtcgggaatcatcacaatggtcttggctttgactttggaagagctggtctccaagggcttcacataccacctgttcatgctctcccatcagggaccacgaagccagtcctcagctgtgacgctgaagtttgatccgcggggacaccatcgtattaaaacgctcagagactgagtcacanagaggggtgtc

SEQ ID NO: 48400 - DNA, 688 bp, Homo sapiens
agcaccagccccgctcagcacaggtgggcagcggacttaacaccctgcaaggcccgaagacacaacacagcatccacacggtgacctgtaaatcacctcggcagaaagaagacaggtccccaaagccaccccaggctcccaagcaccctgaggagcatggtcgccaatcccacagctcctcctcctttgccagtggaccctccaggacacgtggaggttgctagacctgggatccagcccttctggtgtcacctcccagggtgacttcaactccagagctcccagctcctccagcagccgacaggaggcccgtcaagatgcagggcaggcattgccaccccagggatgaagacagcagcccaggcaaaggccaagaccacaggagcctcccggtctcatcctgcaaaagctaaaggctgccaggggccccccaagatccgtaactacaacattatggactgacttcctccccccaccccgccccactaaggggtgctcggggcctccgcatggtgcctgtgctttcacctacgtgttgtgggggggtgtgggcacagcgtgcagggtggaggcagggagctgcagggcaggctcccaaatgctgctgaggcgaccctgctgactgaaggcctccctgagcacagggcccattaaaaccaggttcctccctggggaaaaaaaaaaaaaa

SEQ ID NO: 48401 - DNA, 1438 bp, Homo sapiens
cttaaattatatttattatatgaaatacaaaatgtggaaaatttggaaattacagaaaaaccaaagatgaaaattacagtgactttgttccaccatacaaagataaccactcaacattttttagtatgccttccgtcttttttatctgctctacgtatacaagcatacacccatattttaaaaaacaaaattgaaatcacataacatgcactatttttacaaccttttaatattcaaggagcatttttctttcagtcagatgttcttttacatgacttttaatgtctgcgcggtactccaccatctggatggagatacaataatttacttaagcaatcccctattgcaaactttccgttacagcagaaaaggaataaattcccaaccaaaccattgcttcccatttttctccattgcaatgctgggatgaacatcttatcactaactaaatccttaagtattttcttaggataaattcccaaagatagaattcgtaggtcaaatgacatggaggcttttaggccacatgacacatatcacccaactgtcatccaggaagcctgcaccgatgtatactcccacacgcaatgtatgggaatgttttttcagtagtctctttgccaatattggggtcttatttttttctgttatgggtttgctaagggaaaaatgcttccagctctatttgcctttctttaattactaatgaagcatactttttttcatggttttatccattcagatttcttttatgaatttcctgtgtgtgtcctttcgcagatggttcttggtccttgaggctgcttatataaacattacaggctgggcggaggtggaagtagggcggtgaagccacagggcaccgcactatggtgccacatctcggaggcagaaagcctggagagaaatggtgatcaaagtaggagagggctggaggctcgccgtcaatggaggctggctgccctccctcctcttggggtgctcctggcctttaggggctcctctgctggatgcccaggtaggaccctgtgctctccaggcctggtccttcactggtctccatattcccaggctgcctctcctcacctctgctccatgatgggtgaagatggcagaggcacatagcgagggctggagggagatgctgtggccagtgaagcaaggagaaagtacggaggcagtgtccagggacagagtcacctttgttgcagcctatgagtctatcccctgcttctctaccactgtcccacacgcatcctgcccctcagcttggctgcagaagagcagggttccacggtctactcttctccacatccttgagtttttcacaagcggaggacaagatacagctccctgcacatctcctcccaccaaatcgaacagacacagcttcctgtagccgctaggtgagaatggatcagggctggaggtggcaggt

SEQ ID NO: 48402 - DNA, 982 bp, Homo sapiens
ccgcctagacgctggcactatggtcatggcggaggggacggcagtgctgaggcggaacaggccgggcaccaaggcgcaggatttctataattggcctgatgaatcctttgatgaaatggacagtacactagctgttcaacagtatattcaacagaacataagagcagattgctccaatattgacaaaattcttgaaccacctggaaggccaagatgaaggtgtgtggaagtatgaacatttaaggcagttctgccttgagctaaatggacttgctgtcaaacttcagagtgaatgccatccagatacttgcactcaaatgacagcaactgaacaatggatttttctttgtgcagctcataaaactccaaaagagtgtcctgctatagactatactagacacacacttgatggtgctgcatgtcttctgaatagcaataaatattttcccagcagggttagcataaaggaatcatctgtagcgaaactaggatcagtatgccgtaggatttacagaatattttcacatgcttattttcatcatcggcagatatttgatgaatatgaaaatgaaacatttttgtgtcatcggtttactaagtttgtgatgaaatacaatttgatgtccaaggataacctgattgtaccaattttagaagaggaagtacagaattcagtttctggggaaagtgaagcatgaagggaatcataggaaaaatgtactgatcatataattaacattatgtactgtatatatcattttagacacatcaatcatgtatccatattatagcttctttgtttagtataggtttttgtatgctgggtttgccttttaaaatgggaaatactttttaagttattcataagctgtatattcaccagtgtggcactcatggtttttaaataagattagtattatctgtttataatgcctgttaataaaagaatttacagtttggtaaaaaaaaaaaaaaaaaaaaa

SEQ ID NO: 48403 - DNA, 940 bp, Homo sapiens
atttctggaagctcatagaagggaccacagcattccactggtcagggaagactccatagagtaggcaacatttgggcagtgttttgaaaaatgacaagggcctgccagacagtacatgggggagaaggactttcaggggagaggaacagcatgggcaaagttatggaggcatgcaaacatctccctcttctctcccttactttccaagcaagttaggtacgctttccatggggattctggcctgtgtggtaggaagggatctcccttgctcccatgttgctggctgtccgtacatcaccctgtcccctgcaggagggggctacaggccatctccctcctgtaggcctctgactcccctccacttttgggccctcagcttatctcgggcaggggaccattgcagcatcctcccctcctcggactcaaggtgctgaggtataagccctgggccccagatccctggtgacaccttcctggagaagactctcaaaagtgactgtatatttgagtttcaccagcaataactccccacactcgaagcaggtccaaacccaggatcccagggtccttgggctctgtggcactgtcttcccaagatccttcctgttgcacaatgggaaacctaagaggaaaaagacaggggcctgcttgcccagccatgcgagggattccatgcccacctgccctctgcctgcctcgctggaatgtgggcccctgctccccgtcaggttgtgctgtctctgacctatgtttacatccccgaggggtttctgcctcctccccacccaggtcagggtgtggtccagcagcttgctgtggggtgctgacatgtgtcaccactgcccccctctgccccgggggggtcatggtctcctcctggatgctgctccttgaatcttttttcttgataaaccttttacaattaagataaaaaaaaaaa

SEQ ID NO: 48404 - DNA, 1635 bp, Homo sapiens
  misc_feature (1)...(1635): n = a,t,c or g
tttttttttctcattaacaaagcagtcaattccctttatttttaaaattttatgtacacatatgaatgatctgtataatgtacattcaatatagaaagctttatatatttgatagtgtatagaacatttcacaattacactcatcttttacataacatcttgacatccatttttaaatttttttgcacaagctccttttcattcaatttggtaaagccagttatacatactaatgtgtactgtgagctttcagaaggttaatgattgaggatgccagtgaagggtgcagggacaaaacctaatagtcttggatggtggggggaggatggccacgcagacttgatgcaggagagggaaatattctttcctggggaaaagtgacttagcccaatttttgttgactgtagctcaaccctacagtcatgctagttcaaaaaaaaaattacaaaaactaggaagaaagttttgtctttttgattcacagttttgtaaacagatataaaggaacaaatgtgcttacatacaccaagaaaaaaaaaattcttgtgtacccacttatgttgatccacagagtgctttcttataatgtgatacaattaggatcactgactttttttcctaaaaatatatttatagaaaaaggaataacactgtcatgaaaccaggagaaaggcagtaagagtttgcttcaacgtatcagctggaggaatgtggacttggcactggcctttcagcgtttattgtctctcgtgaatatttcaagtctgatagccaaggtcgcctgcctcatggtctacaggaggtggcaggttagacatgactgatgtagatgtacctgcggtaaggtagccagcaactccaggtcctgtgaggtatcctgctgtttgtgactcagaaatgaacaaatcatgtttctgatctttgaaggcactccagactgaagaacggcacaggatttcattcacctgttctccatactgcaaacttcgagtcattgccttgagagctttaacaatctgagccttagtggctgctgggctgtccaggttttcaaggccaatgccttcgagtaattttaagaggtatggaaccaaatctgctttcagggcttgtgctactaattcactctgctccttctgaaacattcgattaattgcttcacaggctagaccaacagtatctgctcgctttttcattccattcatcagtgggccaatggtctctaaagatgccatggctcgaacacacagctcattttcagacaaggcatggataacccgaatggcactcttaggaatggcattgttcctatgattcattgcctggataactttgggaagatggcccaatggcgggacctgatctgccagctgaggttgtgcgctgaagagacacactgttgccattgtcaaggtttccagagtttctccctgcaggtgtaaaacaaaaataaatcaactataaaatactcatacagtcctaaatatccaaggtaatgtatttggtgttcaaaactagggattcaaaagttctaagtgctgatacttgaaaacagattcactaatcctaagagaacaacgaacttcccattttctttcatnaaaggcatgaatctaaaggactttaagaatatgc

SEQ ID NO: 48405 - DNA, 2546 bp, Homo sapiens
gatgcactcaagcagagaagaaatccacaagtactcaccagcctcctggtctgcagagaagacagaatcaatatgagcacagcaggaaaagtaatcaaatgcaaagcagctgtgctatgggagttaaagaaacccttttccattgaggaggtagaggttgcacctcctaaggctcatgaagttcgcattaagatggtggctgtaggaatctgtggcacagatgaccacgtggttagtggtaccatggtgaccccacttcctgtgattttaggccatgaggcagccggcatcgtggagagtgttggagaaggggtgactacagtcaaaccaggtgataaagtcatcccgctctttactcctcagtgtggaaaatgcagagtttgtaaaaacccggagagcaactactgcttgaaaaatgatctaggcaatcctcgggggaccctgcaggatggcaccaggaggtttcacctgcagggggaagcccattcaccacttccttggcaccagcaccttctcccagtacacggtggtggatgagaatgcagtggccaaaattgatgcagcctcgcccctggagaaagtctgcctcattggctgtggattctcgactggttatgggtctgcagttaacgttgccaaggtcaccccaggctctacctgtgctgtgtttggcctgggaggggtcggcctatctgctgttatgggctgtaaagcagctggagcagccagaatcattgcggtggacatcaacaaggacaaatttgcaaaggccaaagagttgggtgccactgaatgcatcaaccctcaagactacaagaaacccatccaggaagtgctaaaggaaatgactgatggaggtgtggatttttcgtttgaagtcatcggtcggcttgacaccatgatggcttccctgttatgttgtcatgaggcatgtggcacaagcgtcatcgtaggggtacctcctgcttcccagaacctctcaataaaccctatgctgctactgactggacgcacctggaagggggctgtttatggtggctttaagagtaaagaaggtatcccaaaacttgtggctgattttatggctaagaagttttcactggatgcgttaataacccatgttttaccttttgaaaaaataaatgaaggatttgacctgcttcgctctggaaagagtatccgtaccgtcctgacgttttgaaacaatacagatgccttcccttgtagcagttttcagcctcctctaccctacatgatctggagcaacagctaggaaatatcattaattctgctcttcagagatgttaaaaataaattacacgtgggagctttccaaagaaatggaaattgatgggaaattatttgtcaagcaaatgtttaaaatccaaatgagaactaaataaagtgttgaacatcaactggggaattgaagccaataaaccttccttcttaaccattctactgtgtcacctttgccattgaggaaaaatattcctgtgacttcttgcatttttggtatcttcataatctttagtcatcgaatcccagtggaggggacccttttacttgccctgaacatacacatgctgggccattgtgattgaagtcttctaactctgtctcagttttcactgtcgacattttcctttttctaataaaaatgtaccaaatccctggggtaaaagctagggtaaggtaaaggatagactcacatttacaagtagtgaaggtccaagagttctaaatacaggaaatttcttaggaactcaaataaaatgccccacattttactacagtaaatggcagtgtttttatgacttttatactatttctttatggtcgatatacaattgattttttaaaataatagcagatttcttgcttcatatgacaaagcctcaattactaattgtaaaaactgaactattcccagaatcatgttcaaaaaatctgtaatttttgctgatgaaagtgcttcattgactaaacagtattagtttgtggctataaatgattatttagatgatgactgaaaatgtgtataaagtaattaaaagtaatatggtggctttaagtgtagagatgggatggcaaatgctgtgaatgcagaatgtaaaattggtaactaagaaatggcacaaacaccttaagcaatatattttcctagtagatatatatatacacatacatatatacacatatacaaatgtatatttttgcaaaattgttttcaatctagaacttttctattaactaccatgtcttaaaatcaagtctataatcctagcattagtttaatattttgaatatgtaaagacctgtgttaatgctttgttaatgcttttcccactctcatttgttaatgctttcccactctcaggggaaggatttgcattttgagctttatctctaaatgtgacatgcaaagattattcctggtaaaggaggtagctgtctccaaaaatgctattgttgcaatatctacattctatttcatattatgaaagaccttagacataaagtaaaatagtttatcatttactgtg

SEQ ID NO: 48406 - DNA, 585 bp, Homo sapiens
aagatggcggatctgtagtagttaccgcggcggcgggagagcaagcgagccctggggggcaaagagacgggagagtgggtgtatgcgcgggtgaagtgagaggtaacggggcctccgggcggagaggcctcagtggctcttgtcaccccttctcgcggctgaacctttggagccatggtgaattcgggcctctccgaagccgccgccgccgccaccgccactactgcctttaccgtctcctaagagtgaggagcgcggacgaggtaagcgaggaggcggcggctagagcggtggagacagcagccaccatgtcggatacgcggcggcgagtgaaggtctataccctgaacgaagaccggcaatgggacgaccgaggcaccgggcacgtctcctccacttacgtggaggagctcaaggggatgtcgctgctggttcgggcagagtccgacggatcactactcttggaatcaaagataaatccaaatactgcatatcagaaacaacaggcaagtagttgtttatctttaatttgaaagacttcatctgtgatcaaggaagtattaatctgacaaaggttgggaaagc

SEQ ID NO: 48407 - DNA, 534 bp, Homo sapiens
acagctggtcctgaatgtccccaacccaaccccctctttcagtacaggtgagacattttcagttccatgagctcccagacccaaatccccaggccagcccttgcaccaaaagccttttttagaaggcttatcagtctattaggaatgtcctcaggaaagatgagccatttctttggggagaaatatatttacagatggaagtgtgtgactgcgtgtctgtgtgtgtgtgtggtgtgtgtgcgcacgtgagtgcgtgtgttcatctatgtgcatttcacttccataaagacccagcccaagctgctgggaaccatgtgttcctgagtattctcagaggttaaacaagtgacaagtgagcttctgaaattagtgtctcagcaagctggctttaggaatgagccccattttatcaagcagagaaaaaaaataacagcagaaaagataaagataaaccaaaaatatataccccccaatggaaaataatgttgattcagcaattcccataggatgtattacatgctctaatttattata

SEQ ID NO: 48408 - DNA, 1378 bp, Homo sapiens
tttttttttttttaaaaaacaagctttaatccatttcataaaaattgttcttgcaattgaacacagccaggcccacatgcccagcaggttgcaggagacagtttcacattttccaggctcaggacagggcagtctcctccacatgccacaggtgtctgagtgacagtgtagacgcctgatgggcaggaggtaggcacagatgatctgaaggggtcatctatttaaaagtctgcaactccagttcaacggacaccttaaacactgtcaggcacgtaccccaagagaaaattaagcccagagaagaaaacctcaggcttgagagccctgtacccctcctcaaccgctgccacctgggaccagggccagcctgaggcaatgggggcacctgaatttgccccaaagggctccctcattcaaatcacagatataggcacagctttaggattcagcagggcagggagggaggaagcaggcgtgagctgggccacagctttgaatgacctaccagcccctggcgtcaccaagaactggtgtttaatgaggggaatgaccaccgccacacagaactacctagccaagcccctccccagcagctgcctccctccctggatgaggggagttgtgccgggagtcccagaaaggaggcatcgatgccccagcccaaacatgatgtcgactgcagggacccacaggacacatgtccctttttcaaaaaatactacggcaaaatgataggaaactaacagacgtggcccctcagagtgatgaaacccacgtgtctgcgggccagctcgagccacagtcgcgccaacaagcgcatgaaacagttaaatgcacactcccaacagcggggcccccgggctgctcggagctggctccagctgctgtcactgtccactgagaaaggccaagtgccctttggtgcatctgttggcgtagtgtcctttctcgccacacttgtaacaggtgacctgctccagtggccggggtccccggttgcccgcgctgctgttttgactctgcatgaccccgatgacctgcggggttctctgctgattgggagaagagttctgactcgttaactggatcaaggaggacgacctttgtaatggcggattgttactttgctttgctggaggctgtgtctgctgcggcagtgggggctgctcggtggttcccatgggcagttcaaatcgagggtgcatgaatttacacgagggcccctccgggcagaatcccacgaggtaattcacacagatgactctccgtgtgtgccggtgcctgcagaggggaccgtgcttgcagaagccacggtcataccaaggacagtccttgatcttggactcggggtcgatgtgcaggaagggacattccttgc

SEQ ID NO: 48409 - DNA, 2127 bp, Homo sapiens
ttttttttagccttaggcatggtttttattcacttgaacactgtacaaatattacaatttccttttgctgcaaaaagtataaaaataatctttatataggaatccattcgttactgtaaatctttctaaatctctgcaaatggctctaaatgagggtaaatgaaaaagccgaaatgaagagagggttatgggggcagacaggaggtggggccaatcattcagggctgggaccacccagactcctccccagagacctctgttccttcttggtagccgcccccaccacctgcaggttctagggctaaaggcccagcagaagtgggcacgtgagagggccaggaggagctggagggtcagggggtgggggatagcgaaggaagctagaagtggtgctggcatgtgcccagttccaccccacccttccctcctaggggaaggagctggcagaagcaagacactgaggctggcaggaacaagacactgccccctatggggggtaatggcagctcctcggttctgtgccactgggtggcagccgagcctgggctggcgaaggccgcagaaagggagaagcaaacactttggctccacggtgatgggggctgagtcctgttcccctgctctgcgagcacagaagtgccagcacaggagcgggagctgtggcccagaactgtgcggtgaaggggaggccggagaagccaggcgtctgtggctctcaagctctgtaggggtcgggtgggaaaaggtcccccaggcaaccccccaggtcagacagtctgggtcccagccacacagggcatgtccctgtcagtcagaggttgagaacaggcacatcaaagaggtcacagacaccttcactctcgtccaggttgtagatataatcgtggtctcccgggggtggagaaagacgaagcagaggggcaaacacttctgaggacatcaactcctccagcagctccgagctcatgcactctcgtgtgggatcaaagatttctgacagctctttggggagttccaaaacacctgtggggtctgccttgatgggctcaaaaggaggtagaagggttgggtccggacgaactgctgctgttactgttgctgctgcctgctgctgctgctgctgctgctgctgctgctgctgctgctgtccagcagggcagaagactgcagtggccgggtgtccagtgttgttgggcccagtgggagtgaactgagctcaccactgtccttgctatcagtcccagggccgccactcactgtgatctcagctgctgggccagccattccctggacttctgcactgccagggacagcagtgggagtgagctgaggactatttggacgtgaggcttcctgggactgggctagggcaggcttgggcagaggtggaggtgtagaaacagcagatgggctctggagcaaatcttcaggtggtggcacaggcacagccacagggggtgagctccatgcctccttgttcaccagcagaacctcaatgggaccactcacactcttcaggtgaatctggtacttcttctgcccattgagaccctctgggatgggcacctccaggctggtgcctgatggggcccggatggccaagagggtatctccagcaaagcatctgcagatgtcctcatgagtgacgtaggccaaacagctgttctgcacgtcctctgtgacgttccggatgctctgctgcacccacaccttgtgctggtctagttcttgctcccgctgctgcagctcctcgatctctgccttgagctcaatcagtttgtcagcaatctcccgggtattgcagccaggccccacacccttccactggatgctgttcttggactttttctcgattagcccgataccttccaaaacattggtaatgtcgtaaatccgccgcttctggcgtacagctagggtgtcagctgccagcttgaggtcaagcacgccgtccttggcctcctgcagaagggacacgaacttggtggtgagcagtcccaggctcttttcgtgccggcttggagtgcccgggggcggcggcgcctgtggcccggcctccgccatcgcgcccgcccgccgcctcccctcagccaggccaggccaggcgcgccgccgccacttccgcgc

SEQ ID NO: 48410 - DNA, 2672 bp, Homo sapiens
gtgtttttttcattagtagctgtttattgatcaatggtttgatataaagttatttcagatcttcagacttttgcccagatggaatcacaagcattacaaagtttttttcttaaaaataaaaaaaggataggggcaagttgggaggggaccaacctagcagtagtggcatttgagaataaattaacaaaaaaatttagtattaccatttattgatgacaaacacttaagttttacttacattccatggggagaaaaattccagcgtaaacaatgaatggaagcagtacttaactcgcagggctaccaggctttccatacggaccacacgcagagcctcagtgcacacacttctgtgtacagtaacacaacatcaaaagcaacacagctgtatacagaaacgtaggtcattcttttcagccctaatggagatgtaattaacagtatcgagcactctggaaaatcactctgcaggtttatatggactacatggagatcatatcctgtagtgtagtgaaagctaagtcctcaagagccatatgtatagatacacaatgttttttaataatctttaaaacagagatcaaagttcatttaagtcctgtttgcattaacaaaaataaaaatgaaataaaaatggaaccaaatgatcatctaaagtttaaaattcctaaattgtccaatttatacaactgtgggagacttattcaaggtttttgaaagtccaggactgtttcagctgaaccagagggcacacaatttgcatcactgaaactgtcctgggttagtcaatgaaataaaaatgtctaaccaacatacacatggatatgatccttgtcggttagattattgataaagtcagtctcagaacaagtttccaaactgtgctatttaactagatacaattgagaaattctcaaatgaaaattttatatagtgtcatatcaatcaaaagaaaataatgaaactaagaatacagatcactgttggaagagaaagcagtggtgatggtgtgggtactgcaggaggtggtggggccgtggcacactagaaaagttgggtcacgctgagtaggaagcatttgattttctctggtgcttttagctctggggccggtcaaaggcctctctctggcatggctgtccagggtttgtcccaatgtgtctgagtgagccagcttgagaaggggtcgtgccgtttcttctttcacacaggggaaaaaaaagaccaaacacggaggtgcccagggtgtggatctgctggtgtcccgggagaaccagctggcttgggcagcccttcttccccacaggcagctgctattgcggtagggaccgccaggtcaccgagtggccatcacaacaaaccccagcacagtccagcccggccacagccgcctccttgtgtttctgttgtcttccctgctgctgcccacatcctttacccaccgtgtctctcggcccactggaggtatcagaaattccaaattttcaaagcagtttcagtattttcagtatatatgttgggattttataatggttcatggccagaaaaggttcagcacctcccacacacagacattggtccgtttcctgttcttggcatctctgtactttgttggtccaactcagacagcaactttaagatgttcagcgcagccatatcatggcaggactccacatccttgccgataccatggctgatcagaggtggctgagaggagcaattgataagagatacaaattcgttcttgttgtttttggggaagtctttgtattcaacctggaatccctggactctggaaagatagtccagttgctcagagggtctcgtgagaggtccatggggtacgtggcctgaagagatgttattctttaaaatggtctcggctgtgggcgagggtgcccccatacaacaactctcgggctatcatggcagttaccgtggccttggcaggattcggagctgccctggtaaaatctttggtgtgatgtccttgactaactcctacagcctgggcgacctcgggcaccatgggaagaattccagcaggcagctgctgatgacttagataaggcatcctgaactcatcctctttattactagtcccattttcatccccagagccaggttcaaaaaaggttacttttcttccatcccctggtttctttatgggtgtcttctcctctgacttgagtgcgggtttggtgggctgcgcctgcgggactttgaaaccaaggatctccagcatgttctcggctgcattgcgcttggccaccttcttgttggtgcccgttccttctgcaggtgtggtttccaaccttcacctgcatcacaaactccctgcggcgcgggaggcctcgctctgtgaggagcgtgtactctggctccttcggcttttttgcctgctggatctgggccagtcggctaatcggattgatcccctggccatattctgggcttgtctgtggcttgactatgggttttgttttctttttgattctaggctttactcgttcaactgcaggcaggggcggtaacttcttcagctcctcaagaacagctatggcggcatttttctttgaaatcttcttgcttttcccttcaccttcccccacaaactccccaaccgaaaccttggtcacaaagttcttcatgtggggtgggccactctcccg

SEQ ID NO: 48411 - DNA, 2273 bp, Homo sapiens
tggttttaaagtaatgactttattaataaatatacatccatatgatgatgtagatacaaatcatgaacactactccattcccatacacataattgcacacgagtagctcaagttcatggacataaaaacatacacagtatctattcagactttttacagcagaggacagcgtgcttattatcagttaattggtaattattttctccaaaattacctgtggaaaaaagaaattctgaaaacttaaaagaatcaaagtgatctgattactttaaatcacacacttgatttactatatagcattaaattttccaaaaattaaatacattacatgtgagagcacagatttatatatttggaggaggggggaaaaaaggaaagattcagatacatcctagagtttaacagcatacagttaagctgtaataaaaacaaaaatagaatagcatcaaaattttttatgtccaaggaaaaaaatcttttggaaaaactgttttgaattctttatattcctataaagggaccataaaattttactgcatatagagacaatgaccgacagagtagcagttatcaataacccctgaattgttcttttaaagcttcttagaatataaaggagaaatttacttttttttttctttagctcacacactatggttatttttacactgaatgggtcaactttaacctaataaatggacccacatatatatttttttctcctcaactcaaagaaactctattcttagttcatgaaaatagacatgtaaattcacacaaacatcagtttggaatcaatattactttgacagatgtttctttaaaaagtaaataaaaaatataaagaatttttagtctaattaaaacattgattttttaaaatgtccctaaatattaaaaattaaaccagatactactcattttcttccaatacattgtgccaatatattttttaatatccaatgcaaaactctaaagatagtatcaaaatcaccctaaatactacttatgcaaggttatatctgtcaaaaaatgaaaatttcatctgttattagctcatttgctaatataataaataaggcatgttaaagtactttttaaagaaaaaagtaatgcagacttacttgaattgcagatcattttctgaccaacagtttaaatatagaataatgaaacctattttgtgaagaacagaattacactgtataaaattagcaatttacctttcaagaaacaatcatacagtgggggagaaaaggccagttttccccaactgattatattaaagtataggcaactgtttaacatgctatttcagtgtttatcataacaagagacagtgttaacaaaatatgcacaatgtagtctttagtttatatagcagtaaaaatactttaaattttaagacttcattcatgttatcacttagatgtctttctcttcagcatggcaccggtaaactgttcacagggagaaaagtaagtggaatcaggagatgctcaccagtgcatagatataatactccaggtaaccgctcagatgaacagtaaattcggctttctaaatgatgttatccatttacaactgtagccatttgcccctcccatttttttttcctgggacatagctgctgataataaacactgttatgaacatgcctcctttagttgatctcaccatttcataaacatgtatacaaaattcattatacaataatacacctgttttatcttctgacacacagcacagcaccagtaagtagatgtgctggagggtagaggaagaggaatgaatgtacgaaaggcaggggagaaagggaagggtatgtataacaaaataaggaaggaaaataaactgaaagggaaataaatgtcaaatggacttactataaaacacaataatcaaatctttgacaatggtgtgcattattctatggtagaacattaaacaaatgtctttagaaactggcttgaaaaagatttctaagcagccaactgctgaacatcatcttgagaaacagctaaatgacagatacatgtacagagtaggtaacgaacatatgaataaagaggcaagcatttgtgtgtgtcagaagttatactgttctgagtaaattattaaaaatcttgtattttaagcttttgcaagaaaaagctcttgtagcaatttagctgccagaatgttataactgattatgtaaccatccaacatcgttctctatggtttgtgcaaagctaatattgttgaggtcactgtcttagacgccagtgcac

SEQ ID NO: 48412 - DNA, 2467 bp, Homo sapiens
ctcggagtttttttttttttttttttaggattacacactttaatctgattgacactgaggaagtagggaggacatgaaagaaatttagttttagctctgctttatgcataaccagatgctccttttctaaaaagtatattgaggttttaaaaaacacatttatcagaatacttcaggaaaccatactatgtgtaatccaggaaatacactatttgcagaataggaaaatcatcactggcaacaaaagattaaaacaaaaataaagcaccagggttctgagcagttctaaggtgagtatatcagcagaaatagtgtaaatgctcttgactggttgctatgcaaacatgctaatgaggactagtccatgtcttataatttttttttttaacatgtttctttggaaaaatggcaatattgagtggaagagaagctgtccttttagacacccagcttattggcctgggtgagaacaactttgagaactggcatgaaagcagaggtctcactgaagttgctggtgctaactatgtgggtatgcatggtcaatccttctgagtagtttcgagtttcaatgctccttgcaatgttgtgtaaaccactggtgattgttggtgaaagtgtctgttccctaagtttatcatacagaaactccaaacggtttgctggcatcatctagcttcctcttggtttgagggtctgttgctgaagaaaggcagcgctgaataagatcctcaaatgtggtctttagaatgaggtgctcatctggaataggtttcttggtaattttttttgttggcaaagactgcacatgctggaaggtatttccaataggagcccctggggcaccttcaatattgggctttgaaaaagatggtggcatgcctgtttgaccaagaggtttgctgtacgccatggaagggctggccacctggaagatgtggctgtgggaatgaagactggcttgacagtggtactggagctgaaggctgttgctgcagcatttgtgactgggggtcacccaacgggttcatgattggtgatgtgatgggaacaggaggcatgaagttttcaggcatcttcttctttttgggtactctgttcaaagctggagggtcattccaacccattctgaggacctgttctttgggacgcaggcagctcactggcagcaggcagtgtacctgttgttccaggaggcagtgcataagcctgaagatgatggtggagctcctggtccgccatgctggaaggatgctccagaggaagggggaggagggaaagaagtagcagggctggaggtaggtgaagaggcctggtgctgtgctggcgaggaccttcggcagccggatcctgcgttagtgcagcgctcgtccagtataggaagaagcagaagatatgtaaggggtgttagggtaagcgtttgaagtaggaggagcaacaggctgctgaggtcgatacattgctgacccccctgttccgaagggatacggctgggctggttgataaggctgtggctgtggataaggtggtacctgggtgtgcatatgacctggagatgtgggaagctgaccagcagcatttggattaacatttccatgcattatgaaacccggaggtggaggattttctccatggggataatattgttgagtttgaactcttggcatctggtggtggccagcaactggtccaggcctgcccttggggagctgctgtttctcgtacggaattttaggtgattcatgtcctgctacaggctctccttgtgctctacaaagtctgtcacgaagctgcatgatatttggctggttggtgttgtcaggaagaaaagccaaggctgcagcaatactgccctgagctgccaacaaattggcatactgactcatcttcgcagccaagagaactcctacagtactagtgtccatggcttgagtgagttgcacagcttttcgcaggatgacaactttctcaatcagatcctgaagtgacaaagggtggcttccatcttgagctttagtccaacatgcaactaatttctctacattccctgcacaaatatagcagagacatgcttgagtctgcaggaggctatctccttcattttcaagcctggttcccaaaagatcacaaagggctgaaaattcatccggctttgcataagtcaatactgcagctaaagcctctctccaatttttaagatcacaagactcaacaatctctttccagttcttcatcaccactgcagtgatgagcctggtaattttgctttgggattttgcgaagtattttttctgggttcgagccaagagttcttgtccacctgctatggccaatataatgcatcggccatgcggttatcatgtaaacaaaggtcaacagcactctcaaaattgcccgtcagcaaagcctgagtaattaaaccatcaatgtccccactgacagagatattaaatgttcctccagatga

SEQ ID NO: 48413 - DNA, 1409 bp, Homo sapiens
ggtgtttccagaagagaaatttaatctaatttacatacttctaggtacatcgataaccaaaatgtggccactgaaaaaagttaaaaggtcaatcagctcctggcttctagctggcccaggattgcaaaataaaaagatccacgttccttattctctacacaaaacgcgtttttaaaaaagtgaaaggtctagggagctatacatagaaagcaacagtgaaaagggagagggagcaggagtgggggaggagagtcccaccccccaaccccaccctccagggccccagagcccctgaggctctttggggggccttgacatggcaggaggcagctgtcagctctgagctcttcccagctgggaaggcccctctcggggggcaaccaacaaggatttccgtggcattgtgggctcagtggggggctcccaggccccagcaggccccacagagggagcgtggcttcccctgagcaagcaccgtggcatgatgtggtcgttcaacccaggaactgggggtccggggcaggtcccgggtctcacgaggtgcgtgttgtgtgtgttcgcatgtacatgtgtgtgagaggatattcatgggggagagagggaaccagaacaggggtctttggggtctttgcaaatggccacggatggcagacatcgccctgcctggctgctagacgggggagtgctgtcctcccctgtgaccagaccggctgccatcagagacctggctgctgcccctgctggaccaggtgggcatgggctgaaggaagacaccctgtggccccagagtcctcgggctgggggaagggcagctagctggctcccggcgccctggctgtagtgtgcccggcccccaaggggcgccggtttgaggttttggcttgctcctttggaaacggaaagaaagaggaagagggacgaggacacagaggaggaagaagaggagacagaggtggcacgagaggggatctggaatgcttttgtgttagggagcctctgccgccgctgtctgtgcctgcggggcctgggactcctcaggtggggggtccgctttggagaagttcatctccaggatgtgccgctgtaagtgccgcacccactcttcctggatggagagggggccctggaattccacctcacagaacctgcatttgagggtgtagatgttgcccacgaacttgacaagtgatgtctgggggggccggggcaccagggaggggactggccggactcggggtgggggttgccgcacctcctccagcttctgctgtaggtcattggtgtcctcgcctcctcgggctgcgaaggcatctggaggacgggcttgtcggcgttcaaatttgttgatgttctgctgctggtgctcctcagccttcacggtgcctggcgggctggctgccaaaggccgc

SEQ ID NO: 48414 - DNA, 1154 bp, Homo sapiens
  misc_feature (1)...(1154): n = a,t,c or g
gataaaggggttgagcatggaggtgaccaccgtgtacatcactgcagccactgcaccctttctgggggaagatgacacatctgaactgaggtaccctccaacacctcttccataaaatcagcaaacaactgacaggtgagacccacaggtggagaaggctttatacttcccacctgatgatgaaaccctcagaatggaggaaacaattttatagtaagagaaaagggtccccgagatgggaagaaaaccaaatatggcagtagggaaatacatgactatgttattggtgaaggtgtcacaacacgcatggtgggggagttgagaagggtcacagaagaaattaggaatttccacatccttgaagcaggtaatttgcaaggcaatcaaattgtgcagctgggagtctaaaagactgagaaaaaaaaaagacaacagaactagaaagccacagaaacatgggttcatgatggtgaatgatatagcgggtgacagatggctacaaaccagtcataggccatcacactcaggagcatgtctctcttccatgcctccaaaaatggcaaagagagacatctgagtcaggcagcctgcataggagatgactctgctgtgagactggatgtccacaatcatcttggggaccgtggtggaggtgaaaccgatgtcaggcaaggacaggttggagaggaagaagtacatgggggtgtggaggtgggagtcagggctgatggccaggatgatgagcaggttccccagcaccgtgaccaggcacatggacaggaacagcccagcaaggactggctgcagttctggatcccctgagacttctaggaggaggaatatagagacatctgttagattctgtgggtctgcataatttggacacctttgcctagaaacgagggttgaaaaatgggaaacaagtaaaccaacacctggcattgtgtctgcattttgaatagaagcaattcacaagtaatgttttcagatttcagagcaatccacactcagcaatattttgcagttctgacagactcaattgtcttataattcctcgtgccgaattcttggcctcgagggccaaattccctatagtgagtcgtattaaattcgtaatcatgtcatanctggtattcaaatnntggtnnncaaaa

SEQ ID NO: 48415 - DNA, 415 bp, Homo sapiens
ggtgaaatggtacagccactctggaaaacagatctggcagttaccatcctgggtatttatcccagagaaatgaaaactactctgtatacgttagccaggcatggtgatgcgtgcctgtaatcccagctactccggaggctgaggcacaagaattgcttgaacccgggaggcagaggttgcagtgagccaagattgtgccactatattccagcatgggcaatagaccaagaccctgtctcaaaaaaataaaaaataacttatctgtacatgaatgttaatagtagctttattggtaatagccagaaactggaaacaaatcaggtgttttcaacagtgaatggttaaacaagctgtggtagatacccatggaatactactgagcaatagaaaaggaaccaactattggtacatgttg

SEQ ID NO: 48416 - DNA, 3982 bp, Homo sapiens
aacaggcgtgacgccagttctaaacttgaaacaaaacaaaacttcaaagtacaccaaaatagaacctccttaaagcataaatctcacggagggtctcggccgccagtggaaggagccaccgcccccgccccgaccatggccgaggagctggtcttagagaggtgtgatctggagctggagaccaatggccgagaccaccacacggccgacctgtgccgggagaagctggtggtgcgacggggccagcccttctggctgaccctgcactttgagggccgcaactaccaggccagtgtagacagtctcaccttcagtgtcgtgaccggcccagcccctagccaggaggccgggaccaaggcccgttttccactaagagatgctgtggaggagggtgactggacagccaccgtggtggaccagcaagactgcaccctctcgctgcagctcaccaccccggccaacgcccccatcggcctgtatcgcctcagcctggaggcctccactggctaccagggatccagctttgtgctgggccacttcattttgctcttcaacgcctggtgcccagcggatgctgtgtacctggactcggaagaggagcggcaggagtatgtcctcacccagcagggctttatctaccagggctcggccaagttcatcaagaacataccttggaattttgggcagtttcaagatgggatcctagacatctgcctgatccttctagatgtcaaccccaagttcctgaagaacgccggccgtgactgctcccggcgcagcagccccgtctacgtgggccgggtgggtagtggcatggtcaactgcaacgatgaccagggtgtgctgctgggacgctgggacaacaactacggggacggcgtcagccccatgtcctggatcggcagcgtggacatcctgcggcgctggaagaaccacggctgccagcgcgtcaagtatggccagtgctgggtcttcgccgccgtggcctgcacagtgctgaggtgcctaggcatccctacccgcgtcgtgaccaactacaactcggcccatgaccagaacagcaaccttctcatcgagtacttccgcaatgagtttggggagatccagggtgacaagagcgagatgatctggaacttccactgctgggtggagtcgtggatgaccaggccggacctgcagccggggtacgagggctggcaggccctggacccaacgccccaggagaagagcgaaggaacgtactgctgtggcccagttccagttcgtgccatcaaggagggcgacctgagcaccaagtacgatgcgccctttgtctttgcggaggtcaatgccgacgtggtagactggatccagcaggacgatgggtctgtgcacaaatccatcaaccgttccctgatcgttgggctgaagatcagcactaagagcgtgggccgagacgagcgggaggatatcacccacacctacaaatacccagaggggtcctcagaggagagggaggccttcacaagggcgaaccacctgaacaaactggccgagaaggaggagacagggatggccatgcggatccgtgtgggccagagcatgaacatgggcagtgactttgacgtctttgcccacatcaccaacaacaccgctgaggagtacgtctgccgcctcctgctctgtgcccgcaccgtcagctacaatgggatcttggggcccgagtgtggcaccaagtacctgctcaacctcaacctgagcctttctctgagaagagcgttcctctttgcatcctctatgagaaataccgtgactgccttacggagtccaacctcatcaaggtgcggccctcctcgtggagccagttatcaacagctacctgctggctgagagggacctctacctggagaatccagaaatcaagatccggatccttggggagcccaagcagaaacgcaagctggtggctgaggtgtccctgcagaacccgctccctgtggccctggaaggctgcaccttcactgtggagggggccggcctgactgaggagcagaagacggtggagatcccagaccccgtggaggcaggggaggaagttaaggtgagaatggacctgctgccgctccacatgggcctccacaagctggtggtgaacttcgagagcgacaagctgaaggctgtgaagggcttccggaatgtcatcattggccccgcctaagggacccctgctcccagcctgctgagagcccccaccttgatcccaatccttatcccaagctagtgagcaaaatatgccccttcttgggccccagaccccagggcagggtggcacagcctatgggggctctcggaaatggaatgtgcccctggcccatctcagcctcctgagcctgtgggtccccactcaccccctttgctgtgaggaatgctctgtgccagaaacagtgggagccctgaccttggctgactggggctggggtgagagaggaaagacctacattccctctcctgcccagatgccctttggaaagccattgaccacccaccatattgtttgatctacttcatagctccttggagcaggcaaaaaagggacagcatgccccttggctggatcagggaatccagctccctagactgcatcccgtacctcttcccatgactgcacccagctccagggggcccttgggacagccagagctggggtggggacagtgataggcccaaggtcccctccacatcccagcagcccaagcttaatagccctccccctcaacctcaccattgtgaagcacctactatgtgctgggtgcctcccacacttgctggggctcacggggcctccaacccatttaatcaccatgggaaactgttgtgggcgctgcttccaggataaggagactgaggcttagagagaggaggcagccccctccacaccagtggcctcgtggttattagcaaggctgggtaatgtgaaggcccaagagcagagtctgggcctctgactctgagtccactgctccatttataaccccagcctgacctgagactgtcggagaggctgtctggggcctttatcaaaaaaagactcagccaagacaaggaggtagagaggggactgggggactgggagtcagagccctggctgggttcaggtcccacgtctggccaggcactgccttctcctctctgggcctttgtttccttgttggtcagaggagtgattgaaccagctcatctccaaggatcctctccactccatgtttgcaatgcttttatatggcccagccttgtaaataaccacaaggtccactccctgctccacgaagccttaagccataggcccaggatatttctgagagtgaaaccatgactgtgaccaccttctgtccccagccctgtcctggttccttcctatgcccaggtaccacccttcagaccccagttctaggggagaagagccctggacacccctgctctacccatgagcctgcccgctgcaatgcctagacttcccaacagccttagctgccagtgctggtcactaaccaacaaggttggcaccccagctaccccttctttggcagggctaaggcccccaaacatagcccctgccccggaggaagcttggggaacccatgaagttgtcagcttttgacttttatctcctgctcttttcttacatgactgggcctcccttgggctggaagaattggggattctctattggaggtgagatcacagcctccagggccccccaaatcccagggaaggacttggagagaatcatgctgttgcatttagaactttctgctttgcacaggaaagagtcacacaattaatcaacatgtatattttctctatacatagagctctatttctctacggttttataaaagccttgggttccaaccaggcagtagatgtgcttctgaaccgcaaggagcaaacactgaaataaaatagtttatttttcacactcaacgaaaaaaaaaaaaaaaaa

SEQ ID NO: 48417 - DNA, 644 bp, Homo sapiens
gaagcagttaggaatcaggacgctgtgttggttagagctgcttctccagcagggtactcctgtcagtgcacgtactgcttcacatgcctgcttttgctgcaatgtatttctttaaagtagttcttcaaaactggtattacttggaaaccaactagcaccatgtttttgttgcactcatcttttaggataaagagcaagtaaactactaaagggatttctttagaaatcagtttcctgggggataactatgggtctgataggactcagtccatttcttatactgtctacagtattgtacaaagagaggctgaagttctcagttatgtctctgagggcaagtgaaattaaagaaaggttgcattattttccaaattcctatacttaggaaaaagtttttcaggaacaaatcttgaaatagaaagggtttttggtaaacctgataaatcctacaagaatgaattccctagtaacaggattatattttacagctttgtatctccctcagtacttcgtactatgaatttacctgctttccatttatcaggcaaattaaatttcctagaaaaacttcattcatcaagctttcttgttaatgtagacttaatttttaaaaatattttgcaataattcatcctatattgggt

SEQ ID NO: 48418 - DNA, 1579 bp, Homo sapiens
ttttttttttttttttaaattcaacattttaattgtgatataacttatgtaaatactttccaaaaagtatctaagatattccactgtacaacacatcaaaactatctgagaagcgggagacaataaagtgtaaataaggcacacagtttacactcgtaattgcatcctaaactgttgaatagttgatatttacaaccccccaataacgtttttgcatcctgaattagtccttcacatcttgatatttggcataatgttcaaacacactttatacacactgaccgctccttaaaccactcacagatttaataaataccgaaaaaattaagagatttgaaggcttgatcttctatttacttcaagatgacagaagagtaggtttcttgtgatgaaatactacaagaatgaagaattaacaaactgttgtgtaattcatcagaaaagcatattaactctgctgaagtaccactgaatgaaacaaaaatgaagctgtgaagtagcaatctgattagcaggctggcttctatgtcccatcactctcgtagtcttctattattatgttttcttccatgtctccttgggctgaaaagggctggggctggctagcaggcagttcactggcactattctgactcaaaggaagagaccaggtttccggcacagtggcttgagtgggttcacccagagattcctctgcagaatgtcctccattaagctggggcttcatctccgctgtcagggtctatcattccatgttccctgtcagtcagggcttccattttcaatcttccaaagtgtccgccttccagagggagcccttccccaatatccttggataaaagaaatctgagcttgatttctcattggaatggttagtagagcaaggtatggcaatagctgagtttggaggcataaagctggtaggcagaagtcaggaaaaagtgcttttgctgccaggcaattttcccgatactttttatttattagaaaccactgaggtttgtgcaagggtcgaaaacttgatcctcctccttggcaatgagcatatcctcgggctttgttggaatgcatcacacctctcgtagctatagatgtgctatattccctgagtaaagagcgtgtattccagtcaccactgaggatatctgcaaaactcagaaattcactggctctcacaatatcatcaatttccatgaagaaatctatgtagttttggtgaagatataaattaaataagtctccaggcatgtgtgacatttctactacctcctcaggttcaacaagtaatgtatcccgttcatattctgataaatgagagggcaaccgaggtgagtctaattctgttaaagatgctcttttacaatatagaattttccccaaagctctgaagagaaacagagaaacatctttgccaccaatagcttggacctcttgattttcaaaaaccctatcaggtttttttcttcgttttgattttgacagcacagcatctgattttaaagacattccttttttccttggccgtaagttgttttctccttttgaagaagaaaactggaggctgtttattgcacttctg

SEQ ID NO: 48419 - DNA, 375 bp, Homo sapiens
gcttcaacgtttattaattgaatacagtactttgttttttttggtatttttgtttggtttggtggagacagcatctcgctctgtcacccaaactggagtgcttggggccatcaatgctcactcagcctcggcctcccgggctcaagccatcctacactagaaaggtctgagtcattacagagtggccaccagtgtcatctgaggcacgggtaggtggctcattcagggccacaccagcggctcctttttagtacatgtgaagagtgtaaagcaaaggagaataaggtgtgtaaaaggttgtgccaatggtgactgtcagccacacttcctgccctcttgcttgtcctttcaagtacagagctgtggctcacccag

SEQ ID NO: 48420 - DNA, 1464 bp, Homo sapiens
tttttttttttttacaataactgacttttgctttattgtgtaatttacacaggacaaccccaaattccacacttcgtttttctcttctgccttcattattctttcaatatctacgtcaacagaaatcgtttctcccaataacatatgtggtttgatcctcagccaggacgcacaggccctacaagatcccagccctccaacacggacacctggaccctcccatttgactgcagccttgtctgtttgtaccggggctctgccctggtcctgtcacccctgagacgtccgtaaggtaggaatgccaaacaggatctgtgtgatgtgtcaactctgagtaaatacaagaggctgctaggagcccccagctgaggattgagaggcaggctgtgtctggttccatttcaaagaatgctgtgatgcattagcagcgtctgctatggcaacacccattagaagcacctggaaggggggttttgggaaacgggctcagaaaggagcaaggtgtgtccgttccattcttgccttaggtggctgttccgttacccaggctatgctgtcctcagtgggccaggtggctgaggaggaagtctgaaaggccgcatagttgcaagtggcttccctagggccctgcaggggacagcataggccccaaagcttagaggaagcttggaagggcgcccacgctggggtcctgcggggctctgcatactgcagggccaccatggcgctagctccttaccctctggagtctgtctcatcccaggagaagacagctggctggccctcagagcgttacatgcaactcgggtgaaaacatttttacatgacacagacacacaatgggctttacctctggataaacttagaaactttccatccaaacgaaaagggtgtatcttctgtatgttgccaagaagcctaaactgagtacaaggacgatcttactttaatcaagttccagaatgagggtacacagcttcgaaaagcagtctgtagcagaagatgcaagggtgtgtgtagccatgtttccagaatataccaaaggaaacacacacaaccccagtgtggccttttgcgaaccctcgatgctgctccatactgggggcaggcggctacttcgtccagctgactttgggaatgtcgtaatgctccgtgagtgtgtccaggtgtctgttgaagtcctccactctctgcttgtgggttttggatgccttctttaggatcctttccatttgccgcttctcctgcattttctcgaaggccgcctgggccggggtccgcttgtccaggccgcgccgcttctcctcctcgttctttttgctcgttcccattgcttccaggagtttcgctttgtctttgtccttctttttcttcttccgcttggtcactcccagctctgcgacgcctttcagcttcaggggtcccttttggacctgctcgtaggcctccatgacactctccagt

SEQ ID NO: 48421 - DNA, 1653 bp, Homo sapiens
  misc_feature (1)...(1653): n = a,t,c or g
tttttttttttttggaaactgcgcatggcacaaccaacagcgctcccgcccctttttatttgaattcggagaaccagaggcgcctgcagattctggaggggtctcgcctgcccatcgctggcagcccgagatcctggggaggggatgccatactgctagagatgagggaagagagccccaagcaggaaaacattgatttgctgtacactcaaagggcatctcatgccttcagtccaccgcctcctcgggccacagcccgtgccctcgcgccggctcagactagctctggccctgctgctgtcgctgcaggttgtcgtcttcttccttggtggtcctcgggcaggggcggctcctccagccctgcagaggatgtctggagctcccgggtggacccggcgaggcggaagaccacggggatctgggccagggttgggttggtctcctgcaggccctggatccacttagccatcgtcgcctggtcatgagcacccgccatgcacatggcgaagacagggccttcctccacttcattgatgtcaaactcgtagttgtcccagccactcctcacatactccaggtccagctgcatcgggtagtagaggttccactcctccggcgtctcttccacttcacttcttcttccgggggcagcaagtcagctctgaggatgtggtaatacacacacttgttgcggagccacagggagaaggggccctcaacaaagacaggccgggctggattgtggcgggccagggcggcctgctgatcgggactctggattcctacgatgtggggctgggggggatctgctgcacctgttgagtctttgggcaaaggaacctggtagatggtgaccctggcactaaggtcaggctccatgtgccgcaggccaaacatggccagctccacagggtcctggggcaggtcccggggcactgggaaggggttgacgttcatgaatcgagggaaccacagcttcaggcgcaccaacttgagcatggggtagcttttgcgtccaaagatctgaatcagcaggaactccgtctccttgttgggcatcacaccgtggttctccatctgctccagacagcaatccnacactcctgctgccgagggtagtggacgaagatgcgctggatgatgttgcgaggccggaagacctccttggggaagatgttgagcagctggttgtacacagccaggtcccgctcgacaccatactcccgcatcttgcgcagggccaggtagatgaagtcaatgtggcccccgtttaccacgcttgttccgcaaatttctgcaccgtctgcaggaagctcgccttgtcccgttccccaccaggcgcctgcccaaacaggtcctcaaagggcaccagagccttggtgggcctctgccggggttccggtgggctgggaaccagggactgttcagagctatggcagctgcgctgccagtggaggccccgagggagccggcgagggacctgagagatggaggttcctgtgaagggcgccccgcaggtgcctccccaggccctacagagcctcgggccagtagggtggcctggacccagctcatgcctctgcttgtcagacaatcacctacattccgccagccgcggactccaggccagctctgtcttgtntgncggctgcc

SEQ ID NO: 48422 - DNA, 1270 bp, Homo sapiens
  misc_feature (1)...(1270): n = a,t,c or g
agttcacaaaagaggaaatgcaggcgggtaaacaccaagaatatgaacagaagctacttcaagaattatataaattaaatcccaattttcttcagctatctacgggttcagttgataaaaataagaacaaagtgacaccactgcagagccccattgacaaaccttcagattctctcagtatagggaacggtgataattcccagcagatatctaacagtgatacgccttcaccaccacctggtttgtcaaaatccaatccagtcatccccatcagttcatccaatcacagtgcacggtcccccttttgaagggggcagtaacagagtcacagtcgttattctcagacaattttcgccatcccaaccctatcccaagtgggcttcctcctttccccagctccccacagacatccagtgactggcctacagcaccagaaccacagagcctcttcacatcagaaacaatcccagtatcatcctctacagactggcaagcagcttttggctttggttcttctaaacaaccagaggatgacttgggttttgatcccttcgatgtcactcgaaaagccttagcagacctgattgagaaggaactgtccgttcaagaccaaccttccctttcgcccacatctcttcagaactcctcttcacacactacaaccgccaaaggtccaggctctggattcctgcatcctgctgcagctacaaatgccaattctctcaatagtaccttttcagtcttgccccagaggttccctcaatttcagcagcaccgagcggtttataattcattcagttttccaggccaggcagcccgctatccttggatggcctttccacgcaatagcatcatgcacttgaaccacacagcaaaccccacctcaaatagtaatttcttggacttgaatctcccgccacagcacaacacaggtctgggagggatccctgtagcaggtattccagcgtcttcaggaaacagtttagactctcttcaagatgacaatcctccacactggctaaaatcccttcaggccctcacagagatggacggccccagcgctgctccatcacagacccaccacagcgcccccttcagcacacagatcccgctgcacagagccagttggaatccctancctcctccttcaaacccttccagcttccactcccgcacccccaggctttcagacggccttcagaccccccagcaaaacccccacagatttactacagagttnaaaactgggaccgncattaggaaagagggt

SEQ ID NO: 48423 - DNA, 624 bp, Homo sapiens
  misc_feature (1)...(624): n = a,t,c or g
tggcggtttatttggctcctgtgttactgccattcctatttaacagtatatttgagtgaatgattatatttttaaaaagttacatggggcttttttggttgtcctaaacttacaaacattccactcattctgtttgtaactgtgattataatttttgtgataatttctggcctgattgaaggaaatttgagaggtctgcatttatatattttaaatagatttgataggtttttaaattgctttttttcataaggtatttataaagttatttggggttgtctgggattgtgtgaaagaaaattagaaccacgctgtatttacatttaccttggtagtttatttgtggatggcagttttctgtagttttggggactgtggtagctcttggattgttttgcaaattacagctgaaatctgtgtcatggattaaactggcttatgtggctagaataggaagggggaaaaaaatgaaatggttgtttactaattttatactcccattaaaaatctctaatgttaagaaaaccttaaataaacatgattgatcaatatggcagatgatttacagtccattatatgacatttgtaagccctcaacactagccttacaaggntcatgaaagg

SEQ ID NO: 48424 - DNA, 1611 bp, Homo sapiens
tgaggaaggacaaatgacttgtgaaccatgcccaagaacagggaaagtcttgggccctgaagaccccagaagcttggaatatgtctgaatgtggaggtctgtgtcaacctggtgaatattctgcagatggctttgcaccttgccagctctgtgccctgggcacgttccagcctgaagctggtcgaacttcctgcttcccctgtggaggaggccttgccaccaaacatcagggagctacttcctttcaggactgtgaaaccagagttcaatgttcacctggacatttctacaacaccaccactcaccgatgtattcgttgcccagtgggaacataccagcctgaatttggaaaaaataattgtgtttcttgcccaggaaatactacgactgactttgatggctccacaaacataacccagtgtaaaaacagaagatgtggaggggagctgggagatttcactgggtacattgaatccccaaactacccaggcaattacccagccaacaccgagtgtacgtggaccatcaacccaccccccaagcgccgcatcctgatcgtggtccctgagatcttcctgcccatagaggacgactgtggggactatctggtgatgcggaaaacctcttcatccaattctgtgacaacatatgaaacctgccagacctacgaacgccccatcgccttcacctccaggtcaaagaagctgtggattcagttcaagtccaatgaagggaacagcgctagagggttccaggtcccatacgtgacatatgatgaggactaccaggaactcattgaagacatagttcgagatggcaggctctatgcatctgagaaccatcaggaaatacttaaggataagaaacttatcaaggctctgtttgatgtcctggcccatccccagaactatttcaagtacacagcccaggagtcccgagagatgtttccaagatcgttcatccgattgctacgttccaaagtgtccaggtttttgagaccttacaaatgactcagcccacgtgccactcaatacaaatgttctgctatagggttggtgggacagagctgtcttccttctgcatgtcagcacagtcgggtattgctgcctcccgtatcagtgactcattagagttcaatttttatagataatacagatattttggtaaattgaacttggtttttctttcccagcatcgtggatgtagactgagaatggctttgagtggcatcagcttctcactgctgtgggcggatgtcttggatagatcaagggctggctgagctggactttggtcagcctaggtgagactcacctgtccttctggggtcttactcctcctcaaggagtctgtagtggaaaggaggccacagaataagctgcttattctgaaacttcagcttcctctagcccggccctctctaagggagccctctgcactcgtgtgcaggctctgaccaggcagaacaggcaagaggggagggaaggagacccctgcaggctccctccacccaccttgagacctgggaggactcagtttctccacagccttctccagcctgtgtgatacaagtttgatcccaggaacttgagttctaagcagtgctcgtga

SEQ ID NO: 48425 - DNA, 802 bp, Homo sapiens; identical to SEQ ID NO: 6625

SEQ ID NO: 48426 - DNA, 1013 bp, Homo sapiens
tcttaagctccactgataagggattgtttttatcaaaagttactatttgtagattggaggcataattttagtgattttcatacttttagctttcttcgcataaaagctaattgaaacccgtatatgtagtaaaattaaaggcagagctgttgcagttgaattggagagttagggcaaagaacacttattagcccacacttcccacctttctacaggtggtcctttcagagctcagcctgaaaacccactactgtgttatcgtgcgtcttttggggttagtggttcttttgagaatctgaaggaagctgtggactcttcctagaaaaaaaaaccacacatacacatacaatgttgcatgcagtttcaagggattttggacatattgaaacctatcacaggctgtaggttatggacctctgtgccatgagaaaattgatacattaaactaagaactttgtttttaacttaccaatcactactcagcacatcttatataagctgataatttgtgatggaaaaggtctgtagcatgtgatataaggtgaccttatgaatgcctctcttgctggtacattaagttgttttaatatatcatttggaggggactgaaatgttaggctcattacaagcttgatacagaaatatttctgaaggatttctaatcagaattgtaaaacaatgtgctatcatgaaatcgcagtcttcacctcatggttcatggaacatttggttagtcccataaaatcctatgcaaaacaaagtagttcaagaatttttaggtgggtagtcacatttataaggtattcctcttactctttgggctttttcagtctgatttatttaaattttcatttagttgttttacttttggactaaggtgcaatacagtagaagataacttcgttacatttatgttgtaggaaaactaaggtgctgtctcctcccccttcccttcccacaaaatctgtattccccctattgctgaaatgtaacagacactacaaattttgtat

SEQ ID NO: 48427 - DNA, 3170 bp, Homo sapiens
gccggctcccgagctcctgggccctcttctcgccgctcctcgcagggcttgcactactgggagtcgggccggtcccagcgcgggcgctgcacaacgtcacggccgagctctttggggccgaggcctggggcacccttgcggctttcggggacctcaactccgacaagcagacggatctcttcgtgctgcgggaaagaaatgacttaatcgtctttttggcagaccagaatgcaccctattttaaacccaaagtaaaggtatctttcaagaatcacagtgcattgataacaagtgtagtccctggggattatgatggagattctcaaatggatgtccttctgacatatcttcccaaaaattatgccaagagtgaattaggagctgttatcttctggggacaaaatcaaacattagatcctaacaatatgaccatactcaataggacttttcaagatgagccactaattatggatttcaatggtgatctaattcctgatatttttggtatcacaaatgaatccaaccagccacagatactattaggagggaatttatcatggcatccagcattgaccactacaagtaaaatgcgaattccacattctcatgcatttattgatctgactgaagattttacagcagatttattcctgacgacattgaatgccaccactagtaccttccagtttgaaatatgggaaaatttggatggaaacttctctgtcagtactatattggaaaaacctcaaaatatgatggtggttggacagtcagcatttgcagactttgatggagatggacacatggatcatttactgccagggctgtgaagataaaaattgccaaaagagtaccatctacttagtgagatctgggatgaagcagtgggttccagtcctacaagatttcagcaataagggcacactctggggctttgtgccatttgtggatgaacagcaaccaactgaaataccaattccaattacccttcatattggagactacaatatggatggctatccagacgctctggtcatactaaagaacacatctggaagcaaccagcaggcctttttactggagaacgtcccttgtaataatgcaagctgtgaagaggcgcgtcgaatgtttaaagtctactgggagctgacagacctaaatcaaattaaggatgccatggttgccaccttctttgacatttacgaagatggaatcttggacattgtagtgctaagtaaaggatatacaaagaatgattttgccattcatacactaaaaaataactttgaagcagatgcttattttgttaaagttattgttcttagtggtctgtgttctaatgactgtcctcgtaagataacaccctttggagtgaatcaacctggaccttatatcatgtatacaactgtagatgcaaatgggtatctgaaaaatggatcagctggccaactcagccaatccgcacatttagctctccaactaccatacaacgtgcttggtttaggtcggagcgcaaattttcttgaccatctctacgttggtattccccgtccatctggagaaaaatctatacgaaaacaagagtggactgcaatcattccaaattcccagctaattgtcattccataccctcacaatgtccctcgaagttggagtgccaaactgtatcttacaccaagtaatattgttctgcttactgctatagctctcatcggtgtctgtgttttcatcttggcaataattggcattttacattggcaggaaaagaaagcagatgatagagaaaaacgacaagaagcccaccggtttcattttgatgctatgtgacttgcctttaatattacataatggaatggctgttcacttgattagttgaaacacaaattctggcttgaaaaaataggggagattaaatattatttataaatgatgtatcccatggtaattattggaaagtattcaaataaatatggtttgaatatgtcacaaggtctttttttttaaagcactttgtatataaaaatttgggttctctattctgtagtgctgtacatttttgttcctttgtggaatgtgttgcatgtactccagtgtttgtgtatttataatcttatttgcatcatgatgatggaaaaagttgtgtaaataaaaataattaaatgagcaggaatttttgtgtccacttgacttggtcttgcttcttattctaatgatgcaaattatacttttgtgaatatatcacggagtcattaggcattcagcttcatcacagcaggtcaggggtctcactgatggcatacaatatagtgatcgggtactctgacttggtagcacagtaagacagacttgccttaaactcctaattcaaccacttacaaagtcattgtttgaacttggctcttgtttaacctctgtaaacctcagttttcttgtttattcagtggggctaatacttgagttactgtaaacattaaatgggatgatgtatgtgaagtgcttagcttggtgcctagcacagagtaagtggtcaatatgtggtagttgtcattattaatattttagatgatcttattagacttatacatctaattatagaaatacatagacttgatagaattttattttcaggcatgaagaaatattctttggaaaagctaaatttttggtgattgacataaagatttacttgctcatattaactaaaaattatagtactctccaagaattaatgtgccctaaaaattttcctccaaaaacttatccttatcatgtgataatgaagaacatttgatttcttgaaaggaaactgctgtaggcagcatctgggaatgcaaatcttcaatcacatttctattctcaaacacttggagaagtctataatttacattcagacttcaatgcaaattttgtattgtgaacttcacatttcccaaaaagttactttaaaaagactttaagactgaaaaaaaaaaagtttatcaatgctaataattttctagtatgcaaatggacatgtgatgcctataaaacacaaaaatttctctgaaaacaattttgttcttatttttttctttatagttcactgagattggcatgtgtttttactttgtatctaagcatgttaacatgtcttcttaataaatattccttattgaaaaaaaaaaaaaaaa

SEQ ID NO: 48428 - DNA, 705 bp, Homo sapiens; identical to SEQ ID NO: 6635

SEQ ID NO: 48429 - DNA, 1073 bp, Homo sapiens
ttggtagttctttccaaaactttatttagagaaactaaaatctcgtaattttcatattatacaaaatattattttgagccattaacaaaagggaatataaaaaccatagtttgtaggccatacaaaaataggcagcaggccagatttggcccatgggtcggtagtttgctgacccctgctctagattaacaaatttacgggctttgggaagctttgtggggcaaggaggcttgatatacaggttggtggtgcagaacaaagaggaaatttctaagtataatagaaaagagatgtaatgctgtccttcatgtatcaacgctggattcaactatgtgcaaaacattttatcatatgtcgctggaatcaaagatgcagaagtcacagtctctggtctcgaggagcatatacttctccatggtagcttagaaatggaaagtcttccttcaaagtacaatacatccttctcagactttgacaatgcacccgtgcgtgctcatctgtgaggcaggtagtttctttggcaactacagctgaggcccaaacatgcattattatcttgaccacctgtgcttcttcccctccccagtaatcataccagtttttctcctggtctccaaattattctgttttgcattatcattttggggataatacttgggatgatatactaaaagtcaactggtcacatctttttaaaaattaccattttaattagtcttcagagataccctctctctcttaataggtaacatgcttgtgacacctgtgtttttttgtttcaatccaggcagaaacttctccctaggaggcaggataaatggatctatctcaaggcaacaaagacacatcacaaaaacatttttttcagagcaaatgttaaatacttgatccaacagaacacaaataaagataaaatgtaatgctctattatatacttcagttggttataaagattgcggatttgaaaaaaatcagcagaaatccactatgtcaatgtcagagcatatgaagcatagaataaaagttaacacagctaataataaattgtttgtaaatactaagtaacttattaa

SEQ ID NO: 48430 - DNA, 604 bp, Homo sapiens
agcagttatggacacctccactattaccacgtctagttggctctgtcatccaactataaacgatcttatttcactaattttactagtccaagctggtctcttgtctagacaacaataagcaacctagttcaactaccttttcttgcaaatctgattttccaccatggatttatcttgctttaataaagccagagggagcctgaagtggtctggcttctttacctacctcttcagcctcattttgtaacactctcacctcccataatagccatcttacaagcctcagtaaggactcagttctaaaacagggcactgaagagggaaagcagccaaaactgtctcaaaagtaagtggactaacggtatcttttttctagcccaagcctctgtatatgtcattcccccagttttgccttgtgaaaaatatgacacatacctttagtctcaactctttctcaggtttccctaagaaaatcctatcacggaactcatctcatagtgaagttttacatttttgatgacattccctccacttatctatgtttccaaagggaagaactgtgttgtgctcatcatcgtgttctcagctcctagtacagtgcttt

SEQ ID NO: 48431 - DNA, 2784 bp, Homo sapiens
  misc_feature (1)...(2784): n = a,t,c or g
cacaccatgccctttgtcaggttaccatgtacagagattacttggagagcctcatgccgtctctaccttcgcacactggtcaagtatctgctgagcttcttcgccgcaaggatgcagaaataggctgagggtccatnggnaggaagacacaatnaggnantaggaggtnggggagnaaagaagacagactttcaaaatggaattaggcactggggagagatcagtttccccacatcagggagaagaaggtataggtggggaagggggtggccaggagcagaaggaagaagactcaagatggaaagggagccgctgtgcctgtggcaataccacttggagaggtcgacttcataccttcaagccttttcccctgggcttttgattgtgtctgtgccccctttcttgtcctctctgcagatgcccagtaggggctacctcatcctcgtgctgttcttgtgtggctttctgggcagtagggatcttgaatttcctttctaacactgtggcccggcaaggcggggagcattcctctgccctttgtcttgtgccaacctggaaaggtgcagtctagatttcagtgagaaccctgccagctgagccctgtgcatctactaccttgacacagagtgttttcccactagaagctctgctctgctctcctggcccaagtaggggattccatgccttccctttcatggtcttagcaccagcagcctagtttctcccttccagagtctccagggatgacaaattggattggagacaaacctcgtcagatgctcatcccctaaaaggttaattgtgtatttgtggctgcgtgtgcctttgtgttttcattctcttcccatttttgtacattttggtcttctctgtggttttatacttggtcaaaagtactcgtcttggtattgcactgttgtgtgcatgagaaaactgggggaaggctcactggtacaagaaaggacccctgacccctttccttctctgtggtccccggcattagattgggggttctgggagaggcaggtgaatgtcctaagtgaattgttctgtttgtaactggaatgtttttgaagtctttggtgttgctccgtgaaaggacatcgccacctggtgctcatgaggtgtctttgcagaacaataaatggcaaatgaacaaccacaaaattgttactcttgttggccttctgctgtttgtagattagtgcacctatctgtgagggatttgggttaccctccctgagtctgtaagcaaccacaagcccctgcccactgggtgggggaagtccctccccaaccacttaaaaacaaattttccacatattacccacccacacatttgacctggctagactctttgtttgcctaaaggaacagaccacattgctgggaaaatgagtaagtgaacgtgtgggagaaaaacacttttagaatcacgaatattcacttttaaaggtctctttgcctggctgcaatatagtgtgtgtttaaattatttacaggctgttgtttctcaaataaatgtttaatattaatcattcccaaactgacaagaacacaaaaataaaatgcaaatacagagccagctttgtcacccaaatctgtgtctatttctgatagtccatggaatgtggttttcttggaagccagggttggtctccccacagaccccaggctaaggtcaccagttaggaacccaggacttggaaggcagagcctgtgagctcttccatcagggatctgactccgcaaaacgacttgatgaatgcaattggcaaactcccatgttcggacttcatatgcatgagccgttggacagagggtttcttagtatatactttaatgcatgtttatgtgcaatcttgttagtgggtatacaagtttgtgaagaacttctcatttcaataggcagttaatgtaatgcattaaaagcctgggaatttggggctatatttttcctttctgactcaataatcttcaaagaattcataggaaagtcagtacttgcagacaagtggttagcttggctaaaatgtacaaaacacccagaacccacaaaacactcagaggtttaggagaatgttttaatgcttaagaggcaggatcaagtgaagaggttacagaaatcagtgtctctggctgggcagtcaagagagcgggctcaaattctgtgactcacttctctgtgtctcggttggaaatgaatgggtatcctggttcccaccttcccacacgctgtgatacttcaaactccttgggtgaagggcctcttctcagcccaagatcttgattgtgaacattaacaaagagaacagtcatcctccacagaagataactcattaatgacatttgattcagtgaataaatatatcatttaaaaaaatattgtagggggatcatgaaagtagtggaggtaattacaatcaggagagattggtattaaaattgagcaaagtcccaactctcaccagatgacaattatgcatcctgctagatgccccagggctgtcagcctggaactgaaataaatgtgttataagtggtgctggatgcctttttcagttcatttgaaaacatggatttgatcatgtcagctccctttctgctggaaaaaaaagtagtttgcataattggtgttaacctactctgttttgattctacagagtaagtaatactcaaatgtggtcttactttaacttcttgcctttgttacccccagaaccatgcagacattgaaatgtggtgtgcgtgtgtgtgtgtgtgtgtgtgtgtgtgtgtgaatgc

SEQ ID NO: 48432 - DNA, 1200 bp, Homo sapiens
gtattagcaatatctggccagatttagaaccagtcatggaaacttgtgctcaaactaaaagtaggtcatcacttcccagaaacagaataccttgtgcttcctgaaacagcatatatcactgtgaaactaaagaatattctacagacacccctgtagaaagaaacaaagaacaggatagtttagaaagctttctgttagctgtattcagcaaatttcatactagttgctcaggactgctagttggtatgcttttgtaaaacgagattgaaatttaataaaagatgcaactaaaatctttcctgcatgaagctaaaagcactcaagttgagagaggggcaagggaatctccccaggatgactgaagatgacttctttttacagcaagtactgttagcctttctgcaccccttagcttggcccctgctccaacttctgggtcagcagcaaggtgaactcaacagaagttgctcttgactgtttgaaggtagaagcagcctaccttttctctttgctaaaagaaggtcaaaggcttcgcaaccaggatgcaaggtctgcggtccagaagcttgcggtgagtgtgtgccactgatggagctccaagcccacccaccagccactcctgatggggttgctcacactgcagctgccctatcaccaccctgcacgttccttggaagatttaaatgtttggttgcaaatgaatgttttaaaaatgtatttaatgcaatttttcctgctctcaacatgaccacccaagattcaaacacagagacttccaagttactaattttttcagaacatcaccgattttaaaatctgtcacaacaggacttggttttgtgcagatatcagagtgctaatgtgagaaacccagttaaaagaaaacttagtttattgggaagaaagcctcaggcccactcgtttctagaactgtgaaaatatccttggttggcatttttaacacaaaacactatagtgttggtattaaatagtactaggtaaatataaagaaaccaataatgaattgctgagacaatcttgaacccaaatagcattagaaagctgaaggcccaatgaaataacactttcacacttaaactctgtgggataaattttgcctgtggggtattaaacagatggtccaaattaaaaatgctttactataattaacttttctggatttgatgaaggggaatgtat

SEQ ID NO: 48433 - DNA, 469 bp, Homo sapiens; identical to SEQ ID NO: 6649

SEQ ID NO: 48434 - DNA, 528 bp, Homo sapiens
catctggcaggtgcccttgatgctatagcgcctcccctctcccctcagagggcacagctgcaggcctgaccaaggccacgcccggctctcgtgctctaggacctgcacgggacttgtggatgggcctggactctccagaaactacttgggccagagcaaaggaaaacctcttgttttaaaaaaatttttttcagagtgttttggggaggagttttagggcttggggagagggaggacacatctggaggaaatggccttctttttaaaagcaaaaaacacaaaacctcacaactgcctggcaagcccagtatcacttgtttgggccctagcgggactccaaggcagccacacgcccctcctggaagggtgtgtgcgtgtgagtgtgtgcgagtgtgtgggctggtgtgtgaatatctataaataagtatatatggtgtatattatatgtgtataaataaagtctgtacatattggagctctgggagatgctggaataaaagacaagagttacatctggaaaaaaaaaaa

SEQ ID NO: 48435 - DNA, 1756 bp, Homo sapiens
aagccctgaagggtcaaaagaaatacaaaagcaaaggctattttctttttttttttctttctttcattcattccttcctctgtttctttctttcttcctttcatttttttttcttttttaagagcgagcggctctgcggtggcggtttggggtgggcgccgccgaggtgaggtcgtctcgcctcccgcgcgccggtagattggttgtttcattatggatggaggggatgatggtaaccttattatcaaaaagaggtttgtgtctgaggcagaactagatgaacggcgcaaaaaggaggcaagaagaatgggagaaagttcgaaaacctgaagatccagaagaatgtccagaggaggtttatgaccctcgatctctatatgaaaggctacaggaacagaaggacaggaagcagcaggagtacgaggaacagttcaaattcaaaaacatggtaagaggcttagatgaagatgagaccaacttccttgatgaggtttctcgacagcaggaactaatagaaaagcaacgaagagaagaagaactgaaagaactgaaggaatacagaaataacctcaagaaggttggaatttctcaagagaacaagaaggaagtggaaaagaaactgactgtgaagcctatagaaaccaagaacaagttctcccaggcgaagctgttggcaggagctgtgaagcataagagctcagagagtggcaacagtgtgaaaagactgaaaccggaccctgagccagatgacaagaatcaagagccctcatcctggcaagtctctcggaaacacctccctgagtggcccctccatccactgcccctctgctgcagtatgtatcggcatcctcccaggcctgggtgcctactctgggagcagcgactccgagtccagctcagacagcgaaggcaccatcaatgccaccggaaagattgtctcctccatcttccgaaccaacaccttcctcgaggccccctagtttctccgtccctacacagggagctcctccccaagggtagatcggaccgttcatgctgcctataggcattatgtccctcaaaaaaaaactcctttgcctgcatcctgtgtacaacatgacatttttaaccaatccaatctaaaaatgtgccagaatccacctgtggcccgaatcgtgtttggttcctctttctactccactgcagatgaccaaacctgtcccgctgccactttcctcactgatattgggagcgagggcaaggcccagccgaagttccactaaaaatgccccaggagaataggcaccggctggcttgccaaagggtttgggttttattgctttctgttttttcttttcccgacagcacaaagaagtaagggcagttattggacaggtgttatttaaacattctattgtaaatgaatgtgttgtttggttctactgcattgtggagcatgcgggggaagagaactgacccaggtaatgaaatggagcccttccctggaactaaccagtccttgatgttgtgtgactaagtaaagatgataaaccccatctgctgggggtgtcacttcacactcggcatgcattgtgaaagctttccatacccttggccattccctctctcctctctctccaaccccatttatgcaggaagggactgctaacaagaacgcttccatctcaaaccttttctctgcctgggaaattattttatgtttgtttttgaaataaaggatttagtttaagattctaaattttagagaaaaaaaaaa

SEQ ID NO: 48436 - DNA, 2548 bp, Homo sapiens
gtcatgagtgcatgaaggaggccaagagtttatgctatgggaggaaacagtcactgatttgcctagattctgagagtctggcccatagccaaccacattttcctttgggataatttatttcctgtggcatctagccagaagaaattgaggatgtttcctttcacagctgctccaagcctgttgcccaattcacggtacaagggagcaccccttccctttcctctgaaggtacgccacccacctccgtcgcccacctcagcgcccagggagccttgggacttccttccatatgataaatcattcttcttcacgtcaatacacttcatattaatttctagtacagaaaatcttggacagctatcagaatgccttgggtcatagtgttgttggcaaaattggaccatacaggtggcccatgtataaaatctgaattttaggggtttgtccccacctcgcatgctggcttttacagggaggtgtctgggattcctcattagcaatcaaaacttaattactgggatgcagagtccttactttatcgccagcccgtaggcatttctgaagtgcacttttttgaaacatcattttgctaactctcagcagtgtctaattaaactgagcaatacttttgtgaattttaattaatctcagcaaaaccatgatgggagagagtcctctgatggaaatgtagtccctggattatgtgtaacctttttattgctcttagatgcagaggatagaaagcattttttggtgcagtggtcttgtggcaaacacaagaccctctatgcgtctccaactgttatcctaatctagaaaatgaggactggcccctgggcaaaagtgacatgaggaatttactctggaagaggaaaatctgggtggctttccaaggctaagataggtttgtatttcaccctgtggccaagctacagaacttctgagattgtggaagaatttttgcaaccagcagggaaagaggcctcttactgcctaaacacaaagttacactgagcttttctactgtcctttgcctattgctccctctatcatgtaaagatctgggaaggatgagaggcagggcctgcttgtcatgagctgcactcttttctttttaactaatcattgacaattggaagaaaattgacgttaaagaagtttctccattgtcttactaacaaaaccttttgggtttcattaattgtccttgaaattgagttcctttggcatttttccttgcagtcatcagttaagcatgttgcatcctgaattcacagaagtttagctttgcaggtttgaatctctgtaatttaactcccgtggacttggtcgagttttcagcaggttgggagccacctctcttcatttcagcagtgagtcatcccttgacttttcaaatgacagaattttttccaattgtaaaattagcactgtaaaacaaagaaccaaagtggcatcctaagagttgttaaacctgaagtctagtttatgaggaattgtccaagttggagtttaaatagtatctgcttttgtctcaaagcatctaagttattctgacagaaaatggtaagtcagctttgcaggcagatgcgcctctgggcctcctaccttgctccacagctttctggccatcttgtctcccaggccatgccactgctctgccacatgtcagcaaatttctttccaccagtcttatagcatcttacatgatcaaatcatcacagaataaccccgtgatagattattgatagcaatagagaggggcggctttgtcactgatttttctctcagattccttttccatctctcatccataaaggaaggactgaaatccaaaggcattctccttttgtacctacagtatccagaacccacgtggggcagccttctgcttatgacaataattggcccattgcatgcagagagaatgtcttcatagagagaatgtccattaaataccttgaatctgcatgacagtttgacttgaatgcaacagcaggaaaattttgcaagttacataattgtatatacagtaggttttcttaagtctcttcggttcatcctttgtaatttgtgtgtgtatctgtagtattgcaggcttttggagactattcttacaggcagtatgtcagtcatcaaagaaaatgctgtcacctgccattgttgtatttgtgggtatttatagttgtatgtatgtaaatgcatcagtgtgtagattgcatatcagtgtatggtacatgtacatccaaaattatttttgtccttaatcagtgtgatatgaaaagcaagtacaacctcataggactgattatataatgaagttgttgagagtatatatagtggtattgttttattaaacttaaactcaaataatattttgattaaaatttttaataagactttatgctagaaaattctttgagctttgaatcaccagggcaaaaatgactttcaactaaccttgtgaatcttttgcagtgtactgtgtgcaataccaagggcatagctccctgtaatttgggaaatacagaaagaaaaaaaaaaaaaa

SEQ ID NO: 48437 - DNA, 1187 bp, Homo sapiens
tttttttttttttatttttaaagtaacatttaatgaatacacatttataaaagccatcatcccttaacatggggaaagtgtacaaaaataatgtgaaagtgtaaaaatttttctagaatacaggaaacatatcagcagtaaagaagtttagtttaactttttttttaaatgtaaaatagtttggatctgttaaaaggaatacagttcgccccaaagcacttattttcatctgttgtaaactcattctttctaccttaagtaaactggaggagtcagctgtgttaatatggtcaaattaatttcatagttttgggagcagggaggttgtgggaaggacagaaggagaacttgggctttctttggtcagctgggtgggggcttggagcacttgtggttggggccaaaggtcaggtctggaaatgcagctattatgccaaaaccaccagagtgctctttagcttcaggcttcatgaattgcttttaactactcaggtagagcatttttactaggctataaaagtagagttcatttttttctataggtcagcattttacctatggatggcattttcctattttcggtgacggactatgagcccaggataaacacattactctcttctttaacaaaaagagcatggttaactcccaaagacttctctagaccagcctggatggtacctaaactttaatcaaccaatgctcaagtaaaagagcagtatcccagcccccagcacaccctaactgttttgccataacataggtgagtagtgacattttccttatcttttcccactgatactgtagggtcagcaccgtataccatgactctactcaatgtcgtccaactttttgtatccttgcttgggtttatcaaagataagttgaaggagcgtgtgttctgtgtacctttgcaaccagttataaataaacgcaaattgaaataaaaaagacaatctacaatggtgcgatgaaagcaacaccctcatccaatggtaattaaattgataaggtcactttagaaatggcttggcaacattatcagtgcaaagatattatctgaaatgttatttattttagtaaaaaatggatatagtctacatgtttaataaggaaagaggtttgaaaaatgcctatttgatgtgatattatgcagccattaaggaaatatattacgtaaggccaga

SEQ ID NO: 48438 - DNA, 622 bp, Homo sapiens
gggcagatggtaggaaatggagacggagaaatggcactaatggcccagccacctgagatgggatacctgggagggacatcttttcaagtagaggctgtgttggggcatggtgagagagggtcttagcaggtaaccttcctttcctctccagactgaggaatcagagttctgattgtggagtgcctctctctaggacggggctgcagcataggagtctcagctgcttacatccaggtccaggattatgtctgctaacagacgctggtgggtaccacctgacgatgaagactgtgtgtctgagaagctcctgaggaagactcgggaatctccactggtgcctataggcttaggaggctgcttggtggtagcagcatacaggatttaccggctgaggtctcgtggttccaccaagatgtccatacacctgattcacacccgagtggcagcgcaggcctgtgcagtgggtgcaatcatgctaggtgctgtgtacacaatgtacagcgattacgtcaagaggatggcacaggatgctggagagaagtaggactcctataggagccggggctgtccaactcccctaactcaatccctggtacattcctaataaagcagttttgaggaa

SEQ ID NO: 48439 - DNA, 1223 bp, Homo sapiens
aagctatgacatgattacgaatttaatacgactcactatagggaatttggccctcgaggccaagaattcggcacgagcggcacgagggcgtaccagagcttgcggctggagtacctgcagatcccaccggtcagccgcgcctacaccactgcctgcgtcctcaccaccgccgccgtgcagttggaattgatcacaccttttcagttgtacttcaatcctgaattaatctttaaacactttcaaatatggagattaatcaccaacttcttatttttttgggccagttggattcaattttttatttaacatgatttttctatatcgttactgtcgaatgctagaagaaggctctttccgaggtcggacagcagactttgtatttaatgttccttttttgtgggattcttaatgaccctttttggtctgtttgtgagcttagttttcttggggccagggcttttacaataatggctcgtcttatgtgtgggagccgaaggaacccctatgtccgcatgaactttttcgggccttctcaacttccagggccccctttctgccctgggtgctcatgggattttccttgttgttggggaactcaatcattgtggaccttttgggtattgcagttggacacatatattttttcttggaagatgtatttcccaatcaacctgggtgggaataagaattctgaaaacaccatctattttgaaagctatttttgatacaccagatgaggatccaaattacaatccactacctgaggaacggccaggaggcttcgcctggggtgagggccagcggcttggaggttaaagcagcagtgccaataatgagacccagctgggaaggactcggtgatacccactgggatcttttatcctttgttgcaaaagtgtggacacttttgacagcttggcagattttaactccagaagcactttatgaaatggtacactgactaatccagaagacatttccaacagtttgccagtggttcctcactacactggtactgaaagtgtaatttcttagagccaaaaaactggagaaacaaatatcctgccacctctaacaagtacatgagtacttgatttttatggtataaggcagagccttttcttcctcttcttgatagatgaggccatggtgtaaatggaagtttcagagaggacaaaataaaacggaattccatttttctctcactgtaaaaaaaaaaaaaa

SEQ ID NO: 48440 - DNA, 467 bp, Homo sapiens
  misc_feature (1)...(467): n = a,t,c or g
aaaaaaagccaagaagaaactctcaaatgagccaaaaaggaaaaaaaaaattctctgaaaagaattttagggggaaaagttgtgctattttaaaaagctttgagggctgtaaagtgccacgtttttcacaccttctccatacttttttttcagatttttttagtatgtttaacatttgtgagatgacatcctttttgtatctcaaactggatgcttcaggatttgtaggggaggggttggtggtattcacgttctcttgtgagagaaagtttgtgcctaaaggcctccttcctggggaactgtttaaaccctcgcaggcagacctgtcaggttttactgtgttatttgccaccattttcaacatgcaaaagtaacatgcagttaatggtattgggattgagaccacagcatgagcagaaacctctcgtgacaantttttcaggcgacattatcttgctcctagactg

SEQ ID NO: 48441 - DNA, 868 bp, Homo sapiens
gcaattgcattaataagcagtgagttactgtagcttcctttagctctaccgaactctttttaaaaactcaaacttgagcagccttagaaaaggggttggggggtgggaaccacaggccatttctctaagtgggctgctgtgaagttttaaatgaaagctctagctttaggagcttgagccatttcctgactgcactggcctggcagtctggctgctgcacaagagtttttaaagaggggtcggagcccgcccgtgagagcgggtcttctcaccatgtggggctgtactacgtggtggtcttggtttctcttcacagaaatgctctctcaccaacttgccccactgtcccaactcctctcctcttagaggaaaaaactgtgattacctcaacttgaatatgaaactgtgattgaaaaaagtcaaaacgtgaagaagcatcaaagccaaaaaggcaaaactggctgaggcctctgttgatgctcctcagcctactcgggaacgtgaagggggcagctggcgaaagggcattcctggggccacttgctctgccccactgataaggcacacccgcggtgcactgtgagctctttgaggactgaggccaggggatgcctcctggaacctgccaggcctctctgttctgtgaaggtcagtatccacttgattcctccaggcggcgctccaggtgggaggagcagggtcttctgctgtttccaaaggaatggccatgacactgcttttgaccttagaagtggatccagggacccagcaaagagcgggggtgggttcccagggacaggcagtcctcccggggctttacatgctttttgctaactttcctattagcagcttcaatttatatcaccca

SEQ ID NO: 48442 - DNA, 1294 bp, Homo sapiens
tttttttttttttccaccagaggcttttatttcagccactcaggaccctggctttctgctccaaggcactgaacacagtcaggctcttctaaacactggcagggacctcccccacagccgcccccacagggttctctgtttcccaagtcctgatggattcaggcaagaccttcacacattcacccactacctgctggacaggagggtcatgaggcagcctgtggtgcccagctcagtgtgacacactgccaatgtgccgcctcccccagcctctgatggggccgggccttgaccacgtgacaggctcaagctgccgtgcacatcccccaggaaaggggaagagctgctaaggtgtagcagtgaccaaacaaataagaaatgctactgtggaggttacacagatgcttatttggtttttaaacaaatccaacacaaaagaaagaaagagggaacagggtgcttgaaggtgggggaggagagggaatctcatctgtaaagtgcttttccagacaccggaacctcctagtctagcctggcacacccatgtcactcagaaaggtcaggctcagggtggagatggcatgcaattcccaacacacttggtattcagagtggacagagctacacagcagccttccctttgtcggggtccatgcaatctacacatggtcgcaaggtctctgcagccacagtctgcacacgtgggcacagacggcactggtgcatgcctgtcgggctggggccacactggggaagggcctcatggcaacatgcactggaagctcctcgtggcggaccatcctcaggccgccgacaggaatgggaagaaaaagaagtcgaaggcgaacttcacggcgccatgcacggtgctgcgccagtcgtgctcgatcttcacgtgccgcctggtgggtgagagctgggccatgcagttgaggcagctgatggccttgagctcgaagacaggccacttgctgcccaggcggccctccaggatggtgctgaactcgatgaggctgccctggcgcaggctgagcagcacgctcttgaactcgctgctggcccgcagcacgatgtccttggtgacgtcgtcctcctcgcggctgcgcgagccgtcagcgccgctgctgaatggcatgcccacggtaatctcaaacttgtagcggtcgaacttcttgatgtggcaggggtgcttggccagcagcttaaggcgacagagctcctcctcggccgtggaggtgttgccagggctgcaggcagggtaggcctcgccgtagaggcagcgcatccagtcgcc

SEQ ID NO: 48443 - DNA, 861 bp, Homo sapiens; identical to SEQ ID NO: 6718

SEQ ID NO: 48444 - DNA, 1582 bp, Homo sapiens
tttttttatgtatcttttctatgcattagttatgaattagttttttatttagattggaacattacgtacttatttaagaagatggcataaacttaaagataacttaaaaataaaactattctattacaattcctttaaatcacaaattcagaagcactgtttctgaatggtgaaaaagatgacatacaaactatatagttcaatatacttcaatacaaacatggcagcttcacttaattatacatacgttttatttaaagaaaagcaaaacacacaaccacagcatttcaattaaggagcttagaaaaatttcaagtgcgttcttggttctccagttaccattccaataaaaaactttttaaaccaaagttaaaattaagtgaaaaagaaagaagtcccagtaagcagaccgaacaatacaaattcaaaatactactctatcttcttgtgttcgttcccaccaaagtgtgctgtttaaagttccacaactattatcttcctcctcttgttctttagtgagttctacaaaaacctgttccaatgttgcttgagaaaagctatattcttcaatggcaaaagcatgtttagcttcttccagcttaaaaaaagattgtgaaagggactgaacatcttccttaggaattttataagccaaaatagaagaaaaactttcctgacggcttgcatttgggaaaatatactgaatttctctttgaaggcggtctagcttctaggttttctatccagtccgttcaatttaatttccaaaaagtagccttttccaaatttactctttagatgttgtactgttccgatacatcttaactgcccagacaccatgatagctactcgatcacagacagcctctgcctcctccatatagtgagtggtcagaatagcagcccgctttctgtttttaaatgcagttcgaattgctcgccacatgtgcatgtttggcatttgggatccagacctgtagatggttcatctagcaaagtaatctgaggattccctagcatacttagagcaaaacacaactttcgtttgattcctgcaggtagtttctttacagtcttctgaagatgttcttttaaatcaagtgcatgtgttattcgacttatgacttctttcatgtcacttgcactcattcctttgacagctccataaatttcaaaatgttcctgcaatgtagtatctggccacaaagggtttatctgaggacagtaacccatacacttcagtgaatcatcatcttcacttgtctctgaagaataatctcctaaaaatacctggcctgaagctggttcaatatcactaaccagaatattaataattgtgcttttgccagcaccatttggacccaatagtcctaagatctctccttttttcacacagaaagagatgtatttagttgccactctctttacttttcttgaaagaagaaaatctttcttgtcatcatattctttatgcaaattgctgaccataatggatggtttctcctcacaacactggcaacccatcagctctttgacctttagtctttcagctttgacatcttcatcttcatcctcattgtctg

SEQ ID NO: 48445 - DNA, 1802 bp, Homo sapiens
  misc_feature (1)...(1802): n = a,t,c or g
gagctgaggtgttttcaggcctgagctccctgcaggagctgggacctttcgggcaccaacctggtgcccttgcctgaggcgctgctcctccacctcccggcactgcagagcgtcagngnggccaggatgtgcggtgccggcgcctggtgcgggagggcactacccccggagcctggctccagccccaaggtggccctgcactgcgtagacacccgggaatctgctgccaggggccccaccatcttgtgacaaatggtgtggcccagggcaattagacagactgctgtcctgggctgcctcaggtcccgagtaacttatgttcaatgtgccaacaccagtggggagcccgcagccttatgtggcagcgtcaccacaggagttgtgggcctaggagaggctttggacctgggagccacacctaggagcaaagtctcacccctttgtctacgttgcttccccaaaccatgagcagagggacttcgatgccaaaccagactcgggtcccctcctgcttcccttccccacttatcccccaagtgccttccctcatgcctgggccggcctgacccgcaatgggcagagggtgggtgggaccccctgctgcagggcagagttcaggtccactgggctgagtgtccccttgggcccatggcccagtcactcaggggcgagtttcttttctaacatagccctttctttgccatgaggccatgaggcccgcttcatccttttctatttccctagaaccttaatggtagaaggaattgcaaagaatcaagtccacccttctcatgtgacagatggggaaactgaggccttgagaaggaaaaaggctaatctaagttcctgcgggcagtggcatgactggagcacagcctcctgcctcccagcccggacccaatgcactttcttgtctcctctaataagccccaccctccccgcctgggctccccttgctgcccttgcctgttccccattagcacaggagtagcagcagcagggacaggcaagagcctcacaagtggggactctgggcctctgaccagctgtgcggcatgggctaagtcactcttgcccttcgggagcctctgggaagctttaggggcacattggttccagacctagccaagtttctcaccctgggttggggtcccccagcatccagactggaaacctacccattttcccctgagcatcctctagatgctgcccccaaagaagttgctgcagttctggagcctcatctggctgggatctccaaggggcctcctggattcagtccccactggccctgagcacgacagcccttcttaccctcccaggaatgccgtgaaaggagacaaggtctgcccgacccatgtctatgctctacccccagggtagcatctcagcttccgaaccctgggctgtttccttagtcttcattttataaaagttgttgcctttttaacggagtgtcactttcaaccggcctcccctaacccctgctggccggggatggagacatgtcatttgtaaaagcagaaaaaggttgcatttgttcacttttgtaatattgtcctgggcctgtgttggggtgttgggggaagctgggcatcagtggccacatgggcatcaggggctggccccacagagaccccacagggcagtgagctctgtcttcccccacctgcctagcccatcatctatctaaccggtccttgatttaataaacactataaaatgaagactaaggaaacagcccagggttcggaagctgagatgctaccctgggggtagagcatagacatgggtcgggcaga

SEQ ID NO: 48446 - DNA, 437 bp, Homo sapiens
cggacgcgtgggggctccgtgcggccagagctctagagagtggtgccgccttccaaccttcttccccaagccctggtggccggctccgcctcttctcgaatcttttccacagcccaaaatggccgcagaggtgtattttggcgatctagagctcttcgagccgttcgaccacccagaggagtcgattccgaagcccgttcacactcgcttcaaggacgacgacggcgacgaggaggacgaaaatggggtcggcgacgcggagctacgggagcggcttcggcagtgcgaggagaccatcgagcagctccgcgccgagaatcaagaacttaaacgaaaattgaacattctgactcgaccgagtggaatattggtgaacgatactaagttagatggacctatattacagattctattcatgaacaatgctatttcaaagg

SEQ ID NO: 48447 - DNA, 601 bp, Homo sapiens; identical to SEQ ID NO: 6733

SEQ ID NO: 48448 - DNA, 499 bp, Homo sapiens
ttttttttttttggtttcaccagcgtttaatgtgctctgatgttgaccgtccctctgagtgttctggggaggagggggtggggcggagggtcaggaaagcaggctcagcttccagggtcagggagttgtgggcccagaggggctgtcacagtggatgcaccttgccccctccctcgccagacccgagggtagggcagaggcacctcctcgccagcctgtgggttgcacccacagggaatggaggggaggggcaccattaccactggacccaccaagaccccgccgcctgggtgggctgtccacaggcccttccgcccagcagcagtgacgctcagggccttcccagctgtcagccactgcccgttcctgcgcctctcgtgcacctccacatctggtttgaggtcaggtcatttcctgtctgtgggcccagctgctgtgacacccaaggggagggccggctgcccccgaagccaggtcagccgtgcacccggcagagccc

SEQ ID NO: 48449 - DNA, 1280 bp, Homo sapiens
ggcggaagacaggaagcggattctagttcccaagcccgcacccgcctaaatactgccggagtctgcgctagttgtgacgcagtactatagcgctgttttcctgcactgataaacgaaaagcaatccaccaggtctcggcagctaactttccggcactacttatgcccgagccgtgtcgtcccagtgcgcaagtgcagcaggtggctgcacggagggcgcgggaggaggaggaggagaaggaggaggaggaggctggggtggggccggcggcaaagtgctgtgatgcggttccggggaggggccgtcgggtagaggctgaataccagtttccgagcggcaaggcagcgatggcgatttttagtgtgtatgtggtgaacaaagctggcggcttgatttaccagttggacagctacgcgccacgggctgaggcctgagaaaactttcagttatccgctggatctgctggctcaagctacacgatgagcgtgtgttggttgctttcggccagcgggacggcatcccgagtgggtcatgcagtgctgggccatcaatggcatggacgtgaatggcaggtacacggccgacgggaaagaggtgctggagtatctggggtaacccctgctaattacccggtgtccattcgatttggccggccccgcctcacttctaatgagaagcttatgctggcctccatgtttccactcgctctttgccatcggctcccagctgtctcctgaacagggaagctcaggcattgagatgctggagacagacacattcaaattgcactgctaccagacactgacagggatcaagtttgtggttctagcagatcctaggcaagctggaatagattctcttctccgaaagatttatgagatttactcagactttgccctcaagaatccattctattccttagaaatgcctatcaggtgtgagctctttgaccagaacctgaagctagctctggaggtggcagagaaggctggaacttttggacctgggtcataggctgaacctgttatggacccccaaattctgagagttcctgcaacaagaatactgctgttgacactccagtggaaatcccagcagccttgttagtgcacttgaaagtgggagaatgctgaccctgatgacttgtactgattcctgagccttaacactgtgctctttccttctgtatataccatggtcttactttccaactctgtacagatttatttatggaggagctaggtccataaatgttgtaataaatattcctttgaaaaaaa

SEQ ID NO: 48450 - DNA, 509 bp, Homo sapiens
  misc_feature (1)...(509): n = a,t,c or g
nggngnnntagngttggnnnntnntgaatccnttnnntganaccctttgacatganacgaatttaatacgactcactatagggaatttggccctcgaggccaagaattcggcacgaggcactgtgccttaacagaaggtcttgagattctaagtgggaatcatttcagtgactgtcatgtggcatgggtctctgcccaagctcgtaatgagactatagcaaggcggctgtgggacgtcagttgtgacctgctgggcctcccaatagactaacaggcagtgccagttggacccaagagaagactgcagcagactacacagtacttcttgtcaaaatgattctccttcaaggttttcaaaacctttagcacaaagagagcaaaaccttccagccttgcctgcttggtgtccagttaaaactcagtgtactgccagattcgtctaaatgtctgcatgtccagatttactttgcttctgttactgccagagttactagagatatcataatagc

SEQ ID NO: 48451 - DNA, 506 bp, Homo sapiens
caagtttttggctcgggcggctgagaagaccgcgcggggctggagacaggtagcagtacgggggcggggcttcatgccggatgtgatagtctgcagtcgtttcggttggcagcctggcgggtgggagatgcggcggccacctgctgcaaagaaccgaagggaaggttagaagtacgaaggcagtttggagctggggctaagcagctgtcgcacggtcagatcatgggctccaccaagcactggggcgaatggctcctgaacttgaaggtggctccagccggcgtctttggtgtggcctttctagccagagtcgccctggttttctatggcgtcttccaggaccggaccctgcacgtgaggtatacggacatcgactaccaggtcttcaccgacgccgcgcgcttcgtcacggaggggcgctcgccttacctgagagccacgtaccgttacaccccgctgctgggttggctcctcactcccaacatctacctcacgagctctttggg

SEQ ID NO: 48452 - DNA, 881 bp, Homo sapiens
  misc_feature (1)...(881): n = a,t,c or g
gtcttcaaggagaatgccaacatcaatctcattgaacctctttgaattagtttactatcctataactaaaagaagagatttatagtttactgaagtcaaaaagtgggcttgaattaaggctgcttatattgtataagtgaaatgccagagtattttacttttatgtttctgtggcccaagggaattaaaatagatattatgccctgaatcccagtgtcactgtgactgcctgtgaaccatgtcagaaccaatatcaacaaaggcctcttcagctaagacttcccagtgttagaaagacaagaacagtaggatctctaaagcccttatcataatagcctacacaatcaatatcactgccacaaaatcatgcagccaggtcactaaggcatctgcagtcatcactaacactgatctccacctggagaaggctgtatggagactacaccactgcacccacctagtnccagaacaactgcactctgcccaaccgatgccctccagccctgtcgtcaggtgaaagtttttccccctatgaaagtcattcctctgaagtttggaagaggagactgtacccagaagatgcgcaagcattaatgtgggaataccagaaacatgaaaatgcaagggaacatgatgccaccaagggaacatgagaatttcccagtatctgacccccaaatttacagaaatttatgaagttattgaaaaggaatttaaattaatgatcttaagaaaaccaagagagacaaaatagtatacaaatagaaaattcaatgaaatcagcaaagtaattcatgatctcaatgacaaattcaacaaagaaatatatatcataaaaaagaatcagaaatcttgaagccaaagatttcaatcaattaagc

SEQ ID NO: 48453 - DNA, 652 bp, Homo sapiens
tatatccttgcagacaggatggaagatttgacaaaccggaggatatccaaacaaacatcaaatgtgaccggcaggtgtcactttatggttatttaagaggagcacacttcaaagataaaagccaaattcacatgccaggacaaggtggggctcacccatgagctggtccagagtctcatctccacctactccaccattgatgccaagatggcttcaagtcgagtgatgctgctttccaattccaaaccacttgggtcagaggctatagataatcaaggagatggctttggattccctgttctgtgtgctcctgtctggctcctgaacccagctggagaggtgtgtcaatcccaactggtgaagtactgagaggaagctacacaaaaggcagcaaggtgttaataagtgtacctctgacattttaaccacctctgacttttccatggaatggacaagtagtagtctctgtcagagcaatgttttaaaggagaaaaagaaacgtgaagtcatgaactgtttatttatgctgttatttttgtgtttactcaactcatttatattgacttgtaaattagtaatttatgaactattatttatcaattcattgcctacatgtcagcaaacaagttttcttcttaataaagaatccggt

SEQ ID NO: 48454 - DNA, 1559 bp, Homo sapiens
cgtcgacttttagtaaattacagtttatttcatttacagagaccttgaggcaaaaaggtggtgtttggaaaacagcacacgggtgaggagcaccgagaagcctgttacaaatacgccagtgcacgctgccagtgcagtgagtgtggggtcctgcaggtggccgtctaggaagggcaggcttgagacgcgcgtctctgcttccctctgacttgagaccatctcccttgcaccaacagcagcttctccaagctaggctgccacagccaagcacacactctgcaaacctatcactgcgagtagtacagttccctttaaaatcgcagcagcaggtgcttcagggaggagagggagccagggtggctctgggtgggcgtgacttgccagtgggagggcgacacaggtgggcagaaggctgccctccctctcattctatatgctgggataatttaaaattcacaagtcccaatacttgacaaatgaaaagtccattttgcgaatcccgacattcccctcctgatccacaatcacagttctgtgtggtgcgtcccatccctgcccaccaccccccacccccagggctgactgtgatgatggtaactcccaagtgtggaggtacctgtgggtgcagcccagagcctcggaggaggaagacagctctctgcccccaggcaggtccctgggtgccagggtcagcaggggctctgaggccaggagctacagcagcttgacgtagttctgtggaatcagccccctcttgccgttcagagtcccttctagccagccaggttccctggaggtttgtacatcctcaaaaattgctcctatttcaaaagataattccgagctgtgttctgcttcacacggatacgacggctcgagccttccgactgcggatgctttcaggtggcttgtccgctacagtagcaggaggagaaaaggggaaaggggacgacccgggtgaaagaggtgtcacagctgagttggagcttgttgtggttggagactgtgggttaagccactggaccatagacgatcgggtctggcctgggatagtggatgcccagtctccaaagctccctccatctgccagaaggtggtttttgtctggtcccaggaggcccagggacagctgtagtcacgggagaccggggaggaaagtgagtcccagactgctggtaggggtgtcctcccttggaagggtaaggattgtcaccatcttccagctccagacaaagattgtagacggccacgggcctcttggttctctggccttgtctcttcgactgccttggtggcgcatttgggggtgatgctgacaggcaggtgggctcagggaatgtagtatcgggcggcgtccgaaaaatcttttcatggttttcaattaagatttccacaacaatattctgaaacttcaagtccatgagggcagcgacagtttcttcctgtggcctcatcagagttggtccaaacaccactcctaagtttgccacagtcatcaggttctgcttggagtgatttgaaacatttgttaagtgtttcaccaaaatatccaacatctc

SEQ ID NO: 48455 - DNA, 1793 bp, Homo sapiens
ttttttttttttttgcaaaacaatcagaaaacatttattatactgaaatgtgtacatcctactattaaaaaaacaaagtaacaaatttgctggtgccaaaatttatttagcctgtttcactgggacaaactcacgttcaatgccactcagtataatttcaagtctgataagcatctaagtatttttaccccgcttctaaaacctgatgaggaattcaaaataagcacacagcattaaatgacatttattgttccataaatcttgagacccaaaaaggaatgctaaatagacaagcaaaacttttaaaacaaacgagataaactcacttctttccccagtgactggtacagaaaacatgtggtcacacgaaagcaaagggaaaaagtcagaaaggaaaactctctgcctataggatctataggagttacagatattttcaaatcgatgatgaaaatagatcgtgcttctttgtagcaaataattaaccccctttatggaataaaacataaaatgtcaaagcttttactcactgaagtagtttgtcttctgggagagatttcaaactcaaaattactcatttcctattttttgcctgaacacaatgaggatcaaatagtacattcaaatcaggacacctgggtatatggacaaagatatcctacaattaaaatggaatagaagttaaaaaaaaaattcagtcccctacaccacaggcctcaaacatgcttgctgatggattctgggaaggttttggatgaaggacggagatatgggaggaaagtgagaaaacagtggattccctttgaaaagtatgctagcagacaagcatttggttttatgaaagaggcactcttatagagaaagaagctagtatgtggtgtataaaaagcccctaaatcatcaccagaatgtctatccatgattgtactaaagctcaatatttgagaggcttaagggatttgtatggtacattttagtgtttgattgataacatctagtgtttccagaaaaaaattcatcttgttcataatgaagatcccttaacacctagtcagaagctatcaacaataatactttctccccctacttgggtcacctatttccaatgtctggggtagggctttaaaaatgtttaataggatggtgggggtggggggttagggtgggggtggtcagagatggagggagagagggaagaaaatgagagaaaaaccacgagtttaaaaggcaaggaatctccaaaaatgaaaaccagaaactaaaatgctaaaaatggaagcagaagcaaaaaagtttttcaataaatctgtgacaaagccaaaacacaaaagtctttgtacctattaggatttacactgatcctctcaccaaggtactcctgataatgcagtttgcttcaagcccatcttcctggcttggatcttctccaatctggcatgatcatatcaaacgtacaccctcagacatgatttcttccaagaaggtgccgagcctcttacctgaccaccaacggccacatcagcacaacacaactctccgcatacagattcactgctggccccacaacagcactgtcccccatctcctctccaggtcagcataaggttcaggcaataaaagccaaactggcacagaaaggtaaatgcccacagtaagtttctacattcatttccaaaccgcatacagtgtaaaaagacagcaaaggctgcttctaggaactgtatttactggcctctgccagagcagcaggcagctatgcctgcaccgtggcctccagagctggatgcatgctc

SEQ ID NO: 48456 - DNA, 539 bp, Homo sapiens
  misc_feature (1)...(539): n = a,t,c or g
aannttgaaacccnttgactgattacgaatttaatacgactcactatagggaatttggccctcgaggccaagaattcggcacgagctggaagaatcaatattgttaaaatggccatactgcccaaagcagtttacagattcaatgctattcctattaaactaccaatggcattttcacagaattagaaaaaactatttcaaaattcatatggaaccaaaaaaagcctgaatagccaaggcaatcctaagcagaaagaacaaagctgaaggcatcacattatccaacttcaaactatactacgagactacagtaatcaaaacagcatggtactggtacaaaaacagacagaccaatggaaccaaatacagaacccagaaataaagccatacaaactacagccatctgatcttcaataaagttgacaaaaataagtaatggggaaaggactattcaataaatggtgctgggataactggttagccaaatgcagattagaactagacaccttcaccatatataaaaataacttaagatggat

SEQ ID NO: 48457 - DNA, 1073 bp, Homo sapiens
ttttttttgcagtacatgaatgttttattcttcataaagtgcttaaaacatgaagaacaagctctttataaagagccttaactaggaagacaaacagcaaagcagaaccatgcctgctccctgcccaacccacctgcaactttcctccaagtgtggctaggagaagaaacatcaacaaggaccctgggcttcgattcaaaaactcctctgaagccatccatgccctgggcattagggaggcccacaaaggtcagggccagggctgggagtgaataaagcccagaggaatccccagtagggggggtgactccccctctctcagaaaagatacttacttctctaatacccaatgacccccaaaagcatgactgaaaccctggggaccagtggatacttttctcagatttgatgagtggagtttaaggtaggtaacgttacaggggctttcctccatgtgtggcgctcctctgctccatcctggcagcagacagacatcacccagagggcacgtgtctgcctgaggccttccaaaagcaagcccacaggccctctcctgaagaagtggtggtcccagaggagctcttgcctcctcactaagctgttaagtatccttcttcagcacctcatcaccccccatttttgctaattcagggtgccccaagctgccaaagttccctgcagatgcccttggggaagcctaccatgttttctacaagcaaaccaggggctgggcccaaaggacagatacttcatttcaaagtgcactgcagccaagccaggcaaacccctggggcagaagggacaggctgagatagcagcttaatggatggatgggaggacaacaaaggctttttcctaagtataggtgtctcccaaaggcatagtgggacctccctcttccaggcaagctgactggtctagtatggctaagtcctgaggccagacaatgagagtgagcagggcagccccaggcctgcctgcccgcctgcccagcagtgtttatcctgggatcctcctattggggttgagggaggggaagacagcaggaaggttgagggagcagcaacttggcc

SEQ ID NO: 48458 - DNA, 1612 bp, Homo sapiens
ttctcttcagactgaagcagcaattctgccactaccagcagcaaccaggacgtctgttctttgtgggggccagatcagaagagagaggcccctgtgaccgcccgggctgcttggtcacaactctgtccaattcaaggatgtttatcggcctctcttagatcctgagtgagacaaatacagaaatgacccattccctgcccaccagaaactcagaggtgattggggagactgacacaggaaaatgaacttaatcaagagagactgtgatatgtgctaagaagggtgtgagggagggagagatgaattttccctggagggatcctagaaagcattgtcatattgccatctccattagctcacttttaaacaactagggtgctggaagaacctttgtctgagggtagttcatagctggaaatacttggaatattttccagagtctctaaactctcatcttcccccacagatacacatccaagctcacaaataggagtagcaattctaggtggtagggttgtgtacggaacccctggctgtctgcatatatctcagaattaccccaggaccattgtcccaaagtctagagtctttacaggtaggcaaaatttgttttcaatgcctgtgcctcagctgctgtcacaaatacccatcttaggatcccatcagcttcccatcccccaccagacagccacagtaccctcactttctccctattgttctttcaaatcctgttctcaggaaagaaactgccactaattcattcacactaaggtgtaaatgattgataataggaatgagttacctcttcccacagacatttgtttttaagtatgacagagcagggccttaatcccaagggaaaaggttatggaactggagggggtgagctttctgggtagaaggagacttcctgaatttccttaaaacccagtaagagtaagacctgttgttttggaaggtctgctccaccatctaagagcactgtttttttttttttgttgttgttgttgttttacggtctctgagggaatatagtaaaaatgcatatgcacgtgcaatttgcacggcagcatttcaccgattgtggactgtattggctaatgtgtttcctggtctttagatgcaaaccattaataacactatcttatctcatagttttttcaggggtgcttcttgattagtagggaattttgaacacctctttaaatacagctagaaaataaaaccaatttgtaaagccacatttgcatatgatgccagcctcacgcatttgtatatctccagaaattcaggtatgcctcaccaatttgcccgtctttaataaaatcttgtgttaaaatttgcatcacgtcgccttcctatgtatgacgaaacaagaaacagagatttccaattgctcttttgtcttcagacatttagtaatataaagtacctatttttatgctggaaatgtttatacaggtttattaataggcaagtgcaacctaactggcggcatgccttgcaacacattttgatatattagccatgcttccgggtaaaggccaagcccccaaactccttatcttttgcagtctctctgggatcagtaaaaaaaaaaaaaaaagtcgac

SEQ ID NO: 48459 - DNA, 1732 bp, Homo sapiens
  misc_feature (1)...(1732): n = a,t,c or g
ccctgagtgagtctctggcgtcccaaattgcctgtttttctcgcaggctctattccgttcgctggttcgccacctcaggggaacgatggccatggagtccacagccactgccgccgtcgccgcggagctggtttctgccgacaaaattgaagatgttcctgctccttctacatctgcagataaagtggagagtctggatgtggatagtgaagctaagaaactattgggtttaggacagaaactatctggtgatgggggatattccagcagctgtcaatgcattccaggaagcagctaagtcttttaggtaagaagtatggagagacagctaatgaagtgtggagaagccttctttttctatggggaaatcacttctggagttggcaagaatggagaatggtgtgttgggaaacgccttggaaggtgtgcatgtggaagaggaagaaggagaaaaaacagaagatgaatctctggtagaaaataatgataacatagatgaaactgaaggctcggaagaggatgataaagaaaatgataagactgaagaaatgccaaatgattcagtccttgaaaacaagtctcttcaagaaaatgaggaggaggagattgggaacctagagcttgcctgggatatgctggatttagcaaagatcatttttaaaaggcaagaaacaaaagaagcacagctttatgctgcccaggcacatcttaaactcggagaagttagtgttgaatctgaaaactatgtgcaagctgtggaggagttccagtcctgccttaacctgcaggaacagtacctggaagcccacgaccgtctccttgcagagacccactaccagctgggcttggcttatgggtacaactctcagtatgatgaggcagtggcacagttcagcaaatctattgaagtcattgagaacagaatggctgtactaaacgagcaggtgaaggaggcttaaggatcgtctgctgaatacaagaaaggaattgaggaacttaaggaactgctaccccgaaattagagagaagattggaagatgcaaaggagtctcagcgtagtgggaatgtagctgaactggctctgaaagctactctggtggagagttctacttcaggtttcactcctggtggaggaggctcttcagtctccatgattgccagtagaaagccaacagacggtgcttcctcatcaaattgtgtgactgatatttcccaccttgtcagaaagaagaggaaaccagaggaagagagtccccggaaagatgatgcaaagaaagccaaacaagagccggaggtgaacggaggcagtggggatgctgtccccagtggaaatgaagtttcggaaaacatggaggaggaggctgagaatcaggctgaaagccgggcagcagtggaggggacagtggaggctggagctacagttgaaagcactgcatgttaagagggggcacagccctcctcccaagggaaagtgtttttgtatataatgtattttttcacttttggaggattctttttgtataacttcaataaagattgtaagcaaaggttgaggctttgatggtttttttcttaattattggctgaatctgccttggagcactgctggttttatatattagccaaaggttttgttctggccttctgtactgatctgtgttcctgatcctaattcctatctgtctaacgtggaggtgatcaagngtggctgtaggcctttgttttccaatgg

SEQ ID NO: 48460 - DNA, 539 bp, Homo sapiens
gtctccaccactgctgctgctacccttgctgctgctgctgcctctgctgaatgtggagcctgctggggccacactgatccggatccctcttcgtcaagtccaccctggacgcaggaccctgaacctactgaggggatggggaaaaccagcagagctccccaagttgggggccccatcccctggggacaagcctgcctcggtacctctctccaaattcctggatgcccagtattttggaactattggtttgggaacgcctcctcagaatttcaccgttgtctttgacacgggttcttccaacttgtgggttccgtccacgagatgtcatttcttcagtttggcatgctggtttcaccatcgctttaatcccaaggcctccagctccttcaggcccaatgggaccaagtttgccattcagtatggaactgggcgggtagatggaatcctgagtgaggacaagctgactattggtggaatcaagggtgcatccgtgattttcggggaagctctgtggggaatccagcctgggtcttcactgt

SEQ ID NO: 48461 - DNA, 593 bp, Homo sapiens
caattctgaaggtcgccaagaaggagagaacaatgtcttctttacccgtgccatgcaaactgcctgtgtctttgtctgttggttcctgcgtgataatcaaagggacaccaatccactcttttatcaatgacccacagctgcaggtggatttctacactgacatggatgaggattcagatattgccttccgtttccgagtgcactttggcaatcatgtggtcatgaacaggcgtgagtttgggatatggatgttggaggagacaacagactacgtgccctttgaggatggcaaacaatttgagctgtgcatctacgtacattacaatgagtatgagataaaggtcaatgggcatacgcatttacggctttgtcccatcgaatcccgccatcatttgttgaagatgggtgcaagtgtcgaggagatatctccctgacctcagtgtgtgtctgcaattgagggagatgatcacactcctcattgttgaggaatccctctttctacctgaccatgggattcccagaacctgctaacagaataatccctgctcacattttcccctacactttgtcattaaaacagcaaaataaactca

SEQ ID NO: 48462 - DNA, 1193 bp, Homo sapiens
gcctcaaattatcaatagaatttaagagaaaaatcaaagttacacatccctctccacatcagtttcttggaatctgctactcatgactgcccctcctctccccacgcgcccctaccaaagtcacaggagtcatcctcaaatgtcagggtactggggtgaatgtactccacgcctctctgagtttgtctctgctcactcttcatcttcccactggtttcttttctgcactagagatgatccctgccctcagctcccttcatggaggcagttcagatacttggccctacctgtgatgagcacacacacagaattctcaactgacagtggcatcctcagaagagtcggtgcccactattttgttttattttgctgaaagaagttgccctcactacacatcataaacccatagatgtaaatactttccctctcaacatacaaattttacctttctctttcccctcccacaggggtgactgtggtggggaaggaaagagagggcttagacttcaggtcaaatgttacattttcttagggaacaatttttataattcattatgtattttaatagggcaataaatctgctttggggttgcaggatcactcagtgttctgttggaaagcattgaccaatgatttgtttttaatacaaatgctgtgcgatgagttatagaaacctaggacaatggttgagggagtcgactcctacatcagcagtgaagcgctgagcggcgttgtattcacaaagtcacatcttctgtttctgtgttagtctcgatttgttgtggtacgttctgcatttattacataatcattgtgggctcattttagatttgccatctgaaccaagtgacaagtatttttcaatacaataaagttgaaaaccttgtcttccacttgctttggtagttgtcttcatatctccctgtgcttattgccctgtctgaatcagcccatctgtcactcacttagacctatcccttccccactttttctactttcactacacttttgaccttagctattgtttgagtgtgactcagtttccctgttcaagttagcttgatggtttattatgtaaggagggtgcctaagacaatcatcaggtaaaaataaaataaaataaaataagatcagtagagtagaaaatcttccaagagcagagggagttcttccttagcaatgaaaaaaagaca

SEQ ID NO: 48463 - DNA, 755 bp, Homo sapiens
ttttttttttctttgaaggatttactaatatttattaagtgccaccaacatttcaacgggccacaggcagggctgggagttgggggagaaggagtggctcccctcccgacaacaggtgaccctcacccccggctcagggccccgagggggtcctggaaacactcacgctcaaggagcggaggtgaatggcttcctgttctcacctccgggtccaggcactgggggtgaggaagtggctgggaggccaggaagctggaggaggggaggtgctggggcccagggctgtgcgggaggggatgggatcctgtgggtaccttggcccgtgtgccagggtcgggggaacgtgacactaggtgagaattgggtagaaagtgtgtgtgaaagggcatgcgtgcatgtgatgttggtgccatatctataggtgtcgttgtcatggtgtgtgttgtcactgtgtctgtgtgtgacatcatcaccgtctgtgtgatgccatcgccgcgtctgtgtgacattaatatgtgtgacgtcgacatggcccgtgacgtcgttgctgcatctcggtgtgacgtcatgccaagttccccatgtctgtgtgcgaacgtgctgcatctgcacgacgccatcgctatatctcttcgtgacgtctacatggccacgtgacgccatcaccacggtgatatgtgacgtcagcgccgttgcttgcgtgacgtcatctccgcggccgtgtgctctgggtgagggatcgtgaggcgctgggc

SEQ ID NO: 48464 - DNA, 790 bp, Homo sapiens
gactttaaaagcatacacaggaagatacatggatgtaataaccttgattttttaaaaattagctctttcttccctaagcaaaccaaaacttaataataatatgacaacttgattatataaaagcttttggggtgtgtgtgtgtgtgtgtatatatatatataaaatcttatcatgacttacaccaatgttcatgacatgcttggactttctggtttgtcctgaacatccctccttgttaaacaaccagttattttattttaggactaaatttaccatataaaattctttcttatataaaattatttctttttcagctttttaaccttgaaaaaattctttatttttataactttatttacattttttttcttttctggttccttttaccttgttttatatataaccttttaataagctttgaattagacaaaacttgttcaccatttttttaaaaaaaggacacacttttttttaagcaacaatgttttcctacaagatatatttattggaaaatacccaaataataaattatctattatttaatttaatatgactttatattctaaattatgtccagttggtctataagtatttatcccattacatttacctagttattttattaattgtttacctagattatttatgaaaactgtgatagtcatgatttaaagttatgaaatcgccattgcaaaattataactgagacagtgaaaaacgatttgacctaactgactccaccttgctcttaacttccaagctgtccttgttcattcctgggcataggcg

SEQ ID NO: 48465 - DNA, 1877 bp, Homo sapiens
tccttttatcacaaagtttttattgaacaaaaataatatgacagtaaaaatgatacataaagtgaagatttgcagtcatagaaaagatgtgtacaaagagaccaacattcaggttatatagttctataaaacttttcccatagcagtttaacactgattaagcagacataaaagggaaaagaaagtcattaatgttctttgaaacctattttctgagtaaaatacctctgctaacacacacatgcacacacacacagaatgaggcagagctatatgagtgagttattcttcagttcctccagttctctgtttgtgttacaggagtattttcatccatcaaaaaattgtagtatttttgcatttctaataaatggatctagagcatacattaatcccagtttccaaaggaaaagaaagaatcagatctatagtcatttaaatatttccaatcagcatttacgtaaacaagtatactaaaaatagtagttttggttgagatttttgcacattaacttcctttagtttgtaagaatcatgcattttggatgtgttctcttatctgacaacacaagttttaaatgctgtctttatctgttttgtttgttttactaataacacgtagttttgaaccagtaattacttaacagctaggcatgggggagacagaattggactgagcaccaatcattgttctaccttcagtgagctgtgcagccataggcaactcccagcttctgctgtgcacctgtcttgagctggaaacaggtggcgggaagcattctcaaaggccccttctagcactaactttgtatgttcagtaaatatcagttccctggaccagctccttttattctggtacagaattattcttagcctatggggtgggggtggggggacagtagtgtctattatttgtgaattttggaaccagtgtcattactttacagtcaaggaggcatgttaagagtgtttgggatttttatcccttgataagggcccacatccccacatacagagatgctcaattccaattgaaaaacctcagaatttcctaagtgtcaaagcaatagtctagatttttttctgaaaattcaagaaatgtgttttctcaaatctctttttttatcctttctcataatcctgccacttaatgcccagtttggatcagttatttagtcacatttcaagttagtttttatcatcacttatagttaaggattgtaattaatcttgaatttaaagcttggtgcttttcagttttcttgtattagaactttccttcttcatgtacaggtgtggtacctttggactggtgcctgctgattttctgatggaacagaaaatatgtctgtattatcactgctccaaattacattacacaacagaatttactggagtgttccaagttatcatcagttcagttccacgatgatgaggttcctgtagaatttttcatctgtcagatttccttcattctcccctaactttagtaatacataaagcagtgtatcctctctcagtttccacaagcaaggcctttagtacctccactctctatttgtattacagcaagtttttgatccatcaaaaattgtgaacacctacctatactgatgaagatacctagtgttaaaaatggtttctttgttgtttgggttcatcaccactctgtgagcttcttctaaagcattagattttttaaatgttaattatagttccaggggaaccccaacttacttatactgacacagtaaatatatcagatggtcgggattccctatggaaaactgagaaaaccagggctaattttttgaaataagaatatgctaacctaggagatattcttgggcctggaatagcataaacttgatgtagct

SEQ ID NO: 48466 - DNA, 971 bp, Homo sapiens
  misc_feature (1)...(971): n = a,t,c or g
gttactagntacttacctccacctgaagagagtaaactatgaaattcctgcagtggttantagggatgaacttatgtgcattggcatttaaagttctccatgacaagcagcgaggaccactggtttttatgcgcatttactcaggcactataaaaccccagttggccattcataatattaatggaaactgcacggagagaataagtcgtctgcttttgccgtttgctgaccaacatgtagaaatcccttcattgactgctggtaacattgctttgactgttgggcttaaacatactgccactggagacaccattgtctcatccaagtccagtgcattagctgcagctcgtagagccgaacgggagggagaaaagaagcacagacaaaacaatgaagcagagagacttttattggctggagtggagattccagaacctgttttcttctgtaccatagaacccccatcactgtctaagcagccagatttggaacatgcgttgaaatgtcttcagcgtgaagatcccagttttgaaagtgaggctagatcctgactctggacaaactgttctgtgtggtatgggggagttacatatagagattattcatgatcgaatcaagagggaatatggactggagacctatctcgggcctctccaggtggcatatcgagagaccatcctaaactcagttcgtgccacagataccttagatagaactttaggagacaaaaggcatcttgtgactgtagaagtggaagcaaggccaattgaaacatcatctgttatgcctgtgattgagtttgagtatgctgaaagtatcaatgaaggccttttgaaggtctcccaagaggccattgaaaatggaattcacagcgcatgtctccaaggaccattgcttggatccccaattcaggatgtaggcaattacctttacattccctgacaattcatcctggnacctncacaactatg

SEQ ID NO: 48467 - DNA, 2445 bp, Homo sapiens
tgcggccgcgcttcctctgatccgggccgggcgggaagtcgggtcccgaggctccggctcggcagaccgggcggaaagcagccgagcggccatggagctgtgcgcgctggggctgccccggccgcccatgctgctggcgctgctgttggcgacactgctggcggcgatgttggcgctgctgactcaggtggcgctggtggtgcaggtggcggaggcggctcgggccccgagcgtctcggccaagccggggccggcgctgtggcccctgccgctctcggtgaagatgaccccgaacctgctgcatctcgccccggagaacttctacatcagccacagccccaattccacggcgggcccctcctgcaccctgctggaggaagcgtttcgacgatatcatggctatatttttggtttctacaagtggcatcatgaacctgctgaattccaggctaaaacccaggttcagcaacttcttgtctcaatcacccttcagtcagagtgtgatgctttccccaacatatcttcagatgagtcttatactttacttgtgaaagaaccagtggctgtccttaaggccaacagagtttggggagcattacgaggtttagagacctttagccagttagtttatcaagattcttatggaactttcaccatcaatgaatccaccattattgattctccaaggttttctcacagaggaattttgattgatacatccagacattatctgccagttaagattattcttaaaactctggatggccatggcttttaataagtttaatgttcttcactggcacatagttgatgaccagtctttcccatatcagagcatcacttttcctgagttaagcaataaaggaagctattctttgtctcatgtttatacaccaaatgatgtccgtatggtgattgaatatgccagattacgaggaattcgagtcctgccagaatttgatacccctgggcatacactatcttggggaaaaggtcagaaagacctcctgactccatgttacagtagacaaaacaagttggactcttttggacctataaaccctactctgaatacaacatacagcttccttactacatttttcaaagaaattagtgaggtgtttccagatcaattcattcatttgggaggagatgaagtggaatttaaatgttgggaatcaaatccaaaaattcaagatttcatgaggcaaaaaggctttggcacagattttaagaaactagaatctttctacattcaaaaggttttggatattattgcaaccataaacaagggatccattgtctggcaggaggtttttgatgataaagcaaagcttgcgccgggcacaatagttgaagtatggaaagacagcgcatatcctgaggaactcagtagagtcacagcatctggcttccctgtaatcctttctgctccttggtacttagatttgattagctatggacaagattggaggaaatactataaagtggaacctcttgattttggcggtactcagaaacagaaacaacttttcattggtggagaagcttgtctatggggagaatatgtggatgcaactaacctcactccaagattatggcctcgggcaagtgctgttggtgagagactctggagttccaaagatgtcagagatatggatgacgcctatgacagactgacaaggcaccgctgcaggatggtcgaacgtggaatagctgcacaacctctttatgctggatattgtaaccatgagaacatgtaaaaaatggaggggaaaaaggccacagcaatctgtactacaatcaactttattttgaaatcatgtaaaataagatattagactgttttttgaataaaatatttttattgattgaacctttgaccctctatcttattacatttagaggcctggcatctttcttgtgagacaagcttaaggacacaaaagaaacacaactttgtgataccactcttctgaaggctacttatagtaataacttcatagatgaacagcatgattcaggtacagtggctttaaacatcaaagcacatttctcattatataaattaaaacgggtggctccagtgccactatcaaagcttaagttatatcttttatctagttctctgaatgtactgaaacagtactttattcgtccaataaataaagcaataaaaattgttcttactgaaaatgaagtagctaggtgctcctgaatttctctccaaaaactaaaacatttaggtcaaaccacttctccggttgagcagtgtattttgatcttgaggattcatggcttgataagtagatagttctaaggcaaaagtagctgagcctgatgttagcgttcgaagcacagttgaataacccataatttctgctaagggaacaaatccaataacaactttgttgtcctggcgagtctgaatttcctgaatgtttc

SEQ ID NO: 48468 - DNA, 3067 bp, Homo sapiens
gtgtttggccctcttcgagtgagtgagagacagcatctcaaagacaaattttggaattttattttctacaagttcattttcatctttggtgtgctgaatgtccagacagtggaagaggtggtcatgtggtgcctctggtttgccggacttgtctttctgcacctgatggttcagctctgcaaggatcgatttgaatatctttccttctcgcccaccacgccgatgagcagccacggtcgagtcctgtccctgttggttgccatgctgctttcctgctgtggactggcggccgtctgctccatcaccggctacacccacggaatgcacaccttggctttcatggctgcagagtctcttcttgtgacagtgaggactgctcatgtgattttacgatacgtaattcacctctgggacctcaaccacgaagggacgtgggaaggaaaggggacgtatgtctattacacagactttgtcatggagctcactctcctggtccctggacctcatgcaccatattcacatgttgttatttggcaacatctggttatccatggccagcctggtcatctttatgcagctgcgttacctgtttcatgaggtgcaacgtcgaattcgtcggcacaagaactatctacgtgtggttggaaacatggaggccaggtttgcagttgcaactccagaggagctggctgtcaacaatgacgactgtgccatctgttgggactccatgcaggctgcgcggaaactgccctgtggacatcttttccacaactcctgtcttcgttcctggctagaacaagacacctcctgtccaacatgcagaatgtctcttaatattgccgacaataatcgtgtcagggaagaacatcaaggagagaacttggatgagaatttggttcctgtagcagcagccgaagggagacctcgcttaaaccaacacaatcacttcttccatttcgatgggtctcggattgcgagctggctgccgagtttttcggttgaagtgatgcacaccaccaacattcttggcattacgcaggccagcaactcccagctcaatgcaatggctcatcagattcaagagatgtttccccaggttccataccatctggtactgcaggacctccagctgacacgctcagttgaaataacaacagacaatattttagaaggacggattcaagtaccttttcctacacagcggtcagatagcatcagacctgcattgaacagtcctgtggaaaggccaagcagtgaccaggaagagggagaaacttctgctcagaccgagcgtgtgccactggacctcagtcctcgcctggaggagacgctggacttcggcgaggtggaagtggagcccagtgaggtggaagacttcgaggctcgtgggagccgcttctccaagtctgctgatgagagacagcgcatgctggtgcagcgtaaggacgaactcctccagcaagctcgcaaacgtttcttgaacaaaagttctgaagatgatgcggcctcagagagcttcctcccctcggaaggtgcgtcctctgaccccgtgaccctgcgtcgaaggatgctggctgccgccgcggaacggaggcttcagaagcagcagacctcctagcgctcccttgccttcctcagctgcctcctgcgccctgtgcccgactgactggaggaggcctgtcccaattctgcccgctccatggaaaagcgggcttgactgcattgccgctgtataaagcatgtggtcttatagtgtttggacagctgataaatttaatccttctttgtaatactttctatgtgacatttctcttccccttagaaacactgcaaattttaactgtaggtatgatctcttctggtgttgactggactgcttggggtgggggacgatcaggaggaagtgagccagtcgcctgccctgcagcaggcagcttctactcctgcctcatgcatacgtcccacaaatgcaggtgtcctgagcaccacacccagtgggaagagtgtgggggaggcgcacagtgtgagcccgcccccacgtcgtggggtaacatctgttatcaaactgctgtcgttgttgtggaagcatgtagactgtgccagaggccagacccacgggctcatgcacccctgagccagcagggcatcttggaaaaggaactcttggttcgatacctggagcagaggaggggaaagtccagggctatagggtgtgatgaagtcacccctttctgtcccactacatctgggactgactttccgagcctccagtccaaagccggcttgatttccgtgaactctggtgctcctgcatctcatgagtgtgccccatgggtcccctcccctctcagcatttccttgtcccgtctggacctggggagtggttaggcagcaagctttggtttatggttttcattcattggtgaagtaaattaggcagtgctaaagcctgtgggtttggtccttgaacaagatgtgggccttgcaagatgggagagtaaaccttgaagggctttattaaagaaataaaaaagaacttttgtatcttttatcctgggagcactgcgttttcctagctgtgttattcctggtttaattcagcagagaaggtaaggtgtgaacctacctgccttggagaggcccaggtcccaaatctcttcaaattcttcacatgtttaactttaaggatttgaaccatgaagtcataggttacagacctcagttttatgccccattggattactttttttttttttttttttttactctttgaaagctttgttttgtggtagtccttttgggaagaatccagtattatctacaattattggcaaagtttaaatgtattttacataacggaaagtttttagaatgttgaaaagtaattgaaaaaggtgataggtaaatttttaggcaaagataatttatttcaataaatctttcaaaagccttaccttgaaatgctgttagtaaatttctgtgattttttttttttaatttgttttgctgagagcatagctatttgtttttattgtaaaacaataataataataaaaagcaaactcta

SEQ ID NO: 48469 - DNA, 2003 bp, Homo sapiens
ttttttttttttttttttgttggctggagcgcattcattcgacagacacatatgaagcacctactgtgtaaagctgcctttgcaagcacttcacatgattcactgaacagagcagacagaaacccctgcccttcttgggggcttccatcctagacaagtgccagcggccccagttgatgccacgggaggcaatgtgcatagccatggcacgtgccgtccctgtggattcggatgcctcctcccctgctggggtgaggcagccaaccaggggccaactgaaaaaatgctggactctcggtcaaggacagggctgggagagtgccagtctccacaaactgtggatccactagagggttcaggcctggggcatcctctgcaagaggatcccacgagagtccattccccaccacaggcctccgctgctcactgctgtgccttgatcggcctggacgagccgcccacacctccatcatacccagtgtgaagaggggctggggacccaccactcctgagaacagcatccttgggaagacccagctgtgagtgcacagcaggcacagtccctcaggcccaggtgaggattcagcagcagatgggattccaccccatctgtggcctctccagctgtccacaggccctgcaaaggcagggaggtggcaaaggccagcccaacccagccctccactctgggtacccagaggaaggcgcaggccgctggttccacagcccatcacctggaggtgatggaggccaaccccagccctgcctggaggccctggtgagcttgcccagcactgctccaacccctccctgaaccacaggcagagccaggggtggtccaatggcctgagacgaggggacagggctggcctattaagaggatgccaccagagaaggcacaccagacacagactcctgtcagctcaggcgtcctggcctaaggaggcagggcccccaaaagagccaggtcctggcaccatctccgagctcccagcaggcctgctgcaggtcagaagggccacatcccatcttgggtccctgacctcattgggcctcacctgaaaacaggcacccaggcagtggccatgaacagccaggccacaagcctcgacaggggtgggccccaggtcacagggagggcggtctttatttctggaagggccccggagcaggaggctgcctctcgtccacccgtccttctatcctcacgacaggtgctatggggccgcagcagcatcaacagcctctctcagctgctgcagcagctctttgggctgtggtgagaacgcgctggtgtccactctctggaagtcggggtgcgcaaccaaggaggccagcacctctgtgatgcgcccaacatcaaaggctgcctgttcgaaacccaacccagcaccgtcctcagcggctgcctccctcaggaccaggagcctcttctcagcgatgaccttgaggaagtggtaaaactcttcaaagttgatgcctgagcaggacctcatgatgacctggcagtggtggtgccagtcgggcatggagtccctccactcgctgacctcctcctgcacggcgcatagctcctgctgcaagaagcgccacatgttggccaggttgaagccattgacccagttgtggttgatggagatggtgtcatccaggttgtcgacctggtggtgccagccactgggcacaaacaccatctcgcccgcttcctgcgtgatctccaagggtgggccagcaagctggttccgtgggtgcaggtgtgtgtcgcagagtgctggggaggtcacgtcgtagggcaggttgccgtggcggtcccgcagggcctcttcctgccctggggggaagaggagccacttcttcctcccacagacattgacagaccagctgaaggagcggaagatgtcagcatggaacggggaccagctgccgcaggccccgcgtagacaaagcggtagtcatccacatccagtgcatcccagaactcattcagccccgtgtgccgaact

SEQ ID NO: 48470 - DNA, 479 bp, Homo sapiens
gctgtgcaggtcccacacttacagggaaagcatcacccgaaagtgagaatgcctagaggcaggaatcatggaggcttccttaaccgtctgtctgcaacagcaggtgctagagatgacactgcagagtagagaacaaaggaatcttagtaattgttcaatccaatctccacactttaaagatgaagaaactggtattgagaaaaatacacagcttatccaaggttgcactgctggttggtagctgagatgaatttagaacccacatctgatgactacaccatattgctcccagttttcctgtctgttccacatgtaaaagtctgactcttcacttctcctttgagtatatagacttttaacatttttgtatgtcaagatggacttttcctcatacccagcccctgccttttctcctcccttcataccttgcaggatctttaacagaatttaaaaggagttttttgttttgttttgatgta

SEQ ID NO: 48471 - DNA, 993 bp, Homo sapiens
  misc_feature (1)...(993): n = a,t,c or g
ggtttgaaataatctttattttgtaaacatctgtgtttaaaatagatgaaccctgctcacaattcatatatggacccgagacacagtacacgaagttcacccgtcacagggagatagtggaggctcaggagcaggtggcgtgcctggggctggatggagtctcaagacagcaggtgcagaggtggtgacgagtaaacaggccagcagagcctgcttaacagtctgggcctcaagacataccccaggccaccaaaagtttagggtgagcgtagctgcaccctaaaatcccaattctccttctgctcccataccttttcccagtcatggcccttgtggatagggcctatcagtctatagaatcctgattccatgttttcccttccagaacccctagggtacagtacaaatatagtccttctttcctgagggggctaggagagaaagacaatgaatggcaccctgcctgatcttcagggaaagctgaaatactggtccacagattggagccactgcccaatataacttctcaagtccctggctgaagacagacttgagggctggcatcacctacttccctagccccagtgtgatgtggcataggtcttgatacccaaggagtcccatcttcaaggaagcaactccagcctagtcanagcttcatcctagagttagctgtctccttttctcattagccagtgatttacaacttcctgctctcctttgctttccaccatctaagctataccctgtccctaagtcctgagccaccctctcctgctgttttcctggtttggtaagtcaggaggaaaggtttgatggttctttccccacttctttttggaggagtaaggaagtgaggttcttatccttcacatatgagtgccctggattttggttcttagttgatgaatactcaacacccagttctttgttttgctgcagccacgcagtgcagctaatgtgtggcttaagaatgaccctcttcctaggcct

SEQ ID NO: 48472 - DNA, 975 bp, Homo sapiens
atcttgagaaaatgttacaaaattagcatctgggatgcctagacaagacttgatgcctgacttgctgacccctgggccagaatcactgcgcctactatacgcaaaagggcccctggcaatgcaaatgtcctaactgctctggtgagagagaacaataacaacaaaaagcttccatcaatactagagctaaccttctcctactagccccagtgagctgcttagctcaagtaagtttactgtcccagaggacagctttccacagtggcagataagcagccgcctgaacatttttctttggtatttccaccactgagtgtgctctccagtggcgtggggactccagaatctccttttgagcaatgcagtttgcttcctcccctttttagttgatgctatgggattccctgtcttgccttttcctgttttccatacctatcggggcaaacaaaatttggccaggtagatgggtcccagttctgtaaataacttgaatccagttgtcttgtataggtcattttatttaatatgtttttgggtatatgtacatgtattgtgatgtgtgttacatctagcgtgctgtcaaactggcttatagataacagaacactcatacattcaacaaataagactactgacagcttattagtttgaagagaatcttgtatcttctaaaatttaactttaggattttcacctaggtaagtcactgatgttcataggctttaaaatggttaaaatggctttaaatggtgaccagctttgcatggtaccttggttctcggtgatctagataaagttaaaagtgaaataattaaatacacgtaaatgggatatgcttaatgtgtggtttaaaatcataaaatggtagaatggttctcagctatagaatgacaatgtctagtgtgaagttcatgacttcttccttcctaggtttccataaaatgtgctaaagaaatgtattctttattgagaaaa

SEQ ID NO: 48473 - DNA, 2206 bp, Homo sapiens
  misc_feature (1)...(2206): n = a,t,c or g
aagctttttttttttcacgttttacatgtacagagtttatttgttgtttttacttaaaaagatacccaactgaaatattactaatgattaaaaacaaattcagagttaattacaaattcagttgaaacaaaatttcagtttggattaaatttacactgtgaattacaatgaagtgtcactcaattgcaaaatgatttccattcatacagcattttgtttttcataaattttgacctctgaccaaagaaaacacagctttttggggtaacattcatgaaaacattgaagcctataatataaatttttattaccactttcaatagtcattaatataaaaagttaacaaatttaaacaacaaagtttaagctgggggagagccccctcgggggaataccgggtccaagctgctgaaccccctgctcaccgccagcagcaggtgcaacctggggagtgcgtgaatgcgtccacccacaggaggagcgctcctcatgctctgacagttctgcgacaagcaccagtttcaaatcaaacctagtataacaagtactccataaaacgtgtgctaaggcaaagaaataagcacatttggataatacaaatatcccagaaacaatggaaaagaaaggcttctattagagaacagaaggcttagcatatatgagtgcgcaatgatcctgatagctacggatactgtttttatttacagtggcaaaaactttattactacagaaggtcactgacagacaatctactggctggttaattgtttcaaatttgattctttatcaagcaaaaatatcacacaacctgatcaacacacacacaaacgcttcagaaatcacttaactatcaagatggagcagactatgagagctatttataaaacacgaatatttgcatggaactgcttaatatcagaaaattccaagaactgtcaaaggcagcatttgaaaatagttctgacaccttaagatggaattaccatccagaaagccactactttgaaaggaaatctgagctatgaggatggtcatcatggatgaaaaggtcgattttcctaatcattatcaggacgcatttacaaaaagctgtaaaacttcaaaggagaaaagtattttccttaaaaaaccataaaaaaccaaaaacaaaaaaaggaaaaaaaaataaattagtttgttgcaagttatataaagacaacaggttactgtaaccctcattttcttctatntgttttttctgatctgcaggggtgtgaatttcatctatcattccaagtttaagaaggaatcagggacttctctaaaaagcaccagagagtgagctgatttatcaagtaaacaatcacactcacttcttaaaagacacaactacaaacgccatagaaagcggtgactgatggagcctgcaggaccctgtgggcgaggacaactgggctcgcctggacgttttctcttttgcagtccccacaacactgccctgttcaagggcaaacaaaaggcagtgccagtcagacctgtggtagggctggagcgacctcttttgtataaattgattggaaagaaagagttaactgttttggtaagaatgaaaatttaaacacagaagtatgtaagaatgatactagcttttacattacttgtaaaacattttacaatcattattttaaaaacaaaaatactcaaaagggcaacagcactgggtaagaagctctttcattttaatattacacatgcaaatgctaactgaaacttacaagaataggcccatggtaagcggatcgatttttaagataagactttcagaatttcactggaaggtgggaaatcaataggaaagggatctacaaggatgaaggccaaaactcaacccccaaaacctggttatcccagatatgctaatggacagtatgtgctaatgtgttgtgagaaaaccggaatgtttcatcttaattatggaggggaacgccaggttgaatgaagcctgtatgaacgtactacattcatggaaaccattatgaaaagtacacaacctgtaggtggcatttcttcaagcactctaaggggaaaatgacttatgtaacagaacaaaataaatgagggctaaggtttggggctcattcctagctatactttcaatttataatttacctcgggggaactccggaattaggggtatcactgctttctttgtgtctgctctattttt

SEQ ID NO: 48474 - DNA, 556 bp, Homo sapiens
  misc_feature (1)...(556): n = a,t,c or g
gnnnnnttnnnntnnnnnatntgantncttttatgactgattacgaatttaatacgactcactatagggaatttggccctcgaggccaagaattcggcacgagtgacaataaaacccacagtgagaatttgaaacaggatatcctgtaccttcacaaactctttagaggaggtaaacagtgccctagtggggtaccagagacagaatgatcttaaactcgagggaatgaacgagacagtcagtaatcttacccagagagtcaacctgatagaaagcgatgtggttgctatgagcaaggtagaaaagaaagcaaacctgtccttcagcatgatgggtgatagatctgccactctgaaaagacagtctttggatcaagtcaccaacagaacagatacagtaaaaatccaaagcataaagaaagaagatagttcaaattctcaggtatccaagctaagagagaaactccagctgatcagtgctcttacaaacaaacctgagagcaacaggcctccagagaccgccgatgaagagcaagtagagagtttcacatcaaagc

SEQ ID NO: 48475 - DNA, 2013 bp, Homo sapiens
ctggttgtctaacttgggaatctactcattggctagaacatattaagcttattcttgcaggggctcttaggattgctgacaaggtagagtcagggaagacgtctgtggtagtgcattgcagtgatggttgggatcgcacagctcagctcacttcccttgccatgctcatgttggatggatactatcgaaccatccgaggatttgaagtccttgtggagaaagaatggctaagttttggacatcgatttcaactaagagttggccatggagataagaaccatgcagatgcagacagatcgcctgtttttcttcaatttattgactgtgtctggcagatgacaagacagtttcctaccgcatttgaattcaatgagtattttctcattaccattttggaccacctatacagctgcttattcggaacattcctctgtaatagtgaacaacagagaggaaaagagaatcttcctaaaaggactgtgtcactgtggtcttacataaacagccagctggaagacttcactaatcctctctatgggagctattccaatcatgtcctttatccagtagccagcatgcgccacctagagctctgggtgggatattacataaggtggaatccacggatgaaaccacaggaacctattcacaacagatacaaagaacttcttgctaaacgagcagagcttcagaaaaaagtagaggaactacagagagagatttctaaccgatcaacctcatcctcagagagagccagctctcctgcacagtgtgtcactcctgtccaaactgttgtataaaggactgtaagattcaggggcatcattgctatacactcttgattacactggcagctctatgagtagaaagtcttcggaatttagaacccatctatgagagcaagttcagtcactttatttattttaaatctctctaggatgagtttagaactgtagcagtgcaggtggcttaagtgaagtaactccatatgtaattacatgattatgatactaatcttttaagtatccaaagaatattaaaatacttcaatcctggattcacagtgggaacaagtttctattaaaaggcaaatgctgttacaaatttttggcatctggtaatattaaaaccattttagaaatacactctgtgctcactgtgcagaggaacatcagttttcaaaccaacactgaaattctgtggcatcacatatattgggccttgatgtcatgacagatcaaaatcatttgatatccctttctccattctaggtttttctttttttcagtaactgatttaccttgatcacttttcaacttccatattcttcatatagtaaaaggcaaagtgttgaagatactacggtgtggtagtagttgaaaattattgccgtcattatttacatacttaagacatattagcaagttgatccaaaatgggaggccttatagatgtgcttgggggaaaatgaaggggagaaagtagccatacaggagttcaaagaattccatgcccttcagattagcccaattaccagaaacatcatgaaagatattttaaaaactaattatttactacagtgtatttcacttgtcttgtgtgtctgaacacacagaagctaattagcaagtttttaagaagtatttaaaaatcttactaggattgacattttttctgaattctgtataaatagcttatagtgagaagtactgtgctcaaattttacatttttttcctttgcaaattctgtaatttcactcaacgattaagtctaccaaagaacacactgcatgtaaaagatgtattacaatctcaaagccagtaaaagaaatcttgcttcactgttcacctgctacaagtaagagtttggtgctggtagaaacatttgactctgatgtctattttattctacataagagccatatgtaatgtactgtaacaaaggagcttcttgtccccttggtcttttaattaaaagaaattccaactgacttttaaactttaaaaaaaaaa

SEQ ID NO: 48476 - DNA, 1094 bp, Homo sapiens
ttgattaccaatttaatacgactcactatagggaatttggccctcgaggccaagaattcggcacgagaggcaggaggattgctttagccctggaggtcgaggctgcagtaagccatgattgcgccactgcactcagcccgggtgacaaagcaagaccctgtctcagaaaaaaagaaaattcaaggccagttaagacaaatgctatgactttgaaattcacagaaagaaataacagtttagattaggtcttcaggtattcaggatagagataatctcctgaaaaacctgaatttcagagattcttagactggctgccaaaggatgaagctagtgaaggagaaaaagcttaaattccatcttgagctcttggattgggataatacaatgatttcattaacttttcatttctgtatacctgttcatttggaatttaatgcttgacttctttgttcattttggatctaaacttctcttttcttccttccccattcacatctattagaagactgcatcaccatttctttggcccccttactctgttgtcctttcccttttctttcagtttttttaatcgcatgtctagtatattaagtctccatagccctcctgatgcagtagacagtgctatgctgtggatataataccaaccagaaattggcatttataaacctgttaagagactttaagcatgcttcaagaggcagttgacccactggaatttctataaggctggtacccttcccagagttacagaatcttaggtgccgtctctagtctgtgaggggaggaactcccagcatccccattgcccacaaatgggaatcctcactgtatccactaggagattagaaattaaggtttcttcactacttctatggtagggttgtctgaaattccctttcaggctgtgggtactggtcttgggttctagtcataaggggttccttataaggagcaggcggaggggagtacactttcatgtcatttaattttgatcctgccctctccagctgctccttcaaaagatacatcaaaagatagaaactctgggctgggcacagtggctcacacactttgggaggccaagcgggggt

SEQ ID NO: 48477 - DNA, 360 bp, Homo sapiens
aatatgaccatgtaaatcacaaaactgtcagtgtgggtcagagtcttcgaatttgctatcctgaagatgcttcagtacatcctgaagatttgcttcctgaaaatgaatgctctaggaccctgaaggttgtgactgtgcacctgccaactcaagctgaaggctgaagaggaaagctctgcagccccttcctcaagctggaggcagagtgacgtctgctggggatgcaggctgtgcgccccacagggctccacagagtggcactgaccatgttgagttcactcctgcccaaggtctagcttctgctttgcaggctcaggcatcctgtcttgccagggcctcaaagcttgatgggacagggta

SEQ ID NO: 48478 - DNA, 1050 bp, Homo sapiens
gcgtgagccactgtgcccagccaataataacttataaaacatgaaacgatttagtgagaaaagcggccggttttttggggggaattactttctgtcataaagaagatagatgggttctcatgtcttctacattcagtctgttgtgcagtcacatatcatgtagactctggaaaacacctctgtatactggtgaaagaatgaaaagaagcaaataatgccttagtatgattatgaaaaacgttttgacttcacagtgccctgaatgggtcttgggaatctccagggatccctcaggcacactttgagaaccaatctatataaagtgatggttcacaatgattctgaagccttagtttcagaatcatttggggcagcttttcaaaaatgccattcctgccacctaccacaaagattctgattcactgtatctgtgatgggtctcagatctctgcatttttaatctcacgtgattcttaagtatgtggtggaagtacctttcttcaggaaattctgtcctaagcttttaccctgagaaaataaaacctgcatgctttcaccatggacggtgggagactccactgaaacacatctgctagaccactaagtttatccttgtcacccagtttgctcttggaaagagtctgttcccttttgtcactgaaccaatcatgacataaacttgtgctttacctcctatagcacagccgagacaaggctggaacatttaattaaggtttttactaaggactcaggaataacaacagggaaatatctatgtaactagatgacctgacataaaatctatcttctgattgcagtctattgtgagaatgctgcttttcctagctcccagccttccatggggcagaaggctcttttaattaggaagagagggaggacaaaggagagccttttcttttgtccattactcttagaaatgaacaggtacataatagaaaataaataattattgttggtaatgtttacacagcagtgttagagcctctctgtagtgaaacaaaaataatgttcttacaaaaaaaaaaaaaa

SEQ ID NO: 48479 - DNA, 1438 bp, Homo sapiens
aagcttggcacgagggcggatcccagcggcggtcgtgtagctgagcaggcctggggcttggttctatgtccctgtggctatgtttcctgtgtcctctgggtgtttccaagagcaacaagaaacgaataaatctctgacccttctcaggtgcagccagagagacactagcccactgatggatggacagacgtgggcagggtccgtgtcactaaaccacccaccactgccacagctgcctacaacagacacatcagatgacactccgggcaaataaatgattttcactgaggacttactggttttaataataggtcctggtgtagagaagtccctcaacctattgtgcaatgagttttgagaagcgggtaagctgtatgttttgtggttctgtttcataaatgcatctacaggaagaccaatattgactgaatgaagctttcatttaaagagctaaaatatgctttgtgtttttatatgtggatactactttaaacctaacgactattcattgtatcatagcttgtgatgtattctgctcatggcttttaaggtaaattgtgccatgatccactgccattctaattgctttaacaagtcattaccacactactgttacatcttaattatgcatacagacaggtagacttgttttacatatgtgaactaactagttgtcaaagcaaatgcagattgtattctgcaagtaaagtctttttctctctgaaatttctagggatgttctttaagtgaaattcatattaaaactgaagattttagttacaagaactgagtgcagattaaagtcttttgtgattcaaacatagtcaagagtacaactgtgatatttcatggaagttatgcaataaaatgtctctaacctgcgaacaaatctgtcaagcagacggcacagtactgaatttgaaaccaggaatactgggtttttatataaatgcttcatagatttgttttatgataaagggcacataactctcctaaacctcacaccacctcttgaataggtataataagtccacatcaatgctgatgcccttagctattattaaactcttacagtatgatgtaaagtgaaagtacaatgtaagatcattcctaggccaactttgaccagttttatacagaaacatgtgccaacttttctgtttgcaaggataatatcaaagcaaacaccagaaagttatatctttgatgcatttttttcaaaatcatacacataatacacaaaccaaagacaaatgatgaatattatgtcagaaaatataaagtcttcccctttcttcttttgccaagaaagtccaatattttcaccatttttatgcacacaatcaactttatttaagctggaagttaatgtctcattgttttcattgttctaaataaacaccttttcccttgagtattgttctaaaaaaaaaaaaaa

SEQ ID NO: 48480 - DNA, 312 bp, Homo sapiens
cgtcaagcggcgaggcggagcttgcagtgagccgagatcgtgccgctgcactccagcctgggcaacagagcgggactccatctcaaaaagaaaaaaaaagtagagatgggatctctagcctcctaagttaatttagcctcccaaatgccagacaaagaatctaacataaaatttaccttgaataagatatatgatattgattctgagctgctttgtattttttctgactttggcatctgtatcttggtgctttctgttagactggtagagtttaagaacctaaggagtatgcattgtacttcagtgctaact

SEQ ID NO: 48481 - DNA, 976 bp, Homo sapiens
gcagggtagtgggagacgaaggcagaagcaagagtcaaactcagaatgactgagttgaattcactgtctagtcagcaatgcctgcttctgagtttggcccagagagaaggtattgagtaagattttaataactgtaaaaagtaagctggataagtaaaatcatgatggatccaaagcacagtttcttcatctcctgataaagaaagtcaaatgcttgataaattcagagtcacagatgtgagcatagctatattcttttaaacgagaggtagagtgacctagcactaagcaaatgagctgaaatgtcggaaacagagtccatcagcttatttggccacacgatcccaaactagttttatcttgggaaatggccctgtcctcagcattcccttcttgtgctggtggggccagtgaagtcttgatcttatcaggaaaaaggccacaccaagtgcgagttttcccaggctgactttccaggcccttatcaaatgaaacaacagaagctcttcacagttctgtgccccatggccactccacagacagacaataccaagcatcttagaactgtcataagataggtcatgcctgaaatagatcttgaccatatgagagtcccagaaatcagcaaggcctggacaaatagaactaagagagaggcagaggcaggaagctgcgggtctatcttgtaaagagtttagcatcactgtgagagtgtgtgtctaaaattaaattaaactagaagcagcaggtgagtatttggtaagtacttctgtgactcgcctcaattcccactggccagggcatcttcaactgcacggtgaatcaagatgctggtgtcatcctccttggaaaaaggaaatgttaactcatggttaaaactaagtacaatgattcccaagggatcactttcttatttttttaaatgacattaaggagaatcttaagaaagcatcagagaaagacatgtgcatgtgaa

SEQ ID NO: 48482 - DNA, 657 bp, Homo sapiens
attgatactcacccttctccatcacattcctccacagtaaaggacagtctcatcgaactcaaggaatcttcagcaaagctctacattaatcatactcctccaccactgtccaagagtaaggagagagaaatggacaagaaagatttggacaagtcaagggaaagatccagagaaagagagaaaaaagatgaaaaggacaggaaagagcggaaaagggatcactcaaacaacgaccgtgaagtgccaccggacttaaccaagagacgtaaagaggagaatggaacaatgggggtttcaaaacataaaagtgaaagtccttgtgaatctccttatccaaatgagaaagacaaggaaaaaaataagtcaaaatcttcaggcaaagaaaaaggcagtgattcatttaaatctgagaagatggataaaatctcctccggtggcaaaaaggagtccaggcatgataaagaaaagatagaaaagaaagagaaacgggacagttcaggaggaaaggaagagaagaaacagtcctcggacaagcacagataatgaagactttccatcaaggtaatgcacttaatgctttatgtgagatttaaaaagtattttacccatcttaaataaattgtgtttccatcatagtggatacagtgttcagaccct

SEQ ID NO: 48483 - DNA, 425 bp, Homo sapiens
  misc_feature (1)...(425): n = a,t,c or g
ggnnaccagctatgacatgattacgaatttaatacgactcactatagggaatttggccctcgaggccaagaattcggcacgagctacagggggctggaaacagttcagtctttgattggttgctgagaggcggggctactcgactgctctggaggtagcggccgcggttttacagctctttaaaacactgcacaggaccagacaacaagtttttaaaaatgatgccagagcattagaagcagccagaataaagataaatgaagaattcaaaaataataaaagtgaaacttcttctaagaaaatagaagagctaatgaaaataggttctgatgttgaattattactcagaacatctgttatacaaggtattcacacagaccacaatacactgaaactggtccctaggaaagaccttcttgtagaaa

SEQ ID NO: 48484 - DNA, 2015 bp, Homo sapiens
gaaggcggtgctctgagaagccggactacgcggacgctcttcaaagcggacgcgggagtttttgctacagttttcgccaccatgagtcgcagctataatgatgagctgcagttcttggagaagatcaataaaaactgctggaggatcaagaagggcttcgtgcccaacatgcaggttgaaggtgttttctatgtgaatgatgctctggagaaattgatgtttgaggaattaaggaatgcctgtcgaggtggtggtgttggtggcttcctgccagccatgaaacagattggcaatgtggcagccctgcctgggaattgttcatcgatctattgggcttcctgatgtccattcaggatatgggtttgctattgggaacatggcagcctttgatatgaatgaccctgaagcagtagtatccccaggtggtgtcgggtttgacatcaactgtggtgtccgcttgctaagaaccaatttagatgaaagtgatgtccagcctgtgaaggagcaacttgcccaagctatgtttgaccacattcctgttggggtggggtcaaaaggtgtcatcccaatgaatgccaaagacttggaggaggccttggagatgggggtggactggtccttaagagaagggtatgcctgggctgaagacaaggagcactgcgaggagtacggaaggatgctgcaggctgaccccaataaagtttctgcaagggcgaagaaaagaggccttcctcagttggggaccctgggagcaggcaaccattatgcagaaatccaggttgtggatgagattttcaatgagtatgctgctaaaaaaatgggcatcgaccataagggacaggtgtgtgtgatgatccacagtggaagcagaggcttgggccaccaagtagccacagatgcgctggtagctatggagaaggccatgaagagagacaagattatagtcaatgatcggcagttggcttgtgctcgaatcgcttccccagagggtcaagactatctgaagggaatggcagctgctgggaactatgcctgggtcaaccgctcttccatgaccttcttaacccgtcaggctttcgccaaggtcttcaacacaacccctgatgacttggacctacatgtgatctatgatgtttctcacaacattgccaaagtggagcagcatgtggtggacggaaaggaacggacactgttagtacacaggaagggatccacccgcgctttccctcctcaccatcccctcattgctgttgattaccaactcactggacagccagtgctcattggtggcaccatgggaacctgtagttatgttcttactggcactgaacagggcatgactgagacctttggaacaacctgtcatggagcgggccgtgcattgtcccgagcaaaatctcgacgtaatttagatttccaggatgtcttagacaaattggcagatatgggaattgcgatccgtgttgcctcacccaaactggttatggaagaggctcctgagtcctataagaatgtgacagatgtggtaaatacctgccatgatgctggaatcagcaagaaagccattaaactgagaccaattgctgtgatcaaaggatagaaccttggacagcagggctgcctgacaccaccaaccctctctgaagtggaagtggactgacatgctcttctgacatcagactcaaggcgggacaagttgcaaagtgtgccagctgtaactgctcacgccaaaatggctgatggggaggctgctgctttcaggggcccgtgcttgtaaaataaccttccaggaagaggcacattgcccacctttggaaagggaggaatatgccttctccttggttgttccacagagttttaggaaaatctgttagggatgggtagatgtcaaactgccttacgcagtcatactgatctttagccatcagattgatcttcttcacaccaagctctgtttacattccgagaggtgtcatgaagaaagttctgttcaataaggttttggaatgtttcca

SEQ ID NO: 48485 - DNA, 352 bp, Homo sapiens; identical to SEQ ID NO: 6917

SEQ ID NO: 48486 - DNA, 1726 bp, Homo sapiens
aggaccttgtctgaacataatgatttcaaaatttgagcttaaaaatgacactctgaaatccagtcagtgtgcctcactagacttttcgatttcaagattttctgcagaaaatgttttgaaaactttgaatacttaaaaatggcaggtgtagtattgcactttgctagttgctcagatacccttttttatttgtatagatattctgagttcctttttttttctacatgttgtacgttgtcgaaagctaaaaggaaacttatccttggatcacggaaggcagaggcatttggtgagatggaaacaaggatgtgtaaaaatgagacgaccacctctcggattaaaaaaaaaaagtgccagagttctagggttctaagtgatgtccaggaaggaggaggaataatatttatggagcatatattatggaacacagcaatcaggatgagtgaaaaattgatttgcagctgacctgcaaatggaatcatcaggaacatccctttctcatggagtcccttaatttacaagttaactgcaaacataggagatgatagttccaagaaggaacattttatcgtctttgtttttaatctcaagaatggtacctaccatcagtgaatgacctgttgcagtgctttcattgaagtgttcttcgttccctcagcaatatgatttgtctctcaggtgatgactgaaaaagggaaactgtgccactatttgtaccatcattttcaccaaaatctaaaaatgctttttatgacgtatggagacattcttcatgtttgtttcagtggacactccttgcagatgtaaaaaactgagaaaactcacttttggaaagtgacctaaagagtgtcattgaagtgaattttaagtaggcacgatgattgttttcatggttgctgttggatcatatctcaggagctggaatgacagacattattgaacaaagaaatcaggatagtggaacttaaagggcttcatctcagtgctttcataagtatgaagtgcatatatttataattttcagtaatcacagggtaaatataaaattgattcattaaaaatgtttcataagaattcaaaggacatagaattttgtgaaatgtagtatttttacttaagtgccttttctctgcttctaccccacagccaattttttataaaccagttgataacataagtagtttttgggggatgatacattacttatacattttctatgtagtaaacatgtatgtgtatgtgtgtgggtgtgtgtctaattactttgttggacagattcctgtggtttggaactgctggggccaagtttatacaaaaatctacatttttgagtaaactccccatgactctagtaagtttccacagtatttgagtattctttatttcctaaagctgtacaaacatcagataatcaatatttgtaaggatcgataatataatttataatgaaattgctttatcagctattaatgttaactacatcatcttcatatagccttataactcatttgtgctattccattttcctctgttccttttattttcacttcccttgtaatgttagtctctttgtactgatttctgaagagttcatttatgattaaacatgttaacattttgtctagaattgcaaatatgtttttcctcattcattttactatggtgttttatttttgggttatacagaagttgtatattgaaatataatcttgttctgttttatgac

SEQ ID NO: 48487 - DNA, 541 bp, Homo sapiens
tcctgggtggggctctgggccaggtcctctgggtagctgtgaagtggtgaaagaaggggtgggaacgctggacttctggactttgggcagggcagatcctctgactctctggctgcagaacagtttcttccgtgctctggcctgagtgccacagccagggcctctgctctgtacacagaccgggcaaggtcccccaggccaggatgtcaggcctggtgttggggcagcgggatgagcctgcaggccaccggctcagccaagaggagatcctggggagcacacggctggtcagccaagggctagaggccctacgcagtgaacaccaggccgtgctgcaaagcctgtcccagaccattgagtgtctgcagcagggaggccatgaggaagggctggtgcatgagaaggcccggcagcttcgccgttctatggaaaacattgagctcgggctgagtgaggcccaggtgatgctggctctagccagccacctgagcacagtggaagtcggagaaacagaagctgcgggctcaggtgcggcggctat

SEQ ID NO: 48488 - DNA, 1177 bp, Homo sapiens
aggaatgtggggtgtgcatgcagatgtctggtactggagtaagctgaaggtatgtgcagtatttaagaaaatgtacattctaattaattcacttataaaaccatttacatattgtgtatatgtttttattttcaaatgataaactctagacatatattttgcaaaatgagcttgggtttaaaaagtgctttgtgccaaaaatatcatacctaatttttatagtgctttactatcagaatttatattgtttattatatcttttaaaagcagtaagcagttttcatctgacagcgtaggataaaagaggagtatagggaatttgaatgctagagcatctcccagggtgagccttattgcagatctttttgatataggtcaccccataagcatgggtgagctccctgctcctcataagggtcagcccaaagcccccttaagaagggtacacagcacatctgcagtccattccaggaggtcctgtgaagtgtggtgatgcatctaacaccttttgctgctcactgagaacccagctttgaacttacaagattacactaaccatttttaaagtgcacaaaaatattattattagtcttaactaaaattacatattttataatgccctgcaactctaaaccatccttttgtttacacatttttgtatggtattttaagattatcaatcacttcaacatttctataaccttgtttgtatagcactttctcaagagctgtcagtcccacatacagaatcatttcttttacaaaatgatttaatatgtaatcatgtgtcaggacataaattttgtcacttgggacagtagctttccagctaagataattgcgtgaactctgttaaaactgattatcactcatcaatggctttatttttaacctataaataacccctttcaatatacctggtttttacagcattgcaaaatctgtaaaaataacttttattggaaaatgtcatgaagtcatttttcattatttgtactaaacaatgttttatgtactccttttgtgttttatcttttgtttttccatctgtactcccctcatcctcctaatgttgagaaaatcaaatttcctgggtgtgtccttgttaagtgatcaaaagtaaatgttctctttgccattttagatggaaaaataaaaaaaattaaaaagtaaaaaa

SEQ ID NO: 48489 - DNA, 459 bp, Homo sapiens
cttcccaacctaacgaaaactcacaaggattacttgggaccattcatcctcaaaaaagataggaggcagtggtttgttttagtcttcagatatttttgttttggtcagtccctaatctgtagttttgaaactcgtgccacacttgaaagggaaacatcctactacctttctttcctctccatttcccacaaaccctttccttcatcatcactccctgcattcttacttctcagcatataaatacaagacccttctttctattatttgttgaaagctaggcctgtaaaatagagatggacagaccatgcatgtttccatgaagctatttaatgctgctcccagtcttctgtccataccattccttccctgcccctaggagtggggttgaggtctgtgacatgcagactgtaagcacagtcagaacctctgcagctctcaacccaacagaggagactgtgg

SEQ ID NO: 48490 - DNA, 1931 bp, Homo sapiens
tttttttttttttttttactttattgcaatgtctttattgcattactggagcaagttggccagactgtcccctcttggggaaggtattaaacaaaaagaccaataagtatctcctctcgcctttccccctaccctccccaacaattgcacagcaatgtctgaacacatctggtgacaagaacaatttgtaaagtggtctagcaactacattatgaactgtcccatcacaagacatacagttggctttcttgtgagtcagatatttttacgtaaactacacgaattttcttggacacatcaaagacaacagaatagatttttcacaagtaacggcaccaaagtcacatgctggaatttgtaaggaaacgaggttgtttgccacaagtggctggagctaaagcaggtttgagcagttggcagcagagggcccaagcaggccccctatctggaccctctggtttctgaggccactgaagcctcacagaggcctactctgggttgttaaatagcagcagagaccaccttagaaaacaggaattgcccaggtgcaattctcagtttaagagaacacatggggctgattacttgtagcaaaaaagagacccgtggaagacacattggctctcaaagcttcttcaaagcacatgaggcctaaataagtggaggtcccatcaaggcttggagagggagtgaaagtgttgggagggcctcattcttggccagatcagtggtaaggacgcaggcagtctatccaggcccgaatcatggcgtgccatctaaggccaggtggagacaacactgttctgtgatgaaagcttcacctggaaacaatgggcctagtacctgtgtccagccagccccaagctgcttgcatgtcagtagctgggttctctagccaggggtataatgaacccctctgatcttggtctctctttgccctctgcctcattgaaactgcagttaagatgccaagacagtcccagggtccagatcatgggacaggacatggcactagactctcatgaaggaggccaagacctgctcccaagtcatgggcgtagcagaagcaccttgctaccctctccccctctacacacccaggcccagtgggtagtagactggtccctatgccatttccacaggctcagggtcaagcaagtcatgtggcaactggtcagaaaagatactgtcaaacctctcaaatgacccctgggtcttagatcccacaaaacaatgaattcaagaatgaaaaaaaaaatgaaggaatgtaggactgaaaaaaagcagcccttctcccacaagccagcccaagtgtagataaagatggtacttggtctctccctgcacaccgctggtgtctgcccaacaaggagcagacacattactgaatactacagccctgtatctgtatttccattttggtttaaaagacactcagaacacactgaaattttagtaccagatgggagggattccttgcacgtaatcttgagcatccacctgcttcagcaggttcaacaccaggtgcaaagcccatccaggtgtgcccaacagcaattagcttggtattattcagtaaaactttcagttaagatttcaattgacagtttggggaagggatgtgctggctattagttaaatgactttagaggggggttcatttgtctctgtctcacccaatcctgaaactgcagtgtaaccaagaaaaagccaaagagaagcacttccctttctatcctcgtcactagtaactggaggtttttccaaaattaaaaatctgtgtctacatcatggtccatattttagaccctgtcatggaaataagtgctcaggtaaactaatatttttctttcacccccagaactagagctttcctagctgtaagccttataaaccaagatgcaggtactggcttctctagctcagccagg

SEQ ID NO: 48491 - DNA, 3567 bp, Homo sapiens
  misc_feature (1)...(3567): n = a,t,c or g
tttttttttttttccagtttgtcagaaagaaacatttaatagggacttatgcacagaagccatgtctcaggcagtgatccccacagttaccccccgacccagggcttatatgccatagagaaaagggggtacatgaaggaacatgtgagacactgaagtcacctcctcagggaaaggcaagaatgctgtttacaacttagcctataacttgcttaaggccaggatttacagtgtgtgtgtgtgtgtgtgtgttcttttaatagataaaagtagaaatcttagagggcattccaggaactgggttatcagaagtcaacatggtagattaggcatcccaaggatgggaagttactttagcctcatactgtgcctgtgaatttctttgagggaggggttggggtggccccacacctccttccaggttgtacataccccaagtgcctaggcagttcctgtagctggtgagaaaccccaggggcaggaagtgagacatccccagagcaagaggcaaggttcagccctgcttgaaactggttgccacagcagtgactttagtatgaaggccaagaggattggaagtgacacacaggaggtctcaaacactgctcttataaatggcctgtgtgtcctaatgccatcagaagtgataaagttggtactaggatgtgnnnnnnnnnnnnnnnnnnnnnnnnnnnnnnnnnnnnnnnnnnnnnnnnnnnnnnnnnnnnnnnnnnnnnnnnnnnnnnnnnnnnnnnnnnnnnnnnnnnnnnnnntttaaaaaattagccagggcatggtggtgcctatagtgtcagctactcaggcggctgaggtgggagaatagcttgagcccaggaggtggagggtgcagtgaactgagatcataccactgtgctccagcctgggcaacagcacaagactctgtctcaaaaaataataataataataattcactacgatgaccctgacaatagtttctaatctcatttactaggtaagttacagtttggtatactttagattgcatttttttaaatgttaaatatttggatttatttggaaaaagtaactgatacagaatactgaattccttataaacatacaaattgtcattttgtggacacatgtgaagcttttttgccattttcccagaatagtaaagggcagaagatgggaaaatgagaggagatgaagatactccaaaagaacatgaatgaatttggaaacaaatgctagactggcagcccagtccatgctatattgtccttaactcactgaaccaccctggtttttccaatgaaagataagctccaaagtttatttcagctataaaagtttcattcttgaaaaaattccacttcaaatccagaaacctaagcctgaggaaactgactagctcagtgaagccacaagtaggagaagcaagactgaaccttaaatctcctaattcccaggggagtttttttctgaatcagctaaatgaagtattaaaagaggctacttaggggactgggtgcatgaatatagacaactctcagcaaataagccctatggtccacaaagctatacaccagttctcttactaatttaccttctatttcccaataggtaaaggatattcattgaacacaaggacacttagaagttaatggccatttctagacttgtctagaatgaaatctccttggtattgtctgtattttaaggcactaaatggatactaccacttggtagaaagccaaaaggaatatgaaaactgactacagattaagaattaaaccagtttacttaaggcttcaggagagaagctaaagtagtgtttatataactggatttgggggccacctggatcaaaatcacttgggctccatgttaaaaatgcaggtttctggcccctgtttatcagtctctgggaaagggctaatctgcatcttttagcaacccaccaggtgattctcaaaaagtctaagtttgagaaccactggtagagataactgagaaaatggagaaggcagacagggaaagaacaaagccaaataaagaatggaagggaaataacttctgttatgatagggtggctgaggaaaagaaggatgcggtacatactaaggtactactttctttttctttaaatctctatgtaacaaaagttaagggcactagagaagcttaataacctaattctagtaaagttagaacattggaaagatacctacctcaaacttcacatcattatttgaaaatactcaagatgtactcccctcagagcaacagtacgagcaacatcccctatcagatgacagcatcaacaccaaattataaatgttctagcctcattcctgggtctactttgtatctcctaacctcattttttcattttactttctcatctacctgttatcctattatatttcatatgtaaccataaaccaccttattgcctttttgtaaaaaggtttatttggaatcaatcactggtacccaaataaataaaattaaaacgttttggagaactccaaactcactttaatatgagataagccaagcaaatgaagagaaataatggttgtaaccagtccctggtaatacaagcagtggcaaaccttgttgatcaattccaacatataaacaagaaaacataaatgtcaggagctacaaactttagtattcagaggcggacctatgtataatggagccaataagaccaaattgacctttcaggtgtttccttgctatctcccacccccgctcctcatttacctcaagacacaatggtttttgcaaacgattattaaattgcctagtaagtcataaaattattcagtttttcagagacttactagcctcactcaaggaattacatctgcttctcaagggtaggctgtggcagatttttcatattaacacctgacatgtagttgaagccaaaaaagaaatacttgttgatgaaatgacacaatgctactttaaatgtagactgaactgaaatgaactcctgtgcaatgctgcactaaagcagctcctctgtgagtccaggtggtacttccagatcttagcagttctacttagaacactgaactagccttgttaatcacttaaaagtctcacatatgaacgaacatctaaactcccattaaagcaaaaatatcatcaatgtcatctgtctccttaatggttcctgatgtactgtttttatttatttgcatcaccgtccacgaatcagtttcattttcatggatgcctctaagattttcatgaatcattttctccttagtttgtatgacaggcattgaaactccactattcaagagctgcttactgttagggtagagatcagttctatgcacagtacagtgtgagagtctccacttagcactggtatctgtagcactcttccgagtcccttgagagaactgctgaatttcccttaaaagagtcgactgcaactttctctgtggtttcctttgtctccgtaaaaatttattctgtgatcttctctgtctcagatgatgctttgaagttttgatacctgagccacgaagaaggtggttgcaaatagacgttttt

SEQ ID NO: 48492 - DNA, 460 bp, Homo sapiens
  misc_feature (1)...(460): n = a,t,c or g
ataagatagtcgttggttcatcagttgcccctggcaacactgccccatccccatcctctcccacctctcctacttctgatgccacgacctctctggagatgaacaatcctcatgccatcccacgccggcatgctccaattgaacagcttgctcgccaaggctctttccgaggttttcctgctcttagccagaagatgtcaccctttaaacgccaactatccctacgcatcaatgagttgccttccactatgcagaggaagactgatttccccattaaaaatgcagtgccagaagtagaaggggaggcagagagcatcagctccctgtgctcacagatcaccaatgccttcagcacacctgagggaccccttctcatctgctccgatgaccaaaccagtgacagtggtggcaccacaatctcctaccttccaaggttggtgccctttgacctgctnagctg

SEQ ID NO: 48493 - DNA, 490 bp, Homo sapiens; identical to SEQ ID NO: 6972

SEQ ID NO: 48494 - DNA, 546 bp, Homo sapiens
ccgggaggtgacgaccggcttcggagagtctatcatggcagctcggactggtcatacggccttgagaagggtagtctcgggatgccgtccgaagtcggcgacagcggccggggcgcaggcgcccgtgcggaatggcagatatttagcttcctgtggtatactgatgagcagaactcttccactacatacctcaattttgcctaaggagatatgtgcacgaactttcttcaaaatcactgcaccattaataaacaaaaggaaagaatattcagagagaagaattttaggatattcaatgcaggaaatgtatgatgtagtatcgggagtggaggattacaagcattttgttccttggtgcaaaaaatcagatgttatatcaaagagatctggatattgtaaaacaagattagaaattggatttccacctgtgttggagcgatatacatcagtagtaaccttggtgaaacctcatttagtaaaggcatcttgtactgatgggagacttttcaatcatttggagactatttggcgttttagccaggtctt

SEQ ID NO: 48495 - DNA, 673 bp, Homo sapiens
gcacgaggcgcgcgaccggacgtgcactcttccagtagcggctgcacgtcgtgcaatggcccgctatgaggaggtgagcgtgtccggcttcgaggagttccaccgggccgtggaacagcacaatggcaagaccattttcgcctactttacgggttctaaggacgccggggggaaaagctggtgccccgactgcgtgcaggctgaaccagtcgtacgagaggggctgaagcacattagtgaaggatgtgtgttcatctactgccaagtaggagaaaagccttattggaaagatccaaataatgacttcagaaaaaacttgaaagtaacagcagtgcctacactacttaagtatggaacacctcaaaaactggtagaatctgagtgtcttcaggccaacctggtggaaatgttgttctctgaagattaagattttaggatggcaatcatgtcttgatgtcctgatttgttctagtatcaataaactgtatacttgctttgaattcatgttagcaataaatgatgttaaaaaaactggcatgtgtctaaacaatagagtgctattaaaatgcccatgaacctttagtttgcctgtaatacatggatatttttaagatataaagaagtcttcagaaatagcagtaaaggctcaaaggaacgtattcttgaaggtgac

SEQ ID NO: 48496 - DNA, 1472 bp, Homo sapiens
tatgacatgattacgaatttaatacgactcactatagggaatttggccctcgaggccaagaattcggcacgagaggagacactgcccagggacagccccgacctcctgctgctgctccggctgctggcgctgggccagggagcctgggacatgatcgacagccaggtcttcaaggagcccaagatggaggtagagctcatcaccaggttcctcccgatgctcatgtccttcctggtggatgactacactttcaatgtggatcagaaacttccggctgaggagaaagccccagtctcatatccaaacacacttcccgaaagcttcactaagtttctgcaggagcagcgcatggcctgcgaggtggggctgtactacgtcctgcacatcaccaagcagaggaacaagaacgcgctcctccgcctgctgcccgggctggtggagacctttggcgacttggcctttggcgacatcttcctccacctgctcacgggcaaccttgcgctgctggccgacgaatttgcccttgaggacttctgcagcagcctcttcgatggcttcttcctcaccgcctctccaaggaaggagaacgtgcaccggcacgcgctgcggctcctcattcacctgcaccccagggtggccccatctaagctggaggcgttgcagaaggccctggagcctacaggccagagcggagaggcagtgaaggagctttactcccagctcggcgagaagctggaacaagctggatcaccggaagcccagcccggcacaggctgcggagacgccggccctggagctgcccctccccagcgtgcccgcccctgccccgctctgagggccctccagacctgctcgggtgctggggccatgccgagtcgcggccctgctcagccggaagaggctcccggacctggatgtacagggcagtctctcttcccggggctatggctgggcctgtcctgccgtcatggccccctgcttcctgctccttggagctggctcccggaccttgcccaccatccatgcagtggctcccagggcagagcctctccttgtactttggcagccatagaaagcgtgctcattttctgttttcctgtgttaggaaaaaaccacctgttttccaaggggagagggcggggcctgagggtgggggcggggcctcttcattggcccagcttggcgaaagcgaggcacactgcttactgccttggggttgtggagatggacccgtgacctcgtggaggccgtgtgggggcagcagcctggcctgtgccatggtgggtgtcctggggcctgtgcggagggagccacctcaccctgcagcccagtttgcaggtgtggccttgtttctccttgcccagcagtgctgccttcagcggccgtgacggggccagctggacacacggtgagattttctcgtatgtaaataaaaggcattttggtaaaaaaaaaaaaaaaaaaagtcgacg

SEQ ID NO: 48497 - DNA, 321 bp, Homo sapiens
agtgctgggattacaggcatgagccaccacgcctggccaatatccatcattaagggttaagttaaaatagcttataatagtcataggatttagatttgctatttgcaagtaaatctaaaaaatgatgtatcaaatgttacaaatattcaaaagataaaaactaagaaaacagtttatataaactaataattacatacagggcatttcagctctttctgattactcttacctctgaagattttctccccaataacaaatatgtagctgtgatttcatcgtatttcatcttactaagagattcttgaatttcttcttgtgaat

SEQ ID NO: 48498 - DNA, 1742 bp, Homo sapiens
cgggggagtcggaggaggtggcggcgctggagctcctcccggggaccagcgacccgggagcatgcacgtcgtcgcaccggctcttcctccagccgctgagccgtcccttctcgccatgtcccagagcaggcaccgcgccgaggccccgccgctggagcgcgaggacagtgggaccttcagtttggggaagatgataacagctaagccagggaaaacaccgattcaggtattacacgaatacggcatgaagaccaagaacatcccagtttatgaatgtgaaagatctgatgtgcaaatacacgtgcccactttcaccttcagagtaaccgttggtgacataacctgcacaggtgaaggtacaagtaagaagctggcgaaacatagagctgcagaggctgccataaacattttgaaagccaatgcaagtatttgctttgcagttcctgaccccttaatgcctgacccttccaagcaaccaaagaaccagcttaatcctattggttcattacaggaattggctattcatcatggctggagacttcctgaatataccctttcccaggagggaggacctgctcataagagagaatatactacaatttgcaggctagagtcatttatggaaactggaaagggggcatcaaaaaagcaagccaaaaggaatgctgctgagaaatttcttgccaaatttagtaatatttctccagagaaccacatttctttaacaaatgtagtaggacattctttaggatgtacttggcattccttgaggaattctcctggtgaaaagatcaacttactgaaaagaagcctccttagtattccaaatacagattacatccagctgcttagtgaaattgccaaggaacaaggttttaatataacatatttggatatagatgaactgaggcgccaatgggacaatatccaatgtcttgctgaactgtccaccagccccatcacagtctgtcatggctccggtatctcctgtggcaatgcacaaagtgatgcagctcacaatgctttgcagtatttaaagataatagcagaaagaaagtaaatctggagcaacttaaaaaatctttcagtagcacataaaaagttcccctctggccccttcccaagtaaaacttttaccgtagtgtttatgtcttgtttctaaatctcttcatagattccatcaacactccagatttaattatctcctcatagttgttattaagctctttttaatggcttcaactttgtatcagtatactgtatttataaactttgtaccacaagagagagtgtagcacccattttacagtgccatgcacatcagagaaagaaactgcatgtttgttgttgatgatgaaataaaaatgctagcgacagtctttcttactggtgcttaagctcttctttgcacaaagctttataaagggaattcaaaggaagccctttagaattagagtcttgagggacagcactaacaggcctttattaagtatgattgattgttaaatttcagggaacatgattggtctgctgtgtatttgaattcatgtaacaaagaactgttacgatgggattctgctcattttattaaaaagctactgacttgactgtcatcctgttcttgttagccattgtgaataagattttaatgttgataattctgttatttacatatctctaatttactttgaaattcaaaggtgaaaataaaaaatgatggcctaagtaaaatttacaaacat

SEQ ID NO: 48499 - DNA, 482 bp, Homo sapiens
gcagacattcaaaaggagaatttgataagcagaattaaatgtctgttattcataaatgttagaaattggtttaaaaataataacatgcaactgggtgggcacagctttggatttctcatccacgtctgttcccttctttaaatatgattagaattttcgtaagccaaaactaaaggtcttcaaacatatcttgcaatacatagctttgcatcttccacacaacttccacgtcttcttttattctgtattttacaaaaaactcatataatggttttttcttttgaatgtatcagaatatgtatgaaatttgtcatatcagaatctataaattggcactgtgtctgggattctgtttgtggtttgcattttgaagttcaatgtatcatttgacacacatgcacacaaagtgaactattcaccaaaatcatgccaacagaaataccaacaaaaaacttgtgtagcttgtaaggaggttatttgct

SEQ ID NO: 48500 - DNA, 1968 bp, Homo sapiens
  misc_feature (1)...(1968): n = a,t,c or g
attttattctgagggtgatttgtgatcaagtttaatcacaaatctcttaatatttataaactacctgatgccaggagcttagggctttgcattgtgtctaatacattgatcccagtgttacgggattctcttgattcctggcaccaaaatcagattgttttcacagttatgattcccagtgggagaaaaatgcctcaatatatttgtaaccttaagaagagtatttttttgttaatactaagatgttcaaacttagacatgattaggtcatacattctcaggggttcaaatttccttctaccattcaaatgttttatcaacagcaaacttcagccgtttcactttttgttggagaaaaatagtagattttaatttgactcacagtttgaagcattctgtgatcccctggttactgagttaaaaaataaaaaagtacgagttagacatatgaaatggttatgaacgcttttgtgctgctgatttttaatgctgtaaagttttcctgtgtttagcttgttgaaatgttttgcatctgtcaattaaggaaaaaaaaaatcactctatgttgccccactttagagccctgtgtgccaccctgtgttcctgtgattgcaatgtgagaccgaatgtaatatggaaaacctaccagtggggtgtggttgtgccctgagcacgtgtgtaaaggactggggaggcgtgtcttgaaaaagcaactgcagaaattccttatgatgattgtgtgcaagttagttaacatgaaccttcatttgtaaattttttaaaatttcttttataatatgctttccgcagtcctaactatgctgcgttttataatagctttttcccttctgttctgttcatgtagcacagataaggcattgcacttggtaccatgctttacctcatttcaagaaaatatgcttaacagagaggaaaaaaatgtggtttgggccttgctgctgttttgatttatggaatttgaaaaagataattataatgcctgcaatgtgtcatatactcgcacaacttaaataggtcatttttgtctgtggcatttttactgtttgtgaaagtatgaaacagatttgttaactgaactcttaattatgtttttaaaatgtttgttatatttcttttcttttttcttttatattacgtgaagtgatgaaatttagaatgacctctaacactcctgtaattgtcttttaaaatactgatatttttatttgttaataatactttgccctcagaaagattctgataccctgccttgacaacatgaaacttgaggctgctttggttcatgaatccaggtgttcccccgggcagtcggcttcttcagtcgctccctggaggcaggtgggcactgcagaggatcactggaatccagatcgagcgcagttcatgcacaaggccccgttgatttaaaatattggatcttgctctgttagggtgtctaatccctttacacaagattgaagccaccaaactgagaccttgatacctttttttaactgcatctgaaattatgttaagagtctttaacccatttgcattatctgcagaagagaaactcatgtcatgtttattacctatatggttgttttaattacatttgaataattatatttttccaaccactgattacttttcagggaatttaattatttcccaggataaatttctttatttttatattgtaccatggaaaagttttaaaggtatgtttaagaccaagactattaaaatgatttttaaagttgttggagacgccaatagcaatatctaggaaatttgcattgagaccattgtattttccactagcagtggaaaatgatttttcacaactaacttgtaaatatattttaatcattacttctttttttctagtccatttttattttggacatcaaccacagacaatttaaattttatangatgcactaagaattcactgcangcagcagg

SEQ ID NO: 48501 - DNA, 1388 bp, Homo sapiens
gaacagacagtagtagatgtcactgagcagttaggcgattgcaaattagatagtcaggagaaagatgctacatgtgaacttcctttacagaaagtaaatactcagagttcttcaaatagcactttgcctggaagattaaaagcgtcagaaaattctgaaagtgaatacagtaggtcagaaataactctagtaggcataagtaagaaaagtgcagagcattttaagagaaaatttgccaaatcaaaccaagtgtctaggtcagtgtctagttcagtgcaggtgtgtcctgaagttggaaagagaaacttacttaaagttttgaaggagactttgattgagtgggaagacaggaggaaacctttgaggtttttgtatggccagaattatgcttctgtgtgtctgaaacccgaagcctctctggttaaagaagaacttgatgaagatgacataatctcagatccagatagtcatttccctgcctggagggaatctcagaacagcttggatgagtctttaccttttaggggctcaggtacagccattaaaccactgccaagttacgagaatttgaaaaaagaaactgaaaagttaaatctgaggatcagggagttttacagaggacggtatgttttgggtgaagaaaccaccaaatcacaagactcagaagagcatgattccacctttccactgatagactcaagttcccagaaccagattagaaaacgcatcgtacttgaaaagttgagtaaagtgttgcctgggcttctggttcctcttcagattacattgggagatatttacacacaacttaaaaatcttgttcgaactttcaggttaacaaatagaaatattatacacaaacctgcggaatggactttaattgctatggtgttgctgtcattactgaccccaattcttggcattcagaaacattctcaggaaggtatggtgtttacacggtttctagacaccctccttgaagaattacatccaaaaaatggaagaccttggaaagtctaaccatcatatttagaaccagctgtttaccagagtgatatattccatgaagacaaaatagaagatgaacttcctattcacccgtttctggaattctagccgccatgatggtctggtggtgactgataactagttttattccaagacatacctttacctctttaagtttcaatctcccatctcccagtccttcagtccccaactgcagaggatgacctccccagatagaggagaatcattactccaacaagaataaccaagtctttgtatccctagtacaagacatagtatttttattcgaaaatgaatgtttaagtattaaattgaaacttgaatgaatattcaagaaaatataatgatccaaaaaaaaa

SEQ ID NO: 48502 - DNA, 447 bp, Homo sapiens
ggcaacagcaatgacatccgcgtggctggcacaggggagggtggcctggaggagatggtggaggagctcaacagcgggaaggtgatgtacgccttctgcagagtgaaggaccccaactctggactgcccaaatttgtcctcatcaactggacaggcgagggcgtgaacgatgtgcggaagggagcctgtgccagccacgtcagcaccatggccagcttcctgaagggggcccatgtgaccatcaacgcaagggccgaggaggatgtggagcctgagtgcatcatggagaaggtggccaaggcttcaggtgccaactacagctttcacaaggagagtggccgcttccaggacgtgggaccccagtgtgtgcctcaactgattctgacttcaggaaaagtaacacagagtggccttggcatgttgtcttcccctattttctgtcccatc

SEQ ID NO: 48503 - DNA, 1707 bp, Homo sapiens
gtaaaaactcgtttagtttgaaaaatcaatgtagaatattaaattcaccaaacacagatagatcagatctacataaaaatatgtcttaatatcttagaattttcctttactccaaaaaaccccatatatacatgtttctcctttataagcttagagattgctttggtggtcaagtgcagggcggctgggggaggtaagaccttcaggaaggccatatcccggacaagacccagaagggaagcccccagagccaagggtaggagggccccacccgggtctcagccactcacttctccagggcggatccgagacactcacaggcctcagggaggggccaggtgctgctcctggtcattgcttcccccacaaggtttgcatgaggagcagagacagtccagtctcctgaacacccacagggcacagagcccagtgcagggggcagacaccaccgcagctcctgggaccaagaggaagctcccagaggggggcccaggaacgctggggtgggtggacagggctgggtaggggttccttctgggccaaacccccagagcagcagagcaccccagtccaaggaagctcttctcagggacccaaggctccagagcccaggaaaaagggaggggcggggcgggagcctgcatccccagtgcccatcagctctgggggaaacctccgtctcccgtccctatggtgaccacagcagcagagggggatcctccatgccccaggcaggctggcatcagggccacacaggggccaggagcaggggtctcggagtccacagctcccggcccccagtggtgggctcagggctcctgggcgcccatgggtctcaccacagcctcgcccagggaaacaggaaccatagggagtccttctccccatctctagccacccacaggcccagcagagcacacagccccaccctcgcacaggcacctgtggtctccaagtaaccaagccccaagcccaggggccactgcagacagcagctgggatctgcagagggatctcagcagcgagcaggcagctggcgaggagaggtgcgtgtgagggagggagtggccctctcctcagtaggaggaagtaagagggtatctaggccaatttattcagctggaaatcaatctgtccagggctggaccaggcgcctccccctcgatacagctcctggctgaagaggtcatcagagcagcagctgtccccaggccagtgtcacgtcactgcgtacagttcctcccgatcgttcttgcagatctgatagtggcaggggaatttctgcgagcaggcccagggctcggcgggctggtcaggtggcggcacagccaaggctggcttcccggccagcaggatgtgccagatgctgtgggtgtagtagtagttgtcgctagtcatcatggaggtgtagatggcgatgcccacagaggccatagagacgccgggcaggaggtagaaggcccagcgctgccacgaggtggggtagcactggcgccggtgcccgcagcggtaagcccacatggaggccatgatcacgaaggcaaagaggcagggccccagcatgttccacatgcccctgcggtccagctgcaaggacatggcgatgaccagtgtacccagaagaaacagcacgtatttcaggactgtcttgagccgtgccatgcacaggatggtgacccagatggccgccccggagcccaagaagtc

SEQ ID NO: 48504 - DNA, 2943 bp, Homo sapiens
tttttttgaaaaaagacatttggaattgtttgaaaaactatttaccttctataatcattttcctaaaaatactacattggaaattgaaaaaacaaaagatatcaaatataatgaatatttattcaaaaagattacaatgtgattttctttttctagtttctcaactcattggatgctaaagaaatatatttggaagtaatacataatcttccagattttgaactactttcggcaaacacactagaggatcgtttggctcatcatcggtggctggtattttttcatttttggaaaaaatgaaaattcaaatgatcctgagctgaaaaaactaaaaactctacttaaaaatgatcatattcaagttggcaggtttgactgttcctctgcaccagacatctgtagtaatctgtatgtttttcagccgtctctagcagtatttaaaggacaaggaaccaaagaatatgaaattcatcatggaaagaagattctatatgatatacttgcctttgccaaagaaagtgtgaattctcatgttaccacgcttggacctcaaaattttcctgccaatgacaaagaaccatggcttgttgatttctttgccccctggtgccaccatgtcgagctttactaccagagttacgaagagcatcaaatcttctttatggtcagcttaagtttggtacactagattgtacagttcatgagggactctgtaacatgtataacattcaggcttatccaacaacagtggtattcaaccagtccaacattcatgagtatgaaggacatcactctgctgaacaaatcttggagttcatagaggatcttatgaatccttcagtggtctcccttacacccaccaccttcaacgaactagttacacaaagaaaacacaacgaagtctggatggttgatttctattctccgtggtgtcatccttgccaagtcttaatgccagaatggaaaagaatggcccggacattaactggactgatcaacgtgggcagtatagattgccaacagtatcattctttttgtgcccaggaaaacgttcaaagataccctgagataagattttttcccccaaaatcaaataaagcttatcagtatcacagttacaatggttggaatagggatgcttattccctgagaatctggggtctaggatttttacctcaagtatccacagatctaacacctcagactttcagtgaaaaagttctacaagggaaaaatcattgggtgattgatttctatgctccttggtgtggaccttgccagaattttgctccagaatttgagctcttggctaggatgattaaaggaaaagtgaaagctggaaaagtagactgtcaggcttatgctcagacatgccagaaagctgggatcagggcctatccaactgttaaattttatttctacgaaagagcaaagagaaattttcaagaagagcagataaataccagagatgcaaaagcaatcgctgccttaataagtgaaaaattggaaactctccgaaatcaaggcaagaggaataaggatgaactttgataatgttgaagatgaagaaaaagtttaaaagaaattctgacagatgacatcagaagacacctatttagaatgttacatttatgatgggaatgaatgaacattatcttagacttgcagttgtactgccagaattatctacagcactggtgtaaaagaagggtctgcaaactttttctgtaaagggccggtttataaatattttagactttgcaggctataatatatggttcacacatgagaacaagaatagagtcatcatgtattctttgttatttgcttttaacaacctttaaaaaatattaaaacgattcttagctcagagccatacaaaagtaggctggattcagtccatggaccatagattgctgtccccctcgacggacttataatgtttcaggtggctggcttgaacatgagtctgctgtgctatctacataaatgtctaagttgtataaagtccactttcccttcacgttttttggctgacctgaaaagaggtaacttagtttttggtcacttgttctcctaaaaatgctatccctaaccatatatttatatttcgttttaaaaacacccatgatgtggcacagtaaacaaaccctgttatgctgtattattatgaggagattcttcattgttttctttccttctcaaaggttgaaaaaatgcttttaatttttcacagccgagaaacagtgcagcagtatatgtgcacacagtaagtacacaaatttgagcaacagtaagtgcacaaattctgtagtttgccgtatcatccaggaaaacctgagggaaaaaaattatagcaattaactgggcattgtagagtatcctaaatatgttatcaagtatttagagttctatattttaaagatatatgtgttcatgtattttctgaaattgctttcatagaaattttcccactgatagttgatttttgaggcatctaatatttacatatttgccttctgaactttgttttgacctgtatcctttatttacattgggtttttctttcatagttttggtttttcactcctgtccagtctatttattattcaaataggaaaaattactttacaggttgttttactgtagcttataatgatactgtagttattccagttactagtttactgtcagagggctgcctttttcagataaatattgacataataactgaagttatttttataagaaaatcaagtatataaatctaggaaagggatcttctagtttctgtgttgtttagactcaaagaatcacaaatttgtcagtaacatgtagttgtttagttataattcagagtgtacagaatggtaaaaattccaatcagtcaaaagaggtcaatgaattaaaaggcttgcaactttttcaaaaaaaaaaaaaaaa

SEQ ID NO: 48505 - DNA, 1156 bp, Homo sapiens
cgctgccgcatcccaggctaagcgcccgcgcgcaaagccgtgcggagattggaggccgcgcgggtccctggtctgggccatgtctggctgtgatgctcgggagggagactgttgttcccggagatgcggcgcgcaggacaaggagcatccaagatacctgatcccagaactttgcaaacagttttaccatttaggctgggtcactgggactggaggaggaattagcttgaagcatggcgatgaaatctacattgctccttcaggagtgcaaaaggaacgaattcagcctgaagacatgtttgtttgtgatataaatgaaaaggacataagtggaccttcgccatcgaagaagctaaaaaaaagccagtgtactcctcttttcatgaatgcttacacaatgagaggagcaggtgcagtgattcatacccactctaaagctgctgtgatggccacccttctctttccaggacgggagtttaaaattacacatcaagagatgataaaaggaataaagaaatgtacttccggagggtattatagatatgatgatatgttagtggtacccattattgagaatacacctgaggagaaagacctcaaagatagaatggctcatgcaatgaatgaatacccagactcctgtgcagtactggtcagacgtcatggagtatatgtgtggggggaaacatgggagaaggccaaaaccatgtgtgagtgttatgactatttatttgatattgccgtatcaatgaagaaagtaggacttgatccttcacagctcccagttggagaaaatggaattgtctaagccaaaagaaagtctaattatatacagagataaagctaaacgtaattattatttaaatgaaagctatttttttaaatgaattgaaatttttcatgatgctactaatttgccactaaatactgcaaatggtcaccctgaatctcttctgacattggatgttatttgcttatattcttataattttaaatgagggcacagtgaaatgaaaattttatactctatgtttctgtttatttttaaatccttaacagcaaaatatttgcctttaatttcttttttatatatactctcagagaattcctcttaatttttaaagatgctggtgataataaaattcattagaaaatt

SEQ ID NO: 48506 - DNA, 1333 bp, Homo sapiens
  misc_feature (1)...(1333): n = a,t,c or g
tcccctgggatcccttaggatccccagagggaggggaaggaaaaatttgccagtgactgaaaaccagtaaaaaaaaaaanaattttatgtatataaaagttgcattacacagtacaaaatagatggataatgtttatcctttatttttctatgtagaagtttttgaatttgtgtgtgtgcttgtgccgtgtctacacctagtattacggctgggactctccagctgtttttgttgttgttatgtttttaagagggttgaattcttccatcaggtgaacgaaaaaggcaacaaagtaataaatcagtgaatgtggccggcagctgtgtttagcccctccagatggaagtttcacttgaatgtaaaataataaagtttatattttgaatttntcttttcatgggggaaaaaaggtacgttaaaaaaatcaaaataatgatatgtcacttgcagctacctttttttttcttttaaattcaatcagccaccttcatgtgcctttttcctttgtctttccccaaaattccaggaccagagatctggccctggcctattttctcttgctgtgtacacacacgcacacatgccgactagcgcctccgtgtccacccacatgacagcaggagcgatggccgggatcctggagcactcggtcatgtacccggtggactcggtgaagacacgaatgcagagtttgagtccagatcccaaagcccagtacacaagtatctacggagccctcaagaaaatcatgcggaccgaaggcttctggaggcccttgcgaggcgtcaacgtcatgatcatggggtgcagggccagcccatgccatgtattttgcctgctatgaaaacatgaaaaggactttaaatgacgttttccaccaccaaggaaacagccacctagccaacggtattttgaaagcgtttgtctgggagttagaaagttctcttcttcaacacgtccctccccagggtgttcctccctgtgacccagccgcctcgacttcggcccgcttgctcacgaataaagaactcagagttggtgtgtgcaatgcacacccagacacacgcacgcacacacacgcgcgcgcacacacatgcttttttctgttcccctccgctttctgaagcctggggagaaatcagtgacagaggtgttttggttttattgttatgtgggttttcttttgtatttttttttgtttgttttgtttttaaacattcaaaagcaattaatgatcagacataggagaaaccctgaatagaaacaaaacttttgaatgctggattcaaaaaaaaaaaaaagttatctggacagcttctttgagactattta

SEQ ID NO: 48507 - DNA, 472 bp, Homo sapiens
ctccttcctggggcagtggagcagccacagccccagttcatctcgcgtttcctggagggccagtcgggtgtgaccatcaagcacgtggcctgtggggacttcttcactgcctgcctgactgacagaggcatcatcatgacattcggcagcggcagcaatgggtgcctaggccatggcagcctcactgacatcagccagcccaccattgtggaggctttgctgggctatgaaatggtgcaggtggcctgtggggcctctcacgtgctggccctgtccactgagcgagaactatttgcctggggccgtggagacagcggcagactggggctaggcaccagggagtcccacagctgcccccagcaggtgcccatgcccccaggacaggaagctcagcgagttgtatgtggtatcgattcctccatgatcctcactgtgcctggccaagccctagcctgtgggagcaacaggttca

SEQ ID NO: 48508 - DNA, 864 bp, Homo sapiens
  misc_feature (1)...(864): n = a,t,c or g
acagctatgacatgattacgaatttaatacgactcactatagggaatttggccctcgaggccaagaattcggcacgagctctttgcaaatgtcattccaaaggtgggatttacaaatataagtcacatgttaacacccaagggtcgagtgtatgctgagctgactgtttctcaccaatctcctggggagcttcttttaattactggctnnnnnnnnnnnnnnnnnnnncttagatggattgaagaagaagcagtcaaaggtggatatgatgttgaaattaaaaacataactgatgagcttggagttcttggagttgctgggccacaggcaagaaaggtccttcagaaactgacctctgaagatcttagtgatgatgttttcaagtttcttcaaaccaagtccttaaaggtttccaacattcctgtcactgctattaggatatcttatactggtgagctgggttgggagctgtatcacagaagagaagattctgtggcgctgtatgacgctatcatgaatgcaggccaggaggagggaatcgacaattttggaacctatgccatgaatgccttacgcctggagaaagccttcagagcctgggggttagagatgaactgtgatacaaatcctttggaagctggactggaatattttgtgaagttaaataagccagcagacttcataggaaagcaagcactgaaacagattaaagccaaggggctgaaacgaagactggtctgcctcaccttggcaacggatgatgttgatccagagggaaatgaaagcatctggtacaatggcaaggtggttggcaacacgacatctggaagctatagctacagcatccagaagagtctggctttc

SEQ ID NO: 48509 - DNA, 1933 bp, Homo sapiens
tacatcgactcattctccattttgctttggttttgtcttgacttgacttgactttgggggtaaagtctttcaccagcacacaagagtttgattgtacaaatatatcttctgcattaacatctctgcctgttgcttaagatcagttgcttttatactcagaatggaaatacctgatcttggctagttttgttataagatattgatttcatttagatttccctccacgaggtcagcaaactatcatgttcttatgtaaacttaggccaaggccagagttatcatagtccctaggttgctacggcttatcatgtgcttggtaaaaggtgatcgcaggttctcagacgagtttactttacatgagatggaatcaggcagagaggctgggatgatggagaaagctcgaggtgaagttttaaaaaaaaagttgtggaaaggaaagttccaaagaggtggtttctgaggaagtcagagcgcccagggccagagcagtcagtaatgggtgaatgaggttgtttggaaagtcggtgtgacagacacatggatgccatctacttctaggttgctggtgggtattaaatatgcacaatattccatagctcactgaggattttaaaattataagcataggattttatattttggggtgaaagaattatctggcacattaggtattggagtttaaaaaaaaagccaaatttcacagtcttaataactttttttaaaaaaaaaactaaaaggcgcttcatgtccagtgtgtggcccttctgaaacttatggtcatctctcccactgaaaccaaggtcttttcaaatgtggctaaatggggatgaggagacacgggtaggactttcttggtgtgtgtgcattctttaaagagccaagttgcttcggggaaacagccagggaaaatggtcaagattatttttaggaggttattttattgggggattttaaggaactaattaacatcttgagttatttttaattcagggggatgtggaaaggtttgcaattgtcaagtgtttttgttgtagcttagtatccataagggaaacttagactatagacataactacaaagccagtgcagcttttgttttctgtatgttgttgggggatcaactttcacacatagcaagcacatggcctccctgatgtcaggatgcctttgttaggatctgtatttgcccttaattttgttgaaatcttttttccttcttcctcttgaaaagttccaaaatatagtttattgtatctttcatcactaaaaatttgttcctttttcactatgggcagttcacacaaggcaaaaactattgaacagttggttttagtgtgttgtataactttgctgtatatcaaactaattttgacaagttttcatcctaagcctcaaatcatgtaattaataatttgcctgtttatttatgacctaattgtgattcttttattaataaaagctaatgggaaaaggatccctgattaagctgatgactagacctacaattaattttcctgcagtatatgaagtattgtaccagagtattaaaagatatgtaatattttattgataaatctatcctttaaaaggaatacgttttaggatgtcatcattttgatgtgaatcatgtaaatgttgataatatgctgtttattatacatttagtgtttcaagagattcacttaattgcctttttgcccacgtatattatgtagtctatttgcaactgttcttaaaaaaatgacattaaaagaatagtttatgtagagaaacattagtggatgttaattgtctccccacctatatttatgggtgttagcgcaactgctttgctagttgcaaagctgtattatcagagtaaaagtgtatttgtaaactgtatgggaactaaaaattaggaataaaaccattttcttatatgaaaaaaaaaaaa

SEQ ID NO: 48510 - DNA, 1232 bp, Homo sapiens
tggcattctgcctcataaattgcaaaacctaatgaaagtgactgcttggtaaacaaattattattatattataaaatgctataaaagagccatattgaaagtgccctgttggagacagggcaaatgccacaaaaatgatgtaaatttacatggaggaaaagtagaatctgcctggtttgtaggcagcagaagacatttttcatcagtgggcaggtgttctttaccttttgtagaaatgggagtcaagtctcaaataggaggctccacaaaatctcatgccaggtctctgataccttattcacagaagttctttgaagtatttattgttattttctttgacttatgggaaaactgggacacaggaagacaggtaaattacccaacctcacacgttaagtcagaactgggagccataattttgtatccctggtataaatagacaatctctcgaagaaatgaagagatgaccatagaaaaacatccgagatatctccagctctaaaatcctttgtttcaatgttgtttggcatatgttatctttggaatttagtgtctgagcctctgtctgttactgtagtatttaaaatgcatgtattataatcatataatcataactgctgttaattcttgattatatacctagggacaatgtgtaatgtaagattactaattgggttctgcccaatctccttttcagattttattaggaaaaaaaaataaacctcctgatcggagacaatgtattaatcagaagtgtaaactgccagttctatatagcatgaaatgaaaagacagctaatttggtccaacaaacatgactgggtctagggcacccaggctgattcagctgatttcctaccagcctttgcctcttccttcaatgtggtttccatgggaatttgcttcagaaaagccaagtatgggctgttcagaggtgcacacctgcattttcttagctcttctagaggggctaagagacttggtacgggccaggaagaatatgtggcagagctcctggaaatgatgcagattaggtggcatttttgtcagctctgtggtttattgttgggactattctttaaaatatccattgttcactacagtgaagatctctgatttaaccgtgtactatccacatgcattacaaacatttcgcagagctgcttagtatataagcgtacaatgtatgtaataaccatctcatatttaattaaatggtatagaagaacaaa

SEQ ID NO: 48511 - DNA, 2385 bp, Homo sapiens
tttttttttatgagcaaatccaaatttattttaatgtcatgtcattttcaatgtgtttaaaaacctcataagttagtgggagccctagtttcctgggacagcatgccagaggtactgaaatttgtcacctttctctacaaacccccagcaatccaatccaagtccatagcttcagaaagccaggagttgtgtcttcagtcagtctacgcctctggttcttggtttttctttcatgggagggagatcacaatatttcaaacagggaacaaaaccagttgagcttccagctcaggtctgtgtaagatggagcgaggaaagaccccactgactccagagaaaaagggtaaggttgagatggattatttctttacagctttggtgaaaatgggaagaaaaaagatttacaaatgaggatccatttcataggatggagaatctcttcataaatgaaggctccaggtcccaaaatggggagggggcctgactggacagcctgaatcagatgaggaatcggccacactgaataaaaacaatctgaaaaataatcctcttaattttgaagccagataaaatatttggggagaatggaaaaaagaggaaaaagccccaaacagatggaaaaaatgctgacatcagagtggtataaaaaaattcggctgagttttcagtggtggtggctaatttagcccctgttctgtagtggggcacaaaccttgaccaagcagagagtagtagaaaaggctagaaagaggggcttgaagacgatgaattttgactcctgattttattattcaatttctttttttcatttaaagtagtcttccgtggttgggaagcctcacctcccaagaccagagtcagttggagctggttgttgttggaagggagtgggttggggaactggggtgggggcagggagatccccccgctctgctggcggtcctaggtggagaagaactgcacttcacagagtctggggtttggtgggaaggggatgaggcaggagcagcaagctggggagatgggacccacctcagtccccagcttcattttcttctaatgtttccccactggtggcattctctgcagtcttggaggccttcttttttttctttttctgggtttttcgacttgcagaactctggaggagggcctttagctctgcatcctggacctccatctcagacttgtagaggtcaggctcgaagggaccactggttatccgcatggggccattgggcatgagcagaactgtaaatttaaactgggcaacaaattcaccctccttctcatagagaacattaaatggttgcagcagttcatgtttggcgcactccaccacacccatccgagccttcttctcatcttcaaatgctcttaaagtaaacggcatggcatcaaaacgcctttccacctcactgaagaaggcacgtgaagttttcattttcagtccatactgtttagaggggtctcgtttgtaaatagtggttctctgtcctgcatccttggccttgccctctcctgagctgacgagaacatccacagcatatacttcatgtacctcaaattcagctttttcatggtccttcttctgctggtctgtgggattctggataatggttttttctccatcgatgacatgctgcttcaactggtgtgacagcataccttctattggcgtgcagttaaatgagtgggcaatttgttccaggcttctgtcacttgtgtgttctgatttccaggtttgaccaggcgtagggcagcttcagcacaaaggtgagctgccttaataacatctgctttcctccctgttacttgggtcccctgagctacatcaaccacaaaagtgtgagctacattagcgatgaagcccatccaacatggacccccaaggtcaatttttaaccaagtcacctttccttgagaatataatcctgggtcgcttctttcaaaagggggaagaagtgacgataggttagttgattgtacccgaaatgctggtgggaaaaggcaatacctttcttcatttccttttctttcttgaagattttccctggtttcttccataatcatggcatcacctttctcacacaggctcagtaccgacacacctgagctagatgcttccaccaaggaccgaagtacccttgttggcgatgtcgccccccatcttatacttggtcacgaccaggtcctcagcgatagtttgctcctgttgctcgtcctcgcccgacatcttcctactaccaccactgcagcctcgtttcccctgagccgccgccgcctctgtctcccttcccagccacaggctgtggtcagagtcccctcgatcctcgaggagagggcgagcgaaagcgcgagcaagcaagggagcgggcaggcagg

SEQ ID NO: 48512 - DNA, 760 bp, Homo sapiens
aaatatagaatatctccagtatttttactttatatggcagcacgccaatatatgcaagagaacatattgatggggcagggggaaaactgatccgggcaatgacacagtcaggcattacattcggagaccaggtaaacagcaattttaatctgaaaagcagtatgagaagagttcctatgaagctgggatttacatacttcattctccgttcctggtcatttcatccacagcttgactgttgtcaatcatggttccttgcctttggagtggtactataaaggtacagagaatgcccatctcagtaccaaaatttcaccatgaaaaatcataacagaaatgacaaagcttaaagaaaagtacgccggatttcagaagtatttaccataataatttttaagaaagcttaccataaatacttccaaaaacaacaggctttacaaaatattatacaacatcctgtgtacagcagtaagtatctactcaggccatttgtcaagctgtttagtaattagtttctcatgtaccctcttgtctcaagaaggtcaataatcatctgatttcctctctagctaatgatctgttgttagcctacttttaacaatggaagaaggaactggtatatgttttaagtcaaccagttctccttaagtctcatagtttctgtttcaacatcatgttattgtgtacttacagaagcaatctctcagttaggaaaaataaaatcagtttcagggctcagaaagtaaaaagggaaattctt

SEQ ID NO: 48513 - DNA, 1325 bp, Homo sapiens
  misc_feature (1)...(1325): n = a,t,c or g
gctcaattcgaccaatagtgaaaggcaccagggcaaatccatgataagtgaggcccagaccctgcttacaaggaactctgacttgcacagcgccgggaagtgggtcccactgttccctgagtctggctcgccttttcctacacaacaaggaagaagttgattctgaaacccaggttctttacccagctccacccaaaccacatcctggcttctttcccagacaagacaatcatcttttagtcatctgcccaggtgtctgggtgaaccacctcagctctcaggtccttttgccccagcccagcactccagaaaggcaaacagtgctcttgacccactcctttgaagtgggccccttcctgaactggactgctggcctggcttactgtccccctcacttgggacaacagctgccagccaggcttgggggcttcctccaggcccagcttggcaggacatgaatcagagcctaaagtgtcaaaccctgtgcttggtccttgagaacacttcatctgtcaaccacggctgttgtagcaccactgactaaatgctcacatcttcaactgaggccaagaaccttcactgttcagatgaggaaacagaggtgttacacgggtaaactatgattcaaatgcaggctttgtgacttcagggctcacattcttaattggctctccagaatattacctgccgtctgtacaaccttgtggtctacacaatgactacagagctacattggaagatgtcattgcattctgcagaagctgaggttcagaaatcgtccagtgactagctcaagatcagattgctgctaggaaacagagccagggctcatcccatctgacaccaagtccagtgctcctgtaccacatgcaccctcaagtgggcacacaagcaggaaagaacctcacgaggccatttaatctttggctgtttcaaggaaggactggcccctgaactaacacatcagaaacagatcctcaagtggggagcttgaatgctacctggtgttcctatgatccattcctggctctggtttactctcccactgcctgaatggctagtttcacacctcctcccctaactgctggcagagggagggggccttgctttccattttactaaggaaaattttaggcctgggggtgggtgggttcatgcctgtaatcccagcactttgggaggccgagatgggcaaatcacttgagctccggagttcaagaccagcctgggcaacatggcaaaaccctgcctctactaaaaatacaaaaattagctgggcatggtggcgcatgcctggagggaaatgctnaacctgggaagngggg

SEQ ID NO: 48514 - DNA, 485 bp, Homo sapiens
tggtccaactaccctcggcgatcccaggcttggcggggcaccgcctggcctctcccgttcctttaggctgccgccgctgcctgccgccatggcagagttgggcctaaatgagcaccatcaaaatgaagttattaattatatgcgttttgctcgttcaaagagaggcttgagactcaaaactgtagattcctgcttccaagacctcaaggagagcaggctggtggaggacaccttcaccatagatgaagtctctgaagtcctcaatggattacaagctgtggttcatagtgaggtggaatctgagctcatcaacactgcctataccaatgtgttacttctgcgacagctgtttgcacaagctgagaagtggtatcttaagctacagacagacatctctgaacttgaaaaccgagaattattagaacaagttgcagaatttgaaaaagcagagattacatcttcaaacaaaaagcccatcttagatg

SEQ ID NO: 48515 - DNA, 536 bp, Homo sapiens
cggacgcgtgggtggagtttatgagttattctttttatctgccttagtgggtatccacctttctctgagcataggactcaagtgtcactgaaggatcagatcaccagtggaaaatacaacttcattcctgaagtctgggcagaagtctcagagaaagctctggaccttgtcaagaagttgttggtagtggatccaaaggcacgttttacgacagaagaagccttaagacacccgtggcttcaggatgaagacatgaagagaaagtttcaagatcttctgtctgaggaaaatgaatccacagctctaccccaggttctagcccagccttctactagtcgaaagcggccccgtgaaggggaagccgagggtgccgagaccacaaagcgcccagctgtgtgtgctgctgtgttgtgaactccgtggtttgaacacgaaagaaatgtaccttctttcactctgtcatctttcttttctttgagtctgtttttttatagtttgtattttaattatgggaataattgctttttcacagtcac

SEQ ID NO: 48516 - DNA, 552 bp, Homo sapiens
  misc_feature (1)...(552): n = a,t,c or g
tttttatatatcataagtatttatttccacagcagaaaattagttgaagacaagaatattcaaaaaataaacatgtttataaaataaagtaaagaatgaaatgttataagggtacaaagtaaatgctgatatattaatagggtggttggatttagcaattttactaagacacagataaatttggaaataacttacagtagaggcattgtttgtcccccctttttgttagttacttagagtttttctttcatatttgggtggggacaagccatctatgatgcatttgaccgcttcctccataaatacgctaactagttggattattatatgtaaccagtgtggccatgatgtttcttacaaaagggagcttcatcctgtgatcatgtgaaggacaagcagacagcactaatatatctaatcgctatcaatttggtctggaattcattgttacacatcagttaactataaacttcgaatacatttgaataatttcaagataatatttgaagtaaataatgttaaagtgtttttactattgnttattggaatccc

SEQ ID NO: 48517 - DNA, 428 bp, Homo sapiens
  misc_feature (1)...(428): n = a,t,c or g
ggaaggggcaaaagtatttgctcttagtctattcctcccttaacttctgtgactaatttttatttcctttctagatttgcccaattaatactagggtgcagtgtatcctggagaggtagggtgtgtgggggaggaatcccttgggggagatattaggagtgctctgttgtttacaaactcaggtacccgcagggcctagcaagagacttaaatgactgataagaaccgtgagactctgtctcaaaaaaaaaagtttcaatgtttactcctagagaagccaaaaatccagatttgtatatgaaatcttaccattttaaaagattggcagctaattatttttttaaaaagctgtgcagtgtgatgtgtcccaaacggactggctcatgggtggccacgtcacaacctntggactcaaaccgngcatgcct

SEQ ID NO: 48518 - DNA, 626 bp, Homo sapiens; identical to SEQ ID NO: 7131

SEQ ID NO: 48519 - DNA, 1776 bp, Homo sapiens
gcggccaggttgttcctgcctctccgccacctccaccgcggcttatcccctggctggcggcgttggcggggcgggggacagtagttgtagacgcccgcccctgcctcagagaagataccacattgaatgaacaaagactgaactttgtttacagataccttttataaaagatgtctgtggagtagtgttacagttcaaataacaaaggattttgcattatgagatgagtgagagtggagaattggacaaaaattgatttttgatctctgaattgtggtttttagctcaccagttattgtgtagtctcactatttgaaaattcatgctgaaaaactgagtgaatatgatcagatttctccaccaaattctcagcctgataaggaaaatcccgttttgtcaacctaatgaagcattcaaagaagacatatgactcttttcaagatgaacttgaagattatattaaagtacagaaagccagaggcttagagccaaagacttgtttcagaaagatgaaaggggactatttggaaacctgtgggtacaaaggagaggttaattccagacccacgtatagaatgtttgaccagagactcccatctgaaaccatccagacctacccaagatcatgcaatattccacaaacagtggaaaatcggttgcctcagtggttaccagcccatgacagcagattgagactagactctctgagctactgtcagttcacgagggactgtttctcagaaaaaccagtacccctgaactttaatcaacaagaatatatttgtggctcacatggtgtagaacatagagtttacaagcacttctcctcagataacagtaccagtactcatcaagccagtcacaaacagatacatcagaagaggaaaaggcacccagaggaaggcagagaaaaatcagaggaggagcggtctaagcataagagaaaaaaaagctgcgaggaaattgacttagacaaacacaagagcatccaaagaaagaaaacagaggtggaaatagaaaccgtacatgtcagtacagaaaagcttaagaatcgaaaggagaaaaaaagccgagatgtagtctctaagaaagaggaacgtaagcgtacaaaaaagaaaaaggaacaaggccaagaaaggacagaggaggaaatgctttgggaccagtctattcttggattttgaagctttcaaagttggttctcccaaagttaaattgaaaaaataggtgagagcttggttttatgatatccgtgttcataccacttttcttatgtgaataggttctttaacttctaacaaaggcctagtaaacaaagtgtttagcatgcttgctctccaacacagaaattgcttttcctcattttctaaaagcattattacattttttgaacatatagtgtaatttcctttaatgaaagtgactctgcttttattcatcaaattgctttgatggtggaaatattttctgttgggaggttatttattttaaattggaggattaatgacctttgcacaatctgtttcttgattgggtttgttatagttttgagttgggtattttatgttcattggtttttctctgtgaagcaatttttttctcctttattagatctaacttgcagtgtattttctaggctggaaagtggaaaatgaaatatattataatcttaggttacataaagtttctaaagtttcaaagagtcttgatacaaaatcagtttatattctgaaaatatttataataaagtattctaatttctaaaaaaaaaaaaaa

SEQ ID NO: 48520 - DNA, 1173 bp, Homo sapiens
ccacatacaaagaggaaagatgaaacttttattgttacatttattgacactggatatttattatctgttatataccaggcaaaatggacacaccatcaggagataagacctgtatcttacgtgtaagatgaaacttatatttattgattgaattattgaatattttttgagtatttgctatataccaggcaaaaggcacagaacaaattatttgttcacagttacttttaactctttcagcaatgcctgagtcctctttatagaaacttcattttgctaagttagcaaccattcatttttttggttactcttcatgtatagttttctcaagtgtctcttcaaatactgcataatggtatagaccatttaatattccaaacataatctgaaagactagaggaatcgccattaatttcatttgtgtttgacaaagcgtcatcccaatggattaaaacccttccttttggtggcagtggaacggtatgatacttggttgccaggcgtccatttttagtaaaagccaaagaactgggatagaaaacaccacaaactatgccaatcagtgagcttctgaaaacacagttttccttgcttatattatctgaatacaaagcatcaattacaaaaagcttgtcagtaacaacagtagacaaaaatggaagtgtagccaatgatgcatatgtcttcaaagcatcatgtttaaccttgaagcagcgtctgaacaggaagtttgagaatattccagagaaaccagctgttgttccaaatgtcgccatttgatatatattttgtgtcatttcttttctaagatagtcaaaatttttttctatgatttctatgaccattggtcttctgagttttgcatcttctagagaaggactgggctgaccatgcatagatgctgccatcttgaaaactgatactgttgctgttttcctctctcctcattccgagaaggcagtcaggctctttgtagttgtcctcctagctcttcaggtggggaggtggaaacagtggctgcttattgacatctctatcctcagtttctcatgaaagattaagttcattttggaaatcgtgtttcatttccttgggcgcttcctcagttcccaccggcaccacacctgaatcccttggcttagtcccagcctcatacccgaacaccaccatttt

SEQ ID NO: 48521 - DNA, 1137 bp, Homo sapiens
  misc_feature (1)...(1137): n = a,t,c or g
ttttttttttttttttaccggtggagctgtttaagccaaggagttgtggagatctctgtgatgatccaaaatctgactaatataaaatcaactctgatgctaattaaatctgacttataacttgtctgctaaaagaaattataacaggaaactttggtgactggtaaggaatgttgaaaagggaaaatcagaaggaaaaacctggttcataagaaggaaggaaatattggtccaagcacgtcaagggctctaagtaaaaaccgatggcactacaattccacataatccattacatttggaaaaagaagctcctggtagacacagggcctctttgggatattgttctttgttctgattctgtgctcaccaggaaacaaatttcatctccgtagggggcccgtccttcagtaggaatggccctgctcctaggttcttggctcacttgccaagactacaatagcactcgcgtttatcagttatgcttgtgtgaagctggttattgcaattcattgttctcaaaatactttcatgaaaagcctgacctgagaaaaagccttctctgtaatcatattaattagaacataaatgtctactttgccataattatacaaaganccaaatgggcaattaactccagttggttgcttctctctgagccttacttgccagctcttattaccgcattccagagagagtcaacctggatggagtttgtcccctaaataaatgtagcgacaaagaaaagggtgctccaaatcagtttcatcagaatgataaggtacagtactgcagccatgtctgcaatagcacttcaattttacttttttttcccctagcatgtccttaagcattttctccccagcttttcacaatctttcttctaaggctgtaatgtcttacatccttaataggcatgattagatttctcccaaattttccaaattaactttctttcaatgtaaccaaaacaaaaccatggcatacagtaaactaaaagggtagacaggagagaaaggttgctgcaagtacagaaaatttagaaatcagcctttaccagttacatctgagacaaggtaaactttccaacacattggaatcatcagaagggctttaaaaaatacaactgccagccgggca

SEQ ID NO: 48522 - DNA, 464 bp, Homo sapiens; identical to SEQ ID NO: 7163

SEQ ID NO: 48523 - DNA, 1483 bp, Homo sapiens
aagaattcatgtgataaagggtaatcatcacagagtttacatatgctcagttttcttaaagccatagattttattccagaaaggagaaagtacatggcattaataaaccacacatgccatgaattttagaacactaaattatttttctctggcttatcaaccagttatatccatgggctgcaaattatatccatgacaaaattgataacattttgcaacatgtcaaagaaagaccaacatttttgcctgagtgtcccactaatctttatctagagttattattcttggactttctacaaaagtttcttttcaaataatttatgaattacaacaactggaaagaatactgtgagaacctgaatacttcaatcaaacactgaaggcaacaatcttcctctttaaaccatctctcctgcctgaatttttatatactaaaataaccccactccttcatttctgcaggagtagccagaataaggtggcattccttggccgtcacaagtcccaggtcaaaacgtctccattcttcaatgttctaacaaaggtttctggccctgcagctcatgtctgtgtgattcaatcttgttctcaatgagagagatctctagcacaggtaagagtagctgaaaggcgtcctggatgtaggaggcactgtttgatgcctctagaaatactgcagtgattaatgggttaaggacatctgccatttctttgaccccagcagttgttaggcaggtagtgaactctttagacagagaggacaactctttacacaacacaattgtcatctgggaaagagtttggctcctttcctatggctgtcacttcctgcttccctgccatgcagaaccaatgcagctgttttgtggaatagttcaattgagcaggcagtcagttcagccaggctccggattgcaaacgcatggatatcctctattgaatttttgttgacttgctcagtattttctgcttccgactgtttttctccttcttcattctctgctaatggcttggtcagagacttcctgatccattcgtgggcggtatttcttgccctggcaagtttctctggtttggaggaaacgtgcagctgggaaaacagctctgttatgtccttggtaaaatcttcatccccttttttctcttcttcctcttcttcacaaaaattctgctagagaaaatgtttctttgagttgctctaattcaaccttttagagtctctaattcttctccactcagagaattaaggatagatttcacctttatttcactttcttgggaaagcatctccagagcttctagatgtgaaaggccttgaaattcatcaaagagtagcccataatgagttttcttgtctgtttccacggtaacctcattggaggtccgtatctcttctttctccttcgcctctcgtaaaacctgagatagtgtagcatttcggttcatcagacccttggttcttttaaatccaggggtccccttc

SEQ ID NO: 48524 - DNA, 1924 bp, Homo sapiens
tttttttttttttaaaatttaataattactctttatttaaaataaataagccctcttacttacagggaaaatatgaaagcaaactctgtcctcctggtctaagacagaaaccacattcagaatatgttcattgaaaaaggaaagatttgttgattatcaaacaaatctaggtacttcaatacacattgtttctttgaaaaataaagactgaaaggaataattcatttcaaaaagtcacaggttaggaaaaccaattttccttctgagggctcattttaggcaaatcctccaaggtgttcccaaatctttttaaaaaggctacatcccctgagaaagggccctttccctgtagccctcttgctctgacaccagcagccctgcacccttctgccaagtggctccctgcaggacggtgctgttgccgggcaggaatggccctccatggcaacctccagcaggcaggagctcaccacctgctttctgcaaactcactcacttggctcagctattctgcaatggagaggaagtttccttagcagccaaagtattctaagtatcacattttccagtattttccagatccgtagtgtgctcagaaagccagagctgtatcaccaggcttttagagaagattaacacctgcacatctgagtgacctttaacaggctccgcagcactgaacgcctgcagacactgcttcatgtgccctttaatgctgatcaatttccagattcaacagttacacaaattacattgtcatgaaaaacagaagaaaaagccccaaagtctttttcagacctcccctccttacccaaaatacagacacacaggcaagaactctcataaattcaaattcatcatttgagaggttgaagcctccaaggattcttctagctcccagggtacatccactgtatgcttccagatgttttttccagatttcaatgtagtgtggctcttctttttctttcagggctggggggccatcttctgcagggcagctggggcccctgtgtgggtaggctgggaggtgcctgaggcctgggctctcccaccagctcctgctgcacattctccagcatggtcttgtacgcctgtcgggccgccactgtcagctcaaccatcttgtggaactgatcctgggccccatcatagctgaagatccccaccacactgacaggaactgccttattcaaactgcgccccagagctttgcggttgagagcaaacacaaagggaatgttctgctcacaggcataatcaataattgtgtgcaaagtgtcatccagcccaccttttgactgtatcttctcacagttgggagaaataatgacacatttcagttttttgagcttcaggtgtttgagaacctccctcaaccccaacacaagtcgacgtttagtcttggccttgactggatctttctggtacatacggtcttggaaacggaccagttctttgagtaggtcggtaacacaagcatccacttctttactaagcatctggctgcagtaatccctgaatctgcggctgtggatcttagggaaggtggtgtgattgggagcaaggtgggaggcctctgtgtccctctggagctctgtccctggtggctcttcagacttgtcctcaaccgaaggagtggagatcagttcgtccatcccctctggccctgacagctctgcctgctcgggaaactggtcatcaccaccactctctccatcttgtgtgtcatcactggtaaaagctggactcacagcattttcttggagacgctgctttctctcttgccgttctttcaaaataatcttcttcagtgaggttggcttcttggccttggggatctccctctgcttccctttcttcatcagtggggcgctggagtccaagggattgtgcggggtcttcatttgactcatgcggcggc

SEQ ID NO: 48525 - DNA, 521 bp, Homo sapiens
ccttctgtgaaatgtctttatatatggtctagttagtattgctggtataaaagttagtattgctggtataaaagttaacagtgcctgagttgaaacactggccccgtgacttactagatgaatggctttgatcacgtaacttaatccacaggtaagatggggacaataaaagtaccaacttttagggttgttagaagaattttaaaatagttaacatttgtgcagttactagagtagtacatggcaaatagtgttatatgagtaattaaattaatgaatattcataggttaatttcagatcaggaacattgttgaactctaatagtttgtatggttttttaaattggatgatatcatctgtaagctaatagttttatctcttccaattcttaacgtatctttttccaaaaagagaaaaatgttgattagaactttcagtactgtgtcagacagtatcagtctcagtcaacatggttatctttagctaatttcactttttgctgttgttgttgttgtagaga

SEQ ID NO: 48526 - DNA, 1706 bp, Homo sapiens
ttttaaaaagcttaacattatggcatttattatattgtatagagccatattacacatgcttggtgcttcaaactgagttatcaatgtttttctggatgcaaagccatctgatgctggatgcggatgccttaaatactatatttctgcatctatgacctatgagctaaggaaaaaccaaggacaattccagaaatggcaaagaacacttaagaaaaagatgtacatgagacgaaatgctaagtccttgagccagggcctacagaagttaccagaaagcgaataaaaacagaatttttctcaccacctgttgataatagagcctcacatgtccgggtatggacaatgtagaaaaaagaggttgttccgtttggtactgatgcctttctcccctccgtgatgtgtgcggacattgtgcggcccccagagagagcagcagacagaacagagcacagcaaactgccccctcctcaacacatcccagtgctgtttttttttttacagcatctggttgtctcatgaaaagcgggcaatttgatcaaacttgccaccttgtggaaaatcaatcagtgtgcttcagatgaatgtgacgccatcacacgcaccctcctctgacatccagaatgctggcgggggacatggggctgggtgcctgctcggccaggacgaagctctccatgtgtcacctcccaccttacgggcacccagtttgtgggaggtttgctttgcctgctgacctgatgctaacgctcagcttaaacgctccattccagattttacaaggggactgggtgataacgtgtcaagtacatgctgcccatacttcccatcaagcctcagtacagtcccagcttaaagatcctctctggcaccacactgatcccttgggcctgggggtggatgccaggaagcctcttggccacaaatctgccctcttgtgggtcagaggccagccctctcttgcctgacgtgacttgtctgaagggcctgcacttaaaccatcttcaggcaaccagggcatctgagcataacctgagcagtaacaacataaatcaagggtcagtaatttggggtggatgagacctagccagccatccagtcagatgctgccgtgcaggtaagcatgattctgaaggcgtggggtaccttttgtcctgtaaagtcagagagaaggctaagaagtgcatggccagaaccccaagaaagtgcagcttggagttttggcttccttccccaccgcttgggttaaaagttcgggtggaatgcacttgccaggacctgctgggcctgaactctgaagtggcgctcacattactgtcagtgtatccaggacaaagggcccggagccagacaggtgccccctacagccgagggtccaaggcaaccctgtgactcagagctggcttcagcaagccagcagagcagctgggaggaagcctcatggcatggctgtggcatcaagtgggtgtctgtgagcagcttggctctcaccactgttttgacctctgggatccttactcttgctgggggtcagatgtcaagaaaatagaaggattattaaagaataattaaataattaaagatcaacaacatgaatttcccaagccaggctgatttccaggtcacagaagtcagagaccctggaagtgatcaactctcttttcctataatcgggggtggggggaggtgggtagaattttcaggtttcc

SEQ ID NO: 48527 - DNA, 539 bp, Homo sapiens
ggcgcgcgcgaccggcggctctttggcgcggattagggggtctcggcgagggagtcatcaagctttggtgtatgtgttggccggttctgaagtcttgaagaagctctgctgaggaagaccaaagcagcactcgttgccaattagggaatggaccgtttgggttcctttagcaatgatccctctgataagccaccttgccgaggctgctcctcctacctcatggagccttatatcaagtgtgctgaatgtgggccacctccttttttcctctgcttgcagtgtttcactcgaggctttgagtacaagaaacatcaaagcgatcatacttatgaaataatgacttcagattttcctgtccttgatcccagctggactgctcaagaagaaatggcccttttagaagctgtgatggactgtggctttggaaattggtaagagcttggtgttaagagttgtcctgccctagtggactcagagaagaagctgttgttgaagagtaaaggaaggaacctcaggaagagaaagtatgtgttgctttc

SEQ ID NO: 48528 - DNA, 1129 bp, Homo sapiens; identical to SEQ ID NO: 7187

SEQ ID NO: 48529 - DNA, 724 bp, Homo sapiens
gcttgacatgattacgaatttaatacgactcactatagggaatttggccctcgaggccaagaattcggcacgagcacacttgtaacccatttgtgcacacaggtgtgccgtgactcactggtggatccaaaaaaagctgaagcctacatttcccagagcccctttcagcttgaattccaaatgtgacttagcttcctctatgcagatgtacctacttgaaactgggaaggccaaatgagatagaggtaatgtttctgccaacaaacagccacagagcattttatttttctagaagagcaataacagagaccccagggtgtggtgtggcaggacgaggagcatccattttgctggtggggattgtggctaaaataatgtggctctggagccagcaatgggcagcatcttcatgactttccagcttccaggctgtaagcagagatagcatctcttctggacagccagttatgtgatagtgttctgagagtcattcctggaagtcagactaaaggctgctccttcagcctttccattcatcttgtaagcaggaggcttctgtgcatggccagaaactaacaaaagcacattgtgtctaaactaggttgcagtggtttctgttatcagcaagtaaatcctgattgataaagatactacaatatatgcacatatatatgttatagaatcaataaaaattggatactttgctttaaaaaaaaaaaaaaaa

SEQ ID NO: 48530 - DNA, 354 bp, Homo sapiens
gtcaggagagtaagtttactaacctgccaggctgcttcaccacagtcaaaggaggcagccctgagcttacaaaatgagggttttatatgggggagagagaccctggggttgtttgttggttaaccttaccacatatcatctcgtgaccaggttacaatataggaatttacaagagggtgtaacttaggtttatccctcagtcagcgggaggcagacttggcaacggaagctagcatcataaaatggtgcagtaatagaagtaactggaccaggaagaggaggcatctgctccaatgatgtcatagccattggtggccacgggggggtgggactggtcatgcagccgtgtgtcag

SEQ ID NO: 48531 - DNA, 852 bp, Homo sapiens
  misc_feature (1)...(852): n = a,t,c or g
cttgctgcaatgtaattatatttaattacaagtgtgcccctggtagtctttaactgaagggcactgactgggtcactggtgaagttccccgcaggaactgagtcagaccccatctcagggccctgcacaagataggtgcctgctctaaggcgtgcaccctcgccacagccctggcccgtcttgacgggcgagggttactgtacttgtcccaaccatacagatgagaaagctgagactcagggccagcaacccgggtcccagcggagcgcccggcacacgccgacacttcagcaccagtggcggtggccaccactgtgcgcggagatggctgcgacgcgtgcgcagatctcgatcccaaactccctcctgccagaatctggacccgaatccacccattgcccgttttctgctgccgctggagagaatctctgaggtccccaggagagcctgcctgcacggaagagacgcctcctcgggaaatttgtgcacagagataacacaggggatatgccatatgaagatgaaggcagaattcctacaagcccaggggatgccaaagattgcccagcaaaccaccagaagctaggagagaagtgtggattagattcttcctcaagccctcagaaggaaccagccctgcccaagcacttgntctcagacttctagtctccagaactgtgagacagtgcattttgttttgtaagtcagccatatggtttgtggcactttgttatggcagccctaggagatgaagacaatatgcaacatggtatgtccattataggacactgtgggccataaatgtgttctttggcctgaagaaataaaacttggtggtccaagttgntgtct

SEQ ID NO: 48532 - DNA, 509 bp, Homo sapiens; identical to SEQ ID NO: 7217

SEQ ID NO: 48533 - DNA, 1750 bp, Homo sapiens
  misc_feature (1)...(1750): n = a,t,c or g
tttttttttttacaacaatgcagtcatttatttattgagtatgtgtacattatggtattattactatactgattatatttatcatgtgacttctaattagaaaatgtatccaaaagcaaaacagcagatatacaaaattaaagagacagaagatagacattaacagataaggcaacttatacattgagaatccaaatccaatacatttaaacatttgggaaatgagggggacaaatggaagccagatcaaatttgtgtaaaactattcagtatgtttcccttgcttcatgtctgagaaggctctcccttcaatgggggatgacaaactccaaatgccacacaaatgttaacagaatactagattcacactggaacgggggtaaagaagaaattattttctataaaagggctcctaatgtagtactgcttgaaaatggtacatttttgttgtagattattttaaacataatgctatagtaatattttgaagatttgagctgttatttccatttgtttttacactgtgactaaatgattaggttttagttttagactctaaacggaacctgaattaataggaaataaacacggtactatagttgtcctatggtgcccctatgggtgatgggttccaagaacccccctaggatactaaagtcccatggatgttccaaggtcccttataggnnnnnnnnnnnnnnnnnnnnnnnnnnnnnnnnnnnnnnnnnnnnnnnnnnnnnnnnnnnnnnnnnnnnnnnnnnnnnnnnnnnnnnnnnnnnnnnnnnnnnnnnnnnnnnnnnnnnnnnnnnnnnnnatgacaaaaacaagtttgtacatgttcagcaaaggcgcaaccatccattttttttccccaaatatttttgacccacagtgggctgaatcacagatgcgaagcctatggacatggagggccaactggagaagcataagcaggggatactttttaggttgctacttcagcaggcaacattcagaccatggaagtctagagaaagattataaatctgaacttaccgctaaaaattttaaaatgggaaataaatccaaggagtttttagtcatgcattatgattttaatctatgttatgccaagtatagcattccaaaatatacatctagagactaaaagtaaatgctctatagtgaagaagtaataattaaaaaatgctactaatatagaaaatttataatcagaaaaataaatattcagggagctcacccagaagaataaagtgcctctgcccagttattaaaggattactgctggtgaattaaatatggccattccccaagggaaacagagagattcttctggattatgttcaatatttatttcacaggattaactgttttaggaacagatataaagcttcgccacggaagagatggacaaagcacaaagacaacatgataccttaggaagcaacactaccctttcaggcataaaatttggagaaatgcaacattatgcttcatgaataatatgtagaaagaaggtctgatgaaaatgacatccttaatgtaagataactttataagaaatctgggtcaaataaaattctttgaagaaaacatccaaatgtcattgacttatcaaatactatcttggcatataacctatgaaggcaaaactaaacaaacaaacaaaaagctcacaccaaacaaaaccatcaaattataacgtattctataacatacaagactgtaaagatgtgacagtgtacattat

SEQ ID NO: 48534 - DNA, 1225 bp, Homo sapiens
tttttttttttttttttccattatcctggttttatttaggaataggatgggggtggggagggcttaagtggcccacacgtccaggtgtagactgactacattgagtatcgctccaacaccgaacttccctttaacggtttaaaaaaagggtcatgagtgtcaacacagttcagcagtgttttcatgggagaccttcaggcaggcaggaggacatcctcctctctgctcaggaccaccacgggagttctaggcactccacctcactgttcttcagacagctgtgatgtgagcaggggctaggccggtaatcaagggggccagactgagccatgccacacccttcctcctagtccccatgctctcctgggagcctggcagctctgcttacttccgtttgtgttttttcttttgttccttacgttgctgtgctctttggtccttcttcatccttgagtccaccaccttgaaatgacctctgactccagctggccggcgcactttgcggcccacaccttttttggctacaacgtaggtgacatggcgtttctccttgccaagcccagccttcttgtagagacttcgcagctgtgccactttctctcgttctgagatgtccactgtgttcaccacggcttctgccttcttcctggtctgctccagcctcttcagcatcctccttttctttctagccttagcctcagccaccttcttgatgggacgtgcattgatttcccgccagcgtttccggtaatgctccacctccttcttaccaacaggcaactgtcgtatccggtgctgcttttcctcttgcacaaaccactccggaagctccccctcatcctcattaaatgtgtaccggttgaaggagttatctatgaggtctctcttggcctttttggaagaggcaataacagcacctagagcaaggccttcggggtccagtatccgatgtttcgctgggtcctcaataggcactatctcaaacccgtcatcatctgacttaggcccacggcttcgcttcttaccacggaggggttcccagctctcttcttcctcactgctagtactgctatcactgtctgagatgccatccttttcttccccttcaaggccagtggcagcttctgtccccgaagaagcctctgttcccttaggggcttcatcttggtacaggggagacattatctcagtcttcaaacaggaagggggtgtctgtggcagctgc

SEQ ID NO: 48535 - DNA, 683 bp, Homo sapiens
  misc_feature (1)...(683): n = a,t,c or g
gggtgatccacccgccttggcctccccaagtgctggaattacatgcgtgagccaccgtacctggccacacgtagtttcttgattgcaagaaggctgtcatgtgcctaagggagaaaaagacgtgctgatcaacttcagtcaggcatgagtgacagaggtactggccatgaattccatgttaatgaatcaactagacattattaaataaggaaccttgagagagagacatgtacaacaaggttaacgatgaactgcttaacaaaaatgctgtggccagcggctcggaggaacctgactctgtatttccccgggagccagtgcctatgggtgttactcaccaaaactcacgataattagatgattccaggtttcctgcgactttgcagaactatcactgagcaacgcaaggtgaaacataagcagggnccactcacgtttgcttttttcacaaggtcanacttttattgatacttaatcagaaaagccgcaactcaccagttttccaaggtggcaattccccttagcacagcccgttcactcggtggccacagccccgggcattcaggctcagaccactccacaggtgagtcaacactgcaaaccaaagatagtagtaaacttaatacataaatgttacagattatggattaaaatgtccacttacatcaagagaaaaggggggc

SEQ ID NO: 48536 - DNA, 998 bp, Homo sapiens
  misc_feature (1)...(998): n = a,t,c or g
taattttttaaatggagtcggggtcccgcttgtgttgcccaggctcggtctgcacctcctgggctaaagtgatcctcctgccttggctgattttgttaatttttaaatatcttcattttgatctatcattaatggagaaatattccgtctaccatgtatataaggactttcagcagatgaaatgcttaaatagtttaagggtggaaatgaatacagcaattagaaataaggggttgataaaatatgcatttagttttgctgttacagttaaagaagcattttttaagaaagactttctcatttatctactttgtgcaataaaacttaatttttgttgttgtgatttatcttacaaaggatactgtatactgttctctttcccaaactaaagtctaaatttgcactaaaaaaaaaatcatgcatgatgaaaagaccagcctacttaaatgtgcttggagtcctttcatgttggcatggatcaaagcctgagtatcccttcaaacattttccagtttgccagatccagataaacagacttgtaaatatactttggtaaaaatatgaagtgatgaattacttaactgctgaatgataaacagatggcatggtgtgctgagaaataacggattatgtgctactagagggcaggaactttcttttggacccttcagaatgcctggtgtagaactatacattaataaatgtttattagatgaaagaacacatgaatatgtcattaattagctttccagtttcaaaattagtgtcaatagcatggacgtaagattattgcaaactgagaaagggacttaggggactcagaaattataaatctttttcttctttttctttttttggagatgaagtctcgaaaaaaagagaaaagaaaaagaaattagcagcttccaacctcgtgccgaattcttggcctcgagggccaaattccctatagtgagtcgtattaaattcgtaatcatgtcatagcgatntcaannctc

SEQ ID NO: 48537 - DNA, 732 bp, Homo sapiens
tttttttttttttgacagataaaaacactttatttaaaagtataaaaccaggcttactccttcaaactgctcccacccctaattatctccacaaagagctatataaattgggcaggggtatgtgtacagtcatctcagctctaacaaccccagttcttctttcaattctcctttctcccttcatacaattgagatgtttgtcctttgcactttccccaagatagcaaaggtgatacaaatgtggaaggaggggaagtgtagaaaataaactgtcatcatcctctattcccatctccagggaacagacagattatatgaactctgaccaaatgatttgcttgtctgaagaaacaaataataggtacagttactctctgtatcctaaagaaagacacgagggtccagagtccttcttcagtatatagcctcgtccatattgtcatcactgtctcctccaaagtcctctccattgtcaaaatatgacatgatgtaatcagtttcctcttcatgttcttcttcatcatactcttcttcttcctcctcttccttctcttcttcttcttctttctcctcatcctcctctgaagttacttcttcttccttcttctccagggtctctagtttctgtattgtttcctccttatcttctgtggtcttagggggcctcttggggagcagaattgtaatccctggtggagggatcaaaaggtaaaccttcagagagcaaatttt

SEQ ID NO: 48538 - DNA, 1667 bp, Homo sapiens
  misc_feature (1)...(1667): n = a,t,c or g
ttttttttttcaaggtctcaaaaacaatgtttattttaacacataaaatgtaccatctagcaccaatgcctgtaaataccagaattccatccggttactactctttggaacaagtatgattaaagtccttgacagattattgtatatgagcgaatggcttcataacataaaacagagagacacagaacaggaaattcatttgggtatatacatataggaactacatttgtagttattcaaaaacctttcactgcttcatgtaaacaataccagtatttttaagccagattttccggggaacatatacataaagtgcatgagccacgtaaggccattaagcctggaaactgggtctttctattctcactccatgctcaaatgaaaaatctgtaaagatatcttttgttcctccaatcttctgatttgtcttcttagcaactcattacagtacaatttactgattaaatcacatagatatgtatggtggaggaaaagaaaactttggccaatataagtatacaagacaatatctcagttctttttaaaattaaaagaacatttcagtatnaagatattttaaaagaaatgaagtggaaaatacaaatgatcaatattgtataattatgtacaaaatgaaaaccttttaaactctgaagacaaactaaaatttactagtttgaatttaaaacattattatataatagcagatagttctcttcagaaatttatctctagcttcctgtaaaaggtccagtcaaatcatgttggctgtttttggcagatttcagcctcgcctcaataccaatttttatttgaataactgattcccaacatttaagaagaacttgatgctgaacttaagtaaccttaagctggattcagggccattggcaggcaggcaggcaagcaggaatttttcgtattgcagacagcccctggtggtcatcatctatacatcgggatctctaaggacgtgccggaaaaaaaaatctgtgaacacaatcttcccatgctgtattcacatgctctattcacatctttagtttacccaggttgttagagccttgggtaagatgattaaaggcttcacgatggaaatttctcaaaatattttttctcaatttctggatttttccccattgttcgttgttcataacaacatataatacaagtttcaaatccgctgatatcttttagagttttcagcaatggctccaaagactcttcatagtatatgcagtcggccatcagtatgaagtcgggtggagaaggaaagccttctatttcttccccccatttcagtaccttggcttgaacagaaccagtgacaagatgcttgttcatattaatattcatcttcagcaagtcttgcaattcctcaagatcggtgactacaacatcagccccgagggtagcagccatgagccccacggccccggtgcccgaacccagctccagcaccgaccgccggctcagcgcgtgggccccgtcgccagaaaactcgggcgtttccaggtatttagaaaggacaatggcagcgtcccacacaacgcaacccacgccaccggagctatactgctgtagtcgtagcactgtaccatcccgcttctccaaaactcgcacaaacgtccgcagtgggtcctccagcgaggactccacggtatccg

SEQ ID NO: 48539 - DNA, 1763 bp, Homo sapiens
tttaaatgcatcagcaagtttatttacaaatgcaattgaacagaaaggctcaccagtttctgaagaagacttctagtatacaaaccatggttatttttcattaatgaaaataagcagctttctattgggaattacttagcaacatttctggtaaagaaaatagagctcccttcatcaagcaaataaatgggtacattaactgcatttttaaaaatcagaataataggtagaaggaaggatacagaaagcacatttggggatagattttaatgaaattttcccatatggttctgcattaatttagaatacattacaataaacagagcaaatgcaattatgtatttatattaactatttcaaataatgtttaagaacctttttttaaaaaacaataaaataccctcttcaaaacaccactaactagaaagtcaaactagatcattatctgcctcaaaaatattcgtaggttcttattttttcccttgtgctctcaagatgctgaattcaacaggtaaatactgcacttttccccacacacaattaccttataaataaacaacaaaaatactggttctaccaagactacaatgcttctatgtaatctaaagaggcaaaaaaagttattcttttttttaaaaaaaaagcaaaaaagacatacaacacatatttatagatctacatgagcagcaaccacctcttcttctatctgcaacagtgctttcgtatggaggcttacatcacatggcggttggccgtccagatttgaatctgagatagcagtcgttgcagtacagttggtggtttctgatcctgacttcagctcctgaggaagagcctccgaggtcacactcacaggcaacacacttaaaacaatgcaaatgataacaaagacccagggactcgatgatcatggcggctcctttgcccagaatgttattgcagtaggagcatatgcgcttcccactgactgacctgttacgcagctgagagcctgactgtgaagctgaaggggaatggcttctcggggtgggggactgtgtggtggccacacctgtggtggaggtcttcacggagccagctgaaggtgggggcacgctggaggaggggttccgcatgtaggcacggtttgatgtggacaccagctgaggtggtgggcgactaaagtcttgcacagaggaagaagcatagaatcctgtgggctgattgagccaaggaggctgtctccaagaattggatcggggggagtccaggttatctaaagattcgcctcttctcatgatcccaggaagactaacaggctctttgttgacactggcactgcgctgtcggatccagctgttgtcattgtgaaggggtgttctcttcctcatttcctgaaggatttgttgcctctccaattctgctcctgatggtacttgttctttcttggatctcctctgtgaagaggtcgtgttcccaatttggtctaaatatttattgtttccatttttatttgtggagtaatcatccagttcagtagtagatctggatttattcctgtcaccaggaagaaaacctgaagatgcttcttctgtctttggtatatcataggaatcaacaggcctcctgtactggtatattctgactgatgtttcccgctctatctctgcctggcgcttctgctcctccgcaggacgcttctgctcctcagcctcagcctgaagccgcttttgctcttgctcttcctgaagctgttgctcccatttcctctctctctcaataac

SEQ ID NO: 48540 - DNA, 812 bp, Homo sapiens
caacccggattttattagactaggaaatataatttatttcataaaaattaattttgttacaataggaatgctaaaggttatttataggttgcagtttacagaataaacagaggtgggattgggggccatccctggggccctggtacccccctctcccgggcatataaccatgtccacagacctggcaggggtccagccctttgccccaccaagagctccctgcaccaaagctcctggtcacctcccctaagggacccggctcagctgcctaggagctggggaatagggaccagagtgccctggagggtccaggagatgagaaggatcccctgcaccctcaggagaacccctacccctgagctctggagccgggggcactgtgagagaaggcagagggagaggcacgtagaagatacattgactgaccctgtgggctcagggagggcagaagacaggcacaccaaaccctagacgttccaaacctgggacgcagaggagcacacacacacgctcgcttcaggttgggacacgttgcacatgctctccgaggggcatcctgatgtgcccacagagaaaagcataggcaagcacacgcgcacgcacacacgcaccccagagaggagagagagagaaatacctgcgtaagggccctgcaacccccaagggtacctgagctgcttcccaccaggtacatgccctcgggggctacctcttgggtctgaattggaggagaaaccacccatcccaccccggaggcaggcagcctccacagacggatggagtcggcaaagcctttctgggcatttctcata

SEQ ID NO: 48541 - DNA, 1620 bp, Homo sapiens
  misc_feature (1)...(1620): n = a,t,c or g
ccgctttcgcttctgcttgagtaatcaagtgaaaaaatgagcttcatctgtggattgcagtctgctgctagaaaccatgttttcttccgatttaattcactgtctaactggagaaaatgtaacacattagcatccacctcacggggctgtcatcaagtacaagttaaccatatagtaaataagtatcagggactggggagtaaatcagtgtgacaggtggagttttctgcctggaaactttcatttttatagtacttttaacaacaaaagaacaggaggcctctcaagtaccaaaagtaaggaaatttggaggattaccagcaaatgtactgtatggaatgatgctttttcaagacagctgctaataaaagaagttacagcagtccctagtctgtcagtattgcatcctctaagccctgcttccataagagctattaggaatttccatacttctccacggtttcaagctgctccggttcctctcttgttgatgattcttaaaccagtacagaagttatttgcaatcattgtagggcaggggcataaggaaatggtggcagggcacttcctcctaacaagaaggaagtagttaaagaaaatataaggaagaataaatggaagctattccttggtttgagtagttttggattgctctttgtggtgttttattttactcacctggaagtaagtccaatcacaggaaggagcaagctactattattggggaaagaacagttcagacttttatcggaactggaatatgaagcatggatggaagaatttaaaaatgatatgctaactgagaaagatgcccgataccctggctgttaaagaagtgctttgtcatctaattgaatgcaataaagatgttccagggatctctcagatcaattgggttattcatgtggttgattccccaattattaatgccttcgtgcttccaaatggacaaatgtttgttttcactggatttttaaatagtgtaaccgatattcatcaactttctttccttctgggccatgaactagcacatgcagtacttgggcatgctgcagaaaaggctggcatggttcatttgttggatttcctaggtatgattttcctcacaatgatttgggccatttgtcctcgagatagccttggcacttttgtgcccagtggatacagtctaaattgcagggagtatatgtttaatagaccatacagcagaaaattggagggccgaagctgacaaaattggactactgcttgctgcaaaggcttgtgcagacataagagccagttcagtgttttggcagcaaatggagtttgttgatagcctgcatggccaacccaagatgccagaatggttatctacacacccttctcatggcaatcgagttgagtacttggatagacttatacctcaggctctcaaaattagagagatgtgtaattgtccaccactgtcttaatccagaccctcgattactattcaaacttcaggcacgaaggcatttttcttggaaggaatcagaggaaaggaagacctaaattattcacggaagaaacaggaaaatgggtgactctttcctatttcaaaaacagggaggnaatttaccttnaacatacatagttgtt

SEQ ID NO: 48542 - DNA, 811 bp, Homo sapiens
cgcccagtggctgcgctgggacaagaattccttaactttggaggcagtgaaacgactaatagcagaaggtaataaagaagaactacgaaaatgttttggggcccgaatggagtttgggacagctggcctccgagctgctatgggacctggaatttctcgtatgaatgacttgaccatcatccagactacacagggattttgcagatacctggaaaaacaattcagtgacttaaagcagcaaaggcatcgtgatcagttttgacgcccgagctcatccatccagtgggggtagcagcagaaggtttgcccgacttgctgcaaccacatttatcagtcaggggattcctgtgtacctcttttctgatataacgccaaccccctttgtgcccttcacagtatcacatttgaaactttgtgctggaatcatgataactgcatctcacaatccaaagcaggataatggttataaggtctattgggataatggagctcagatcatttctcctcacgataaagggatttctcaagctattgaagaaaatctagaaccgtggcctcaagcttgggacgattctttaattgatagcagtccacttctccacaatccgagtgcttccatcaataatgactactttgaagaccttaaaaagtactgtttccacaggagcgtgaacagggagacagaggtgaagttttgtgcacacctctgtccatggggtgggtcatagctttgtgcagtcagctttcaaggcttttgaccttgttcctcctgaggctgttcctgaacagaaagatccggatcctggagttt

SEQ ID NO: 48543 - DNA, 648 bp, Homo sapiens
ggggagagattttattttactgaaccagttctatagaaatttattttattaggaaatttgtctttggaacaaagtggcagctataaaattatttttgttaagcctcagaaatatgaggaagcctgtaaaactctagtggggagatattaacttggagacctaatgctctgtaaatagtcatttaaactgttggttttagtggttttgtttctaaaatgttttcttttaccgtgatgcaccagtatgagatggtgctgacactttctatgaagtggttatgagcaggtttaataaatcctctatacaagtgtttgaatcaattttaaaacataaaaagtggaaatttccttttttgtagacagtaggaacaaggaattatatgcatttttactaagtagtaattttacactgaattgtaaatgtttttacagtgagttttattaatagaatgcttcaccttaaattggaaaacaataatagtcttggactaagtctttgtactaaagcatttgctataattatttttaaaaaaacaaacagatgaaaacctcagagaaggcatgtggattataagatttgtctagtaaaaattgtaattgaatatgtttaaatatttaatttctcattctggggggtttttattttttt

SEQ ID NO: 48544 - DNA, 2117 bp, Homo sapiens
tttttttttttaggttttagggacctacataggtcaataaccagccaccctagaactattttattttagaaaagggtttggtccatttttataaggcacaggtaaagaaaacagaagtgtgacaacatcttttaggttttccaaacagctttcaatgataaagttcaataaataaagtacagcactttaattgcagggaaaaaaaaatgccagaatttagaggtaaaacagtacaggggccaagaccaaaaatttttatttggaacattcagaggctagaaagccactgtcccgttctccagagcctctgagaagttaactgagaaccaattaaagaagggcatctgttcctcctcatcctaccatcacctcagtcagtctgtgacctggtgacagtgactcctctcctcacatccagtcttccctggttggagctcctcaggcccggcaggcagcttacagcttctctggctttgtgattgcttgcccaagaacatacccaaggagaccctgtggtgtaggggtggggctgaagcgcagcaacctgacagagctctcctgggaaaatgcctttccaagtagcctctcagagtatgcaaagctctctcctaacaccctagtgtgctctatgaattgatgactcctcttttggagattctgaaggctgaaatcaggtccatatattttcccccttaaaggggattactgaaaggcaaaggcaacacaatttctgccctggttttcccaggtaggacttcatcttactgcagaatagtaagaagcagcagcccttggcagaaaccaagcagggcaacagatttcacccgttcccagtcctctcttggtcaggacttcaggcccatcttggccatcatctcttcatacaccgtccacgccattgcctgccattagagttcctgcggagggctcgggggatgccaccttggaagaagcccacgtagtcccatagtctttgaaaataagtgtcaactgcttggccaatccattgaaacttcagtggataaagctgcatatgagttttgataacatccgcaggttgagttaccagtgaggccagaataccagcaaatatcccacagctgaaatttgtaataggaataagggttgcatccacctggtcatgaggcactatatttttggtctggttgtaaaacatcaggtagattcctgagaagggcgcatctcgaaggagagttgctgtcaggccactgaagaggccccggtgcccctcactgtgatagatgctcctcagggcagcgtagatactctcatagccatatttcccactctcatagcgcgtcttgattacagtgataggtgacatacagacccctgcaacagagcgagagcccacccccagcatgacttgacttccagggcggtttgggggattggccttcgccaagaaatactgcttcaaagagtagagagtgcccaaagtagattccaacgccagggacacatctcacaatggaaggggacatccctttccaaaggcccaaaagactctccgtgcgaaccaccttcaagagtacagccaacatcccaacacgtctagacccatgatctgagggctggagggtttgtaggcgtgttttaaggagatccagaggttggaaaaggagggtagagcaggtcccactgatggagccacacaggaaagccttgatcaccggatgtaacataagcgtttccaccgttctccgacatcttggggttgcagcagcgacggacgtgagttctgaatcattggagatgaggccccgcgagtcctctgggcccagggtgccgtcgagcgggcgctttggcccagccctggaggccttgaagaaggctagggggtggcgctagccaggcgacgcgctttaagccgcgggctctctgacgtctgcgcctataagcacgcagccgccggggttcggatcctgctagtccaggggctgcgggcgcggaacaatcttgctgcgggaattcagcgccgctcttcacccgcgccgcagactccgcggctctgctctcctgcccatcctgccctgctgcaggcttcagcaccgtaggagatgaggttctgtgtatcccggggtggaggaagcgcc

SEQ ID NO: 48545 - DNA, 482 bp, Homo sapiens
aaaatgggggttgcattagaccatacccttggcctgtgtttaggcaaatagggatgaaagtggggccaagggctgaagagctgggtccgctgccgtcgttgcccttctttcttgccaggtgagtgacttgcgcaatcaggtctacctggaggatggactggaccccttcccaggcgagggccgtgtggtgggcaggcagcggatgcacaaggccttggacagggtggaggagcacccaggctccaggatgactgctgagaaatttctgaacaggctccccaagtttgtgatccggcaaggcgaggtgattgacatccggggccccatcagggacaccttgcagaactgctgcccattgcctgcccggattccaggagattgtggtggagacgcccaccttggccgctgagcgagagaggagccaggagttcacccaacacgccggcacccccgctctccatgctgcgcatcaagtctgagaa

SEQ ID NO: 48546 - DNA, 1321 bp, Homo sapiens
  misc_feature (1)...(1321): n = a,t,c or g
ggaattagtgactctaagtgaaggtcactgacacagagaagcagtatgtgtctggggcttccaggacctgcaggcccactagcgtgcacttaccagaatggcatacacaggacctgatcatgaggaagaccaggtttccagtgtaaactactcttgttcccaccacctctggagcactcagggagccccatacagtacttacaatgtctttaatggacttgattctgtttaattttttgttttatattaggcacactgtattaattttccaaaatgttataccacactatgttcttggtcctgacctattgctctggaggaaagagttgtataagaacgtggctcatgtgaacttttgctagcttcatttgaggacctgagaatcatggggaaaggggaggtaatgttttcattgaaatcatcacagtgatttttattccctgggaacacagcgtgtacctaaaaatacatgagaaaatagcatgtatatgaaagctattctcaaaagtcacctgagctcaccatcttcatagccaaccctaccagttataaagatggcagctctatcacttgattaagtgggaggtggtcaaatattttggtgcctcattttcttcatctgtgagatgggaactgttatgcctggcttactaagagtcttgtgagagactgagaagttgattttgttcatatccaatctgtaaatgcgaagtcaggggaagtaatgtccctgaaataaacgggttcatgccatctagggacaataaatggttttcttgttgtaacttctggttaatatcagtaccttgatgtcatcaccgtgatgacaaagagaagagttattgttgatcttcttggttttggtctgtctcttttcttaggataaagaaaaacttccaaactagaaaaacaggccctggttcccttagtttgcacttgaacccaatatgttgccttgtacatacttggtccctgtcacattgactgcttgggaggcttccagggagaagtatgagaccctgaggggtgagaatgggcagctagcaagaacatggaaattctgcttggcactacagtcataaatagaaaacactgtgtgtgctcaggggagcaggggatgccactgaagaaactcaagggaatgtgtatttgaaggaaatgcaaaaactaagtatttaggcaaaatgaaattatgcctttgatgactaaaagggcactaggaaaggttgtgtcttactaactttcagcccttattcaggaacagatgcctaggaagggagccntttttgtggacactttcatagtggatttgggattcagt

SEQ ID NO: 48547 - DNA, 2811 bp, Homo sapiens
  misc_feature (1)...(2811): n = a,t,c or g
gcgaaactacccacgcaagaacatggttgaatcacatttgcttgacttagggcaaagtacgaaagagagacaaaagggttctcttggaaacaagaagagttactccagatgtggcctgaataattgccatgttaagttaatgcaaaagatcagaacagggctacatttgcacaggcagtttctttccgggccgtagttttcactgatgatcacctttcacagcattttccccaaccagcatttcacttagtcttctctatacccagcacctcccccggcacccccggnaaagcccactatcacttccgacttccaacgtggcatccgtgagatctgtccacattaggcgaagcaggagaacactgagagcagcaggatgggtttggaaagagcatgcctctggaaacacagcttcctgggaattcacatgaggccagtcctacagagagcaagatgcaccccaggatttcttcattttctaatagatgtgggagtgctccattttccccgacagcgaatttcccctgagaaacgatactagaccctgggtttgcccaccttgtaactcttccttatctcctccttttcatccctaattcatcctccctctggcatggaattgacgcccgtgcagtacatttgccaagtggcaccttctttcaatttatgttttattttgctatggtggtgattctttatttgctggttgtcttttctcacacatctttctctctgtctctctctttcctgctctttgtttttctgcccagaaaaacctgacttcgataccaaaaaagatgaaactacagaaactcaaatttaaaaaaaactttaaaagaaacaaaaaaatactcaacgattctttcagctttattaacattttccattgtttcttgcgacttgtgtctcgttctttgtagtattgatgatgaacatttgataatgaatgttcttgtatattcagataaagaaaaaaaaaaccaaaaaagcggtctgaatttaatagtgtttataataaaaattttaaaaatgaccctcatagcacgcaaaacaggatggggaatttcccctcttctttctgtgacaatgcgcatcattcctgcattagtttttaacaccagactacctacattcatcatttccctcatttttcttttattttcttgcatttgtgaattagttcaagaatgctagaaaagtgtcgagttgtgcacatccatttcttgtttcacaatgtttaaaagtgacagtaattcattttgtaaactaaaaaaaaaaaaaaaaaaaggttggaatagtgagcataataggtacaacctaacacattattatgtttattaactttgagacccagaaataaattcttttcttttcttgattcttgctcttaaaaatacaaaaaaaaaaatgttttgttttgtgttatttttggtttgtttattggggggctttttttaattgtcaggattatgatcttgctgtttttcttcaatatgtatacaaggtgatgtgaaaagatgacttgggcagaggagtaagaacaagtaggcttgttcttctactttgcttcagaattcagttaatgccaaaagcgaagatcaagcccatgttgatgtctcgttgctcacctgccatttccagagagtgtgaccctcatgcagtccctgagaaaaataaaatcagggacatacttctccttttagccttttaaaaattcaaaaacgtttagtccaagggaactttttatgctatcaggaaaggtttttgctgtttttgattctgattatcacagccaagtactttgttttatttctccctaattaataactacattccatgaggcctcttccaaccaaagaggccttttcttccaggagagtcccgcaggagatgctggtatgatgggcaccattggttaagtaaactacatgcaggaagaagtccttggggccagtctgccagctgagtcctggttttggatgaagagttaatgagatattggggccaggctcaatgctgtagttttaatgctaagaggttacgtttacttcacagagtacacctcttagtaacctctgacttaggcagctgcttaaagcaaattgcaaaactggcttgatttggaatgtttttattagaggaaaaaagaaagccatattatcctggaaaaaaattcattttaaataccatcattcaacaaattatgttcagaaagtggtcagaacttaagcaagaaaagtnaagaaagaatgcagaattgtggagcaatgctttaggaaatatttctacctgaacacttgtactcttgaagtcacaacaaaataatgatgagcttttcacatcacctttatggtttcaatccctagctcaaagcttcctggaatcttttattttttgtaaacttttttttcttttgttaaaataaataaaacattcaatgtttttctccttttctctcttattacttctttcctttggcattttcaatttgaaatgctttcctttggttgttggttttattctccccctacccctccccttttcttattattcagaatataaacctgcaaagctctgctctgttttggttttgaaagtttaagcttttctgcttctgtgagagcacaggcttctgtcccttttgattccaactgaacttttgtgttctctaatgatactaacacggtgtaggttttacagtctcctaatttgtactggtaatgcatattccaaataaatagtttcttttgttgcaaaaaaaaaaaaaaaaaatggtttctgctgcaagttatcccttatgagggtaattta

SEQ ID NO: 48548 - DNA, 1024 bp, Homo sapiens
gggatccaggcctccatccccacagaagtgaagctacagctgggaggtctcctcccaccccaaccgtcaccctgggtcccgactgcccacctcctcctcctccccctccccccaacaacaacaacaacaacaactccaagcacaccggccataagagtgcgtgtgtccccaacatgaccgaacgaagaagggacgagctctctgaagagatcaacaacttaagagagaaggtcatgaagcagtcggaggagaacaacaacctgcagagccaggtgcagaagctcacagaggagaacaccacccttcgagagcaagtggaacccacccctgaggatgaggatgatgacatcgagctccgcggtgctgcagcagcttgcttgcccaccccctccaatagaggaagagtgcccagaagacctcccagagaagttcgatggcaacccagacatgctggctcctttcatggcccagtgccagatcttcatggaaaagagcaccagggatttctcagttgatcgtgtccgtgtctgcttcgtgacaagcatgatgaccgggccgtgctgcccgttgggcctcagcaaagctggagcgctcccactacctgatgcacaactacccagctttcatgatggaaatgaagcatgtctttgaagaccctcagaggcgagaggttgccaaacgcaagatcagacgcctgcgccaaggcatggggtctgtcatcgactactccaatgctttccagatgattgcccaggacctggattggaacgagcctgcgctgattgaccagtaccacgagggcctcagcgaccacattcaggaggagctctcacacctcgaggtcgccaagtcgctgtctgctctgattgggcagtgcattcacattgagagaaggctggccagggctgctgcagctcgcaagccacgctcgccaccccgggcgctggtgttgcctcacattgcaagccaccaccaggtagatccaaccgagccggtgggaggtgcccgcatgagcctgacgcag

SEQ ID NO: 48549 - DNA, 1384 bp, Homo sapiens
ggggttcacgtaaagacagcgagatcctgagggccagccgggaaggaggcgtggatatggagctggctgctgccaagtccggggcccgcgccgctgcctagcgcgtcctggggactctgtggggacgcgccccgcgccgcggctcggggacccgtagagcccggcgctgcgcgcatggccctgctctcgcgccccgcgctcaccctcctgctcctcctcatggccgctgttgtcaggtgccaggagcaggcccagaccaccgactggagagccaccctgaagaccatccggaacggcgttcataagatagacacgtacctgaacgccggcttggacctcctgggaggcgaggacggtctctgccagtataaatgcagtgacggatctaagcctttcccacgttatggttataaaccctccccaccgaatggatgtggctctccactgtttggtgttcatcttaacattggtatcccttccctgacaaagtgttgcaaccaacacgacaggtgctatgaaacctgtggcaaaagcaagaatgactgtgatgaagaattccagtattgcctctccaagatctgccgagatgtacagaaaacactaggactaactcagcatgttcaggcatgtgaaacaacagtggagctcttgtttgacagtgttatacatttaggttgtaaaccatatctggacagccaacgagccgcatgcaggtgtcattatgaagaaaaaactgatctttaaaggagatgccgacagctagtgacagatgaagatggaagaacataacctttgacaaataactaatgtttttacaacataaaactgtcttatttttgtgaaaggattattttgagaccttaaaataatttatatcttgatgttaaaacctcaaagcaaaaaaagtgagggagatagtgaggggagggcacgcttgtcttctcaggtatcttccccagcattgctcccttacttagtatgccaaatgtcttgaccaatatcaaaaacaagtgcttgtttagcggagaattttgaaaagaggaatatataactcaattttcacaaccacatttaccaaaaaaagagatcaaatataaaattcatcataatgtctgttcaacattatcttatttggaaaatggggaaattatcacttacaagtatttgtttactatgaaattttaaatacacatttatgcctagaaggaacggactttttttttctattttaattacacataatatgtaattaaagtacaacataatatgttgtttctctgtagcccgttgagcatatgagtaagtcacatttctattaggactacttacaaggacaaggtttccatttttccagttgtaaaattggaaccatcagctgataacc

SEQ ID NO: 48550 - DNA, 563 bp, Homo sapiens
  misc_feature (1)...(563): n = a,t,c or g
gtgnnnnnnnttttgaannccctnnntttgaaacccctatgacatgattacgaatttaatacgactcactatagggaatttggccctcgaggccaagaattcggcacgagtggaggtgtctcggcaaccactcttcaccaatatcacagtggacattgggcggcctccgtcgtggccccctcggggctgacactaatggacagaggctctcggtgccgaagattgcctgccagaggactgaccacagcctggctggcagctgctctgtggaggacctccaggactgagactgggctctgttttccaagggtcttcactaggccccctagctacacctggaagtttcagaacccactttggggggcctcctgcctgggcaggctcttcaagtgtggccctctttggagtcaaccctccttcccgaccccctccccctagcccagccccagtcactgtcagggtcgggccagcccctgcactgctcgcagagtggcctgggctaggtcactccacctctctgtgcctcagtttcccccccttgagtcccctagggcctggaaggt

SEQ ID NO: 48551 - DNA, 424 bp, Homo sapiens
  misc_feature (1)...(424): n = a,t,c or g
gaagaaaagggattttggtcacattttgcttgtaaatgaaaattacatcctcattctttgtgtagtatctacacattgttataagccaaaaaacaaagtctgtctgggaatctttgtacatatttgtatgttgctataattgttatttttatcttcattattgtgcaaaatataaatgagcatttgtacattgactgtataagaaaccatgggcccaggtcctgtggctcatgcctataatcccaacactttgggaggctgaggcaggaggattgcttcagtccaggagttcaagactaacctgggcaacatagccctcatctctacaaaaaataaaaaaattagttgggtgtgatggcatgtgcctgtagtcccagctactcaggagactgacatgagaggatcacnnnnnnnctggaaaatt

SEQ ID NO: 48552 - DNA, 560 bp, Homo sapiens
  misc_feature (1)...(560): n = a,t,c or g
gnnnngnnnngttnnnntnttncctccnnaanccctttgttaaannccngctatgacatgattacgaatttaatacgactcactatagggaatttggccctcgaggccaagaattcggcacgagaatttttagaacactaggcttcttctttcatgtagttcctcataagcaggggccagaatatctcagccacctgcagtgacattgctggacccctgaaaaccattccataggagaatgggttccccaggctcacagtgtagagacattgagcccatcacaactgttttgactgctggcagtctaaaacagtccacccaccccatggcactgccgcgtgattcccgcggccattcagaagttcaagccgagatgctgacgttgctgagcaacgagatggtgagcatcagtgcaaatgcaccattcagcacatcagtcatatgcccagtgcagttacaagatgttgnttcggcaaagcattttgatggaatagggaactggcaatggatgangattttaaaaagggtcaacccggattggctttaaccgnctaaggggg

SEQ ID NO: 48553 - DNA, 1802 bp, Homo sapiens
ttttttttcttgtatttgcaggacaagtacaactgaaccaacaaatttatttagttagtgctgataaagacagcagccttgagagacaagcagtaattacctggtctacttaatgatgccctttgttatattttacaggcaaaaagaatgattcctcagcagtcattgtgaaattttgtgggccacaagtattgtgcacacatgatccttgatttagagtcaacctgatgtccattatagctgtggaaaggcagcaggcagttgtgtcgctcttcacaataaggaacacatcttgctttcagcatgtgagaggaacaaaagcattgatgtaaatgtgcctcaaagtgagaactgaaaacattaacataaaataaaaaagtcaaataagactaagttcttacaactacctataaaaattgaattattacaactaaagcagcaaatcaaaacatctgctgaggttttctggtagaacaacaacaaaattagttggtgcccatgttcagtaagtcactaccattgacaaaactaaatccaaaataggaaattgaaaagtgcataatgaaattaaatcttgtatcaagtatttgtggaaaactggaaatgtttctctggtatggttggtgaatgatgatttggaggaggtattaaagtttatccgatccagctttggcctggtgttccacgtagaaaaggatgtagccttcgccttcaccacagtctccttcggtcaagtcaagtgttacaagtactgtcaattgaagtggaaccagcggccttcgtgagttgcgtatgctgtgtaatgtccagaaccaaccccggaaccatggtgcaccaccacagcggcgaggtcatacaggcagctctccgggccactgttctcaggctctagtaagtagcatttcatgtctaggcctctcagtggaaattctacgtatgtatcaactttatttcttaaatatgctgtccaatgaaatcttttcaaatgtaagcatagcaccttgggtagtttttgaatccaaaacttttttgtggacttttgtttctttttgcatttatggcacatatataactctgtctcatcaagttcttctaagtcggtaaaactgcgaagacaatctcgtaacgaacaaactggtccattttcttgattcttagagcgcttacttctgaactgacttggaatatctaatgaaaggtctaggaatggatcaaactttctagattctgtcccacatatgaggcagttaacctcattttggagaatgcctccgaatatagccgtgaccaacagtagatgctccatttatgcaacacttgttacttgcagacagagtagaattctcctgcagaattgctgagcgggaaacaccgttgaaaccgccctgaagttccaagtgtaggtggtccaaaaggtagcgcatgaattcatgggcgtcctgctgttgatagcccctaaagtttggcataatcttccaaacaacataaaataaggactctgggctaaatgcagtctggctgccttgccataaagcacagagtgtctttctaaactcttctaccaaagacacattgttatccccttggctcctggtgtggtatgtccgccttcctgctgttttcccattccttaactccacggcgggcagttctttgaaataacagcaaaactgctcaatgttactgagtgactgaaggatggcattcatgaaacatgtgttccccaaattccgaagcctgtggcacaaatggcagtggtgcttccatttacttttaataacttgctgtttagtgttgagttt

SEQ ID NO: 48554 - DNA, 990 bp, Homo sapiens
  misc_feature (1)...(990): n = a,t,c or g
aaatggtttatatttttagctaaattttcaggagtgaaaagaaaaagaggaaggaagaaacccctctcaggcaatcatgtacagccacccgaaacaatgaaatgtaatacattcataagacaagtgaaagaagagcatggcagacacacaggtttgcgctaagtgttgtctgtaacaaatatggcctacaatacttataaaaatgtcaacccacctgtttcaaacttggtatcccgcctaaatctttattcttctaggcttgtggtaattaatgagtataaatctttatcgcaactgtccactctattgtaatcccagcatatcaagataacttaggttggaatggtccattgcattcagtattaagaaaagatagacttctattaataaagacacagacaggcttgcctgagctcagaatccagcaatgtgtcacccctcacactgtgacccctgtaactgtagttctctgttctttaaagaaatagacattccactaacaacacatacaaactgtgacaagaagtgacaggggctgttatgtcaaagacttaagggtaatttttaaaaatcctcttaattcannnnnnnnnnnnnnnnnnnnnnnnnnnnnnnnnnnnnnnnnnnnnnnnnnnnnnnnnnnnnnnnnnnnnnnnnnnnnnnnnnnnnnnnnnnnnnnnnnnnnnnnnnnnnnggtattgaaatttaaaaagttacagttttatatgtttaaaaaagcctcttaattcatatagttattgtaagcagagaaattttcatttttactttttgtaacattttattcattgtttcagctggccaaaaaaaatgaggtatgatgaaattataattaataaaaagggtgaaggtgctgtattattttactaagtatgtgcatccaccactaggcaaggtctgaagaaataagcataaagtaatttatgattagctgccctaagactatttccttctcaaatgtttgtcttattc

SEQ ID NO: 48555 - DNA, 864 bp, Homo sapiens
ttttttttttttttggtacaagtaaagtagtataatccaaatttattatatctaagaggctatcatgggctgtaagtagaatcaaaggttaagaacattttatgcacttattccacaaacatttactgagcatactaggtgctgggagtgtgacagtgagcaaaaaacacaagagtgtgcaaagagtgatcaaaatgtcaaccagtaagaacagggaagagctgctgaggccaagaggagacgactagttctaaagatgtgtggatttcacagcctggtctctggttttgagcctgattgcaatttgacatgactcttggcttaggaaatggtaatccctaataagacagggatgatattgatgtagaacttgacataagatctctattttcttgaaaagagcacaaggtttgttttaagtcctgaagtagctcaatctcttccttcaactgctgccacctttgttgagatgcatgaatttttttctctattgctgcttgaaaatttacaaatgtgtcttcgaacaatctacagtcaaaaagtgcactcccgatttcttcatagtctgattctgaagtagtctcatccatgagtttttctggaattgaatgaactttgtctaatatttcttcaagtaagtaattaagaagtcctgcttccttgcatttcttaagaaaaggaactttcacagttgcatctgtgtgtctgccatgctcttctttcacttgtcttatgaatgtattacatttcattgtttcgggtggctaggagagaaaatcaagattgcattacattgattttaatattgcataaaatgaaaaccagtcttttgctgtgcataactaaatgatatgcctacagtaa

SEQ ID NO: 48556 - DNA, 1133 bp, Homo sapiens
tttttttttttttttacttaaattaaatagcatgatttaatttagttggtgcttaaccctgaatcctcttaagttaaaaaaaaagttataattaactattaacgttaatgaatttaaaccttccagaaagcatgaatccaaaaggaaatgtccaacaggtgatatgaaccagatattttatggcctttcctgtttcagtctcaaactttctaaacatcaatggggaaaaaaaattctctagagtttttcagttttattcttctagagcacaattttccggcctgttactgagtacggtcttctaacaggtacacaattaactcataagtagacaacacaatggcagtatttggggatctgccggataaagctgggcaaacagtcctctataaaaggcaaggtagccttcttcccggaacaccaggcgcgccgtctggacaaaagacttgtacttggtgccctcttcccggagcctcgtccttatgacttcgtgtggataagcaatgcaggaggcacagcccttagaaagagcagcagctgccataagtccaaaaaaacttgtggaatttttctcagtcccatttgcagaagaggctaatggagcttctttcagatacttctttaaactttcataaatagcaaagcagattatagtttcggaaattccagcatacgaggcagttaatcctctatagaagccacgaatgccttcggtctggtaaacgtaacgagcacactggagtgtattcatctgcttagagcccctcactttctgttctagctgcattcgggttttaaccatccatataggattcattaaggaatttgtgataaaagctgcagagccagctgagaaaatatgcacaatattgctgttaggcacgaaaatgccattaaattgctctttggctttggagtaacatgcaaagtatacagccttcagaacctgaaagagtccaggtgtcactggatgttggtctcaccattccagctccactaatggtccccagatgaacctgaggatagtagactgtccggagagctaatcttgaagactgcaaccgtgtcttaatgacttctagtggacaagtgaaaatagaccaactgtgcctccacacccgtccggcgaagag

SEQ ID NO: 48557 - DNA, 1165 bp, Homo sapiens
cgccgtccgctccgtccgcccttagacctgttgcccagcatccctgcagttcgcggtacagtctctagtagagcgcgtgtatagaggcagagaggagtgaagtccacagttcctctcctccaagaggtagaaggggcgcggggaaacgacctggtatcggttttccgcttgctgatcaagagctcccgtttaatgccgcacgcaggccggcgccccgtcactgataaacgattggggctgggcctcggcctggagggcgttcgtcctctcagtgccctcagctcgtaaaggaggaaaccgaggcgtggggttgggcgagaacccaggggtcctcctgcacccccgccgccgtgtgtctcgtgtccagcgcctggctggaagcgcctcagccctggcgcgggtgtagtcgtgaacttgaacttctgacactgccccttccttccccgtccagcctgccgaccatgccccgcgggggtgccaatgtccaactaccttgaaaatgttcgcagccagtctcctggccatgtgcgcaggggcagaagtggtgcacaggtactaccgaccggacctgcaaaactggatcacaagtctttcggtcggagaactggaaggtctgggcagagtcgagcagaggagaccatgatgactgcctagacttgtgctcagtgctgtgttggggagaactgctacagacaatacctgaaattccaccaaagcgtggagaactcaaaacggagcttttgggactgaaagaaagaaaacacaaacctcaagtttctcaacaggaggaacttaaataactatgccaagaattctgtgaataatataagtcttaaatatgtatttcttaatttattgcatcaaactacttgtccttaagcacttagtctaatgctaactgcaagaggaggtgctcagtggatgtttagccgatacgttgaaatttaattacggtttgattgatatttcttgaaaaccgccaaagcacatatcatcaaaccatttcatgaatatggtttggaagatgtttagtcttgaatataacgcgaaatagaatatttgtaagtctactatatgggttgtctttatttcatataaattaagaaattatttaaaactatgaactagtttcattaattgaatttgctaagtggagtatttctca

SEQ ID NO: 48558 - DNA, 1149 bp, Homo sapiens
caaatctgtggattgtagtagggactcatggtgcctcttctgggtccccgtgggacaaattggcagccacttcctcctctctgaggtccataaaagccctgggctcagccagagcagggcagaggatggccagaggacaaagagggcagagaggtggtgggatgaccagctgcagagaggagtactctctgctgatagctggagacaatgggatggctggctgcagagaagagctaccttctccactgagagctgcagagacaacctgccagcagagagaagccaccctttccagggcctcctctccactgagaactgagcactggacagatgacctgcctacagagaggagctacccactgtgggcctcctctgagctgttctagcactaaataaagctcttcttcatcttgttcacccttcatttgtctgcatatctggacacaggacaagaactcgggcaccgtgggcaaagcgccacgagcaacaggtttccaggggaagaaaaccaccacaaagatcactcataacactaacataaccaaaacttcaaatctaaaaatgtaatgcatccaactgtacaaactgtcagaaactagacggccacttttcatctttaacattttgaaatcctcatactctcacaagaacaaaatgaaaccaaaaaggagaacacattcagtgattttaatgtgtaagaaagattacatgcttcatgggcagaaccaaaggttaaaccttgcattttgttcatggttattacacaagtaattacacaagtccagtgtataaacactacctgaacacattgtaagttcttctaataataataaatattatatgaaaaaagttaacaagcattaattcaataattctcaaacagatattcatcgaaatgaggtaggtctaatgtgtcatttgctaaagcatttaatgctgaggaggaaaaaaactcatcgaaaatatcagtcttcatcggactctccaagtttaatgttctaacgcaggcattatttgtcagagagtctggctgaacttcacatggatttttcttggtggggctacaataattatggtcctgtctcagatgtgtgttctgggaaacatcattgaattcacttggtactggtggtgggatatgactatctc

SEQ ID NO: 48559 - DNA, 904 bp, Homo sapiens
ccgggcttgtggtgacgaaagcagttgccatggagttgctctgagtaaccctgaggcagtgggacgccaagactggagaggaagcgactgcggtggagtatttccattttaaccggaaacaatccctgaacccacaggaatgaatgcctaatggtggagtttcagccatcagtgacaggctgaacccagactcccaggggcacctgcttgcacctttgaatgatggcctgaactatgaacaaacgggactatatgaacacttcggtacaggagccccctcttgactactccttcagaagcatccacgtcattcaagatctggtaaatgaaggagccaaggacaggactacgaccactgaagcgttcaaagtcggggaaatcactgacccagtccctgtggctgaataacaatgttctcaatgatctgagagacttcaaccaggtggcttcacagctgttggagcacccagagaacctggcctggatcgacctgtcctttaatgacctgacttccattgaccctgtcctaacaactttcttcaacctgagtgtcctctatcttcacggcaacagcatccagcgcctgggggaggtgaataagctggctgtccttcctcggctccgtagcctgacactccatgggaaccccatggaggaagagaaagggtataggcaatatgtgctgtgcaccctgtcccgtatcaccacgttcgacttcagtggggtcaccaaagcagaccgcaccacagctgaagtctggaaacgcatgaacatcaagcccaagaaggcctgggaccaagcagaatacactttgaggctcccacgaccctagtagtcctaaaggcctaagcatagacagcatggtttgacaataaataatttgagctgttgagcagatgaaaaa

SEQ ID NO: 48560 - DNA, 423 bp, Homo sapiens
cggaagctggagccacctgcggccctgaccctctattctgcaccctgtgagccaccgagactgaaccaaacccaggaagcggcgccaccaaccagcctcgcagaggcagaggccctggagcagtgacagcacaggagatctgctggctcgggggaaggggaggaaagaggaaaacaaagggagtgatcgagtgagcctcgccccgccctccctgcgccggcccatgatgtgtcaagtcagaggcgcggcaaggaccagagctccgcgcggcgaaatggttgcacttcccccagctggccctgaggcggaggctggggcagctgagctgcatgtccagacccgctctgaaactgcgctcctggcccttgaccgtcctctactacctcctgcccttcggcgccctcagaccgctcagccgggtgg

SEQ ID NO: 48561 - DNA, 786 bp, Homo sapiens
  misc_feature (1)...(786): n = a,t,c or g
tcttctttgaccagatacctttgttttaaaaaaagttattacaatataaatatttgaaagtcatactgagggctttaattataggcgattggagaacgggaatccattgaacctgatttacttctttttacatgattctactttatgtgtctctttctgtaccatctaaaccccctaaaaataatcttgaaacctagtgaaggaacttgagtcactagtgacagtcggttgttgggatagcttgtgaaggctggtggatccatttggttgtagctaatggcgtgaaagaattattaaagttttaaggtttttaataggagtttggaagaaaccttagaacctatgaagtctaatcttgacccaaatagctgtttcttctaaatatctcttgtcagatggtcatctggtttacattcaatttcttttatataaagattttcactgtgttgcccaggctggtccgtgaactactgggctcctcctgccttggcctcccaaaacttcgatagcnnnnnnnnnnnnnnnnnnnnnnnnnnnnnnnnnnnnnnnnnnnnnnnnnnnnnnnnnnnnnnnnttccgtttctagtgttaatacttatgtctgcattagaagaaattatagtgagcttgcctaccaaattgttgaagatctgagaaaggcaccaaggcaacaaaattggaatctcagaacatctcagcagtatgcaacagggatagaatataacaggatgacctttttttcttttttataaagaatatttttaaagttgtgaacaaggatgtgtc

SEQ ID NO: 48562 - DNA, 1203 bp, Homo sapiens
ttttactgaatgaatattttttgaatatacaaagacacggaccctgtgcccgcgcccccgccacacacagcgaaaacaggtttctacattgtaaacacaacctccgtgtagaccccaacccccaaaaaggcaagacaacggcgtagccaaacagattggtcattattgtacacatagctggaagggaggggtggtcccggggtaaggacagggctgcccaatatttggggggaggaagggactcttcttccaaatgggcttgtccgggaaccggggtcccggggagctgggcgcctggtccacatggaccccctccacctccccacatacgctgtggaagaagggcaggagtgagaaatgctgggggaggacgaccctttggtctgagatgtggaggtgatcataacagttcccgcccgctggctgttttgttgactttggagaggccttcccggaacccagagtccgtcattacttgctccatctgaacatcctcctcgtcctcctgggggcagctgcaggtacgggttgttccctgtgggctggaacttgtagcccgtgagcacgaagaaggccagggtggagccctccaccaagagctggtacagccactgccactgaaagggcacagccacctgcagcaggatggcgatgatgcgggtgaagtagacgtagcagatgacctgcaggggcgcacaaggcgtgggggcaggacatgacatagtaatgccggaacagcttcagcttggccaggttcactgccaccttcccgtctgtgccagacgcatccatggagatgccggatggaccagactacggggaacaggatggcaccacagcagatgaggtccaccaggaacaaaatctccttccacagcacgtagtcgctggcgccttctcgcgggactcgatgatgatgtagccacgttggccaggacctgcatggggatcacgatcccaaagaccttcttctccttatccgacaggacgtacttgatgaaggcccagcctgagccaatcagggcgatggtgatgaagaggagggcgcccttcagcaggtgtgcgatgtagtacatgacggcaaggccttcgatggggtggccctggctgttgatgaagtagtagttgatgctgtggaagaggagagagatgctcttggtgaagaacttttacattccagttgagctcccagcaacatttcaa

SEQ ID NO: 48563 - DNA, 6232 bp, Homo sapiens
ggtcgactttttttttttttatgttatgttcgtttattgttgtaacattttgttttgaacatcaaacactgcaccaaaatattagccattcatcttgcaacaattgctttactgtaactaagagtactgtactgatgatgtttacaattaactttggacaacttaaaacttattagtgacattgctgtctaataatcaaatacttcatcataggctgaacataattattaaaagagcaaagtttcccctccctttcttactttcaaacaaaaccaaaagagtagttttcatctggaaagagcacttacttcagggaaagactcaatttttaaccagttttattaaaccctggaagctctacaacacgggaaaacatcgaaattccccggaagtctgtttttgccaacttgtaaaaagtgaaagagctgacttccttgtttattctttaaagggttggcctgcacctgcagtgccaactgtggaagggctgtgtgcaggccccacagttgcaggggctgttccgggccagcgcttcccagtcatccaatctcctttgtccctcggttgttctgtgactttgagcagctttcattttaggacatcccatttttaagttttttctttttccagttgaaaactatgcagatgtttttagacagagcaaaacacaacacagtacccaaaaacggaggcagcctgcatgctccaggtctacacgagcacctcacagcctgacaaggggcagacagcaactcacacgggacgagcttcagcacacagacagcaaagcaaatacgagacttagactgaactgcaaagagggaaagggccatttcaccaatggagtaactgagagaataatgacttagagcccaatctgcctgccatctccctgagccgtcacccgtcactgaagatagcgcgagggtgatgcttcaactcaccatcctaagggtttgtgtacaaacacactcgagggcatctctttcacagaaagaacaaatgtcatttgtaccaaatggcaatggattttcagcacaaacttaatactttcctaacactacagcaatagtaatcatctactttcagcaagagggactcctttaaacaaggaaaaagactcacattaattagcctatgtacccactggatcaatctgcagcaacaaagtctagtgctagcagacacagggacagagggaccagctaccctcaacacagggccaggagagccgggtcctagactgaaccctctaagaaggcccatgtgtccaaagagaagagctgtcaagaaaaagaaactagtcaaaaactctttaaaggacaacctaaaaaggattaaagatgtatattaagatttttcagtaccatacatatgcaaagaagtcctactataagcctcagttaaacacacaaagctctcattcttcctctaaatagaaggtagtcaagaggacacacagatggcatctatgaaataaggtggctgcatggctgctgtactagaattcacaaactgggaagaacttcatataaacagaacccaggatccctaacctactgtagataaataaactcattaaacaattagtccttatcaactatttaagctgggggaagctttgcatgggagaaggctcatgtggtcccttctctgggaacatgagccttcctaggttttgccactgagaactgtgtttaggggatttcaacattgtctctgcatccgacaagcactaggaaaatggctgaaatcagtcagggactttcaactctccaatctggaaaaataaccacccctatttctctatctctagatcagcattattttaggtgaagcaaactaaaacatgtagaggttccactacaacggcaggggcatgaagagttggccacgagaccaccccgagcgccaagcctgtatctgcagatccctctctgctcaggaaccaccacgtcctgtgttctcgccaatggagaccaagacctggggttggttctgggctcctgacagttctcttgatgttaagagtgcagctctgtcaacactcagcataccaaaagctctggagcagcttatggcacacctttccctggtgccatctcttcagacacgatgtgagctcattacaaccgcatcagtaaatggagctaccatgtatattttagtgaaaatacataggcacccgtgtccccatggggtcctccacagggctaggctggggacactgctcggggggcagtctggtccataggagctcccaagacccctctttgacgctgcttccacgggcccgattacagggtgtgatcccaaaagccaaagtcacacactgctggccagtgcctttaagcaagcttcactgtgcttccctgacaaatctgaatcacagaattttagaaatcctgtcccaaggcaagatgctttccaaaggcccacaccaggcagcaagcagagggattcagcgctcttcccaggaccccactcaaccgcctatctgcatttcggaggcctccctaaaagcagagttgttgggggcggggcggggtttggtctgttttaagacccaccttcccacttttattacagacatcaaatatatacttgtgagacctgttcttctggtgaggactaagaaattaagggctcgtggagttggcacagatgagaggaggatgctctgtggggatctttccccaaagagggccaggtttatgggactgggctcagtggctctggtgcatgggccctgcaggggcgggggtcctgcccaacttggcccactggagcagctgaccccttcagtgtagcaggaaatgaggcgaccagagaagaaacgtgcacaggcagcttcagccagcatcactgactgggcccgcagcagttcagggaccctgacatctgaagacagccctggttacagaagccacctcaactgcccagtggaaactggaacacttcactgtgtgcagtgttttggtccactcttttttagctgcttttttcttcctttaaaatgatgcaatggaaggaggccccagctcacagcaggaaacatgtgtgcgacccacaaaggagggatcccaggcctccagccccaggcccagttcctcccttctccttccaggagctgagctgcagacctgccgagcctgagcagctggcctgggaaggcaaaggaggatggcgggaccagctccagaagcacccgtccccgctggggaaggctggtatctgaggtcagcagaagagccagctgccttcccttgctgtggggagggggaccaagccctgcccacccactgaggtgccacctcaagacaggtcatccaggtccacttcagggatcgggtctcgccagtagcagaaggagctgaactccgggcagggaaaagcggaattctgctccttactgagaagggggaacacatgctccacgagctcactcagcctgtgatacgatgacttgtttcctttggttctttcttgtattaattcacccttggggttcacggtgaatattctacagtctggaactccaacttgtgtgtaggcatagacatcatttggacggtttccaaaggcagcatagaagggctgcttagacggggcaaacagattcttgatatcatttagacactcaattttgaacttctctggtttcttttctatcacttctctgtggaaggcggagaacaagctgctgggggacagcatcagggggccccggggcaagattgtgcccttgtcattgacccagtgcaggtagccacgggtcatgtcggccatgccgatggcacgagccgagcagtacagaaacttgtagccattctcattgatggaatggtagagctttgctataccctggtgggtccagtctttgcccagctgtgggagaatctgtcccaaagcatccgacttggttattgtcccatcaatatcagaaatgatgatcttgtcattccagttccacaggtaaatggtccctgcacagcgacaggtgccttgatactgggttgtaatactaaacacaacatcatttgggccatcgtggagcttcagttttgcgatctggtctgaggagaggcggagagacttcttatatgaagttgtgctgccgtggctcaggggctctgtggggatggggtccactgtgatggattcttcgagctcctgtgatccctcgtcactcgaggagtcattctcggccggcctggcaccggccggctccttggagctggatggcaggtcactggctggcggtgcctcagattttccctccttggattctggcagctgtttggtcatgctttctctctttcgccaaaaccaccagcgaccagatttctttggcatcttgtctttcacccaggactcaactgtggccttaggcaagctcttctggaatacttgcaagctaaggatcatgggagctgccaaagcccagttatagtaacgattatatatccttattacaaggttaggattgtctataagtccagggttttctgcaaattcgtgataagtaatgatatgctccatgaatttttcttttgaaatttctccattttcactgaggcccccgcaaagggagagggtaacgtcaggcaagtccatggcagaatctgagaggcactcggtgccgctatctgcagctgcgcttcccacggactgtggggactgggagccagagagtgtgtcagactcgggccactgcctggaaccgggctccgattcacttttagggaaataaagagctgcaacttcaggttctagaccctttaagtcatcaaggtaaatatcatcaggtccctggtgttggcttcttttgtgaacacctttcttctttgacggcgagtctactttagctgccggtttggattctgagggcgcctccgctaaggctgcgttgggaaggtggtcagcatctaacatagatgaaatctgagtactctcaagaggaggttcgagaagctctgccacagatgttgggtcgctcatctgtgtacccagggctctgggtttgggcttcactatggtacagacagtgtcttccatggaagcatccttctcaacttcactgatgaggttgtcctcactgggaattacccgaaaatgagtattttctgatggtgtaattgtagctgtcctaggatgatggtcagatcgttctcttttgctgaccttggtggactctgggaatccgccccacgtccactccatgtgagactctgatctgagcaggctctccgcaggtttcacctccagctctgaatcactcttaggacacgctgtctggggataggtggtctctaaaggggaccaatctccatcagataaggggtaatgatccccagaatggaagagcaaaggctctttacattcttcttctttcaaggaagcatttgaagatcctcgtgctgcctgggcccccttgtcatcatcggagctcacgcctacatcacatgtgtcttctgcagcagcagatgcggcctgctcttccttcttactgtcctgtttgtatttctttctccttcgttttttctttttcacagaacttggagtaaaaattgtctctgtttccaagacgtgtgagatgtctgaactctgagatggtgtttcatctccacccgatttcaccaaaggggtgtcaatatctttaaagaactgatcttcagtaggaattggtgaggtggcaaggtaagcaggaagcttttcatattcttcttcagtctcctcaacaaagaaagcttctccgttatcacccaacttcatgtgaagatccactgcactgccgttgatttctatatcaatcactttctctttggatctcaggactcccagctttcccaaaccgaacgtgaaaaggtgaacactgatagctgccatcctgctgctgtacccacgggatggacatcaatgcacccagagagggtggcctggggttaatgcccttgtagagttccttcacagtgacaatcacctgccccagccagctgtcccacataattcatggtttgagacaagatacccaggaggggacttgtcatggtaaacatcttgagttttacttaatgagcctttacaaaccacctcatcttccttgtcatcttctaagtaaaacatcttgaaatttaactagcatgtcttttttcagagatgaaggtatataatcaaaacagaaagctgctctcttgacaaactgagtacaaactgcttgcagacacagttc

SEQ ID NO: 48564 - DNA, 1807 bp, Homo sapiens
ttttttttttaatggtcagcaatgtctttttaatacagatgtggtacagaatgtttaattacagcagggcagtgattccagttaaataaaattaaaaacctttattttcccaaatataaaattactaaattaatgtcttaaaagaaaatataacatggtgacagctttaaagtacaccaccattcaccacaggatttatgatttaccaattacatactccaccattttggcaaaaggatgaaattcttaaaactgtttataaacctaatatagtaaagactgtatacatctccatattgcacatttttatgtacaagaataaaacattaaagtgtatttgcatatactggaacagcacaaatttatcacaattaaacttaatgcataagcccatgtgagtattaaaaatgtagaaatgtaatacatatatgtacagaatgccaggactgtattaacaatgatatgtacataacaatatactgtactactttgtacttttcagcatagttgcggttattaatataggcctttggttctaaactgcttgactagttttaagctcacataattccttaagctttcatattttcttaaatgcaaggaaatgaatataaaagcactaaatctccctggttcactggtacaaaaattacaatggtcagttcccttaggtcatcaaaaactagtcacaaaaatagttcttgtattcaacctgaatgtgccacaggaaaaaaaaaatattttcaagattttccagctcagcctcgaggcaaaaggtcccccaggcatcaatgtcagtgcagccctccctgccatgtagatcccagaaccttttttttctgtaggccatctattctaacactactctgcaaggaagaataaaatctaagtccagctcaagagtgtctaccacacctttgttaagacacaatgaaaactttgaatattgccagtgagatttaaaaaaatatgtgcaccttcttacaactcctatagaaagtctgttaagaaataacgttgttctttatttcctttctctccccttccccttggtcctccctgtgctcggtctccccagtgattggctttggaaagcatcctgagtttgcaaatgacaaagcaagtccccacacacgggccatgagatgtaatcacacgaccgaagacgagctggtcatcccgtgaaccattgtgcttgttggagtcccactgatggcgttgaagatgtgaagggaattcggtaagacgctcgtcttctcctccagggggcagatctgctcatgcatgatttcagaaagctccttcgccatttccctgtagttggctttcatttcttcctgatactcgagctggtcttctttaatcagacgttcgtttaccgctaaggcttgaccgcaagcttccacaaattgcctgaaaacttccttaagcagcttcactttattgtcaggatatcgctttgtgtttgtatcatctaagaaagctcgcgcatatgctagtgggccagcattgacctgaacactcacgctgccctggagtttgagctgcagtttgatcatgtccacctcggccgaggagcacagctgccggagctccgccaccttcttactcatctcgtcaatggccacctcgatggggttcaggtcagtgtggtgctggtacatgacagggatgcgcttcttcacataagggaagcagtgtatggctgtcaggatggtgcgccgtttgcactgctcttccaccccgccctgcctcttcccggtctgcgtaaatggcatctcaaacatgaagcggcggatgttgtggc

SEQ ID NO: 48565 - DNA, 499 bp, Homo sapiens
  misc_feature (1)...(499): n = a,t,c or g
ttggnngcanctnctatgacatgattacgaatttaatacgactcactatagggaatttggccctcgaggccaanaattcggcacgaggtgcagggagtgaaacctcagaaggctgctgcttctacttcctcagggagtcaccacagcagccataaaaagcgaaagaataaaaaccggcacaggattgatctgaagttaaacaaaaaaccacgagctgactattagaagacacattagtgcagaagcttccaggctgtagagccctgcttcccttctctgacctcacaaagataaacatccttcacctgagttcgtggccatccacctctgctctcccagacccagtgcctgtgactttgagtagtttgttctaaatgtggtgacaaacaagtcatttctgtaagacattgggtcttactttatgtcatttttagtaacagaactgcaggangatgaagacaatgttgtaatcccagcaagttgctaactgtgcgttctt

SEQ ID NO: 48566 - DNA, 435 bp, Homo sapiens
  misc_feature (1)...(435): n = a,t,c or g
gaactggaagtatacttatgatatatctacaagttgctacttcaaaagcaaccttcctacttttccaaataatttataggagtgtgataagctggaaaatggtccaccaaaagatatctacatcttacactgtgaaacctataaatgttttatgatttgggggaaaaacaggtctttgcaggtgtgattaagttgagaatcttgagatgaggggattatccttcatcatcaaggtgggccctaaatgccatcacaaatgttgagagagggagggggcaatctgacacaaaaagaagacaacacaaccatcgcaggagagattgaggtaatgtggccacaagtcaagtaatgctcgtgccgaattcttggcctcgagggccaaattccctatagtgagtcgtattaaattngngatcncaaatannggtnttcaaa

SEQ ID NO: 48567 - DNA, 2659 bp, Homo sapiens
caaccgtgaacacatcaacaccacgacgactaccattacttgctattggccctcggatacatttaggagaaagagacaggcactcttttttttcttaaatgatatacatataaacagctatttttatcctattataataagtcttttgtctttatctagtactatgcggaaagggtttgcatcatagatttttcccagccttataatataccataagctcctacttccctgcccctccctaatcagtattctttcaagagttctttggtgaagccatctatctgaaactaaaatgaaccaaacccatatttcactggtggttggagaaaaccatggccaaaacgattgtggcaggtctcaatcttgggagtttttaagaaggaatgtgccagaggccgattcccaagaacagagttttcttttgttttgcagaggcattcaatgtgtctagtgcttgctggccacagcagttactaccacagagccttctgggaggggccgttgtgttgaaggaggctcctgcctgagggacagcatcaggcagtgggctctgtagagtgagaaccaggtggaggccttctgtgcccagctcagagttctgcaccacgccaggactgcccaggccaagggctactgacgcaagttccactcattccactctgtggggggcgccttgggcctctcctggaagggctcttggagaaggaattggagttacgtacaagtgacctaaatgggaagcttttctagatgagattggattaaattccatgtgatttctctttccctttaatccaggttggggacttcgtttctttctggtggatcacagcttgcccagatgttgcaatttgatttttatgtttctgtagagaagtatttttcttttcatcttcaggattttttttgccaccaaaagaaaacattgggaactctgtgtttcccctttgaatgtgacttcccagtgtttgacagttaagtccttagtgtcgtagggcccagcccaccaatactatatcaaacactgttatggcacataatgcaggcactgtggatctaatttaaataatacttttttattatttatactactatatataatatacatcaacacttttgctatataacctaagtgataaccctcttttagttacctgccaaactctggacttggtttatattgcagttaacacagttacaaagctgtaatggtgtctttttttcctttgtaacggaatgtgtaaatcaaagtatatacattgtgtggtgttcctgtttctggagtttcatgaggatttacacatggcattcagtgttctgtatagatctgcctacctttgtgaattcatctgttaacccctcttcctttgagagagcaccggcgatggtggttaactccttgtgttttctctctctcctactggttattcttgaattaagcacagactcgtcagctcggttgctttatcatgaataatgtgtgtgaccttgcagttcttccacagttcagcaaacaagtgctagcttcactgaccaaaaattaaggaaggaaaacacagtttttaaaacgatccatcttttaacagccgaaaccgatgtgtctatggtgctgcacccttgctgttgtacttctgaaatcagacgtgtgtgaacgatcatttctgacttaaccgtgagatgctcacgagtacccttcctgttgttttgttagcattgaaatcgagactatttatttggaatatatacaacagtgtttttccactgtatttcatttgcaaaagttgagaactgctttctctaccttttgcaaaataattgatattccatattggattctcaaagacttcgatatggtgaacctattaaacctagaaattgtattcatcctttcatgactgtggcctgagttccccagcccctctcctccttttttttagatgagatttagcacactctcagttatttaaacatgcaacatttcttgagtatgtatgttgaggccatctgagctcatagctgattcagtaaccagtttcatgctgtgtcattcacactcactacttaatactgccatggtgaaaatgtggaggaaaaatgtatccatgtgtgtctgggaagcatatacacttgtacattttttaatactctgattctgtaacatttctgagttttgttttgttttacagaaaaaaaaaaaaagtgataaagcaatcagaagaccaagaggtttactattgatgcttagggtcgtctgaccttggctggccaatagacctacacggccaaattaatttacgagagtaataatttttcaaaagccaattttttttctgtattttctgtatgaaactgccaatatcatgaatagaaagggagaaccataaaggagaaagaacgtgatgttctgttatgttcatgtaaacctaaagaaacagtgtggaggcaggcgcgatcagccgaactctagggacttggtgttgcttggaaggcatccatacctgcattttgcattcttcgtatgtaatcatattgccaaagacaaactatttcatcatttattgtaaataacacttttccccagacctaccataaagtttctgtgatgtattgtcttccagttgcaataaaaattactgagttgcatcaattgaagaaaaac

SEQ ID NO: 48568 - DNA, 507 bp, Homo sapiens
gctagattgaagaaggcctgtgaaggaatgataaacatctatcctactgtacagtatccattagaagtgctttgtttgcatttaattgaatcaggaaatcttactgatgaggggcagcagtattgttgtagattagtggaaatggattcaaaaagtggtccaggcctcattggcttaggcattaaagcattacaagacaaaaagtatgaagatgctgttaggaacctaacagaagggttaaaggaaagccctgtctgcacaagtggatggtatcatctggcagaagcccaagtcaaaatgcatagacctaaagaagctgttctttcatgcagtcaagagtatttttgatactttttgggttgacatataagggtgaccaaccctatttgtttttatcttaaaggacaaagatagtgatttttaaaaaccaaaatgcctatattttggtattttaaattgctaattttaatttccaataagtttaaataaaagtctgcatgcatgtgt

SEQ ID NO: 48569 - DNA, 3653 bp, Homo sapiens
aattccggttgaaaccatccctcagctcctagagggagattgttagatcatgaaactaattaccatccttttcctctgctccaggctactactaagtttaacccaggaatcacagtccgaggaaattgactgcaatgacaaggatttatttaaagctgtggatgctgctctgaagaaatataacagtcaaaaccaaagtaacaaccagtttgtattgtaccgcataactgaagccactaagacggttggctctgacacgttttattccttcaagtacgaaatcaaggagggggattgtcctgttcaaagtggcaaaacctggcaggactgtgagtacaaggatgctgcaaaagcagccactggagaatgcacggcaaccgtggggaagaggagcagtacgaaattctccgtggctacccagacctgccagattactccagccgagggccctgtggtgacagcccagtacgactgcctcggctgtgtgcatcctatatcaacggcagagcccagacctgggagcccattctgagacacggcattcagtactttaacaacaacactcaacattcctccctcttcatgcttaatgaagtaaaacgggcccaaagacaggtggtggctggattgaactttcgaattacctactcaattgtgcaaacgaattgttccaaagagaattttctgttcttaactccagactgcaagtccctttggaatggtgataccggtgaatgtacagataatgcatacatcgatattcagctacgaattgcttccttctcacagaactgtgacatttatccagggaaggattttgtacaaccacctaccaagatttgcgtgggctgccccagagatatacccaccaacagcccagagctggaggagacactgactcacaccatcacaaagcttaatgcagagaataacgcaactttctatttcaagattgacaatgtgaaaaaagcaagagtacaggtggtggctggcaagaaatattttattgacttcgtggccagggaaaccacatgttccaaggaaagtaatgaagagttgaccgaaagctgtgagaccaaaaaacttgggccaaagcctaggattgcaacgctgaagtttatgtggtaccctggggagaaaaaaatttaccctactgtcaactgtcaaccactgggaatgatctcactgatgaaaaggcctccaggtttttcacctttccgatcatcacgaataggggaaataaaagaagaaacaactgtaagtccaccccacacttccatggcacctgcacaagatgaagagcgggattcaggaaaagaacaagggcatactcgtagacatgactggggccatgaaaaacaaagaaaacataatcttggccatggccataaacatgaacgtgaccaagggcatgggcaccaaagaggacatggccttggccatggacacgaacaacagcatggtcttggtcatggacataagttcaaacttgatgatgatcttgaacaccaagggggccatgtccttgaccatggacataagcataagcatggtcatggccacggaaaacataaaaataaaggcaaaaagaatggaaagcacaatggttggaaaacagagcatttggcaagctcttctgaagacagtactacaccttctgcacagacacaagagaagacagaagggccaacacccatcccttccctagccaagccaggtgtaacagttaccttttctgactttcaggactctgatctcattgcaactatgatgcctcctatatcaccagctcccatacagagtgatgacgattggatccctgatatccagatagacccaaatggcctttcatttaacccaatatcagattttccagacacgacctccccaaaatgtcctggacgcccctggaagtcagttagtgaaattaatccaaccacacaaatgaaagaatcttattatttcgatctcactgatggcctttcttaatttaagtggctatgggtatttctttcatactttattaaagtatcaatatccctctctccattgtccagatgaaaatatcctgatataatgcaccaaaaaccatgcagtttcggaacagtctaaagagaagtggtgagactcccagtggagacacccatcagtctccacggactgcataaaattgtgtgccacaattctaactcttttctgaatcttcttcccaagttttctaaactagcacagtaaacagacaaactaatgtgccgtatggcctgctgcaattggcttctctgataacaaatatgtaccttacaacatatgtcatgaatttgcatacaaagattcttgtcattcttaataaactgtggcacttggtatttgaatgtgtgtgaaaataagggaagtcaagagattaaatgctgaacttattaatggaatagaaataataaggaggctgaggctggagaattgcttgaacccgggaggcggaggttgcagtgagccgagatcgtgccactgcgctccagcctgggcatcagagcaagattctgtctcagaaaaaaagaaaaaaaaagaaataataagaaaaacttccagatttcaaagtaacaagaaagaagacaggttggccaaagggaggaaaggggggacataaattaattgactttctattcccaaaatgggctagttatatcaaataaatactcccactgccctttctgagtgagagtgtttctcataagtcaaaaatttctgtttactcattaactactctttgcaacaggctttcatatagaagtattctgtttatttttgctgagcctagattgagtaattcttagtttacagaagctccgagcttaatgataaggatgaaaagcagagggagcaatatagaagcaggcttgctaataaaactttttaaataattgacaagggaatattatggaatgtgatgcaaagtttgttccgaaattttatgaggaaattactctctagtctcactttatagtctttttgctatgactttgaagaccattgatttttgagaagcagaataataggattgcctttcattgccctatagtgcaaagaaggtatatgctttataaccaatgttgtacttttgcctagaaaaacaagatatggctttaaatagctacaatcatctttggatgtatatgtcactgctgcttcaagttattggatgcatttgaacctctgagtttgtctttcattttaaatattgtctgttcttttaaataaacaaccacagatgtcaggaaaaagtcttaccttgtcaactggttgctccactttttaaaaatgattgaatgataacatcatattaactgcgttttactatacttacagagtcacctaaggtcctgcgagtacaagggtcgacccccaaaggcaggggcagagccagcatctgagagggaggtctcttgaccaatgggcagaatcttcactccaggcacatagccccaaccacctctgccagcaaccttgagaggaaggacaagaagaaagatgggatagaatttaaatagagaagaatgccattttatcactctgcctctgggtgaaataaagatcagtcttgatgttctaactctaattcacagtggtctcctttcagccctacccattctgcagca

SEQ ID NO: 48570 - DNA, 443 bp, Homo sapiens
gaaaaggcacaagtggcaaacaggcctttaaaatgcattgttgaggaaacctatatcgacttgaccacagaatctcccagttcatgtgaagtaaaaaaagatgagttaaaatcagagccaggatcaaattgtgataactcggagttgcctgggactttgcataattctcacaaaaagagaagaaacatttctgatctaaatcatcctcataaaaaacaaagaaaggaaacagacttaactaataaggaaaagaccaagaaacctacccaagattcttgtgagaatactgaagctcaccaaaagaaagccagtaagaagaaggcccctcctgtgactaaagatccctcatcattaaaggcaaccccagggattaaggattcatcagcagcacttgccacttctacaagtctttctgcaaaaaatgttattaaaaagaagggaga

SEQ ID NO: 48571 - DNA, 1159 bp, Homo sapiens
cagccctgtggtggcgacgacgatggaccaggagccagtgggcggtgtggaacgaggagaagccgtcgcagcctcgggagctgcggccgccgcggcattcggggaatctgcagggcagatgagtaacgaaagaggctttgaaaatgtagaactgggagtcataggaaaaaagaagaaagtcccaaggagagtcatccactttgttagtggtgaaacaatggaagaatatagcacagatgaagacgaagttgatggcctggagaagaaagatgttttgcctactgttgatccgacaaaacttacctggggtccctacttatggttttacatgcttcgggctgctacatcaactctctcagtgtgtgacttccttggagagaagattgcatctgttttgggtatcagcaccccaaagtaccaatatgccattgatgaatattatcggatgaagaaggaggaagaagaagaagaagaagaaaacaggatgtctgaagaagcagaaaaacaatatcaacagaataaattgcagactgattccattgttcagacagatcaaccagagacagtgatatccagctcatttgtgaatgtcaattttgaaatggagggagacagtgaagtaattatggaaagcaagcaaaatccagtctctgtcccaccataaaatgaaatgactatcaagcttcaaactcttgttttttttttttaatacaaaaactttcacattctttattcagtgggacttaatacaattatttatattttaaattattaaagtatctggaaagggaaaatgttttcttcatttttaggatctatctagcaaaagccagatctgaaattcagatatttgtactgtttttactgtgtatagaaattagtgctttggttttaaaatgatcttttaaaaaagttaaggacatcctagagccttaatagttaagaagagttaaattatcaagcctatttgtgcatttgctttttttgaaaaaggtaagttgctgattaagtctaattggaattgataattccatagtcttagattaaaatgaggatattttctcctagattttctcatgttatgccatgcatttatatatctaaccattaatttcacactaaggatgcttcaccatataataaaaggagcaagatggaa

SEQ ID NO: 48572 - DNA, 438 bp, Homo sapiens
  misc_feature (1)...(438): n = a,t,c or g
gtgcatgagagtgcacacgttgctatatggctctgagcctgctgagtcagggccaaccctctgatcaccctcctgtagctccaagaaggagggcagttattcaccctccacgccgttccttcctgggttcgggggcagctccccggagggctcaggtacccacctttcctgcaggtgtccaggctcctctgcctaccagtggggtggcgaccatcaccaaggtgtgaggggcggggggacctgcctgggggtgatcaggcaggtccanagcctctntnaatgacttcaccaataaaatttctaacttcctgttnnnnnnnnnnnnnnnnnnnnnnnnnnnnnnnnnnnnnnnnnnngtttttatttagggggnccgaangtttttttncctttaagtnagggttaattttggtttggaattgggccttngttttaaat

SEQ ID NO: 48573 - DNA, 1099 bp, Homo sapiens
  misc_feature (1)...(1099): n = a,t,c or g
aaaaagactgttcgtgatatttcatatgttttagctacaaacatttatctaagaaaacagctccttgaacacagtgagctggcttttcacacattgcagttgttagtgtttactgcccttgccattttaattatgaggctaaagatgtttttgacaccgcacatgtgtgttatggctccttgatatgctctcgacagctctttggctggctttttcgcagagttcgttttgagaaggttatctttggcattttaacagtgatgtcaatacaaggttatgcaaacctccgtaatcaatggagcataataggagaatttaataatttgcctcaggaagaacttttacagtggatcaaatacagtaccacatcagatgctgtctttgcaggtgccatgcctacaatggcaagcatcaagctgtctacacttcatcccattgtgaatcatccacattacgaagatgcagacttgagggctcggacaaaaatagtttattctacatatagtcgaaaatctgccaaagaagtaagagataaattgttggagttacatgtgaattattatgttttagaagaggcatggtgtgttgtgagaactaagtttatacttcaagatggacaagaagttctatcagctgctgagaaatgatgccagatggtaactcagatatacaagaaatactcaaatgcgctggaaatggcctggttgcagtatgcttgaaatctgggatgtggaagacccttccaatgcagctaaccctcccttatgtagcgtcctcctnnnnnnnnnnnnnnnnnnnnnnnnnnnnnnnnnnnnnnnnnnnnnnnnnnnnnnnnnnnnnnnnnnnnnnnnnnnnnnncttgattgggatccaaaatcatacaactatacactaaaatcagtgaatattaccttatgtaaattaaaaattaggaaatcaaaagaaaagcatacatataaaaaacagttttttctaagcatttctcatttgtagggtgtttgaattacgttgtatgttgtctcatttcacccccataacaaatctatgaaagaggtacttttatccccatgttaacgtgaataaacccaggtttggaaaa

SEQ ID NO: 48574 - DNA, 1014 bp, Homo sapiens
tttttttttcattttgaatgactttattgagaacattttgcaaattagattttacaatttaacattttacaattagaaattttatctgctattacataagctgcaaacttttcaaaaacactacagaaaatcttttatttctttggatttttctgttccatgttgagctcctgagatatattttttctttcagcttcattttcatcttccttggaagatgaagaatcacattcctgacatatccatccgtagcctgtctgtttaggagactttttcaaaggaggatccaaacagccaaaatggtagcagagtctgcattcatcacacctgacaagattttcattgtctccagttcccttgcaagttgcacattcagttcttaaatcttcagccttgggcttcttttgcaacacagactgtctttgtcttctctctctaggaactctttcctcatgtttttcttcctcaggaacgaagcttcgttttcgtcctctggttctcgtgtttcttatcggaatcttcttgggttctggtggcacatcctgtggaacaaatttcactggttccttaatctgcctccttgatcgtttggttccatctggtagggtttccatggccatatctgcttccatgtcactgctccctgcctggtcacattccgagcactgccaataactgtttttggtctttcttggcatccttgtaagaggaggatccagacatccaagatggtaatgtagtttacaggtatcacacaataaaagaagatgctgatcatggttcttcttacaaatcccacaactataaagtactgcaggaagagtagatgtcttttgtgtgcctccttcttttttacttggttttctctccttgggtgctcgcaaaattgccggtatattcaacttctgccctgtgattctgcctagtaaagcccatattccttgtccttcacttcgaagttttccattcaggttttgtagttcttctaaagattcacatagcttattatattct

SEQ ID NO: 48575 - DNA, 415 bp, Homo sapiens
gtgggagttccggatgtttagcgttaccatggatcctggaggtgcccgcgaacactgcttgtcgcctgggcaaccggagaggacgaagcaggacctaggtggcggcggtggtaccggctgcaatggtgtccaatcccgtgcatggcttgccctttcttccgggcacgtcctttaaggactctacgaaaacagccttccacagaagtcagacgctgagctacaggaacggctatgcaattgttcgacgtccaacagttgggataggcggagaccggctccagttcaaccagctgtcccaggctgagctggatgagttggccagtaaggcaccagtcttaacttatggccaacctaaacaagccccacctgcggattttattcctgcgcatgtggcctttgacaaaaaggtactgaa

SEQ ID NO: 48576 - DNA, 3004 bp, Homo sapiens
ctcattaggcctcagaaactgatcaatcctgtaaaaacctcccggaaccatcaagatcttcacagagaacttcttatgaattaaaaaaggggtctggctcctcagaacaaaccagaattgcagaaggtgatggaaaaaagaaaacgagaccaagtaataaagcagaaggaagaagaagcacagaagaagaaatctgacttggaaatagagctattaaaacggcagcagaagttggagcagcttgaacttgagaagcagaaattgcaagaagagcaagaaaatgcccccgagtttgtgaaggtgaaaggcaatctcaggagaacaggccaagaagtcgcccaagcccaggagtcctaggctgaggctgcaccaagacctcgtgtgtcaccccacagagctgtctgtgggtgccttctcaatctcagggcaaaagcccctggagaatattccagccagcagagaattttgacttgcagtaggatttggtttgattttcctacgatctgggtggatgccttgcctgtgacagttgcagttcctattcgccaaatgaagggcagtgccccgcacgtaagttggaatgatggacctgtgttcagagacttaacagaaccaacaagcaaaacaagtgagaacaggaaaaaggaagaggacactggaatcaattcttgagagtttgcactacttggtttttcttccattccaagtttcgtggggacccagagccttttttcttttaaaagctaaaaaacaagtgtttaattcctctttttgttatctgttagataattgagatcacctagaaatgcgtttaatctgttcactcactgtaaattttgaggacccagaattgtcttgtttaatttatactttcacccctgttgcagttaacaccagagaaggaacgtgaatgtcgagcacagccactacccttgttggcacttaatttagaaatagggtgagaagtttaaaagcccatcttgattttattttcattccttttggttctctgtgtaataatagcaggctacatagtgacattccagttccaagaaggtacatcctgtccattcattaattgctttgattactaggagggtttctgttcagttttgtttttaaatgtcttgctgatctagttctttcagatggaataaccttccagtcccttagagagtggaactagtccatataacccagcttcagtagcaaaagtagaagccgccacatcttttcatttctccaagaggagagtggggaagggttcccatgaccagctgggcagtcaggatttctctaggcattctaatgtgaaataagtgtagactgctgtcaaggaggcttcatcagaagatgtatagcatttgaatgtctaatgataatgcatatcattagaatccaagctttgaaaatttctgattaatgctcatgtatttctttatctttgtttttccttgtgaagaaagactttcaccactgtctgagtgatgatgctgttgataaggatgatgtcgatgactactatattgcatctctcaggaacagctgatgggaagggaggggctgctgagttcccttgttctagctagcagcacgctcctcagagagggggccgagttacagacagcagccgcattctcatgcaaaattaagttttaaactgctagtgtgggcatcggtaccttttgcctgggtgataccgaagaattgttgaggatttagtatgctccgtagagacagttcagccagtcatttctgcattggagagacttctcatactttctttgaagactcatagaaagctggatctagagcttttgaatccttaattagcacagtagaaattagctttctatgggaatgctttagtgttagcagttgacaattaggcccatattcaatctgaatgggaacaaaagtaaatgcaatgataatatactgctagttagagaaacatgttagttgattatacctgaaatggattatttatctcatcagcaagtattatttgaataaaatgagaaatgcttaagaaaaattgttgctctatagtaatttggtttcgaagaatggaatggtaactattttttcccatcgttcttttgagagaaggaagtgtgatgactgatgatcttgaaaagcccatttctgattgcacgttgactggaattctttctttgtgtctgtggactagcgatgctgtttgtaaaatgaagattcgggactggctcatatctttttatctaactagatgtcagatcttgaaatctgtattctcgaagcaattctgccacttgatcgtattcacaggggccctggtaggctcctttagaaggaccatttctgttcctagagcttaactagaattcattcttcactgaaaaaaaaaaaagttacttaagaaagcatttctttcctaatctcactcaaatctgcagaattatttgtaattagtaatacaaaatctggccaaaaggagacttgtaaatagcgtaaagtggtgtcttatgctaaacggtggaatgtataggcagagaagctctttgaagttgtcagatgagctgggctcacaagcctgattcaaacaggctgtcggtctcctctcaccccttaatactgtgcagcccaaactcctaggactcttgaacatctgagcagttttgtgctttgagccactttttgacaaaaatggctccatttttccacagcgtggttttcttaaaatagtttaatgttttatagtctcatagtagtagtgttgctttctaagctataacagtcgactttattcttctactctgaaaaatcttgacttgtttgagtgtatataatatatataaagggagccttaatggattggttttcataatttaatattttttgtatttgctcttgtataattgtttttaacggaaagtattaaagaattgagggtggaattcttagaaccaaagttattcttaataaaaatcaccacatgcttggacaatgaaaaaaaaaaaaa

SEQ ID NO: 48577 - DNA, 263 bp, Homo sapiens
ttataccagcttacttcggaagcatgtcccaccccatgctagatccagctgcattaaaagtaaaaattaatggcaaactataaattttaagatcatttgcttcacacataaacacagactagctgcatggtggtctcaagagatctcaagtcttgctgacatgcatatagggtacaacttattacaggttcataacatttgcttctcaattcacataaaagagcaaattgctgtggctttgctttttaatttttttttttttt

SEQ ID NO: 48578 - DNA, 1171 bp, Homo sapiens
ttttaccatagtaacagccaaaaacaaaaaaatacattttctgattagaaatctgaatcacagaatcaaagtgcataaattataaaatagtaactgtaaaaagaaatatcaatacttcaatcatccccattttaagactggtctagtattttaattatagagaaaatgagaccaatgagcatataaaactatttaaacagatatccccctccccttcaaaaatcccaagacacaaacgactgtgaagtatacattttatttaacattccattaataagccatatttacatatataaatgtatgaagtcttaatataaaatagaaaaattgcctggactgaaacaatcactccatatggagttactttacttattgaagaccttctgtttacataaaaatttacaataatttatataaattattttcttccaaactagatatttaataatccacactattctgatgactttacaaataggtgtacattaaaatcttcccaagaaattacagcatttttctgcgtaaaatttgctttggataggaagacagtttcttttctcgttccttccaaggacctgttcctgtcacttctgtagttttgtcttgggtttgctcttggactacgtcagctgggggctaggccaaggggggaaatcagccgaatttctatgggaggaggtgaccaagcacttcctttttcctgtgttttgcttgcttggtttggttttgatgtcctgaatcgtttcgcttttggctttcccagagtttctactgattgtgcatcatctttcagttcatcttcaagcttgttcttattggatgtgtttttttgtctgctccttaaagcaggaggtgagatgacaaactgagaagataaatccgaaactaattctttcagctgtgcaggaacctctatttttttagcttttgcctttccttggaacttctgacgctggagaaaataaaggctcattgtttggttcagaaaggtccggcaacaagatggccttgctagaccgagtcctgctgctgcgggatgatttagtgaaggaagctgtggcgagcaatctttcttcctgctcatttgtttctttatgtgtcatttcatctgtgcgttcttctgatactgagtgcaatgaacgtttttggctttgactttcctgtgccgaat

SEQ ID NO: 48579 - DNA, 1405 bp, Homo sapiens
  misc_feature (1)...(1405): n = a,t,c or g
gtatgttgctgcaaaacctacagaccccgatgggtctggaacatgtgtactgtatatctttagtaaggaatagaaaattggctctgtgtgtatacctattgcattgacctgaaagctgctttatccaatccttcagagaggtgacctacatgcatacttctaccttcagaggcatgcctccccagccacccactcccactcatcagcccttctccgtacttttctctgaaaggaatcttgtcttgttaaaccctaaagagagtgtccttaatagcaatcagcacttgtaagcttatatactggtgcatttggttttctgttgggtgaatgcggtgtgtgggcgtttgtggattctgaaagagaaagccgtgtgtcgtgtgccatgacatttctattgcacattctttgtactggcttctttaacagcgatgaacgttcttttccctcctgggttgttcatccacgacagtctctccctgtgctccttcatcacctttccctctctctttgatggctacagagtggtagggcctggtgcttagtcgatgaaggaatggtagccatctacagtgctgctggagatttccgccagagcgctggagaccttgcgctcagatcttctctggtgatgaagaggcgaggaatcaagtgactgatctggaagaaatatctcgcagcactgcagctaacatcacagaacttaagtgtgttttgtgtgtgtgcccacacgtagacaaatgtgtacggtgcacacacacagtgcatcattttttaagggcagattatatatatatatgagatgtattaattcagtggttaccatttgtttgcaggaaaaagaaatgtatgggtgaaaaaatttatggttgataaatccagccaaggagattaaaaggggtttggataaattctgggtataaatgctcagactaaaaaaaagaaatggcagttttgcacagtgctatggtcttgcactagtttttgtttcncatctgaaaaaaaaaaagtaaaataaaaggaagaaaatgtaccttttttatggaatgagtagactgtatgtttgaagatttagccacaacctctttgacatataatgacgcaacaaaaaggtgctgtttagtcctatggttcagtttatgcccctgacaagtttccattgtgttttgccgatcttctggctaatcgtggtatcctccatgttattagtaattctgtattccattttgttaacgcctggtagatgtaacctgctaggaggctaactttatacttatttaaaagctcttattttgtggtcattaaaatggcaatttatgtgcagcactttattgcagcaggaagcaggtgtgggttggttgtaaagctctttgctaatcttaaaaagtaatgggtgatttaaaaaaaa

SEQ ID NO: 48580 - DNA, 1153 bp, Homo sapiens
tttttttttttttttttcacaagactagatggagaattaatgaagaagaaatagaaatgaggcttatttaaggtacaaaattcttgtatttgtaataacctagatttatagatataaaacaagtcttttaaagacttccctaaaatactcaatataaaacaggagttacttatcctagatcatccttagttagggtaccacatgattctctgtgcaactagctggtggacatgaataaaagctgctgggcctataatgtactaaaacatttttctcccttcagcaagacaggtagggttgaaggctaaatgcatcagaggagtattttcttaggcattttgggacaatctttttgcagtaggttccataggttttccccagcgaaagttgactcagacccagagtaactctgacacaagttgccaagagggaaaaaatacttcatttgctagattaccccaaatgtgtagcttcatttaattaccaaggtaagaatcatccccaaccacttttcagctgagaacacttgcccagagaatgtctctggatgggaatagatgtggtaccagctaggccactggactacccgagttcagctgccaggaaatcagagccacctcaaatattgggcatgctctgattcagcagtggcagtgccctataactttcagatgattatctccatgtgctatgttaaccaaaataggcaaattatttacgaaaccatttttttctgtaaagcaaaataaatatatacaattcaagattcttttctcttctaaaaaggtacagatagtgtgagctgaacatcagtaggaaaattatttcagaatctggatgtataataaataaacattattgtatatcatgttttcaaagttctaagagaccgggaagccacaaaacatagagttagatgggtaaaaaatgattgtgaaaagtactgggaaatatgattgtatgaaatttgaaaaaaaaatttcacaatccctaaattgatctcaaatcttggagggacatgaagcattatagaaccatgtctctgttttgcaaccaaaaagttattccattttaagtatcctgtacatttctgtttgcttctgtaaacttgcaaaagaagtggtgagagattgctgatgtgtggggacttgac

SEQ ID NO: 48581 - DNA, 1267 bp, Homo sapiens
cagcaagtcaacatttgacatatagttatttattagttgatcaaagcatgaatatttcaactttagtgcatagtcttttttattcactgattttattttgctgtaacatttcagatattaattattttattctgttttacaggaggggttcaaaatgggactaactcttgaaggcacagtattttgtctcgacccgttagacagtaggtgctgacatcaagaacaagaaatcctgattcatgttaaatgtgtttgtatacacatgtcatttattattattactttaagataggtattattcatgtgtcaatgtttttgaatattttaatattttgaaaattttctcagttaaatttcctcaccttcactattgatctgtaatttttattttaaaaacagcttactgtaaagtagatcatacttttatgttcctttctgtttctactgtagatgaatttgtaattgaaagacatattatacaaatacctgccttgtgtctgagttctatttagttagcatcttgaaatttgtattcattttccagatggctagtttattaatgatttcccaaaagccataccttaaagataactttttaaattctggaagagacatgccaatgtcaaactaaacatgttctgtttttaaaccaacaaacatgttactattcattggacagatatcattttatgtataaatactgttcacatcactgggaaaatgtaaactttaaacataatgccacaaggtcactaatttctagcaggtaaaattataaggatataaattccaataataaaccaaatgtatttagagtatttattagtaaatgcaaggtgatgttagttatgatcagttatactctaaatatttaatttgttttataaaggtagtgaaaaaatgaaaatttgctatttattaaaaaacattaaatttcattccaaatgagataagtgatattactataacatctaagcatcatctgatttgatattccctaaaaaacatttggaatatatgctatctatagattcagtatctactacccatatttactttaccaaatatatttctcctcactgcataaggactactcttctcatattttcttctttgatgaagatatttttcaccaaagtttattttgtgatgccctcttggttttgatactttaaaatctgtggcacccgttctacatgaattatcaatatttggtaaattcaatctgtatttgttttgttaaagtcaaaaatctcattttccaaaa

SEQ ID NO: 48582 - DNA, 1850 bp, Homo sapiens
tttttttttttttttttttaactgaccaatttttataagtttagttaaagatgtgaccatcttacttcattacatctccattaagacagtttggtatttcagttacaggtgtatgactgggagttcaattcttttctgtgataagtacgaatgactcaagctaccattcaatattcactttacagatatatgaagcttgtctactcacgttcaaaggttttccttaattcgtcttttatctaaatcagtcaagtctcttctcataaatgaggaaatattaaatgagtgggcagctctcaagaaataaaaaagtgactagcagaaataatctggcaacttctgtgaataagatttttctcagtgtctaaaataacaaacaccatttatggaccaaagactaggtgccatgagttttagaaattggtccccactccactgttatgtgtaccattatcccagtggcagagatacacagaaagccaaggctcagaggcagtaagtcatgggtccgaggcctcttgctgatgacaaaactggaatctgaacccacgtcaggcttacatttacacatacatgtatacaaatgtacacatatacagcttagattccataaaatacagtaatctagtggtggaacaaattatttctaataaatgttataaaatataaacgcctctctgaatcctttagaaaattaattttgccatgaagtacaaaaaggaaagagatacaacttaagtatgaacaaagttataggatactacaaacagttggtaatatatactgtctttaaaaatcatttctccttatcgaggcattaagccatattgtttataatgtgaagagctattggcatcttattttcctacccataaccatgaccatcacttattcatcttttcatgcatccaggtgcatggaaaggcagtaagtacaatttttaagaaaatagcatcaaaagcagattttaaatctacctgtttttcttcgtttgttttctccaacagttaaggaaagtaatagtaatttctcattccaaaccaaagacaattatgctccttttgctaaggacacagctgtaagtctctacaagatcagggaagactacaatatttcagaaaaacactcccagtaaagtttatgcttgaatgggcagctggaaatgcatcgatgtacagggcctcttttcacggcctctaaaagtgcttgcatcatatgcccacactgtgtctatcccctcccccgtgacgtggtctggagtccaatgtgggaaagggaaccggcaagcaataactcgtgcatcatcctcaagttcacggttcaagtttcttctccaactgcagcatcatctgaggcacaccgaaaataacaacgttcgagtactgcgaaaaagtaaccttccacaaatctgaaatataaaatttggcagatccatgcacaccttctcgccaagcgcggtatctggaataccaaactagccatgggtttaattcataaccaactgctgtgaaaccctttcttcgcagccgcctatgacaatgcgtccgtccccactaccgatgtcccacaagggatcctcttcggcatcgcaacattttcacaacattttcaatctgcttcgtagttgcaggtacaaacggcaaacagacttttcgaagggctggcgttacaaacggcgtggctacagcgtacacagccaccagggtgccacccacaagcccagtaagtaagaacccccagttgcttttctgcaaactgttgacttcaaaacttgcaggtagaacatgtcttgactgactttcttctttaagtgtttctaggggtatacctcctcctccctccatcgcgag

SEQ ID NO: 48583 - DNA, 514 bp, Homo sapiens
ccctctcccctggttcatcaagtataataccacatacttgaactcctgcccacaggggacctcccatctcctggcccctctcataggatcactgggcctacctgcactgtggggccaagccctgtctttttcccaagccctcaagcacacgcatgaatgttcatcccgacttggtagggggcttttcacccttacaagatggcaaaagattcacattgcttttttaaaaatttgtttttctttttaaaaatcccaacccttggatagcagggaggtgctggaggggtagagtcaagaagagtgtgtgagagcagtaatttcccaagactgccctctgcgggactgtatttcagaaaacatactggtggggctacctctccattcacgtgtactgccctagcctctccccatcccccgctgatgcacttccatagatgcactgttccataacagcagtagaatgttgcagaaagtgctaggattcctccactccatcttcaaagaaaaagtcgct

SEQ ID NO: 48584 - DNA, 442 bp, Homo sapiens
  misc_feature (1)...(442): n = a,t,c or g
aanaccgcttntcatgccccgaatttaatacgactcctatagggaatttggccctcgaggccaagaattcggcacgaggcgttagttccgagcttgaagtcactaggacttctctcaancttgtgtgctgaggagactcagatgttggcctcagctcctaggctgaactcagcagatcggcccatgaaaacttctgtattgagacaaaggaagggatctgtcagaaagcaacactagttatcttgggcttggcagcaaggaagaggacaggtagaggagatcctgcaatctgaaaagcatactgaaaggtgacaaagaagctgaagatgggtggtggagagaggtataacattccagcccctcaatctagaaatgttagtaagaaccaacaacagcttaacagacagaagaccaaggaacagaattcccagatnaagattgt

SEQ ID NO: 48585 - DNA, 1076 bp, Homo sapiens
gccgcgtcgactttttttttttttttttttgcttcttttttataaaacttttattattctagcaataataatgtgtgttaattttaggaatatagaaaatacaaacaagcaaaaggagaaaaatcattcataatcccaccaccgagaggctgtactttctttcatccttcacaagttatgtccatatatgtaatatacaaatgtactttttacctttcaaaaatatgatattcacatattacttagcctttttccattttatatcttaccaagaacctcttttttacaaatgtgtaaagttcttttattaaaagacagagacttgtagattggttcaaaatacaataaacaatgagatgcagataacaagagatacatctaaaaccattaatagcaacaggttataagtagaaatatggacaaaggaatatcaggaaatgctaataaaaagcaagctatatggtattgttaatatcagataaaaatcaaggtaaactacattaaataggggtaaggatggtttcgattaaccttccaacgcatcactataagtttgtttctgactctccttatctcatctatttcatccacttctctaaacatatcttcattgcttaaatgcctgttgtgtatatcttctttaaactcctggagagattgaatcagcctttctctaaaagttccttttgctttggcctcctcctctagcttctcctcctcttctggcttttcctcaggcttttggttcttcctcatgcttttggtccactctcatttttctggttttccttccattttttgacaggatttcatcttgtatctgtctacctctcttccttccttcttttctttcttgcttattcttctttgaatacaatgacttctggcactgatcggggtcagtttcttcctcctccttttctagctttgggtcttgctggaaacaacagccctgcagataaactgcaaaattcccgcaagtttgactccttccacgggcctcagggaccaaccgcctgcgctgctgaaggaagctggtatccagacgggaacaaggaccagattaccaggacttc

SEQ ID NO: 48586 - DNA, 768 bp, Homo sapiens
actttatatagtttaactcccttatataaattctcctatagtaatctcaaagagtattctagacttctcaatgcttttattgttgctgaaaagcaaaaaggacttgctgtggaagtgggagaagacttcaacatcaaagtgattttttctactctcctaggaatgaaaggaacacaaagggacccggaagcatttcttgtccagattgtgtcaaaatctcaattgccatctgagaatagagaaggtaaagtgctgtggactggctggttctgctgtgtatttggagacagtcttctggagactgtttcagaagatttcacctgtctgcccttattccttgcaaatggagcagagtctaacacagcaataattggaacttggtttcagaaaacctttgactgttatttcagtcctttagcaatcaatgcatttaatctttcctggatggctgccatgtggactgcatgcaaaatggaccattatgtggctactactgaatttctttggtctgtaccctgtagccctcaaagtctggacatttctttcgcaatacatccagaggatgcaaaagctctatgggacagtgtccacaaaacacctggggaggttacccaggaagaagttgacctattcatggattgcctttattcacatttccatagacatttcaaaattcatttatcagccacaagattagttcgtgtttcaacatctgtagcttcagcacatactgatggaaaaataaagattctgtgtcataaaaaaaaa

SEQ ID NO: 48587 - DNA, 499 bp, Homo sapiens
caggtgaggcccggcggggcgggcggagggctttgtatggcgcaggggactggaagagttggctggcccaggcctcaggtggaagaatttccataccagccctgcggaggtgcctctgtttccagaggcgtttttgtacgaagggcattttgaaagcgaagcagaagccgtagaatcagcggcgagcctgttgaaagaacccacaggtgcatttcacagcactctgggcgaaaattggatgtgaaaatgaagccagaccgagatactctggatgaatattttgaatatgatgcagaggaggtcttggtctctttggccttgctgataacagaaggacgaacacctgaatgttctgtaaaaggtcgaacagaaagctttcattgccctccagcacagtcttgttacccagtaactaccaaacatgaatgtagtgacaagctggcccaggtgagaatcttgtgttgaatgctttggatcttttatataaactagtttatgt

SEQ ID NO: 48588 - DNA, 2335 bp, Homo sapiens
  misc_feature (1)...(2335): n = a,t,c or g
aatctctcatcggtttgctgaggaaattttctaagatgaaaatagaaaggcacatgacgccctgtgaaggacgtggcccagccgcctactctctgttgctgtctcccgctacgacctctcacacaggtaggaagcccctgcggacagcggggcccagcgaaaggacagctcagacggccaccacacttgagttctgtgctttcctgggcatgggaggagctacaaactttacttaaaaaaaaaaaaaaatcacacagtttttcaacaggaagagtgaagtagaagaacagatcatttaattatacaaacaaaatcgctttcctttgctccagcgagtccaggcaacctttcaagttcatttgctgcctgaaagaaaggtttttagtatcagaaagaacctcgctgtcctccaatatccacagggaaaacaagatcagaaacaaaagtccaccatggaagaaatcccagagcgatccaatttggaaagaatttaattaacaaaataaaacggagggaaaatggtccaggtggggccctagggagatcggacttctgtccccagctgaagtctgccccagcacacctggtgggcagcccctgggcctgtcactgcagaactggccttgacaagcagacccactgtgcgcgacgccacggtttccttacgcactcggcattatgtacagatatgaaaaaaacccaacggcaggtggctggaaagtggcttctagctcccctatgctggcttggcacgttcatgcatgcaaagcgaggaggttttgcgggcttcaccaaacagttaattttggcaaaaagagaaaacaaacaaacaaaaagctaaaattcataagcaggatttaaaagccactgaagtgaaaatgatgtatttcctcagcgttatggagttagactaccactacaatctttttttttttttaataaagtctctgccatcctctcccccgactcaggtcaaagttcatagcagcaatgcacaaagtcctctgtgaagccagtgttctctgctccccgggtcagaggtcacaggtcaagttcagtcagtccgaagaatcatgggcgggtgctcgctgtcctcatccaggcgcagggcgctggcctcgtcctccaggcaggcgccacccacagcacccaggtcgtctgtgtaggcttttcctgcagctgcgccgtatgtctgaagtgactaaggggcagtcgtgagaggcagagtccaagatctcattggtcgtttccagactgccgtccagccggtgctgcttcatcagggcacactcgccgccctcctgggggtccaggttgtacatgtacaggtacccgtcggcggcacccaccaacaaccgcgggatcttctgaattgtggctagcgagcagatgtttttgtggccgcagaatggcaggcggaccgtggcgaaagctctgccctggttgaacatttctgtcacttgggaaggccaggtagctggtggaggccatgagcactttcccgaagtacccggtccaggtggtgggctcctctgggggtttttctttcacagtctcgagtttgaagatgtgcacggtctcagtgttgctggaggcggagaggaacatgccgtccatgctgaaggccagggagcagatgctcacgcacctctttactcctctccgaaactcaaagagtttttgtccttctggaatggaaaataccctaatcacggtccccttctccgaagccgtggcaagtttagttccacttgcgtcaaaggccagtgccgctaaaggactgtcgtgagccggaatcatgtttgcagctctcaaattaatggtatcgaagacctgcacctctccgatggtcgcgctccctgggtacgccaagtagcagttgtcgttgttgattgacagcgcacacaggcctgcagggtttggaggcgtctccctgatcgtatgcagcaccttcatgtcccgaatgttgtggatgtacagggactcctccaggcatacttatcagcctctgcctgttgagcttcacagccagaatcgtgttggagtagctgtagttgcagatctcagttcccttcttaaagtggcaaacctttagcttccttggtgctttaaggctcacgatggccactaggctgctggagaacaatctctctacaatgcacacatcttccgtatcggtgcattcatagatctgttccagcttatccacagaagaaagggagaaaaatttataaccggacttactaccaacagctagggacgtgttgtcctggttgaagttggcgaagagcgagcgtgcggcgccggcctctncngctctggctcgccaggttca

SEQ ID NO: 48589 - DNA, 857 bp, Homo sapiens
tttttttttcaacaggagatatcctttcctatatattgtgctattctgtattcactaccttttcagtttttttttttttttttttttaagttaaatgcttttcagtaatggattctcccaggcactaaactacttaagccaggagtataactacttcaaatacactatgagaacctaaacttgggtctctggagatctgctgccagagtctacttgttctaacctgtgtatgcgcaagatacaccacattataatagttttgcatttgctatcatacattagttatgtagaatctgtgtcagcaaatgctggactctccctaatactgaaatttaaaaatcacctcagaaaactgccagttctgagttctcaaggcagcttttagaggtaggaattccttctctacagaaagctatcttattctttcagaacaaaatgactgttttatttccacaaggtaaagtagataaaagtgaaagctgtctgaggcttactatacccaagagaaagtctactcactacgtagcaacctaggtaggtgccacccagctacatttccagttctcatgaaaagatctgaaaatcccatcaatagacaattcagcacatttggaaataggaagagccctaacaaataattgaatactccaaattactgagtgtttgcacacagcatgctgcaaacaggaaatgtaaatggtctgcagattagaaaagcactcactgaagcaattaacagcatctccataagacatgcaaaatgtaatttcttgacatacaaggagtaggaaaataatgaaactaaaagacatgccatgttaagacatgaaaagagcaggcggaggtggaattacttg

SEQ ID NO: 48590 - DNA, 442 bp, Homo sapiens
gttgagagaacggagcggacgccatggcgaccaacatcgagcagatttttaggtctttcgtggtcagtaaattccgggaaattcaacaggagctttccagtggaaggaatgaaggccagctgaatggtgaaacaaatacacccattgaaggaaaccaggcgggtgatgcagctgcctctgccaggagtctaccaaatgaagaaatagtgcagaagatagaggaagtactttctggggtcttagatacagaactacgatataagccagtttcactctttttgcccagcctgggagttgcaatggcgtgatctcggctcaccgcaacctccgcctcccagacttgaaagagggctccagaaaaagtagatgcgtatctgtacaaacagatcctactgatgaaattcccactaaaaagtcaaagaagcataaaaagcacaaaaac

SEQ ID NO: 48591 - DNA, 1820 bp, Homo sapiens
ggagtcctgagttcaaaggggacagaactaagggcaggagaagagaatggatgtgtcttctctcccatcttcccctcatcatcgaccgaggagcacaaagaagttctgtttctgtttttttcagaaactttattttagctgtcaagcagagaatagcttgaactattcagactattgttggcactgtttagtagtgaccacacgctcttctacccgggaaggaacatatgacgacatgctcctcccatgtcccctgatggtgtctgttcccacaatatccttctagtctgcatcgtgaagtggcttaggccaaagcttcctgtgtgatgacgcacgtccgagactgttccatctcattcctcgcaaatttgagctcttctgatcaattctaaatatttgattaattttaattctgaaagaaaattttgaggatttaagcttaggggattttatttttataaataccagattattgttagacttaataaatcactgttaaatttaaagatgacagttaccttggaaagttcactaatacttcgctccaaggcgtctgtaaaagaagatatctttattggagcaatgttcatgtgactgggaatgacagaagaatgggagatgagtagggacccctcaagcacagctgtcactcagaaattttaaatttgaaaaagaaatcgattttcatctgtatgccgtcaaggaaggaattcagttacagggcatctgtaacttaaatattgtaagaataactcatatggaagttcaagctatttttatactataatagagttatttaattttaatttgttgaattattagttaccactgtcatttcttcagctatggatatgtggctgatgttggggagacggacctcagtgtgttttatattgtctggtgttaagatgataaattactttgtgattacaagcaaattttctatttgacaaagcccttggtggagtccaaatgatttttctgtaccatattgttctcttacacatacgtatgttaggaaaataggcacactttcaaagagaatgttctcttacacatacgtatgttaggaaaatagacacattttcaaagagaatgttctcttacatatgttaggaaaataggcacactttcaaagagaggtataggggctttttactgccttcgaaatcacttttaataaaagttgtatgataaatcattaaaaatgcgagtgtaaatatttttttttacctctatcagggtttttatttgaaagtgtgctcttaccatttccttgtttgagtaagagagtgaatggttctgagtgtttaggaaggatttgcttgcttgcagcagaagttctaggaaaagcaggcacctcccaaatatcttgaggacactggcagccttatggtgactaaatccacactttctttaaagagatgcagatgaattacttttctgttaatatatagaaaaatacacaggagaacatgcagatacatgtaaatatctacatacagggatatttgtatgtgtggttgtgaaacccatacacaagtggatttggccatctttgggcagtgaggtcaaatgtgaatatgtgtaaaagtgcttttcagaactgcattactatgagaaaacatcaaaactgctgtagttttccatttctactgtatttcagttgcaacctatttttaataaactttgtatgtatttaagtgtatttgctattgttttgaaagtgctgacaaagtttatatttgtaacatcagccttcctcgcccatctctttccatctgtctcttcttcattaaacacttactgagtatgaaaaa

SEQ ID NO: 48592 - DNA, 503 bp, Homo sapiens
aggaatgtggttataaatatactattttaagtggatttatacgttgtatttgttctgcttataatgggaaaaaaagtctttacatataaaaatagtggcaaattccatttgtattttttaatctctgaaatttgggaagcagaaaatatcaaacgaagaaagaaaccagagtctcaacctgctggacactattggaagtccatcatttaacacgtttttagtatatacttttagcaggagacagctctgagtcaactgtgttgaggtgccaccacagcgagtttaggcactcagatccctgcatactcatcacattgggccataatggcaaatagaattttttgttttgttttgtttgtttgctttttctttcacatagaaatagtaagttgtaggagtgtgggtcagaaagaaaaggtggccctacctctgatggttggcaatgataggatacaatggggggataagctatctacaaatgggagtgggagaagggatatatg

SEQ ID NO: 48593 - DNA, 1045 bp, Homo sapiens
aaaaaaaaaaaaaagactgtcaaatgaacttttacagaatgcattaaaaaaaaaaaaaaactcctgtgtcggtcagaacaacttgctacttatcatttttgtataaaaaggaaattagtctttttctttttttggtaaatttttgaaaaatattgctaaaagtgcatttaaggagattgggagacaattagcagaatggagaaagtaagtcttttttttttccaaattattaattgtcctgtgtctatgtacctctagctgttcttttttgtacttttctggttccaaaccagtttattctgtggttctataataagttttgatataatcttggcttcttaaaaactgtgtatcattaaaatatatgttctgcaagaattaaaactgagtccatgaaaataccataggaagacataaaactttaaaaggcaactcaaagatgatggaaacgcacttacaagtggtgaccaaaatttttaggtgaagtcgagcactctaattagagaactggaggaaccacatataacacttaacttcccctaccctgcccctccccaaaagaaaccatgacaaacctagcttttaaaaaatattttaagaaagagaatgaactgtggaatttattggcagccaagggaatgtgtccaagacacatgctgaggttttgaataaaaagtgaacttttgtaatttgaattgggtcccgcttagttcttgaattgttatgaaaatcctatatctgtttgtatatttgcaaaccctttgtattataattgttgatattttccctttttaaaaaataccattgaaatcagcatgacaaaaataacactgttggcacttataggtaacgtgattgattcagtatcttagagtttacagtttgtgttttaaaaaaactgaaggttttttttttaagtgcaacatttctgtatactgtaaaagttataataactgaactgtttggtcgagtctttgtgtgttatattccaaggaaaattgaaagtattcagaaattaaaatattatttgatatctgaaaaaaaa

SEQ ID NO: 48594 - DNA, 506 bp, Homo sapiens
  misc_feature (1)...(506): n = a,t,c or g
cctacagctatgacatgattacgaatttaatacgactcactatagggaatttggccctcgaggccaagaattcggcacgagcaaacacacacccaaacacacaaacacagacacacaaacacacacacaaacacacacacaaaacacacaaaaaacacaaacacacacatatacacacacacacacacaccctgaactggaaaccctaactcagtgtgtgtgtatgtgtgtgtatgtgtgtgtgtgtaagagagagagagagagagattaagctgtcctttgagtgaggaccagggaggggaagaagagaacccagggagagtccttccaaaggctgccttcacgagctttccttctggcggggttgggtgaggaccctggaccttgtcttcttgttttttccctttctgctgttttggtcaccctgccccacccttcatggncgcccattgtgcaaggaaacccagagggtacacagcacggcagggcagctgggaagctggtga

SEQ ID NO: 48595 - DNA, 3494 bp, Homo sapiens
tttaaatcacgtttaccgaactccgccgccatttcctcgcttggcctaacggttcggccaatcccagcgcgcatcaagaaggactgaggctccgccaatcggaggccgccgatttcgacccttcgcctcggcccggcccaatccaggccccggccccgccgcccccggcccgcccccgcggtgccctctctcctccctctttgtgcgtctcgcgccgccgccgcccgccgcgtgagaggacgggctccgcgcgctccggcagcgcattcgggtcccctccccccgggaggcttgcgaaggagaagccgccgcagaggaaaagcaggtgccggtgcctgtccccgggggcgccatggcgaccggagcgaacgccacgccgttggacttcccaagtaagaagcggaagaggagccgctggaaccaagacacaatggaacagaagacagtgattccaggaatgcctacagttattccccctggacttactcgagaacaagaaagagcttatatagtgcaactgcagatagaagacctgactcgtaaactgcgcacaggagacctgggcatcccccctaaccctgaggacaggtccccttcccctgagcccatctacaatagcgaggggaagcggcttaacacccgagagttccgcacccgcaaaaagctggaagaggagcggcacaacctcatcacagagatggttgcactcaatccggatttcaagccacctgcagattacaaacctccagcaacacgtgtgagtgataaagtcatgattccacaagatgagtacccagaaatcaactttgtggggctgctcatcgggcccagagggaacaccctgaagaacatagagaaggagtgcaatgccaagattatgatccgggggaaagggtctgtgaaagaagggaaggttgggcgcaaagatggccagatgttgccaggagaagatgagccacttcatgccctggttactgccaatacaatggagaacgtcaaaaaggcagtggaacagataagaaacatcctgaagcagggtatcgagactccagaggaccagaatgatctacggaagatgcagcttcgggagttggctcgcttaaatgggacccttcgggaagacgataacaggatcttaagaccctggcagagctcagagacccgcagcattaccaacaccacagtgtgtaccaagtgtggaggggctggccacattgcttcagactgtaaattccaaaggcctggtgatcctcagtcagctcaggataaagcacggatggataaagaatatttgtccctcatggctgaactgggtgaagcacctgtcccagcatctgtgggctccacctctgggcctgccaccacacccctggccagcgcacctcgtcctgctcgtcccgccaacaacccacctccaccgtctctcatgtctaccacccagagccgcccaccctggatgaattctggcccttcagagagtcggccctaccacggcatgcatggaggtggtcctggtgggcccggaggtggcccccacagcttcccacacccattacccagcctgacaggtgggcatggtggacatcccatgcagcacaaccccaatggacccccacccccttggatgcagccaccaccaccaccgatgaaccagggcccccaccctcctgggcaccatggccctcctccaatgggtaaatcagtacctgggaagtacgcctgtgggctctggggtctatcgcctgcatcaaggaaaaggtatgatgccgccaccacctatgggcatgatgccgccgccgccgccgcctcccagtgggcagcccccaccccctccctctggtcctcttcccccatggcaacaacagcagcagcagcctccgccaccccctccgcccagcagcagtatggcttccagtacccccttgccatggcagcaaaatacgacgactaccaccacgagcgctggcacagggtccatcccgccatggcaacagcagcaggcggctgccgcagcttctccaggagcccctcagatgcaaggcaaccccactatggtgcccctgccccccggggtccagccgcctctgccgcctggggcccctccccctccgccgcctccaccgcctggttccgccggcatgatgtatgccccgccccctcctcctccgcctcccatggacccttctaactttgtcaccatgatgggcatgggggtggcgggcatgccgcccttcgggatgcctccagctcccccaccgcctccaccacagaactagacttgttttttaagaaaatatatattatatatagagagaattggtctcgtttaaacacgccgaacctcaccatatggagccagacattgggacgcacgcatgtgattgtgtgtgcacgcatgtgtgtgtgtgcacgcactgggctgggccaagcgactgaggattcgcttgggaacgggcaggtggtagtaggggcgccagcttgggctctcctggcgccccgtaggcatcgagtgtcttctttgtcttctttctctcctcacccaactccctttgcctctccccaaaccgggccgccaggatccctccccgcggcggcgatggcccgagccatgagagtgaggactttccgcgcccattggtgacccttccaggcagacagcctcagcaacgcccctgggtggacaggatggttcggcaaagcagcctgagttatttttgtggacggaatcggaacacgctggctccatatcgtgaaatttttattaatttttttctttttcctttgttacttctttatcttttcctttcttcagactccgtccaaggagatgctctccccggtcttctgctgcaatttagattcctttcccttctctccagttctccttcccttaccaagggagaggggagcaaatggttttggggcaagggctttgggccatttcatgtcaagctggttgtgggtttttcaaggtgccatagccacccccaaatatgtttgtttaaagcgtggggttttttaatctctgccacccttgtcaagggagtcttgtaaagttgccgagggtaggttcatctccaggtttcgggattcccatccgtcctggcgatcctgccagcagtgggtgggcagcctgagctccctcgggctcgcctgccagcctgggagttcttcctgtgctccttgatcacctgagctgcctcagattccatttggtcctctccttcctggaaggcttccttttatgttttgttttaatcccaaatgtctgaatgttttgcagtgtgtaggggtttgagccccttgttcattctccttcctttttcctcccgcttccctctccatgaagtgattctgttgacaataatgtatactgcgcgttctcttcactggtttatctgcagaaatttctctgggcttttttcggtgttagattcaacactggctaaagcggggatgttccattgaataaaagagcagtgtggttttctggg

SEQ ID NO: 48596 - DNA, 1894 bp, Homo sapiens
agctgcaccactagaaagatggcggagcaagagcaaagaaaaatccctttggttccagaaaatctcctgaaaaagaggaaggcttatcaagccctcaaagccacccaggcaaagcaggcacttttggcaaagaaggagcagaagaaaggaaaagggctcaggtttaagcgactggaatcattcctacatgattcctggcggcagaaacgtgacaaggtgcgtctcagacgactagaagtgaaacctcatgccttggaattgccagataaacattccttggcctttgttgtacgcatcgaaaggattgacggcgtgagtttactggtgcagagaaccattgcaagacttcgcctaaagaaaatttttagtggtgtctttgtaaaagtcaccccccagaatctaaaaatgctgcgtatagtggaaccttatgtgacctggggatttccaaatctgaagtctgtccgagaactcattttgaaacgtggacaagccaaggtcaagaataagaccatccctctgacagacaatacagtgattgaggagcacctggggaagtttggcgtcatttgcttggaagacctcattcatgaaattgccttcccagggaagcatttccaggagatctcatggttcttgtgccctttccacctctcagtggcccgtcatgctaccaaaaatagagtgggcttcctcaaggagatgggcacacctgggctatcggggtgaacgcatcaatcagctcatccgtcagctgaactagacccaggtgccaaactgcggtaaattttttatcagtgaagtggaagcatgtgttttgttgttttgggaatttttatcaagtatcttcagagaagattatttcctgctttatcttcagaaactggaaagggtcaaagaaaagacagtagcctgggccggtcgtgggattacaggcatgagcaactgcgcccagctcttgtgtaccttatgtgaggaagtcctgctcaatcaggatcggtcacgcaggccctgatcttgctactctggttccatgtcctatggaagaccaaagtttaccaagatagatttttcccttcatagtggcagatagtgttaacccctgcaccatctgtaactcagaaatccccaccatttcttcccctggggcttcagaatagaattgcctggtttctctgatgatcagcatggttccttaaaacccaaatcagcaaggaatgaacaattttgtttggcatggatgaaattagcactgtttggctcgttaggccccaggcaggcaggcaccttaattttttccttgcatattctagtcttcagaagcattgccttttgtcctactggtaagtgacatagaccaataacagggcatctggggattttaatcctgaaaacaggtgagtctgatactgcttgtgtttttcatcagtgtccaccccaagtgggtcttcctgctattctcttcacttagttgcccctcacttgccatctgagcaattggcaaggatgtgccaggcctaggttaaacttggaaacatgcttgaccattctattccctggtcctttaagatcagtttggctgcaattttggctccttggaccctcaagcatagctggtaaatcaagttagagatgtaactgccttaaaacatgccagcttaggctgggcacggtggctcacgcctgtaatctcaacacttcaggaggctgaggcaggcagatcacttgaggtcaggagttcgagaccggcctgaccaacatggagaaattctgtccctactgaaaatgcaaaattagccggatgtggtggtgcatgcctgtaatcccagctacttgggaggctgaggcaagagaattgcttgaacccagggaggcagaggttgcggtgagccgagag

SEQ ID NO: 48597 - DNA, 400 bp, Homo sapiens
agttgttgcctgtctgaacctctgccagtcctggagactggtgccctgagctccaaccagcgggcctcatcctacaccctcaccaccgcaacttctcacccgagcaagaagcagctcccagagagaaagaacgttcccacctgcctagccatgggagaggacgctgcacaggccgaaaagttccagcaccctgggtctgacatgcggcaggaaaagccctcgagccccagcccgatgccttcctccacaccaagccccagcctgaacctagggaacacagaggaggccatccgggacaactcacaggtgaacgcagtcacggtgctcacgctcctggacaagctggtgaacatgctagacgctgtgcaggagaaccagcacaagatggagcagcgacaga

SEQ ID NO: 48598 - DNA, 1504 bp, Homo sapiens
aattcggcacgagcggacctcggccagtcataaaagatgacaacagcagccaggccaacctttgaacctgccagaggtggaaggggaaaaggagaaggtgatttgagccaactttcaaagcagtattcaagcagagacctaccctctcatacaaagataaaatacagacagactactcaggatgcccctgaagaggttcgtaaccgtgacttcaggagagagttggaaagaaagagagagagctgctggaaagagagaaaaatagggatcgtccaacccgagaacatacaacctcctcttcagtgtcaaaaaaagccacggttagaccagatttcctgccgccaaccttgatgcagatgaccctctaacagatggaggaagatgaagattttgaagaagaaagtgatgatgatgatactgcagctcttcttgcagaactggaaaaaattaaaaaagaaagagctgaagagcaggccaggaaggaacaagaacaaaaagctgaagaagagaggattcgtatggaaaacattctgagcggaaaccctctccttaatctcactggcccatcccagcctcaggccaacttcaaagttaaaagaaggtgggatgatgacgttgtcttcaagaactgtgcaaaaggtgtagatgaccagaagaaagacaaaagatttgtaaatgacacactgcgatctgaatttcacaaaaagttcatggagaaatatattaaatagtacagttttatgtgcttaattaaagactgtaaaacgtaaaggatcattctgactttttttatgagtttttttttttcttttcccctgtctaaattgtgtgtgggcttccccagttttaaactcctatctttttctttagtgataccttacttgataatggacttgggaataggtttaacccagtttgcattctccaaatgtttccagtgatatgttttcctgggaaaagcaaatctgcctgtaataaatatttttaatctaaataaccaaatctgggtgcccaactttttgttggaatttatgctgctagtaatacattccataatatcttttgaaaagaaaaattaccattgtgtattgtggcttgtgcattaacttgtccttttccccctgtttctctcacatttaagatgagttaattcatattttctctgcattttttaaaagagtgtaatggaagatgagagggattctattttggaccacatgttggtgtggaggagtgtcattgacagtaagcaccccaggcgtgtgtctgggagagcattgggtatcgctcacttctgcaggtacttgtttttttttctcatggccgaagaggagagctctgtaagcattcttttaaagtatacggtactcacttgtgttctggatactcaactgccatgtttcctttgaaagagattgaatatgcacctgacatgcatttagtgcaaagcctgagaaagcttcaaacaatatataaaataaaacctttggaaataaaaaaaaaa

SEQ ID NO: 48599 - DNA, 1650 bp, Homo sapiens
  misc_feature (1)...(1650): n = a,t,c or g
agcgtccctgccaccaggcccaatgcatctgatccttgaatatactctcaaagaattcactctcgttttattaagagaactaaattgtttctaaatgtagatggtccctctggaaaagcagttttcagcaggggtggtaaccccttcagagggagtttggaaatgtgtgggtatgattcttggttatcataatgatgggggtgctactggccttctgctgccatgggaccaggatgctaaatgtcaaggtagtcctatacagtgaagaattgtcctgctcaagatgccaggatttcccccagtgagaacatgctctaaggaatgaccacccctttcttttattctcccacagtgctccatgtacagaagtaaggcatagcagtcatatgagcaaccacattcctgaacctttcctcatgctgggctctacacttaatcctttacttgtatgtttctgtaattcttacataaattctattaagagggtggcatactgtagtggatgaagctgaggcttatagtaggtaaggcacaaagttaaaaagtaacatcactgggtttcaaacctactggtctctgtgactaaagaacactttcagaaccacttcttgattctgccaccacttgatcccataacaggctaccccttggcctcatgctggagttgtgtgtgtctgtcttcatcccaggctgagctccttgaggtgaggatgttgtgctgtttgcctccctcacagtgccttggtcttagtggatgcccagttgtcttgtgaatgacttttaagaagtgtacttaagagaaaaatcctaccttatttgaataattacaagtcatgtttttgttgcttaaaggtgataaatcagtgtatattatttgttaatgtccattaaagccagtttttaaaaaaatcactggacttttgtgtttaccatttaaaacaaccattttaaacaaacttagaacgatgccttagctgtttataggtaacagaatgtaaactcccaccacctggagactaggccatatccagggacctcacactgactttcctaaaggagagaagcagctacgctgttcatactgatagagaagagggcaagaaaagatccagagtggctgttactttgaaaattaaacgaaagatgaaattctgaacttaaaacacttctgtttggccttctataactgatcacccttctttgctctgttttccagataaatggagacaccagatctccctaacctctgacttctgccgttagccatactctgtgtagttagatctcagtctgggaatggcattccagggcaattgtgaacatgaggctagatttttcctttgatttagcacattcctaggcagacttttgcaagctcaaaaaatgaaaataatatctgcttaaccaaaacataatcataggaagaagaaaaattttaaaatgattgatttttgactctacattctttatctaccatactgctcttttcctttttaggaaatattactaaggcactttccgtataggattaaatggaaatacagggctaatcttttagggtgtncttagggnattttttgactttttggaaaaagggaaaagnctaataggcctaaactgccggagggaccngagttgggntgggggtat

SEQ ID NO: 48600 - DNA, 2558 bp, Homo sapiens
aaacacctttttaggtacgtggcctttcactggttgtgaattggtatgcatccgtagtagtaagttcacagattcactgcagtgcaggaatgttcttgcatgccaaagactcaactgctttcaaagataatgtgggtgctagatgcagtggcttacatctgtaaccctgttagggtgttcagacccaacaccaggtcgtgggggtgacaaagtccggcagagtcaaaggattgagaaaaagacagtttgagagagaaagtgggtccagggcgccaaagctaaggatggaggctgtgaaggccccgagctctggaagtgcagattatttattggtgatcaaacaaagaaacaggtggtgagaatgtgggggtcgaaagggcatgttgcattaagcacatgatttacagctgtgatggtttagcatctgctctgctacttgagataatggagagcaggttcttttaactcaagatacaattgatcctgggagagcaaggagcaaggagccagcaagtccagacacattccagagccacgagccctggattctatccaagccacgaggggttttatgccccgggcttagattatggtgcgtcagggtagccttccacccttcagcacagagcttggtgttccaaaggccacaaggggttttagaccctggatcctggacatgattcaagactcttttacattatgtcagacatgcaagctcggcctcagcttctcccaacactcagcttttctcccaacaagagatacaggtgggtaggagacaggtagacaagcaggtagggagccctggagaaaggtgagagagagaagggcaggcagactgggggaccagcaggcaggtgggaagaagggaaggtgggcagacagaaaacaggatatgggcagacaggaaggggacagaagcgggggtcaggaagacaggacggcaggtggaggccctcaaagctggtccttgtcttcacaagggttagggagcctcctgagacgcaggtggattccatttttggatttcaacacaagtcgtgcaatggggatggggatcctggtgggatcaggcagcagctcaaagcggagcagggtcagggccgtggccaccttcagctcgttcatggcaaattgtttcccgatgcagttccttgatcctcctgagaagggcaggaaagcgtggctgtgttgagcagaacccggtgcaaaacgggaagggtcaaacacctctgggttgggccacacttttgggttgtggtgaaggccataaatggagaggaggaccatgatacctttgggcaaggagcgcccatcagggaaggtgacgggagtgctgagctctctgccaatgcctggcaccggtgggtagagcctcagtgcctccttaatgcacatggtggtgtagggcatctggtccaggtggttccaggtgatggaggctccatcacccaggaggctgtggatctcctcccggcacctctcctgatgcttggggtgtgtggccagagcatagaggatccaggagatcccactggctgtggtgtcgtggccctcaaacatgaacgtgtccacctcagcacggaggtccttgtctgacaagatgctcccattctccattttggccaagaggaggatatccagaaaatccaaatgcctcttcctcttgatcttctccagctccccctccttctgtagttgagccttcctcagttggatcacttggtctgtgtgctgatgggccagctggcaggcgcggtgtgtccagcggccagcagaggtcaggctgtagatggtgtcattctggtgaaaggcattcctcacacgggaaaaaaccaggttgttcaggtcactaatggcctgtatgtaggactgagaattcctgtccacctggatgctgccctgatggctgaaggcacacttcatgatggtgtccagggtcatcaaggagacgtgctgaaagacctccagaggggaatcctggccaaggagctcttcccatttgtccagcatcactcgtacagagtctgccatgagccccacatagggcttcaggatgtcatagtggaaggctggggtcagcatccgtcgatgctggaaccatgtctgcccattcaacaggagcaagccgtacccaatccatggagccaggaatctgtaggaaccatgggatttcgggtctgatctccccagaatcaccttcatatagtcagggtcatagagctggacacgaactttgcctccccatagccaatgaggacaggcacttgggaatgtctccacccatttctgaatccgttgtagctcctggtcctgttggagctcctggatgtgcccgaagagccagtgggagggagggcacgggaactgctggagggctttgagcagccactgcctgtgcaggtagagctgaactgccttgatcagcagcagaagcagaatgagcagggaggccgcttggaggattccagagacatcacccaggagtctgctggggctcagcacagagacactcatggtgcagcacctgctggatctctgagtgccccccggaattc

SEQ ID NO: 48601 - DNA, 482 bp, Homo sapiens
agcagaatgacatcactgtcctttgggagtaggtcctctgaaaaggcagcaggttccagcaggtagctgagctgagaggacatatggcccacggggacctacagacagcctttgacatttgtatttcttacaatggagggccaaggagggcaaggggctgtggagtttggtgtctactagtgtgtatgaatttgagctagagtccttctgtggcatgcactttgaccactcctggcagtcacatggcagatttccaagtgcaaatccttaatccaaacaaggatcatctaatgacaccaccaggccaatccctgctctcctccccgaaaagtcagggtcccttcattggaatcctccacccacccaagcagaatttagcagagatttgccttcaaaccctaacggcccccttgttctctggtccttctcaaacccacctttgtaggccacccagcattgcaggacagcgtgtggggcagctg

SEQ ID NO: 48602 - DNA, 1196 bp, Homo sapiens
gcattgtggttacatgtgaatcagctgtcacaacaatgtgtcaccagtgatgaaatgtacgaacaagtccgaaagagtttagaaatgtgcagcattcagagggacattgaatactttgtgaatcaacgcaaaactggacagattccaccagcacccatcatgtatgagaatttctactcctcccagaagaatgcagtcccagcaggaaaggctacagggcctaacttggcaaggagaggacccctcccaattcctaaaagctcaccagatgatcccaattactctttggttgatgactacagtttgctctatcagtaaaatcaatgaaaccagagctttttccggctagtgcttctgtgatatggaaagggcacccagagcagcaggacctatagccacgttatgtcagcaatgaagactttgaagtgaacccttgctataattttttagagatttaaaatttatggtagacatttaggacaacataagcaagtagagttctgcagttttttgaagtttacaaattgccccattctgaagaattattatttcccagttactcaggttatgaatgaattaggttttcaacatgggaagcatgaaatccacttctggatttggagcatccacttgaggagcagaggtggcagcagaggattctgagccaccaactgcagtagtggctcctttggctttgggcagcctggctgtggagtttccacggcgacacacagcctcagtggtgcaagatttaaaattaccttcctttttggctggaagacttagaagccgcctgatcatactttctcattttacagatgaggaaataaagcctacaagtgtgaaattaatttccttacagttttcctagctgatgagggacagaaccagaactagagcctgagcccaacccacatcactattcttctaacccttcctgaaagttgtgatgctcatgctgaaatttaagatgccaaatatttttgccagcactttttcagttgggagaatcaccagggtttaaatgtcagatttatttttatgtggatccctgtgtatgctgaactacagagcatgatgtttaatctaatttaaggagccactgattgtaaaacatgccattattttatgttgcactaagaaggtggggtcgaggagttgccaataaacttgggacagactattgatgccaagcc

SEQ ID NO: 48603 - DNA, 803 bp, Homo sapiens; identical to SEQ ID NO: 7619

SEQ ID NO: 48604 - DNA, 1421 bp, Homo sapiens
ggtcggtggcgcttctctctggcccgagccagcactgatccgctgggcccccagcgcaatctcctggaagagcccactcaccctggacgagctcttcggtagcctcagaccgtccttgaagaggatgactgagacattatgggccacgcgctgtgtgtctgctctcggggaactgtcatcattgacaataagcgctacctcttcatccagaaactgggggagggtgggttcagctatgtggacctagtggaagggttacatgatggacacttctacgccctgaagcgaatcctgtgtcacgagcagcaggaccgggaggaggcccagcgagaagccgacatgcatcgcctcttcaatcaccccaacatccttcgcctcgtggcttactgtctgagggaacggggtgctaagcatgaggcctggctgctgctaccattcttcaagagaggtacgctgtggaatgagatagaaaggctgaaggacaaaggcaacttcctgaccgaggatcaaatcctttggctgctgctggggatctgcagaggccttgaggccattcatgccaagggttatgcccacagagacttgaagcccaccaatatattgcttggagatgaggggcagccagttttaatggacttgggttccatgaatcaagcatgcatccatgtggagggctcccgccaggctctgaccctgcaggactgggcagcccagcggtgcaccatctcctaccgagccccagagctcttctctgtgcagagtcactgtgtcatcgatgagcggactgatgtctggtccctaggctgcgtgctatatgccatgatgtttggggaaggcccttatgacatggtgttccaaaagggtgacagtgtggcccttgctgtgcagaaccaactcagcatcccacaaagccccaggcattcttcagcattgcggcagctcctgaactcgatgatgaccgtggacccgcatcagcgtcctcacattcctctcctcctcagtcagctggaggcgctgcagcccccagctcctggccaacatactacccaaatctgaaaaagcagcatgttgagaagatggccccttgtgccttggaaagaggttcccatccctcattggaatcaccacccattccatccaggacttctcttacacttgggggtagcggggtcaggacaatcatctcagtcctgcatcttttcttctgctttcttccctccaagagcaaaacctgggcaaggggacttactgagtgggggtgggtgggggttgggaaaagggaaactggtgggatatggaacatggctctgagcaggactgttgagctcacatagtgttctgactccaaatctgggagcaggagaatgtgtaaacaagaataaagtggaagcaggttggtgtagaaaaaaaaaaaaaaaaaa

SEQ ID NO: 48605 - DNA, 975 bp, Homo sapiens
  misc_feature (1)...(975): n = a,t,c or g
tttttttttttttttgagtcaacggcagacagctatatttagtggtgcctcgacactcacgaaccgccagcgtggcgcctggatcttgcccagctgccagctccccccaccaggactgtggttcctcagtttctcctgccagccccggctcatctcagggcaaagctatagacatggtagatctcatcggggaggttctcctgcctctcctcggccaggaggctgaggcctgcactgcagatgatcctgcggaccacgtcaaggtcccggcacacgctgctgtccacgtcgtccagaatcacgccctcctgggccatgttgtctttgatgacgatgatgccgttggggcggaggctgcccttgcagcgccgcaggaactcggccaggtgctgatcggtgaggtggcctatcacccactggatccagatcacgtcgtaagagtccggctccggggtgaagtcctggagcccacaacagaagtagttcctcaccctcttgccctcctcccccaggtaggtcttggcttgaaccaggaagtcctccgttatgtcgaccatatccacctctctgaacagcggcaggagcagccgcttggtgatcctcccaatgccagctccacagtccagggcacaggacgttcctgtcttgttcgggccttccctcaaaaacctctgcagaaacttccgggagctgttgatgtcgatgctggagatgtggccataccccccaagcatgccgttcaccgtgggtgggatttgtttccagtaggtcttggccttggaatagaattgcttctcgtcttctatcacctcgctcgtcatgctgtcaccaaccacggctctactcaagcaccacgatcagcaaccgcgactctctccgggcgggggctcccgggaccgagagaagaagatggggaagaggaagggagggcggcggcggcggagacgccacaagccaaccgcatntccgccagac

SEQ ID NO: 48606 - DNA, 1884 bp, Homo sapiens
gcaattaccaagcttcctgagatctcacatagactagaggcattttatggtcaatgttttggtgcagaatttgtggaagtgattaaagactccactcctgtggacaaaaccaagttggatcctaacaaggcctacatacagatcacttttgtgggagccctactttgatgagtatgagatgaaagacagggtcacatactttgagaagaatttcaacctccggaggttcatgtacaccaccccgttcaccctggaggggcggcctcggggagagctgcatgagcagtacagaaggaacacagtcctgaccactatgcacgccttcccctacatcaagaccaggatcagcgtcatccagaaggaggagtttgttttgacaccgattgaagttgccattgaagacatgaagaagaagaccctgcagttagcagttgccattaaccaggagccgcctgatgcaaagatgcttcagatggtgctgcaaggctctgtgggagctactgtaaatcagggaccactggaagtagcccaagtgtttttggctgaaattcctgctgatccaaaactctatcgacatcacaacaagttgaggttatgctttaaggaattcatcatgagatgtggtgaagctgtagagaaaaacaagcgtctcatcacggcagaccagagggaatatcagcaggaactcaaaaagaactataacaagctaaaagagaacctcaggccaatgatcgagcggaaaattccagaactgtacaagccaatattcagagttgagagtcaaaagagggactccttccacagatctagtttcaggaaatgtgaaacccagttgtcacagggcagctaagaaaagccatcttcattcgtggagactgtggccctgcaaccctggagaaggacttgctggtacttaaaaaatgggacatttgccacccaggactgactgtacactccctgatcagccagcactctggaagctttgggatcccaggaaccatggaattattcccaaatggactctgaccagatttttgccatactggggggtggcgggatggaggatgggtactcaggcatgactgcgtatttattaaagtgtgtttttccacaatgtaccaaacaaggcataagcagcttctcctgctgactggccaatcactgcccatctgagagatgatttcctctggcccatatttgaatttattggagtaactcaaattgcctgaggaaaaatggaaaaattatccaccagtcgattcaaactgaagtttcactctttataggaaggcagggcaaacttgtaggagtacgaaacattttcaataaatctacaaagggaagccttactacaattccaaaaatcatcatggttggaaatttgggaggagattatttgtgaacttgttacccttttggtaatggtggactaattgctgtatagttatttttgttttattattactgttacattaatttaacatgcatttatagaagaatacattcaaagcactgatgtaggagatacacggtacttggagcagtcagccaaaaatcacagatactgctttcacttaaatggaaacaattctccgataatgctttgctttttttcttatgtcactcttgtgtactatctatttttctcctctctgggaccaagtttctttttataaagcaataatatctctgttttcatttcagaacattgtgctgtctgtcagcatatgtatatcagctacaaaatatattcaactttgacttcttttgacaaaggactttaggaaaaagaggaacaaagacattatttgagaattaaattatatatttttaatatgactgtgaccttgactgataataaagatgtaataagaattgcaagct

SEQ ID NO: 48607 - DNA, 1297 bp, Homo sapiens
gcgctcctgcctccctgcagggagctgcttatgggacaccgcttcctgcgcggcctcttaacgctgctgctgccgccgccacccctgtatacccggcaccgcatgctcggtccagagtccgtcccgcccccaaaacgatcccgcagcaaactcatggcaccgccccgaatcgggacgcacaatggcaccttccactgcgacgaggcactggcatgcgcactgcttcgcctcctgccggagtaccgggatgcagagattgtgcggacccgggatcccgaaaaactcgcttcctgtgacatcgtggtggacgtggggggcgagtacgaccctcggagacaccgatatgaccatcaccagaggtctttcacagagaccatgagctccctgtcccctgggaagccgtggcagaccaagctgagcagtgcgggactcatctatctgcacttcggggcacaagctgctggcccagttgctgggcactagtgaagaggacagcatggtggggcaccctctatgacaagatgtatgagaactttgtggaggaggtggatgctgtggacaatgggatctcccagtgggcagagggggagcctcgatatgcactgaccactaccctgagtgcacgagttgctcgacttaatcctacctggaaccaccccgaccaagacactgaggcagggttcaagcgtgcaatggatctggttcaagaggagtttctgcagagattagatttctaccaacacagctggctgccagcccgggccttggtggaagaggcccttgcccagcgattccaggtggacccaagtggagagattgtggaactggcgaaaggtgcatgtccctggaaggagcatctctaccacctggaatctgggctgtcccctccagtggccatcttctttgttatctacactgaccaggctggacagtggcgaatacagtgtgtgcccaaggagccccactcattccaaagccggctgcccctgccagagccatggcggggtcttcgggacgaggccctggaccaggtcagtgggatccctggctgcatcttcgtccatgcaagcggcttcattggcggtcaacgcgacccgagagggtgccttgagcatggcccgtgccaccttggcccagcggctcatacctcccacaaatctcctagtctaataaaaccttccatctcaaaaaaaaaaaaagagggggcctcaggtggccttgaagaagggggtagatgggcatccagataaaataacaataaccacagcagtaagagtaactagggcacgtcgcctcc

SEQ ID NO: 48608 - DNA, 436 bp, Homo sapiens
gttatgacatgattacgaatttaatacgactcactatagggaatttggccctcgaggccaagaattcggcacgagtttaacatacccattttataagtgaggaaaatgaggcacgaaaagaaaaaaagattaaaaatagctaaataacctgatcccgactacctggctgatgactggtggaaccaggactcaaacacaggcattctgactctagaatcaatcaatctatctatctatctatttttttgaaatggagtttcatccttgttgcccaggctggagtgcaatggcgcgatctcagctcactgcaacctctgcctccctggttcaagcgattctcctgcctcagcctcctgagtagctgggattacagggatgcaccaccatgcccggctagttttgtatttttagtagagacggggtttcaccatgttgg

SEQ ID NO: 48609 - DNA, 2352 bp, Homo sapiens
gcggccgcggagggacgatgcgcgagtacaaagtggtggtgctgggctcgggcggggtaggcaaatccgccctgaccgtgcagttcgtgaccggcaccttcatcgagaaatacgaccccaccatcgaggacttctaccgcaaggagatcgaggtggattcgtcgccgtcggtgctggagatcctggacacggcgggcaccgagcagttcgcgtccatgcgggacctgtacatcaagaacggccagggcttcatcctcgtctacagcctcgtcaaccagcagagcttccaggacatcaagcccatgcgggaccagatcatccgcgtgaagcggtatgagaaagtgccagtcatcttggttgggaacaaagtggacctggaaagtgagagagaagtatcgtccagcgaaggcagagcccttgctgaagagtggggctgcccctttatggaaacttccgctaagagtaaaacaatggtggacgaactctttgcagaaattgtgaggcagatgaactatgctgctcagcctgacaaagatgacccatgctgttctgcatgtaacatacaatagcatccaaatatggctgtcctggatgggatttgcccaatgtcgtaggtgatagaaaactcgcctactccactgcagaacttgcagaatgcgtggtgttaatctacagagaactgcagcccttattcagaattgagcagtgattgtcagttgatatctctgagtaacatttgggttcagtaactacagttttcaccatttgtcctcagtctcctttatgcatctgcaactttaaggcatagtccatcgatctacagggtgatctcatttgaaagctatgatggcattgtcgctgagttgacagaagcaactattgtacaaattaaaaataaccataagggagaaaccagaagaattcctctgaccacttacaattaaaatattttgtcttctttaaaaaaataagtaaaggagaaatattttcctacaagagtactgaatttcaggaaatgggatagagcttctaaccagtgtattccgtcaagtaagataataacagctgacctgccaacagcattacagggagattctttgctcagctaacacatttctgtttttcaaaattgatgcttaattgtagctgttattctaatttgtgacatggaactaactcatgcttcaatccttgatagagcaaaactcagaacaggttatgtaaaaatatagtctggctttaggaatttgttaatttcacctgctttgccacagaaaatggaggctttcacaagggtttgatcagaattaaaaccccaaacccgccctctgttaggggtggtctttataactttactgaacaagagggaagcaactgtgatgggaagagattacctagccttactaacaagaagcattctaatagataaactagtaccatcatgtaaggaagatgaagccatgttgcatccacatgttcccgtttgcagaaacctcacaggacagtacgaatatctggcatttttaagttcattaaagcagcaaattccttctcgcctttaagggctatggttgtagtgtgacccgtggctaacctgctttcaaaatcaagtatttgctgtagcagagctttattgcaggcattttaaaaattgaataaccatgtgaaataatttgggcttaaaagtgaacataaattatagagtggaaggtaagggacaaaagccttttacctttaattttcctggagaattatataaaggttttcttagaacaattttgccctgattactgaagcgtcaaataaagctggagtgaaaattttgttttgaaaaggtgctcaagctcctgacatttttggttttcatagtcgtgaagtatttatcatttgcatgactaatggcacaggaaaaacctattcataagttttacaatcaagtatagaggggtcttcagctaacttagttatacataaatgctgaaaagattatcttgagctgggccttgggagaagaatttggccttcagaactgcaatatcactgagcctgcgatctatacaccaccccacattttgttggtttcacagtcttgtgcaagtaacctctggtcttacgtgtgtaactgagagaagagtgtgtgtttgtgtgtgcatgtgtgtttattgttcctaagaatttggcacaagtcagagataattgcctatactaagaatctatactgcagaatatagtgtatcaaaaacttttttcttttaaattattaaagtgtcttttatacttttatgaaatcattggtagccccccaagtgtttaataactggcattaagcttagagggtgaaaaaaaaaaaaa

SEQ ID NO: 48610 - DNA, 660 bp, Homo sapiens
ttttttcaagtgaacatacagttttctttataagtatgtaaataaatttcatagcactacaaaaatacaagtcatctgagaagtttacagtggtcccagtactgtaggagagaattaaataaaataaaatagctgtagataattaaaagctaattagataaatcaagttacagtatcatccttcagattaaagtgctctgatataaccaatgccacagcaaacgaaatcctggaaagagattgcactgccaatgattttgtctcttaacctcaatgtaacaaggacacacataaaagagattcctgatttaataactgctatcatcttcacccccaaccacgctattagcctgtgatattcttcccctaggagagatgtcaagattagatgagattctatcatagccagggaaaaaaatgagaaataccagaaacattctaattccagtcttaagtgagtaacaacaaaattacctgaagaactgaactagtgcttttagttaaggggaaaagtgccctagcttttaaaaaatatgtctataaatctagttttaaaaacatagcaattggctgcatgtggtggctcatgcctataatctcagcattttgagaggccgaggtgagaggactgcttaaacccaggagttcaagaccagcctg

SEQ ID NO: 48611 - DNA, 1866 bp, Homo sapiens
gacgggttcagttcgtcatggggctgtttggaaagacccaggagaagccgcccaaagaactggtcaatgagtggtcattgaagataagaaaggaaatgagagttgttgacaggcaaataagggatatccaaagagaagaagaaaaagtgaaacgatctgtgaaagatgctgccaagaagggccagaaggatgtctgcatagttctggccaaggagatgatcaggtcaaggaaggctgtgagcaagctgtatgcatccaaagcacacatgaactcagtgctcatggggatgaagaaccagctcgcggtcttgcgagtggctggttccctgcagaagagcacagaagtgatgaaggccatgcaaagtcttgtgaagattccagagattcaggccaccatgagggagttgtccaaagaaatgatgaaggctgggatcatagaggagatgttagaggacacttttgaaagcatggacgatcaggaagaaatggaggaagaagcagaaatggaaattgacagaattctctttgaaattacagcaggggccttgggcaaagcacccagtaaagtgactgatgcccttccagagccagaacctccaggagcgatggctgcctcagaggatgaggaggaggaggaagaggctctggaggccatgcagtcccggctggccacactccgcagctaggggctgcctaccccgctgggtgtgcacacactcctctcaagagctgccattttatgtgtctcttgcactacacctctgttgtgaggactaccattttggagaaggttctgtttgtctcttttcattctctgcccaggttttgggatcgcaaagggattgttcttataaaagtggcataaataaatgcatcatttttaggagtatagacagatatatcttattgtggggaggggaaagaaatccatctgctcatgaagcacttctgaaaatataggtgattgcctgaatgtcgaagactctacttttgtctataaaacactatataaatgaattttaataaatttttgctttagcacttggccccattgtagattgccctgtgcagtaaactttcaaggtgtcggctgccccagattgcttcatttgctgggtgtggaaagagttgctatggccagggcatatgggatttggaagctcagcagaagtgacttctgctctgtggttgctgctccccggctttcacagacatggtatggcagccattcttttatctatttaaccaagaggatgctggggaattgtgctgcttgtcctgttggctggtggctgcattatgtcctggggtgtgcatgtgggtctatttagagcttctgtcccttccttcccattgcaagttgcacccagatgagacagctgtagtactaggtctctttcacctctcattgcctgtccctgcttcgagctggttgtcttgtgcgtgggacatgggccttcctatctgtgttttctcaaagtcaggagctgaccaggagcacactaaggtgtggtcatgcatcataaccaacattcactcatctgggacattcttaagatacatttataaatcatttcagcagtagtactttgtatgtgttgagagtttacagagctctttgacatacgcgatcttagtctttacaaataaggaaaacagctcagtttgggaagtatcagagatgggattcaaacccagatcctctggtccaagttgtatgtgcactgaactaatcaggcaggaaaaaagcccagccactgtctcacagattgttttttgtatattgtagcaaaatcctgaaacaatggggtccttccagtctcatcatacaaaatggcaatcttggctgggtgcggtggttcatgc

SEQ ID NO: 48612 - DNA, 719 bp, Homo sapiens
tttttttaaaacaggagaatcatttattgagtgcactcaggcccagctgactcaacgtccaaaagactgggcccggaagaaagacagcacttgacttctatacacacttcacaaaagggggtgggctagcttgaagcaagcttacagtggcatgaaagcagggatatagaggcaggacaaactcaggattgcacgtgaccgttgccaagcaacccagatgtccgttatctaggtttgcccaggcacagacttatcccataaccttcactgtggtgcccaggcagctcaggcttctcatgaccttcgctgtacttcttagataaaaacagaatacttgaaatcactagttacagagaacaggaatctataaactcattcttgtaaaaccaaaggcaaaattgtttttcttctccctgtgttgagggagtgctgggagagtctccggagcacattagataatattatcaagacttttcctgggtctcggctgtgcctgttgctgcctctgggacaaatcagcctaaaacaggaaaacttatttctctttcttttaaattttatttttctttaatttccggcctccgtgtagctgagcccagggctttttatgggctcagaatagggagtgtgtgctgattggtttgtgagtatgcaaaaaaggttaaagtgaagacaccactcaaaggtgggcatgatagtgtagaaaaccaattaggaga

SEQ ID NO: 48613 - DNA, 657 bp, Homo sapiens
gcacccagcctatctcctagatcttgaatcaaaaataaaatgtaaatcacttccattctgctagcatgagggtttgttgctaaaattgaggattctatctgacgtttactttttgttgttttttgagacaaggtcttgctttgtcgcccatgctggagtgcagtggcatcattataactcactgtcaaactcctggactccaatgttccctccccttttagcctcccaagtagctgggtctacaggcatgaaccatcaggcccagataattaaaaaaactttttttggtgaaaacatgatcttgctatgttgctcaggctggttgtctggcattttctttgtcctttattctttatactagctaaaccctggagtatccttgaagcctttactggcatacagagtacctgaatcttactttggagcctagcatgggtcataaatatatctgattcattaacctgtgagacagctgagagaacacagactccttacctgtatctccagggcatatctgggtttttctctgccaataggattttcctgctttctagttagtaatattgaggaaagaaggaaagggcttatttatccatttgctttttttccactgtgaatccatctgttctttccatggaacatctgggggagcacctc

SEQ ID NO: 48614 - DNA, 953 bp, Homo sapiens
agaagatctcacaattaaaagatgaattaaaaacatcttctgcagtctccacaccatctaaagtgaagacaaaaacggaggcccagaaggagttattagatactgaactggacctccacaagaggctgtcctcaggagaagacaccacagaattacggaaaaaactcagtcagttacaggttgaggctgcacggttaggtattttacctgtgggtcgaggaaagaccatgtcctctcaaggtcgaggaagaggccgagggcgtggaggaagaggaaggggctcactaaatcacatggtggtggaccatcgtcccaaagcactaacagttggaggattcattgaggaagaaaaagaagacttgcttcagcatttctcaaccgcaaaccaagggccaaaatttaaagaccgtcggctacagatatcatggcacaagcccaaggtaccatctatatccactgagactgaagaagaagaagtcaaggaggaggaaacagaaacctcagatttgtttttgcctgatgatgacgatgaagatgaagatgaatatgagtctcgctcatggcgaagatgaaatctgatgctagctgtataatttttaggaatattgtttagaagaacaacttttaaaaattatttaaaagaagtcaatgagccaaaaaaaatttttttatttttcttttcaacacagtaggttcaagaacagcaagtttgctatttaaacacatctcataactgtacatgatattaaagcaccaaaggcctagtgacttttacacagttgtgaagatccacagcaatgacatggataatctctagagccttattttccacaccacctttttttgttgctgttggtgttggattatgatgtaaatgacagggtgttcagaaattttattttggattataatctactgataaaatttaattaaatgtcaaaatcacctgtaaa

SEQ ID NO: 48615 - DNA, 493 bp, Homo sapiens
aaaagcacacctgagccgcagtgtgtaggatgctggaaatggtggagatgggcctgcgaaagtgatgacccaggagcagcagccgggcacctaacaatgggtcagcaccgtgggcgtggagacgagagcggggattgatcaataccggagaagtacaatgtacaggacttgggttccatttggatggagtgggtgagggagagggaggagtcagaaatggcttccggtttccagcttgggcctggggattggagatgtccccactgagagtagggcacaagtgaggaaatggtttggagaggaagataagttacatcatggacatgctgagtctgagttgcctatgggacttggaatggggggtggcaaaatgtgtgtgatcttgagcaagatattcaacccttctgggccttggtcttcttatttgtaaaatggcgataagaatattacttcccatttgtgttgctgtgaatattaaatgcgctaccacatg

SEQ ID NO: 48616 - DNA, 781 bp, Homo sapiens
ggccctcgaggccaagaattcggcacgagggaactcaagtgtcctacataggccaggactgcagagaaattccagagcaccttggcagggactgtggacatttcgcaaagaggcttgatctgagctttaaccttctgaggtcactggaaggactgagcgcattcaggagcctggaggaactcatcttggacaacaatcagctgggggacgaccttgtgttgccagggttacccagactgcataccttaaccccttcaacaagaaccgaatcactgatttggagaccctgcctggatcacttggcagaagtgacaccagctctggagtacctcagtctgctgggcaacgtggcctgtcccaacgagctggtcagcttggaaaaggatgaggaagactacaagagatacagatgctttgttctgtacaagctgcccaacttgaaatttctggatgcccagaaagtaaccagacaagaacgagaggaggcgttggtcagaggagtcttcatgaaggtggtgaagcccaaggcttctagtgaggacgttgccagctccccggagcgccactacacgcccttgccttctgcttccagggaactcaccagtcaccaaggtgtcctggggaagtgtcgctacgtttactatgggaaaaactcagagggcaacaggtttatccgagatgaccagctctgaagccaacttctgtataccttcacccatttcatgaaaataaaatcaaaagggaaatcaaaaataaagaaaacgctaaagaaaaaaaaaaa

SEQ ID NO: 48617 - DNA, 955 bp, Homo sapiens
atttggatggggacacagccaaaccctatcaactagggatttgttgacttaatgcacacgagccaaccataccccaacaaagcaggtactagccttatagtacacgtgaggaaactgaggaatgaggcatctcattcatgttgggaatattaattgaaaaacctgtcagctcctgtggcccttggagttccttgaaaataatgttatacgccaatacttattatagtactgtaaagatgcaccatatcccatatctcatttgtcagtggaaagaacacagatttggagccaggtaaaagtacctcttgctacctgtgacgtcttggacaagttcccaccttttggggccagtttctccatctataaaatggggataatgcctaacttaagagttattttagatccaatataaaaattcccagcccaatgcctggcatgcagtaagcaggcaattatattatttttcctctctactagtcacaactacccaggaagggaagttttcactcattcctggccatccgccccatgctgggcacttggggcatgctgactgtggtgaatgaaacagacagggtactggtcctactattatagaatgtttgcttcataagaacaggcactgactgtatcatctctgaacacaatggaatgaagctggcaataacaaaagaaaaattggaacatttacaaatgtgtggaaattaacagatttctaaacaatcaaggggtcaaagaagaaatcacaagggaaattagaaaatactttgagatgaatgaaaacaaaaacacaaaataccaaaactgagagtgtgtgatgacaacagtgtgcagagggaaattcatagctgcaaatgtccatattaagaaacaagacagtaactatgtgaggtgatgggtgttaattagctccagctgtagcaatcatttcctaattgtattttcaaaacatccc

SEQ ID NO: 48618 - DNA, 1458 bp, Homo sapiens
tttccagaagtaaggtaactttactcagataaaacacagatggtagcagatagaggccacaagctcatgggatgccattccagagggcccctcacccacagaggagcccctgtaggaaggaggcccaggccccatccgcacagcaagtcccggtgaggggctctaacacacccccactccagcctctggtcatggacacagcccatagcgggcacagcatcatgatggaatggactctgcaggccacgcatggctcctgggaacccccagcccctcccttctcctcccagcctttccagctgtcttcccaccaggagggctcggaggtcacagcacggaacgtcttccaagagcccctgccctatatttctgcctggatgtaggcaggagctggggctggtgcaggagccagggcaggaaccagagatggggtcaagcaaggagtcctagtccaagcagggcctagactgcggctaaggctaggctggattctgtgctaagaaacagcatagaaacctgcaggcagaggctccggcccagcctgcggagcacaggatgcagcaggtgatttctgtgcccagcacacaagctccggccttatcacattttcctccactggccctagaatgagcaaagagcttgggcggatagcctgagcctcagccagggagcaggctggcctcgagggagcaggtcagcccaggaagggaggggtctgcccatgaccaggtggggtgtggccacagtagctggagattggcagcacccacccgatctcccatccccagggaactttcttccagcttgccaggtgtgacccactccatctcaccgggaccctcacagcagcgtgtcggtgcgtttgctgcgccacaccaccaggccagccatggcgacagtcagaacgacgggtataacgatcagcgggatgagaacctcgtctggggggtcctccaagtggaccctgtccacggtgcagttggagaagaactgcctgtggatgccggtgatgaagccctgggccagggggttgggccagtagcagcccacgacattggcctccatctcggtgcagttggtgaaactctcatagtacacgatgaactcggacaggttgcaccacttccagacgtccaccttgcccatcatgtctgcgaaagccttcccacacaggggcagcctctccaacatgcctgtctcgttgcagccgtctgctctgggacacccacctccttgccctgagggctcctggctggagtggccccacttagccctggtccccgatccccaccttcctttccttctctcccagtgggcacttccaagctccatgtcaagcctgggctctgcaacagattctggagtacaggtcggcattgatcctgggaagggccgcagagcagcagcagcaacgggagaagttgcgggcgccgcagcgctccagtctccatggctggc

SEQ ID NO: 48619 - DNA, 585 bp, Homo sapiens
tacaaatggccaatttcaatgtctgcaacagtgaactgtctcgggatattttaaaaagtgagtgacaagtataaaagcttttcccataagttattacatagctaaagtttattcttaaaacttagtatctgatgagaactaagagttttctcatattcattatatttaataaatcactctcaagcatgtattctctgatgagttttggtttaaggctttcacacatgcaaatcggcttttaaggagtcctcttcaatgtgaattttataatgattagtaagggatgacctctggctaaagagtttcccacatgcattacattcatagggtttctctccagtatgaattctttgatgtgcaataagtgatgagctttgtctaaaagttttttccacatgtattacatttaaagggtttttctcctgtatgaatcctctgatgttgtataagagctgcactttggccaaaagacatcccacattctaaacatcgataaggtttctctccagtatgaattctctggtgaatactaagcgatgagttacacctgaatggtttggcacattcgttacacttatagggtct

SEQ ID NO: 48620 - DNA, 849 bp, Homo sapiens
tttttttttttttgtttttattgttattgcttttattattattgcttttattatcattaaaactctagttcttgttttgtctctccgaatgaagaagtatgtattttcattaggccaagtctgcgggaaggctggggcagcagcatgaagtgtttgaggaagtgggttgggtatgtcagtttccatctcctctctgagcctgtcagggtgtttctggagtgcagagcaggagcaccctgctggagaggccaaggcatagctgtgggcaggctcgggcttcagtttttccatgcccaccatttgcccctttgtcctagggtactttgaccagcagggtatgttggtgctcatcctccccaccctacatgttcccaggttctgtcccatggcacaggtgatggtctccctctcagctctgggtccatctccctggcctagttctccagcatctgctcacaggttcgagccacatcactgagcttgaggcgggcatagtccactcgcttcagagccatctgacagtccttcctcgaagagtagctggagccctcatggggctgccctgtggccacctgggtgaggtagcggatctgagctgacagctccgcctccacgtgttgcactgaagcggtgaaggccgccgcctgccggtctaggagccgctcgttagttttttccttggacaattctaggatcacagtacctgcattctgaaggatggcgccgatttcccgttcaatgtcttccagagcgcgtagtctctcgttcgccaggctgtaggtagccattatcactctgggaattctcaccaagagtttctcctcagaaacgcgacgccggacgcgtggg

SEQ ID NO: 48621 - DNA, 447 bp, Homo sapiens; identical to SEQ ID NO: 7750

SEQ ID NO: 48622 - DNA, 1193 bp, Homo sapiens
aaaaaaagcaaacatgccctggtgcttccaatgtatacccaaagtttaacccaattgttgcaaccccctgatctaactggcttaaaggttaagggtgtgattgttttttcttctgtcctgaagtaagtcagttctagatcatcaccatagtagggccaccaataaagaattctaagcattatccactctggtggtggtgtattcataaatccttccccagtttctttaaaaaagcaaaaggggcaggaggaagaaggtacagaaatcacatgagaaacatttaaaaatacttttagtaaaatactctgtaccctgtcaaaactcctttggcacacagtaaatcatagtgaagaacaaacatagcagaattgccttagttgaggctacagtgtaagagagaatacaacttagaaggtaataatagaaaaatcatagcattttccagcaattgatatgacagtaaatttataaagaaatacaataatttcccagtgactcttaactgttcaggatgccagtgctaaaccaggttgccatacataattcaaagaaagctagaaaacacattccacatattaaattgaagataatttttgttcagagagcaactgaaacatatagtaagttatatattttttagatataagataaaattcttttgcttttagttaaaatgatttttttcatacattctaatggacatatgaaaaagatatttactttttttcatcactaaccctgaggaaggaagaacaaatgtggagtaggccacaaaactcactaggaaccaatctccacacttttcccaattgtgaatagcaattaatgggagaagttcaggatactacacttgtttaggctcccatacacatcagcttaaactatttaaaatagatacaacatttgggcaactagcacagtggcatttctctgcttcaactgagaactattttaaatatcatcacttttatttcctacactggtttaaacaaacaaaacaaaataagacaaaacttgacattgattatgtaagaactttcagttcaatatatagtaatatgtagggacaatatagcttcattgctcaagacttccattcagcaggaaaaaaatgcataagttctaggaattcttctctttcactagaaagacgctagctattacaggggagttgatgagaggaaaatgtgaaa

SEQ ID NO: 48623 - DNA, 1813 bp, Homo sapiens
ttttttttttttttgactaagagtgtttggttgcttttttgtcacaagtaacttggaaaatagaagcagaatagtaaaggttctattcagcaacatagttcatggattttgtggaggttctattcagtaatatggttcatggatttagtggtgactgataagattttatttttgaaggaaaaattgcttatactaagtccagagacatgcaggtgagcccttttgtcaggctgcaaatcatgacatgccgatggttgtttattttgtttttaggtgtgcattctttttcttcttagcaattcctttatgatcaccttcccttcttgtttcactccctcccgctctctcaaaaggaacttgggaaacttgtgaaacccaggaaaacctttagtcttatacctcaactacctttcagtcctgtctgggttttaaataagtgaagtagaagaaattgagtatttcgtgacataagaatatattatcaatacagttttatgcagtaagctctccttaccataaatgtttcttggttgacaacatctaagacaatattagtgggatgaagaaagaaaagcaggggtgcttttggaagcagtgttagtgttcctcaaaagtcggaacaattgcctgttgatatattaataagacattaaagtcaaattttaatgttggcctctcaaatgatttggataccactctgcaaagtatttctaacctttaattcccagttttaaaacagatataataatagcatttaattggaatatactaggcagctggaaaagtatttgaaactaaattgacattaaaattaagatttgttttcaagtggatgtccattaaaagtagaaaaatatttgggataagtgagtgtgtgtttccttacatggctactaaataaaatataatgagtatacaagtatatctcctcttttgctatggaggctccatgttcaaggcaatggctttttaaatcttggctatctaaaattttttccctttgttttgaatatttgtaagtttttaagaagttagtgtcagcaaattaattgaagttatgcttctatactgggacatatttaaatactgagtatagtactgctgctactgcttctacaatgtaaaatgtatgacttggtgttttaaagtaaaaattatgatgttacttgtggagaaactaaaaatgttgtacaactgaccgaaagaaaacccttggggataagtttagtgaggggattggaatccccaaaaagataacatttttcttctgcttttaaaaactgaaattccctgttctagttcctaacaattctcattacatactatgccagattacaaaatacttatttttaaaatgaaatctatatattgactttcttatcaatcatcttactgtgcaatcaaaattagagtactttggtttgaaaacaacacttagagcctccagataacttttaagacttatttagctttgtgggtggtattttcatgcaaataagtaagggtgggttttatattttgtagaagttttcggtcctattttaatgctctttgtatggcagtatgtatatattgtgttaagttcctcaagaatctccttaaaaactttgaagttaatacttttgtgcaactgtgttttgaataaagccatgaccagtgttaaaaacaaacaaaaaaatttgcagtactcctgattattcttttattgtttttgactgttccctgtttttttctgtgactgctgtaacttaaagtttttgaaactgaattgcttcaaataaattgaagatttgttataatgattaaaaaaaaa

SEQ ID NO: 48624 - DNA, 275 bp, Homo sapiens; identical to SEQ ID NO: 7771

SEQ ID NO: 48625 - DNA, 431 bp, Homo sapiens
tcacttcattttgggtcgactctacaacttccagcccttcctcactcgcactgaagtttacaaaactggtgtcacacattattttagcttagagaaagccaagaaagagctaggttataaggctcagccatttgacctccaggaagcagtggaatggtttaaagcccatggtcatggcagaagttctggaagtcgtgactcggagtgttttgtttgggatgggctattggtcttcctcctgattatagcagttctcatgtggctgccttcttctgtgattctgtcactgtgaaggaggggccagaaataaggtgatcacagttggctgagatggttctcaagaaacatgggttttaaaatgtgtacagtgatatctggtgccaaacattggctcttcaaattgctacttaagaataggttcttggattgaa

SEQ ID NO: 48626 - DNA, 1515 bp, Homo sapiens
tttttttttttttgctgattgaaaatgatttattaaagtccaattagtatgcttttcatttcaaataatccatatagcctccagaaaaatatgcacatgtgtaaaagtccacgttcatttctttcacttccaatataaagtattctgtattttgtataaagtacgtgcaaacacctttctgctaatcgggtccccacattcttttcactacaggtactttacaagtctgccctctgctcaaacactaaccgtgcactgacatcctccttcctagacagccattcatctcccggacttctttctctcaggacatcctcctgacctcccctgacctgcttcaccactgtgttacctcactggttacttgttacagcaaactgatgcaactactagtctacctggacaacatattaaacaggtatcacctaataggggtgggcagcctatcgggggtgattcctgggcgaatacacagtaaccaaccacatactgacacactcaacccatttgctacagatggacccacactaattgatatgacaatcctttattcactcggcacatttggtttctttgcattttcttccattttacattgcaggtgtggctaccaagagctggataacgagtccctcaaacaaagtttggaattgcgagatatattggggtaccttgattcttgagacagttgaattcttctagttgatcttgttgtattaaaaagtcactctcaactgaagtgaccactgcatttcttttgtaaaaaggtcatttgactggcttttcctcacaactgccacccatgcagtacaaaagcaggaaatccctttgcatgaaaggtgtaagtacaagatgacatttcacatttttttaaaaaaagaatccttcatgggaatatatcctaataatcaattatatggagacagttttatgtacaccaaatttctgcaactttataataatgaaaattagaaacaacctaaatagttaacaacatgggaatggttaaataaactgagttgcatccattaaatggaatataatatagccattaaaattatgtttttgtaaaatttttaatgccataagaaaatgtggcaattttgcaatgaaaaagatctacttataaaactgtttacagtatgactccaattatgtaaaaaaagtatacaatacacatataggcatacatgggggttgctttttaaaggtggttacttctgggttgtgatattatcagtaatcatttttgcttttttatacatttctgcatttttcaagttttctatgatgagtatattattttacaaagactacgaaaattttcctctgatatactggtaattagaatgtacttgggtattttaaatatatgggaacaatattatagtgcttcatcttctatgacttttttggaatacatatcactttggtaataaacttacattccctgttttatacttgttacaacattttaattaaacagttaatattgtgattagagcattgtttgct

SEQ ID NO: 48627 - DNA, 903 bp, Homo sapiens
cagtctggtgcgactcaatctttctagtaatgaactgaagagtttgccagcagaaataaatagaatgaaaaggttgaagcatttggattgtaattcaaatctcttggaaactatacctcctgaattggctggcatggaatcactagaattgctttatttgcggaggaataaattacgttttctaccagaatttccttcttgtagtctattgaaggaattgcacgtaggtgaaaaccagattgaaatgttagaggcagaacatcttaaacatctgaattcaattcttgtgctagacctgagggataacaagttaaaatctgttccagatgaaattatactactacggtccttggaaaggcttgacctaagcaacaatgatattagtagtcttccctattcattggggaaccttcatttgaaatttttggcattagaaggaaatcctttgagaacaattcgaagaggattataagtaaaggaacaccagaagtcctaaatatctacgaagcaagatcaaagatgatggacctagccaaagtgagtctgctactgagactgccatgacactaccaagtgaatccagagtcaatatacatgccatcattacattaaaaatattagactataggtatgtaatttattattatttttatttttatagagatagggtcttactgtgttgcccaggctggtcttgagcttcttgggctcaagccatcctcctgctttggcctctcaaagtgctaggattataggcttgagctaccatgcttggcctaatttatttttttttaaaacattaccaaacacataggaaacttttcagaaagaaacccttcagtaaaaaggacaattgatgaggaaaaattcatcagagtacttgacttagagtaataataattg

SEQ ID NO: 48628 - DNA, 384 bp, Homo sapiens
tttggttataaatcctgcaatatattacattttttaaaatcctagtacaacaaaaacaaatcttaaataaaattgaacaaacaaacaaataaaaacagtagcagcagtggttacctgtctgagcacctacattttcttaggaggggatcgtgtctcaccagccaaatagcccataaaccttctcaaaaaaagtgagccaggagaaaagtataacacaagatttgatttcacaatgtctctaagccccacaagccccaaactgggggattcactgaatgaaacaaatttgcttctccattgctttcttcttgagaaaaagagatgattttcaaagtcaatgccttcaatatgttctcaaagtctgataatgtggcttgatggaat

SEQ ID NO: 48629 - DNA, 335 bp, Homo sapiens; identical to SEQ ID NO: 7791

SEQ ID NO: 48630 - DNA, 772 bp, Homo sapiens
acaggtaaaacgggaaatcgagcaagattgttgtgtcaatgtcaacaccctggctgtgatgctttatcctaaagttttgcaagatgttaccattgggtgaaatggggtaccaagtacacgaatctctctatattattgtttctttaactgcatgtgagtctgggattatcccaaaataaaagtgttaatttgtaaaaagtacacacagcatggcagttcccagcctcagagattctgatttaagggtctagccgggagcctgggcatgtgcttgaggcccccaggtgagtccagagtacagcggggctgagagtcgctgttgacattggctgcagggtggacagggcgagatgggccctgccggagcagacctgtgtattgctaggtccttccggctctgatgctctgtgataattggccactttactcgccattttcctcccagagagcaaacacaggtctagactcaatatcgtgtggagctatcgatgaccacgggtcacttccatctccagcactgcaggctgtgcgggctggtccaactggggtacggttgagggtcctggctcagaccaggcctgactcctgggccagtctgtaaaacaggcccttctgggccagcagctgggccgggctgccgctctctgccacctgccccttgtccatgaccagaacccgggcacagtccatcacggagcgcaggcggtgggcaatgagcagcacagtgcactgtgcaaaccagctcccgagcatggcctgcatcggccgctcg

SEQ ID NO: 48631 - DNA, 2271 bp, Homo sapiens
  misc_feature (1)...(2271): n = a,t,c or g
tttttttttttctgatggaaagccattttatttttctctaaattttaaaatagaagactttaatggaaaacatttagtaccatcatgtcaccctgaatgccagcaatacctcgacttttacacacgcaggaagcctagtaaaagccccgtcagtagtacacatttctctatggtccttcaacagttttgcatatacaaaattttctgctattttgctttagcaaacagcaataacttttgtgtttcctatatgacacctaatatccagtcctacagtaatatagttagaaaaataaaaggcttaaaaatttcatagtacgagttcatggtgctaataacagaatctctttaaacataagatcattttaagcctcttacataaccaccttctggtttcatttgaaatccttaagaattaaaatctagtaagattgttaaatcaacgtacgtcaatcattcattttcacttgccttgggagagttaattcccactgtccactgaatgaaatgcctttcaaaatattaataaatatattacagtatttacaagcattcttatacactccgacactgacagggagttaagccatggagagggaagcacaggtttcccaatagtgtgacttcatgacgtatgggacaaaaggaaccggtgctcaggcctggagggagctgagatgagagcagggatgatggttcagatacgcacacatgctctaagacacatcagactctagctgagaccagccagacatttcttttgttgttggattagaagtaaaagctgaacaagaaaccaggacaaggaaggaagaactggaagctatgccctaaagtcagacccaggctaaggattttaaaaccaagctcccacaagctcttagtgaattaccctgtggaaactatgtagctgacgtgaagtgtggaggggggtggtagaaaggggggttaaatgtaagactttgttttggcaacaaaaaatgatagtaatttgatttctacaactttaactgtgccatgtgccctttcttaccccactttctgcagattgtttcatatgaacgtaccctccacgtgacctctttaatgcacttggcaaactccgttaatgctgttgaagaatgtatgttctgtgctgtggtaagaggtgatcgtaatgcccaaatcatccaatacactatcataaagtgaagtgaaagacatgtactagatgtttgctttgtgaatgtgaatgaaagtcttattttgggggtgtagtttcttatgttttaataaaaacagtagtcattattttaaaaagcacattctcctaggtgcatatttatatacatatacaaataccatttccttcccccttgtgcccttctgggtagtcattttaaaaactcaagccctggggtcatcaaaaggggtagatttatactcccacctaactgtctggagtatagagttcagatagtctcttaggaagttttataaatgagattcacccagtacaattctgaaagctcttaaacaggagtctttaaaataatgtaaacacttaagtaatcaataagggttctctggtggcccacttttacatgcaaatacagaccaactgttaacatgcattattttagtcaactggtaaagtttatttcataagtataagtaattttaagccttttactaaactgtaaatttcaatccattaaaaactactaccggagcagttttgaggtattactgttaatttagtatagaaatgttactgtattttgatgtggtatgaaatgcagccgccatgcctttcatgaaacggtgctatcgtggtgctgactacagacatgtcctatggctttcaggaaattattgtgcatgtgcattaacagattttccaaacattaatgacaatttgattggttagtcatttgtaagcataccaaaataataaagtatagcccacgtatgagccaaacacactgagacatttgaggcatacaatgctaccctccagtctactttcgtcagaaaccaaacctactcactcaaatcatttacaaggaaaactagtgcagaaagcaccccaaaaatgttgcctgtcagcaggttaattttcttctaactttaaaagaagtagatattttttcttttaaaattcatttataaaaataaattttagtttgagaccctaggtaccaaattgtggcttaatttactcaagatggatgtactacaaagttatgaaaaatgtaggctggaaaacccatggggcttccagctncattt

SEQ ID NO: 48632 - DNA, 893 bp, Homo sapiens
gacagcagacgtaagcagagagaaatcagagagcttagttcttcctctggggcgcactttgtggttaattaggacatgcaaatgagctagaagctcatttaatatcctccctgacatgtagccccaccccaccctgccccacttccctggcaggtacaagggccacctgattggcccaggtatctgtggaaggttccacctgcttctttgtggcccaggggaacagaaaagagtccctgctgggcatggctagtggggccggcctgggtctccctcctcccttttctcttcccaacctttcagacttggggacctctcttttccctcttcctcagacacttcccttgtgccccgcccctcagggtgatctctgaacccaaacttgccccaaagaaggttgctctgtcctctccacatccccatctcctccctaggggccttgttgggggagaggctcctccatctttccccaagtcacaccatcgtttcctacgtggtctggacaagagcaagagcacaccttgtccccaccttctccagagcagccagaacccacctcaggtgccttccccatccggtgcagttaaggcacttctgccagcaccatggtatgagcactagacttggagttaagatttgagagccccctctgtcactgtggaagcttgagcatgttgcttgatctctctgaaccttgtgtttctcatctgtgaaaggtgataatgtggggctgctgtgagatttaaaggacataatgcacctacggtccaagcactgcctggaatacagcagaagctcagcagatactggacaacccatccccttagtagaggcactaaccatgtgacccaaggcaaaagtgcttaagaaaaagtgctttctctgaaaaaaaa

SEQ ID NO: 48633 - DNA, 1516 bp, Homo sapiens
tttttttttttttttgcaaacaattaaactttatttgaaccttaaaaatttgcagagtggaacattattgtaagatctaatggcaatagagtacaaattcagtacagagcaaataatcaagcaaaatgctatataaaatatgacttacaatcacctttcgaaaaaaattagctctctaactgttcacagaaaaacaaataaaagctaagcaaacataatgagaccatagcaattagcatattttctaacaagccatgttgtttaaatttatattaatgatattattatgatcttgaagagtatgtgatatattgtcaagggtgtaaagaaaaactctccctgggtttgtataccaatggattttccatccaaatggaattataaagcagtcatgaattgaaagtaatgattatttgtcctgtcactccagttttaagtcttttctttcctttcttatgtctcccacctatattcaagttttaaaagaacaaaggccggtggagatctgaacagaaataacaccttatttctgtattgtcactgttcacgagactatctggcttggaactgttggtcatcagttggcaaaggactccctctcctggattaactgtaaaaggaggcagaaatctagatgctttccatcatgggcgagtttgtgccatgggggaagggtttcaagaggttttgtctgcaatgaaaagctgctgccatctactggcctaggactaaaaacttcttttcaacccaaagcacaaacccaaatccacaaaggctacattgtcatgggaaacaacggcttttgcttttcagctgctcaagttttgaaaaccagtccactaaagtcgtctttggttgtctaacttttgccaagataatttcagtctatttcaatggcactatatgaggaaaaggtaagaactgcacaaatgtaacttctgaaaactttaacttcacaatgtctctctatataaacttgtttactcacaatacctaaaatcaaatttctttttttttttcacatttgagattggatgatcatgatattgagggggtaatggtaaagcagaccctctcaaacactgcttataaacagttttacacaaataatggagattttaaaatattaccagctcagatacatgtttagaatctttataaagcaaagatattgaaaagttccataaagataatacctgataggtaatgattcaatattaggagtttatgtgtagtccaaataattatctaaccagcaatgcattttgacatatgttaaggctacattggtatctcataggtattttaaacacctctgatttcaaatatacatgaaaaggtaattatatgattctacaaatcttgctcaggcagcacagagtataactcaaatgtcaggctaacactacctttctactcacctgttggtacatgctaccactgggatttctacactctcctctgcaaacccttcctttcttttcagtgctctgagaagtatatagaaaagcctcaa

SEQ ID NO: 48634 - DNA, 2456 bp, Homo sapiens
  misc_feature (1)...(2456): n = a,t,c or g
ttttttttttaaataatgatcaaggaatttttttattcattaagtttcagtatcattacagaaaatgttatggtacagaattgtttaacattattttgtctttgctcttgatttccacatgaatgctggtaacactaatatctgtacaagatcagtctttgattttatttttttgttctgtacaattttaaatgtattggttaaaaaggctgtcagcacttaaggaagcattttttcttcagtttgtttcttcaaataaaaggtgtccagttactgcccaagagtactgtgccgtgacggaatttggggcgagaaacctccctggatgctctgcaggggatggttcttgaggcaaggcagagcctccacccagtcagtcttcttttggcactgtgcacataaacacgagatacatgagaaagaccaagcaaaagctctctgtaaagcagttatgaaagcatactaagaagggaaatccaagtgttgcctacgcctagtattaaataagcagacagcccttggatttaagagccataagtagttgtattttaaagatgagaaaaacacaagttcctgcaggcaccctaccgctgtcctacctananaantatcgctatcagacctagcattgaacacacaaagcaatttgcaagaaaggaaaaatttgccttgatataatcagaacagaattttctgttaagatttatttttaggtgtttttttctttaaaagatatttaaattcatttgaaatatagttcaagatgttgactatacagatcaacttttatccaaatcgggaaaactagctgtgccgttgcatattacaggatacagtcaatgatatgtggacatgcatcaaagctttctcctgctggtgaccatcatagccgtccaatgaccatgacatccaccacctcgcctttgtggagctccacgtactgttctgtctttggaggtagcatcaacaatccattggcactgcgcatgctcatcagacggctgctcatttgattacctgtactctgtgcccaaggtagtggttcttggtgatgccaagttagtatacaccgatggtattctggacgaggatcaagttttacatcacatgataaccttgctttgatgatggttggccgaggatccaagatgccctgcattttcctcagtgcaggcacaacaaagagattgcaggtgaccacagccgatacaggattcccaggtagtgcaaagattatttttcttacaccatcaatatccaaagttgcaaatgttgttggcaagccctggtttcataaaaaccctgccaaaatggatctgagcatgaagatcaatgtccagcacctgcttgagatagtccttttcccccatggatacaccccctgatgtgatgatgacatcagcacgactgataccctcattcaaggcattgagtaagtcatctgggttgtctcctacaatacccaagttgatcgtggggtaaccatgttcctgaattgttgctagaagagttgaacgattgctgtctcgaatcttccctggtaagaggtcatcttcaggatttagcagctcattccctgttgacatgactgcaaccactggaaacttattaacttcaacctctgtgacacctacagttgccagaagaccaatctctgaggggcccatgtgggttcctttggccaaaacacattcccctcttttaatgtcatggccgatgggtctgatatcttggcctggccgagcttgcaccagaattcgcacttcaagttcttcagtgccatcatctgattccctgataagttcggtatcttccacttgtactactgcatcagcaccgcagggtattggagcacctgttgtaacccgcatgacttgtcctggcattactgtctgagttggctgttcaccagcttgggattccccaatgatgaaacgatctcctgggccatcagcagctcggacagcatagccatcttttactgatgctgggaaggggggtaaattgtcttttgcatatacatcttgagcaaggactcgccccattccatctcggtaattgatgatttctgtcccaagcaccggagtcatctccaggactgtgataaaggctttgtccatagatgtcagaggaaaaggagacatgcgatgtcttctagccaccttggtgatatcgacagcactgtgactggctctgagatctatggacaaagcctttatcacagtcctggagatgactccggtgcttgggacagaaatcatcaattaccgagatggaatggggcgagtccttgctcaagatgtatatgcaaaagacaatttaccccccttcccagcatcagtaaaagatggctatgctgtccgagctgctgatggcccaggagatcgtttcatcattggggaatcccaagctggtgaacagccaactnanacagtatgcnnggccaagtcntgcgg

SEQ ID NO: 48635 - DNA, 747 bp, Homo sapiens
  misc_feature (1)...(747): n = a,t,c or g
caggattcaaatccagaatccttcaccagtacccaacagtccatccacaatcttaacgattgccctctactgctccttgggccccctgtccccaaaagcctgtccaggcaagactcacagcttcagatgagtggcaaccaccagaagcggccgtctcagggctactgccatttgctttcgtgttcctcttcgctgctgctggaacaccagggcggtttctctgccaatattctttgaactttttcttggctgcagctaatttactctgtccagtttcttctgccattgtggggtggggagggaggcggggctggggccacgtcagccaaatcccagcgagcgctgatcaacacgtccagtcacccttaaagaatcagaaataaataggctgggcatggtggctcatgactgtaatcccagcactttcgggaggccaaagtgggcggatcacctgaggtcagtagttccaagactagcctgcccaacatggtgaaaccccgtctctactaaaaatacaaaaaaatagctgagcatggtggcagaggcctgtaatctcagctactcgggtggctgaggcaggataattgcttgaacctgggaggcagaggttgcagtgagctgagatcgtgccattgcactccatcttgggtgacagagtgagacctcgtgccgaattcttggcctcgagggccaaattccctatagtgagtcgtattaaattcgtaatcaggtcatanagtttcaaaa

SEQ ID NO: 48636 - DNA, 426 bp, Homo sapiens
  misc_feature (1)...(426): n = a,t,c or g
ggngnnnnnnttgnnttngatancgnttgacatgattacgaatttaatacgactcactatagggaatttggccctcgaggccaagaattcggcacgagggtgtccggctttgctggcccagcaagcctgataagcatgaagctcttatctttggtggctgtggtcgggtgtttgctggtgcccccagctgaagccaacaaggtgagggagagttctgaagatatccggtgcaaatgcatctgtccaccttatagaaacatcagtgggcacatttacaaccagaatgtatcccagaaggactgcaactgcctgcacgtggtggagcccatgccagtgcctggccatgacgtggaggcctactgcctgctgtgcgagtgcaggtacgaggagcgcagcaccaccaccatcaaggtcatcattgtcatc

SEQ ID NO: 48637 - DNA, 857 bp, Homo sapiens
ttttttttttttgacatctgtaactttaatttaatacaaattgatcataactcataaaatgggcaacattttaaataaaaatactgctggggtggcccagattctggtagttgaagggttggggtagggctgacaattccttttgcccaagggaggcccgggtggcgggggcagccattttaagaaccccctgtgtttagctcttccggctactttgggatggtgtgttgtgtcagagaccccaagtgcagaatctaggccccaggactagaaagaaaagtcaaggccggggagacatttaggctcagtcttgcagcccactcctccagttcccacctctgggcagggatagagccaaggggcaggacaaccctagatgtggactccacccctctcccgagttcttcacgattggatgctgtggcagaaaaacgcaggtggggcttgctccacccaccctaacttccttctagggaaatgacatttcccagactccccttgcagccaaggttctggatctgacttaagttcccccaaacagaatctcttgtaaaaatttagatttgggaactgaagtgaagtgggagaggggcaggcctcaggacatctattggctggcacggaccgtggcagagggagcctagttctgcagtcagcagctttctggcatagtggcttcctgcagatgggggcagctttcctggtcacaacagacatgatgaatctggcgctgggagttcctggaaattcagcagagtctgcttctccagctcttccaacaattttgcaagccaccaggggccaggtagtaaatccttgtctaattaaaccagctacaagtggctcttgttttctgc

SEQ ID NO: 48638 - DNA, 1019 bp, Homo sapiens
gatctagttcccgtatctgagctgggaggccctgacggcgccacggccccaataaggtcacctacaatggctggaggtttgtttgccatgaacagacagtatttccatggaacttggacagtatgatagtggcatggatatctggggaggagaaaatttggaaatatcatttcggatctggatgtgtggcggtaagctcttcatcatcccttgctctagagtaggacacattttccgaaaaaggcgaccatatggatctcccgaaggccaggacaccatgacacacaactctttgcggctggcacatgtctggttggatgaatacaaggagcagtatttttccttaagacctgacctgaagacgaaaagctatggcaatatcagtgagcgtgtggaactgagaaagaagttgggctgtaaatcatttaaatggtatttggataatgtatacccagagatgcagatatctgggtccaccgcccaaaccccaacaacccatttttgtcaatagagggccaaaacgacccaaagtccttcaacgtggaaggctctatcacctccagaccaacaaatgcctggtggcccaggggccgcccaagtcagaagggaggtctcgtggtgcttaaggcctgtgactacagtgacccaaatcagatctggatctataatgaagagcatgaattggttttaaatagtctcctttgtctagatatgtcagagactcgctcatcagacccgccacggctcatgaaatgccacgggtcaggaggatcccagcagtggacctttgggaaaaacaatcggctataccaggtgtcggttggacagtgcctgagagcagtggatcccctgggtcagaagggctctgtcgccatggcgatctgcgatggctcctcttcacagcagtggcatttggaaggttaaggtggatgctgtggcgggaacgttgcttcatcaggcgttgcctccggtgtggagtttggggctttaggaaagcctgggttgggtggagcagaacc

SEQ ID NO: 48639 - DNA, 759 bp, Homo sapiens; identical to SEQ ID NO: 7842

SEQ ID NO: 48640 - DNA, 549 bp, Homo sapiens
ataggaatttggccctcgaggccaagaattcggcacgagcgcggacggaagatggcgtccgccacccgtctcatccagcggctgcggaactgggcgtccgggcatgacctgcaggggaagctgcagctacgctaccaggagatctccaagcgaactcagcctcctcccaagctccctgtgggtcctagccacaagctctccaacaattacttattgcactcgcgatggccgccgggaatctgtgcccccttccatcatcatgtcgtcgcagaaggcgcttggtgtcaggcaagccagcagagagctctgctgtagctgccactgagaagaaggcggtgactccagctcctcccataaagaggtgggagctgtcctcggaccagccttacctgtgacactgcaccctcacggccacccgactactttgcctccttggatttcctccagggagaatgtgacctaatttatgacaaatacgtagagctcaggtatcacttctagttttactttaaaaaataaaaaaatagagacagagtctcaaaaaaaaaa

SEQ ID NO: 48641 - DNA, 905 bp, Homo sapiens
ggcacgagagtatggaggaacatctgtctgtcatgtatgagagactgagacaagagcttcccaagctcttccttcagtcccacgactacagtctgtattccttggatgtggaattcatcaatgagatcctcaacatacgtaccaagggccggacatggtacattctttcactgaccctctgccgtttcctggcctggaattattttgcacaccttcgtttggaggttttacagctgacccgccaccctgagaactggaccctgcaagcccggtggcggcttgtgggggctgcccgtccacttgctctttttgcggttctacaagcgtgacaaagacgagcattaccggacctatgatgcctactccactttctacctgaattccagtggcctcatttgtcgccatcgtctagataaagtgagtcctaggtagggctgggtggggtaaagggtagaacatttgtgtgcctcccccaactggcattaacctttctccctgcagctgatgccttcacactcacctccaacgcctgtgaagaagctgctagtgggagccctggtggccctggggctgtcagagccagaacctgacttaaacctgtgttccaagccctgatccttgaccttggagtggaggcagcactgaagactgctacgcccaagagaaggaggtggaggcagccaagaatctcaggagccagcttcctctcctcgtttctctccttccttcctttccatctcatgctgtgtaaagctgctgtgtaatttaacttgtaaataataaagtttaactgactatatgagatagaatttcacatatcactttctctagatcccaaatgttcccacaagctttattccaaaaataattttatttaataggtattaaataatgtatagaaggaa

SEQ ID NO: 48642 - DNA, 2169 bp, Homo sapiens
ctgaagtggttttggccttggagtaggaattgccttcttggcaactgtggtcactcaactgctagtatataatggtgtttaccaatatacatctccagatttcctctatgttcgttcttggttaccatgtatattttttgctggaggcataacaatgggaaacattggtcggacaactggcaatgtacgaatgtaaagttatcgcagaaaaatctcatcaggaatgaagaaggcaaaaaatatcttttgtacagaaaagcaagatgaaaaggatgtgaaatggtagatataccaacaaaacttcagactgtaaaattgccaggatgcagttttccccttgattggcgtgtgtgtatatatggaataaatatatatatacacacacacatattactgcaatctgtgattgcttcatctgtaaatcagttgtaaacctttacatatttgacttaaataactgtaagatatatatgtactacattaaaaagtgttgattaatagatgaaatttttaaattaattttttaaaacatgccatacattgtatcacaatgttaatgtgccaagatattgttcctgtcatgcagagtataagaatgctttgaacaatttgtagacttagtgaaataaaataagaggaaagccaaaaacaaacaaacaaaaagcatatggggagctgggtattttctctttagcttactgttgtgcctttttatttttctaatcacagcagtatgagttatgagtgccctaatttgtggttagtttctaatttaatgttgtttcatagagtttgggagtgttttgatacagggtgaaaatgaacttctggtttcaaacctgcgttactgggagacagcccaaagagtaattttctgttttggacaggttttactgggaagtatatgtgatgaggcagaagaggttatcaggcattaaattgttttgggttctaaatttggggaccagttatatattaatttaaaagtaaggaacattaggaggatttaattaggattaaattacctgttttgggaaatacagtgacctcttgcagtgtcacaaaagtgcaaagtgatattaggctgtcatctgcaatacagaatctcattgcttttgcacatgggagcatatagggaaactccaaacagatcacaatgaggtttctaaatctgttggggttctgtcttctattggggttctgtgaaggcaaaccactgtaggctttagctggggttcagtcatatgactcgttggtgggaatgcctagggtttttcatcttacatgcagtcttggggggtgggatgaatacataatttcttatgtattcgtgtatcccttagtggaatagttccaagtctgtttaaggagtgtattgagatggcattctctgcatgttaaagatcttaatggcaaccagcacctcttaagtatggtttaaacatattcttagctaattttttccattagtttttgaaattggtggcagttgtctgatccacaagggcaagatcttctgagtactctggggtgtgagtatgtgtgcacacgtgtgtgttggagtgagtgagagaatgtgtctgtgcatgtggccatgctttcctagaatgtcaagtagatatttttacactttgagttttaaagcaattactatcagactgagatcttgtatgccaaactttaatcctgcttttatgttttcaggctgaaggtgtgaaaatcctaagaggatttccatattgaatatgtgtacacaatcttaactatcgtggtggaaaacatactactataatttattattatatcttccagataatgttattcatttagaacaaataaggtatattttttagaatcaactttgtaagcactataaaatctttaataagttataaggtctatgatgtgtttactttaaaaattgctgttaaaagcaacacgtattaaatatgtaattatcatctgggttaagagtctgtttttccttcctttgtggtaagtcttagaatatggtactgtggattaatctaatgaaattaacatatgtggttgaagttaccaagaaacgatgaaaagaaactaaatatagttgacccttgaacaacaggagttaggggcaccactccccaacatagttgaaaatccatgtataacttttgactcctccaa

SEQ ID NO: 48643 - DNA, 1794 bp, Homo sapiens
ttttttttttactccgtgtgcagtgttttaatttatccatgtacataggcaattatcataatttgaaggacactttttacttattagactataagaaaaactgtacagaaagtttatactataaaattacatccctaagtgattagggtcctcagtaacacagaaataagaaattgaaaagggtcattgctcggcaatccacataactacagagtagagcgcaagctattgttcgtgatcagaaagagacttcataaaaacatcttcacatattccctagcattatgccctactagtaaaaggaaggcctatgacaatgccattgtttattttgtgtaacgcagcccttctatttccctcaaaagtttttttttcctgctataagataaagaaaaggctgtatccctaagatatatacctaatggaagattatctcaacagaagctccaacgttttccatttttcactgtctttcctgaagttcacctggatgttccacagcaattttctaaccctttcattgttgattagcctactaaaagtagaattctttagcaacacacaatacaaaagacacaggctaaaacaggcctcacaaatacactttgaaataggtatatttggatataaatataactttccagtccattattttttctaatgactaaactctaaatttttaaaaatggaagttttcaaaccaacgatgtgttaagcccattctcatgacacattcattttaacttctcattcagtatgggaaaattttatttcttccctttgtcttgcagaataatttaggttcccaccctgggcacgattcaccaaatagagtaagaccacagataaaagtgacaaagaaacacaggcaatgaagaacacttccaaaaacaaatacccccgagaatccagtatcataccagcaatgatggaaatgatggccaacccaagattctgaatggactgcatgaagccatatgcagttcccagctgatgttcaggaactacaaatgccaccattggccacaatgcacaggcaagcaatgagtaggagagtcccagaagacacatagcaatccaagggttccacatcgtaaaggccagcatcatgtgggacacaagagtggctgctactgcgcaaagaacccagatgatgttcttccctgttttatccaccaggagcccaaacaccggggacatgggagctgatatgacatatacaacactgttaattgcacttgctgcctgggaagaaaatccaaatttctctgtaaagaaaactttcccaagtccaataaaagggaacacagcaacataatagcagacacagatgataaatataagccacaggggtaaggagaagtcctttacatcagttaatttaataacttcacctgtttttccttgttctttatgaaggattctctctgctctctgatccaagtaggcaagagccaaggcacagattagtgaaagaatacacgttatacccccaatcataagtgtgatcccgagggttgtgtgaccagcagaacctaacaaagcttcaatcttagaatacagccatcccatgaggttcatgtttactgtacttccaattctagccatgctaagttgaagtccaaacaccaggtttaattctttgcctttaaaccagctcacagcatatgtattctgggcaactgctaaggactcgccaccaatcccaaatacaaatcttccaaattccatcagccaaaaagcattaaatattccacccagggcaaaaacaacctgtccaatgcaaacaaagca

SEQ ID NO: 48644 - DNA, 3821 bp, Homo sapiens
tgtgattggactgttggagcccatgaagaagagcatggtgcctgtgcaggtgcagctggatgtgcctgtggtaaaggtggcctcaggaaacgaccacttggtgatgctgacagctgatggtgacctctacaccttgggctgcggggaacagggccagctaggccgtgtgcctgagttatttgccaaccgtggtggccggcaaggcctcggtaagtggccttggtacctccagcagggcaaattggcaggccacccccacagtgaaggccaaacggaggaaggatttgctgtggtcaggcttcgatcagatgggcttgtggtgttggttaggactttggagacagactgctctggtagtttttggccaccctactgtctatgggactctgaacatagtttcttcatcactaagtctacctacctgtaaacctacttcattaggttgctgtgaagttaaatgagttaatgagaagaatatcaggcagatggtaagttccacgtaaatgatacccgtaatgactgtgggaatctgagcaaggcacttgtattctcttgatctcagtttccttttctataaaatagggataagagtccctacttagcctctcaagggcttttataatggaggagaattaaactcggggcagagagaagccatgtgtgtctgtctgtcactgaccgtggctttccctttgcctgcagaacgactcctggtccccaagtgtgtgatgctgaaatccaggggaagccggggccacgtgagattccaggatgccttttgtggtgcctatttcacctttgccatctcccatgagggccacgtgtacggcttcggcctctccaactaccatcagcttggtgagccccgagcccagcttcaggcatgacccagtggcctgcgttcctgtcctggctctgcactcattcattgtgcatcctttgcggggtcgtctaacccctccaagccagttttgtcatctgtaaagtgagaatgtccatatcctgatgggaggtggcctcactgtgggaggagattgagaagggcagctctcagaacaccttcacccctgatggctccggcctttcccccaggaactccgggcacagaatcttgcttcataccccagaacctaacatccttcaagaattccaccaagtcctgggtgggcttctctggtggccagcaccatacagtctgcatggattcggaaggtagggcctttacgtccttctctagtttgggggtggagtgttccctggcctaggcctagccagattcctgagaccatggtccttggagcctgggtctgttccatgggttgtaccatacatgggtccatgagagtcactctcatcctcctagagtcctggtgttcttccaagtgtgagttcaatgggggcccatgtagattctcctaggcctcctccaaaactgggaagagacactgcagatctccttctgatcgctctgggagcagggacacactcccatggacaggtggactcacctagcctgccacccattttgcctgtagcacgccctcttgctattgctcatctctctccctcctcccataggaaaagcatacagcctgggccgggctgagtatgggcggctgggccttggagagggtgctgaggagaagagcatacccaccctcatctccaggctgcctgctgtctcctcggtggcttgtggggcctctgtggggtatgctgtgaccaaggatggtgagtggggctgcctacactctgtctagttgggacctgggggtcatggttcttacccaattccccaataggctgtgatgtccactctcgggggagccggagtacagagagcagtgtttgtgatggcactttgttcctgcttctcagaagctctggcattgatgaatatgaaatgagtacacaaattattttagtaaaggtgacttattatgcagaggagagaaatagcaaagagtgagatatcactgaggcctaaggaggcaatgggactggaacccaagtctccagactcctaacccaggctgctctctcccctcaggtgaccccttcatatatcaccttgtatgttcccgctttccagggacttttacttagaatctaaatcaagaaaaaaaaaggcttagtagtcagagttgtggcaactatagcagaggagggtgtgaacaagtgaccaccaaagcctgagtgggtgagggggatagccatggaggtcctgtagaagcctggagctggcagaggtgcttgacctgaggttatctgggaagacttcctcaggaagtggggcttgcactgtaccttgaaggttccattccttgtgaaaagcaaagaatgccattccaggcagaggaacatcagggcagtctcaaaggtggctggtcctgggaacagagggtggggtaggaccttgaatgccacgcctaggagcagcctttggcagtgtgtagggactgtgctctctggtttacagagttcttttttatccatcatctccttgggttctcccaacttccctgaactcccagagtctggtaccttgccaagctgctattggccaaggccacagtccacgcccatgtcccaggtttctcctgctacagaaaggtgggctggggatcctggagacagctgtacccatttctctctcttgcaggtcgtgttttcgcctggggcatgggcaccaactaccagctgggcacagggcaggatgaggacgcctggagccctgtggagatgatgggcaaacagctggagaaccgtgtggtcttatctgtgtccagcgggggccagcatacagtcttattagtcaaggacaaagaacagagctgatgaagcctctgagggcctggcttctgtcctgcacaacctccctcacagaacagggaagcagtgacagctgcagatggcagcgggcctctccccagccctgagcactgtgtcagttcctgccttttctcatcagcagaacagaatccttttcctcttttccttcctcctctttggaattttcctgggacctacagaataaagggggggatggacagggggttttcaaaaggaacatggctcactcagagctatatggttagacgtttctccccttttccctaccttccatggtcctggttggccctggctttgcctactagaaaaccaaaacttcccccctggggttttgtgcccactctctgagaagttggggctccatcaagccccattctagtcatgtgcccctttcctgtccctaacagtccacaggcaaacaaatggtacagtcataagagccatctgtcacggacccacgcccagaggaacgtgcagaaaaaagcagagctacatggctgtgggcaactataagccaaatatttggctcagaacaggtgtccatgggacaaaaaagaacgatcctccacttgaccaagaaaaaagtgattctcccagaagcacaaagcatactcttgcccctcaggtgttgcttgtgtacatcgtacccatccattcggcttcacctgcagccaacggcctggaatcgcaaagagacaccactctgggcagagcagagcagggtatggggtggggagagagggtggagggttttataaacaaacttaacagcaatattgaaaggaggtgggggattgagggagggacagagtgttggagggccagagactagtcctgagatggaaacagcaacttgtacagtggctgagaaaataggatatagttttgatttttttaattgtaaaatattttggagggagaacaaaatcttttaacattttgaataaatttagagttttataaaatag

SEQ ID NO: 48645 - DNA, 502 bp, Homo sapiens
caggtctgagctgtgggctgaggcagcgcagccgctgccgcagggtgcgcgatgccttgaacctgggaaactatgtgaagcaacactctggattttgaaagacatcttttcatcatgggacagcaaatttcggatcagacacagttggttattaacaagttaccagaaaaagtagcaaaacatgttacgttggttcgagagagtggctccttaacttatgaagaatttctcgggagagtagctgagcttaatgatgtaacggctaaagtggcttctggccaggaaaaacatcttctctttgaggtacaacctgggtctgattcctctgctttttggaaagtggttgtacgggtggtctgtaccaagattaacaaaagcagtggcattgtggaggcatcacggatcatgaatttataccagtttattcaactttataaagatatcacaagtcaagcagcaggagtattggcacagagctccacctctgaagaacctgatgaag

SEQ ID NO: 48646 - DNA, 1094 bp, Homo sapiens
gcaaagatggagcgacaatattgactcacgcctactccagagtggtcctgagagtcctggaagcagccgtggcggccaagaagcgatttagtgtatacgtcacagagtcacagcctgatttgtcagggcaagtacctttctgttcagttatgtgcccagccataattttacagagcaaactgcggattacagtccaacaggatcagaaccagaatgtgcccccagcttgccagcagtcagcactgcctttcattgtaccttttcctgcctttggaagaaaaatcactgaatttgcagcaggccgcagtatatgatctagggggtttcacttaagtagttaactccgtggaagagcagagattgtattgatgaagatttttatcaaggaataggtaacttatatctccctctctctagacgataatcaaagcaaaacttcctccttttttcctgaatttacatctcttacccagagtctaagagtatagttttccaaaaatacttctttcctaaaagaactcaaaattccttggtttcccttagtcccaaagtattgggatctgccccttaaccccattagtattaatgtgagtttcaagcaaacatccactgtccacattaggtgacatacatcactgtggtactgtcttgtactttctctaacgttctcaaaatgtcatcttcagtaagaaaatggccaaagccctctgccacctcaacgtccctgtcactgtggtgctagatgctgctgtcgggtgagtgcccatcttccccagccataatcacctcccccaccccatgctggcttacagcaagttttcagattgaaagtttgagtcccgttcataaagccacaccaggtagcgtcctacttcttaattaatagctgccctaaaccagcaagcttgttatgacggttgtgatagcatacaaagaagacagagctgtaggatgttggggagagtgggagttgtgtctatagctttatggctgtaagtgttgagtttgttgttgttgttgtttttgtttgtttgttttttgtttttttgggatggagtccagcctgggcgatggtgagaccctgtctcagtaaa

SEQ ID NO: 48647 - DNA, 412 bp, Homo sapiens
ggtcacaggtcgtgttacagatcagggggacagacaagcacagaacccccatctcccagcacccagcctccgagtcagatgccccccgccctggtctctcacagctgtgctcactaggcaagcctggccggcccctccctggtagcagtgaagctgttgattatgtttgtcgttgttgcatttcagttacacaagtgttaccagaatgcagtctcctttatacaaacttaaaagtatgagtttaagcctagtctcttgtgccctccacccccgccattcccagaggggactgctctctcctggtggacacattctacaatttcaccaacatagacgccgacacgcgggcacctacgtaaacacacatgcaatgctcatgtaaacaaacattcatgcacacactgcccccagg

SEQ ID NO: 48648 - DNA, 803 bp, Homo sapiens; identical to SEQ ID NO: 7922
  misc_feature (1)...(803): n = a,t,c or g

SEQ ID NO: 48649 - DNA, 451 bp, Homo sapiens
  misc_feature (1)...(451): n = a,t,c or g
aacattgcttgtctgtaaatctgtgggatggccttgaagtgaaaggcgaggttgctgtaagcgnctaatcataggctgtggggacactctactatattctattccccgagcaggagatcgtgaacgaggtgaatttctgggtgactgcttaggtgacggtcgaggtgaattgcgtggtgatggtgaaaacctgttaacagcagggtatactgcatgatgcatattgtcatcttcatcatctaaactttgtgcatcaagttcctgatcactaaaagtaccccgtcttgtagaattgcaagatgaaccagaactgcgccgagacgtggtggctgcatattcttgccggagactttcttcctgcatccgggctagaatctgtacatcagttacatcatttagcttataattggatccaattgaatcttcatctaattctgaacccacgcgtccg

SEQ ID NO: 48650 - DNA, 1148 bp, Homo sapiens
ggttctcggttgtcatctcctaagccaaagactctcccagccaataggtctagcccatcgggtgctagttctccacgctcctcctcaccacatgataaaaatctacctcaaaaaagtactgctcctgttaagacaaagcttgatcctcctcgggaacgttctaaatcagactcttacacacttgatccagataccctccgcaagaagaaaatgcccctcacagaacctttgagaggacggtcaacgtcaccaaaaccaaaatcagtaccaaaggattctacagattcccctggatctgaaaatagagctccctctccccatgtggtacaggaaaacctccacagtgaggtggtcgaagtctgcacctcaagtactttaaaaacaaatagtctaacagacagcacctgcgatgacagcagtgaatttaagagtgtggatgaaggttcaaataaagttcattttagcattggaaaagcaccactgaaagatgaacaggaaatgagagcatctcccaaaataagtcgaaaatgtgctaatagacacaccaggcccaaaaaagaaaaatcgagttttcttttcaaaggagatggatccaagcctttagagccagccaagcaagccatgtctccttctgtggccgaatgtgccagagctgtgttggcttccttcctctggcatgaaggcatagtacatgatgcaatggcttgttcttctttcctaaagtttcatcctgaactttccaaagaacatgctcctataaggagtagtttaaatagccaacaacctacagaggaaaaagaaaccaagttaaaaaatagacattcattagaaatatcatctgcactgaatatgtttaatattgcaccccatggaccagatatatcctaagatgggtagcatcaacaaaaacaaggtattgtctatgcttaaggaaccacctctgcatgaaaaatgtgaggatgggaaaaccgagaccacttttgaaatgtccatgcataacacaatgaagtctaagtctcctcttcacttaactttacaacatttagtggctttttgggaagacatctctttggctactatcaaagctgcttcccagaatatgatttttccaagtcctggttcctgtgcagttcttaaaaagaaagagt

SEQ ID NO: 48651 - DNA, 447 bp, Homo sapiens
aaaagcacaacttccagggaatagaaaaaatcacacaggttagcatggcctcattgaaagaactagatcaaagactctttgaaaattacatcgagttgaaagcagatcccatcgttggctccttagaacctggaatttatgcaggatattttgattggaaggactgcctgcctccaacaggtgtcagaaactatttaaaagaagcactggtgaatataattgccgtgcatgcagaggtgttcaccatttccaaagaactggtccctcgggtactatccaaggtgatagaagcagtttctgaagagctcagtcgactgatgcagtgtgtttcatccttcagcaaaaatggagctttacaggcgagacttgaaatctgtgctttgagggacactgtggctgtttacctgacacccgaaagcaagtcaagttttaagcaggctttggaag

SEQ ID NO: 48652 - DNA, 658 bp, Homo sapiens
cttgttcgttccgcgcagccgtagccagaaccgggtgacgcttattcccgctgtcttttcagtccagggccgctgatagtgggggtggctgggagcagcgcagcctccggaggaggaggcggaggccgaggaccaggaatcaccttcaagcctatgtcgtgaggctttggcagaaattaagaaggaaatatctccattgttcattggcatggaaaaatgttcagtgggaggattagagttgactgaacagactcctgctttattagggaatatggccatggcaactagtctcatggacataggggattcatttggtcatccagcttgtcctttagtcagtagatctaggaactcaccagtggaagatgatgatgatgatgatgatgttgtgtttattgaatctatacaacctccttcaatttctgctccagcaatagctgatcaaagaaacttcatatttgcatcatcaaaaaaatgaaaagcctcaaggaaattattctgtaattcctccttcttcaagagatttggcatctcagaaaggaaatataagtgagacaattgttattgatgatgaagaggacatagaaacaaatggaggagcagagaaaaagtcttcctgttttatcgaatggggacttcctggaactaaaaacaaaac

SEQ ID NO: 48653 - DNA, 504 bp, Homo sapiens
ctctggtcacctggcggcctcttcagctcagccctccacaaagtgtgagcctgaaggaccaccctgaattgcccttgtaggacccagaacagctaccagcagaatcagattctcatggaccaactggtattcaaagagacaatctggaatgatgcgttctggcagaacccctgggaccaggggggcctggcagtgattatcttattcatcaccgctgtcctgcttctcatcttatttgccatcgtgtttggtttactcacttccacagaaaacactcagtgtgaagcgggtgaagaggagtgacctgacttgctggggactgagatggcagcaggggaggcgagctgacctgcccccattccagtggtgggccccttcgcggttccctctggctcaggggccaagccctggtgtcttcctttcccaccaggaaaaagtctagtaaaatactgtatctggcttagggttggtcagactagtaagatggggaggctggtctgagac

SEQ ID NO: 48654 - DNA, 2016 bp, Homo sapiens
cttggtgatattgacagagcacgggcaatctatgaattagccatcagtcagccacgtttagacatgccagaggtgctttggaaatcatatattgattttgaaattgagcaggaagaaacagaaagaacacgaaacctttaccggcggttgcttcaacggacgcagcatgtcaaggtatggatcagctttgctcagtttgagttgtcttcaggaaaagaaggaagtttgactaaatgcagacaaatttatgaagaagctaacaaaaccatgcgaaactgtgaagaaaaggaagagagacttatgctgctggaatcttggcgaagttttgaagaagaatttggaacagcttcagataaggagagagtagacaaactcatgccagagaaagtcaagaagagaagaaaggtccagactgatgatgggtctgatgcaggctgggaagaatactttgattacatctttccagaagatgctgccaaccaacctaacctcaaactcctggccatggccaaactgtggaagaaacagcagcaggaaaaggaggatgctgagcaccatccagatgaggacgtcgatgagagtgaatcctgatctttttttcatagacaaatgttttgttatttttataaattaattgtttggaactcttgtgactcctggaagttcttatatatttcaccagtaagaaattgattggtatctttgatggctactttttaagttattttttaaatgctcttgggttagctaggggtagggattgcaagtaaaggacttttttaactgctggatttgtttttccaactgagtccaaacttttctaatgtctgtccacatcatgcattaggaaatgtaattaaggtaacattctacagttacttttcatgtcatacccataaagatagtttatgcattcatctgaaatgtgtaactttttcatgtcttcagagtcacagacttgagttcatttcccagctctgccactcatgattatataacttaattttcattttcctcattcacaaaatgggccaatagtttgacagctcattttgaagattacattataaaaggaatatacctggtgggtgcatagtaagtgctcagtaaattgtttgttctaagccacttttaaaaatggtttcattccttgtagaattgaatgcgagtggattaataatttaccttactttcttactagtgtccagttatattgttttttagaacaacacttggaaaataatttgcagtgattatatttctgaacaaggttcagaaaacattgtttactaagaatttagtctaataatttcagttaggcgctcatcagttctccagagtggttgagtttgtaataccttgtttaaagaataatggcttgttcacgtgtgtgctatgaaaaatgatgtcccatgttcacataaatttgggaaattctggactaagacttaagtctcgttaatcaaatctctttatagttaggcttctgtacattatgtatctccagtagcaatgttgccatattatttatttcccaaacttagtggacaatggagtcatttctacctagagtaccagtaaacatctcccagtgtgctatagtagaaaatgtctactcctcactgctgacatgttaaacttactcttggtttagagcatgtgtagaaacacctaaggtagctctatgctaaataatgaagagtagcacaagaatgaatgtatttgctgatacgttgctcacattctcaagcaaaaattcaactgcattaaccgatctgagagttttcctttaacctggactgtgtttctcaagcacattttttctttgttcactgcccaaggactagaactgtatttttaaggttgttttcccctaaaaggacctttagtaagcaaatttattattaaatgtgcacatcttattcacccaagggaataaaagctattcgtaatgttgttactaaattttatcttgaaaataaataacagtgtttgaggacagaaaaaaaaaaaaaa

SEQ ID NO: 48655 - DNA, 605 bp, Homo sapiens
gtcttctgggcctgtggagtttcttggacaggggcccgcggggctccaggacggcgcccttagcgacaccatggcccgaaatgcagaaaaggccatgacggccttagcaagatttcgccaggctcagctggaagagggaaaagtgaaggaacgaagaccctttctggcctcagaatgtactgaactgcctaaagctgagaagtggagacgacagatcattggagagatctctaaaaaagtggctcagattcagaatgctggtttaggtgaatttcgaattcgtgacctgaatgatgaaattaacaagctgctaagggagaaaggacactgggaggtccggataaaggagctgggaggtcctgattatggaaaagttggccctaaaatgctggatcatgaaggaaaagaagtcccaggaaaccgaggttacaagtactttggagcagcaaaagatttgcctggtgttagagagctgtttgaaaaagaacctcttcctcctcccagaaagacacgtgctgagctcatgaaggcaatcgattttgagtactatggttacctagatgaagatgatggtgttattgtgcctttggaacaggaatatgaaa

SEQ ID NO: 48656 - DNA, 525 bp, Homo sapiens
gggctgcacgtgtggtaaggcctacaagaagcggccttcagctggaccttggtctccccgccggacttcgagggtgtaatcgccgcccctgttgggggtgagcgccgcgcggctgcagcatgcctacacaggaagaaaaagcctttatgagagaagaagaaagctgtgtcttttacacttggtccaccggagccaacgagatcctttagcagcagatgagagtgcaccccagagggttctattgcccacacaaaaaatagacaatgaagaaaggcgagcagaacagaggaagtatggagtgttctttgatgacgactatgactacctgcagcacctgaaggaaccatctgggccttcagagcttattccctcaagtaccttcagtgcacacaacaggagagaggagaaagaagaaacgctagtaattccaagcactggaattaagttgccttcatcagtgtttgcttcagagtttgaggaagatgttggattgttaaataaagcagctccagtttcaggacctcc

SEQ ID NO: 48657 - DNA, 481 bp, Homo sapiens
  misc_feature (1)...(481): n = a,t,c or g
tgnnttgaaaccntttgacatgantacgaatttaatacgactcactatagggaatttggccctcgaggccaagaattcggcacgagcacagatgatgtcaacgccatcatcctggcccagaagaacatgctggaccgctttgagaagaccaatgagatgctgctcaacttcaacaacctgtccagtgcccgcctgcagcagatgagcgaacgcttcctgcaccacacgaggaccctagtagagatgaaacgggacctggacagcatcttccgccgtatcaggacgctgaaagggaaactggccaggcagcacccagaggccttcagccatatcccagaggcatccttcctggaggaagaggatgaagaccccatcccacccagcaccacgaccaccattgccacctcagaacagagcacgggctcatgtgacaccagccccgacaccgtctcgccctcctgagccccggcttcgaggacct

SEQ ID NO: 48658 - DNA, 1566 bp, Homo sapiens
ggtatttggagatttttttaaaccacatactttatttgatgtcaacatcaaagaaggaatattttaaaaagcacatagaaacccttaagttagtaatattttaaactgcatgaaaaacatattattttacatcttgtcatactgtatatacaactgtacataaacttctgcatttcaaagcacttgtcatttataaagtgaaaagtttgaaagtgctaaataaacatttcctaattattatttttaaaaacagcactcttttggaagttatctcttctttgtgcttatagttgatctgcaaacatttcaagtcaaagtttctggaaacttctttaggaaacatctggaaaaaatcatagtagacaagggctaagtgcagacataagcagctccattttataaacaaaatttcgaccttccattttattccactgaacttctttgaatggcccacgaagatgactccatttgttatcttgtaaaacatcactttttggaaggtctttacattggttacgaggaaactgaaccataatcttgctgccactttcaggtccattacgaactgaaatagcatagtcaccacttggggaggccaccgtgatggcagatgcattaccaatgctctctataggtccaagtcccacatgattactgaagctcagtacttgcccagcccataaccttggcgagttgctgaactgcatgtacctggtgctgtgacatctgagacagaagaaaatcctgtagctcctgctcctgataagacagtgtaattactcttccatctctatgtacaactcgaatctgctcaactccaatattcaattgcagttgaatggacttgcatatttgttcatagccttgtgatgtgattaaaactttcacactagattcataaacatcattgatatttgaccaatgagcctgtatctgaggatcctcaattcggcttgctaagctgtcaatggttgcagcagctctactccttagaaaaatatgctttgcttgtttaattattttttccagaagcccttcactggactgtaatgaattaatttcatttttatcaaaagcttgaggacccgaaagtctcattctcttgtggccaaaaggtgcacttgcctggatgaggcatcatgatggaactcaaggtctgtttatgaaactctctaatcagtagatgcaaattatgctctaggacataaaggtggtcctccggacattgcttctcagtagcaaatttttgggatttcttatcatttgaggaatggcacaaagaaatagataactgcaagctcggaaagggctgagagataatctggtttttcaccacaatgtgagggacttgtgatttaatttgaacagcttcccgagagagctgtgcaaaaatttctttacataagagaacattctgtgccgcttctaattttgtctgccaatgtggggaacctggtttggatttgggcaaaggtcgtttgaagaggttaactgtgccgaggtcacctatatctggagcctgtttttgtattgaaaccttgatatatgcagaaccctctaaatccc

SEQ ID NO: 48659 - DNA, 892 bp, Homo sapiens
  misc_feature (1)...(892): n = a,t,c or g
gcggcacgagctgacggcataaaagggcagaaccatagcagggtgcggctaagttggggaagagtttttggagagggtgaattttgcattggaccggacagaattgtgtatggggaaggggagcggttattctggtctgctcacatctctcatactcaacctcatttctcctaattctgaaatcttgagatcctctatcactaagaaggaaaactactgtccaacagggacactttattgctcaccccatatgtgaaagtttgtcatagctaaggctagggtgcttttggtcagtatcagcagaatatatgccccctttcttttgtcagcattactccgcttacaaagcccttccatgtagatgacctcatctgagcttcctaacaaaggagctggtattagaccccattttacagtgtgcctgggtagggaagagagtgtagtggattgagcagaggccttggcaccagacactgcttcctagccatgtgctcttgggcaagttgcttaaccctgctgagcctcagtttcctcagaaggagtctgtataagcaagggaagggattggtcatagaagtggtactgtgtttcatttatctagttatggcagactctcaaaaacaaatggttctatacaactaacattgtctgcaattcccctgaatccattcacttgttcagtaaatgtgtattgagcttctacaaggtgtcaagcaccatgatctctgtatcagtgatttaaccatttttgatggttactacagacctctttaagaatgtgatagaaaactgtagctccctccccagaaaacttttctagctttttattttgcnnnnnnnnnnnnnnnnnnnnnnnnnnnnnnnnngggggacagagtaagaccctgtctca

SEQ ID NO: 48660 - DNA, 1001 bp, Homo sapiens
  misc_feature (1)...(1001): n = a,t,c or g
ggctgtaagaagcctgcaaaacaaaatgggaagaaagcaacctccaaagtgccctctgctcctcagtttgttcactccaatgatcatgccaatcgagaggctgaaataaagaagagggttgaggagatgagggagaagcagcaagcccgcccaggagcaagaaagacaaaaacgcaggtctatcaagagctactgtgaggatatcctaagacgccaggaggagtttcagtgtaaggaagaagttttgcaggaattaaatatgtttcctcagctggatgacgaggccactatgaaggcttattacaaggagtccgtgaggtggtagaatactctgatgtgattctggaagtcctggatgccagagacccattaggctgctgctgctgcttccaaatgggggaggctatcctatgggcagaaggcaacaagaagctggtcctggtcttgaacaagattgacctggtccccaaggaggttgtggagaaatggctggattaccttcggaatgagttgccaaccgtggctttcaaggccagtacccagcatcaggtcaaaaacctgaatcgttgcagtgtgccagtagatcaggcctctgagtcactgctgaaaagcaaagcctgctttgnagctgaaaacctcatgagggttctggggaactattgccgccttggtgaagtgcgcacccacattcgtgtgggtgttgtgggtcttcccaatgttgggaagagcagcctgatcaatagcctgaagcgcagccgcgcatgcagcgtgggagctgttcctggaattaccaaattcatgcaggaggtctacctggacaagttcatccggctcttggatgctccaggcattgtcccagggcccaactcagaggtgggcaccatcctgcgtaactgcgtccacgtgcagaagctggcagaccctgtgaccccagtggagaccatcctgcagcgctgcaacctggaggagatttccaactattatggccgtctctgggttcc

SEQ ID NO: 48661 - DNA, 3085 bp, Homo sapiens
tgcgactgagtcggtggcgaagacgggaacgcgacgatggcggagactctgcccgggtcgggcgactcgggccctggcacggcttctctcggcccgggcgttgcggagactgggacgaggcggctcagcgagctgcgggtgatcgatctgcgggcggagctgaagaagcggaacctggacacgggcggcaacaagagcgtcctgatggagcggctcaagaaggcggttaaagaagaggcgcaagatcctgatgaaattggcatcgagttagaagccaccagcaagaagtcagccaagagatgtgttaaaggactgaagatggaggaggaaggcacagaagataatggcctggaagacgattccagagacgggcaggaggacatggaagcaagtctggagaacctgcagaatatgggcatgatggacatgagtgtgctagacgaaactgaagtggcgaatagcagtgctccagattttggggaggatggcacggacggccttctcgattccttttgtgatagtaaagaatacgtggctgcacagctgagacagctcccggctcagcccccagagcatgctgtggatggggaaggatttaagaacactttggaaacttcatcgttgaacttcaaagtaactccggacattgaagaatcccttttggagccagaaaatgagaaaatactcgacattttgggggaaacttgtaaatctgagccagtaaaagaagaaagttccgagctggagcagccatttgcacaggacacaagtagcgtggggccagacagaaagcttgcggaggaagaggacctatttgacagcgcccatccggaagagggtgatttagatttggccagcgagtcaacagcacacgctcagtcgagcaaggcagacagcctgttagcggtagtgaaaagggagcccgcggagcagccaggcgatggcgagaggacggactgtgagcctgtagggctagagccggcagttgagcagagtagtgcggcctccgagctcgcggaggcctctagcgaggagctcgcagaagcacccacggaagccccaagcccagaagccagagatagcaaagaagacgggaggaagtttgattttgacgcttgtaatgaagtccctccggctcctaaagagtcctcaaccagtgagggcgctgatcagaaaatgagctcttttaaggaagaaaaagatataaaaaggctttccaaagatgaaaaaggtcgggtcggcagcggttctggtagaaatttctgggtcagcgggctgtcctccacaacacgcgctacggatctcaagaaccttttcagcaagtatgggaaggttgtcggggccaaagtggtaacgaacgcccggagtcctggagctcgatgctatggattcgtcaccatgtcgacatctgacgaggcgaccaagtgcatcagccatctccacagaactgagctgcatggacgaatgatctccgtagagaaggccaaaaatgagcctgctgggaaaaagctttccgacagaaaagagtgcgaagtgaagaaggaaaaattatcgagtgtcgacagacatcattctgtggagatcaaaattgaaaaaactgtaattaagaaggaagagaagatgctaagaagggtgacgacggaagtggagaaaagagtaaggaccaagatgatcagaaacctggcccctcagagcgatctcgagccacaaagtcaggaagtcgagggaccgaacggactgtagtaatggataaatccaaaggggtgcctgtgattagtgtaaaaacgtccgggtccaaagagagagcttccaaaagccaggatcgcaaatcagccagcagagagaagcggtccgtcgtgtcctttgataaggtcaaggagcctcggaagtcaagagactcagagtcccatagcagggtgcgtgaacgcagtgaacgcgaacaacgcatgcaggcgcagtgggagcgcgaggagcgtgagcggctggagattgcccgagagaggctggccttccagcgccagcggctggagcgggagcgcatggagcgggaacggctggagcgcgaacgcatgcacgtggagcacgagcgcaggcgcgagcaggagcgcatccaccgtgagcgcgaggagctgaggcgccagcaggaactgcgctatgagcaggagcggcggcccgcggtgcggcggccctacgacctggaccggcgagatgatgcctattggccggaagccaagcgggccggcctggatgagcgctaccattctgactttaaccgccaggaccgcttccacgactttgaccacagggaccggggccgctaccccgaccactcggtggaacaggagagaaggttcaaggtcaatgatgggagaacgagaaggacagcattacccagaacgccatggaggaccagagcgccacggccgggactcccgcgatggctgggggggctatggctctgacaagaggatgagcgagggccgggggctgcctcctccccccaggggcagacgtgactggggagagcacaaccagcggctagaggagcaccaggcacgcgcctggcagggtgccatggacgcaggcgcggctagccgggagcacgccaggtggcaaggtggcgagagaagcatgtccggtcactccgggccggggcacatgatgaaccgcggtggagtggcggggcgaggcggctttgcacaaggtggacattcccagggccacgtggtgccaggtggcggactggaaggtggcggagtggccagccaggaccggggcagcagagtccctcacccacaccctcatccccccccgtacccccacttcacccgccgctactaagtcccactcgctgcgagttttcgggtgggcagacgcactgttgaatctggtagccagggttccctcgaacttgggggatctttttaaaagcaaagtaaatcctgccaccatgttgtagctcaatacaatgtgaactcactttttttttttttttaaataaatgtgttcttgttctgccatttttaaatcaaggtttctgttaacgaggcattccattttccattaataaagtttaccattcgca

SEQ ID NO: 48662 - DNA, 438 bp, Homo sapiens
  misc_feature (1)...(438): n = a,t,c or g
nttttgataaccgntatgacatgattacgaatttaatacgactcactatagggaatttggccctcgaggccaagaattcggcacgagcggcacgagacagaatccagaaagcacactggagaaaagaaaactcaatataaaacttaatgcctggaagagaactaaagactcatcagaaacttcttgaaaggacacctcaggaagatgccggctgaggtggtggctgaggaggcatccagttgctctgccactcttttgacctgaagtgaaatagaaggtctggggttatgcaggtctcacatccaggttgttttgaagcaaagtccaagcattgtatcacttcatctgcaaatatttcaataagtacccaaaagtggttggactgagtcccatgaagccagatcacttctgactgcaaggagcttggaaaagcaagta

SEQ ID NO: 48663 - DNA, 1347 bp, Homo sapiens
ccattgcccaccctcaaagtgctgggaataacaagtgtgagccaccacacccaaccaggttatttgaacatttttaagtactgtattttctctattgtaatattgactgtcatctctgtgcaggttttttagtggttgctctaggttgaaacgctttgaattcttaggtatctaagagtgagcattttctttttttgactgctatactctcaccagttgccagcttctcatataaatattgtaaatgctctcgtttaggtaactcagcttctggagttgagggaacttcaaaatcagaagagctctgggaatctgcatttgtgctaagatttagcaaacttttttcctcgggtatatgtgtctcactgcttagagtagttggttctccagtactaggaactattgtcacatctttatctctgcttttcaaatcagagtaagtatcctttgggcaaattacattttgttccatgagagagcaggaatattctctttgattgttggtctgtagtcagctttgtccaaggaagtaatatccccactgtttctctcttgggaagataacaaaacagtatcagattggctgtcccagccttgacttccttgttctgttatgtgtgttgactgggaagaattctgggaggagatgtgagttgattctccatcagagtcactgaaaagctttggtgactgagatccccctgccactgtggaggaagggaagttttccaaactctcatctgtgatttcatcatttcttttaaagaatacttcccactggggtacatccccatcagccttttgcaggtgaagtacagagcccagatctccttgcagtgaagctgggattcctacttcttcttcactttcactgttggattcttcacaatctacaaagtttgtgaaacgagagctctgcatacactctgctctgcagcatcctggggtttgtctcagtttttcaggctgcttttctgatactgcagtcattgaaaatacctcagggtgaaaagtttccgggtatggaactttgtgccttaaaggtattggcagaggatcatcaaagagatagtcatcttcctcctctgtgggacaaacaaaacaggtttataggaaacaaggcaaagggagccaatttgtagtatttatctgtacttttaattcttggaattgcaaagaatagggaggccactcttcttcaaagggaaaagatattcttgggatatgctgaacaatttaactgccatccttcaactttttataataaatgccagagtatcagtggagaatatagagcagtcactctgctctatatgtaagcctggctgatcattacgatcatatgca

SEQ ID NO: 48664 - DNA, 1504 bp, Homo sapiens
tttttttttacagatatccaatttttaattaattaaaactttacaatgtattacataatccatggaaggagagaaaggggatgaaactgaaggaaccaggactctggaggatgcaggatgctgtttctctggatgagatgtactctgccactgtgctctctgggcactttcagatgatggggtctgagatgtctcctcaggctgcatcagctgtcttcagtctccagaacagaaagagcctgacccaggggcatcttggtggccaccagaaccaggtttctgggagagagttcaggactgaagatgggcaggagctcagcatggaaacctggggagaaagggcctgttcctgaaggtacagcagccggtccagtagaataagcgtctccaccagtggggcaagcagtagagccaggctgaagaaggccaccacacggttctcctgggccaggtgggcctgaagggcagccagattcagtggcagctggggatctagccccactcgctgtagcccccgctgcacatatctgcgggttcctcttctcctctttctccagagcctgcagaagctcctggtccaggcgctgggctctctccaccagtctctgatccccttcgatgctcttcaccatcaaccccaggccaagagccatgaagcgggagagatggccctggcctgagccccacgtctacaacctgggtgcagcctgtgaaatcactcagcttcttcaccaactctcccagcctccggatctcatgctgcttcttgggcctgacatgtttccggaatggagctgttagtcgggagctctggctggggttctccaggaattctgagggggtctgaaagccaggcatccgggttaaaaggcccaggccacaagcccgtggacttcagggccagcagggtgagtggccacactgaacctgtacctgacgaacctccccttccccaggcatccccagcagccattgtggccagctgtggtggtttcagtccatccaatgcttcctgccatgagcaagggagtgtgtcccataggttgtctgtgaaaaattcgatgatgtaggcatccaagatggaacggtagagtgccaggacacgggtgaggttaacagctagctgcttcctcccctcatgagagaggcctcgggcggagatgcccggcatcccggggtccagcagggagcgcggggagcgagaacgcagtgaacagggatccagggtcagtactacgcgggtccaggacccggacggggctcaactctgcaggcagaacaggaagagttttgggtccagtctccgacgctgcctttccgggatccgatgctggagtggaagatttgaggcgccccccagacgtcacaggtcgcgacgtttcacagtgagaaggtgtcagcgtcagagacacgtagggcggggtaacagtgcagtgacaccacaaaagcgtgccgctgagctcagctcacaacgaggcgggccaagttccagttcccgcccctc

SEQ ID NO: 48665 - DNA, 5882 bp, Homo sapiens
  misc_feature (1)...(5882): n = a,t,c or g
gatcaggctctttctctctgtaaacctgctcccatggcattcttttctgcttcaattcagtccatccctgaccacccacccagccacccatgctggaaatctgagatatctttgactcctccaccttcccactcccacagctaatcagtagccaaaccctttagattctacttcctaattatcttgatattctatctcctctgcctcctctaattatgacttaattcaggctcttattatctgtcatttaaattattgctgtattgctacaggagtggtgtgtatatgtgcaactgttcatcttggtatgctatagactcttgcccagcagttttgcctcaattctttaaaagctccagttcattgtttgaaatatcaatcagaacattttttccaaaatgctaaaatgattgtcattccccagttttaatatctctatcatctgctaagtaaaagcaagctcctccttgtggcgtagcagggcccacgtgatctggcccttgcccgaatttgtagcttatcacaacatccttctaccccccattacctcctattatacaggaacacccaagcgaccttcacaacattcatatcaactagtacacagggtctccaaagaggacctctggatgcctgtgatctttgtacttctgcctaccctttgccctggcgtgtttttctcttccttcatgttctgctggccaaattgtttttccttcaagtcttaggagcctgcctgattatgttcctcctattccgcatcctcataaaattactgcgacttccaaaacacttggcacattcttatttgaatacattacattgttgtgtaattatcccttggccccctcccccagcactagactctaagctctttgaaggcagactatgcctattcatctttgtatttctagccctgggcccaacacccagaatttcttgtattttcaatatatgtctgccaaatgaattagagctaatgcctgaaggagaataagtttttttgagaaagaggaagagccaggagggaggagaaggcagggtccgaagagccctgggggtttacttggggaagatgcggttccccattgcagcattctgccaggaggtggcactgctctgaagagccagctggtcgcttacagactgaggctgacagcttgaaaccaaagagggaactccaccaggaagcaacattcctccactgggcttcccagcccagttacatgccatactctgccctggtcaaacagccaagtcttcaggaggttactggccccaggcgtctccccagtgactgatgatgttaaaccctacgcttctctgattggtttagacaaaatgacaagggcacctattggaaatgatctggcaaaacatgatctaaggccaccctctcggggagggagttggggaagctgggttggctgggttggtagctcctacctactgtgtggcaagaaggtatgggtcatgaacagaaccaaggagctgcgctgctacagatgttaccacttctgtggctgctaccccactcctgggccgtccctgaaggtaagatggtactcctatttacttccatcctgaacctagggagcccactcagctttgtgaggaaaagcgctgtgctttgtgagtggtgggaagtcttatgaggcagtggaaacaacaggggagtggggaaagacagctgctatgtgtggttggtaaacgatatcagtgatgctttgcatgttccatttaagacaatctcttgaagcggagattgttctctccattttacaaatgaagaaaatgagactcagagttatttgtgcaagttcacaccattggaaagtggtagagctgggatttgaacaaagtgaatgttattttcactcctccactcaagattctactctgctttctatcattaacttatcttgtgattcttgaaaagtgtcttagtttccttctctgtagaggatggggcagaatggaagaataatctggaagatccctcttcctccaaatgtctgtttttctgggtattgggttaaaggtttcctgctggctgagcgattcctgccaagagcttcaaagaagagggattattttatgcagttatggggtcacttctcccattgctgtctttgggaggcctggtaggttaaggaacagaagacattttgagagacgcttggtgccaatgaagtggctgaagaaatgtctggatacaggttttccaatttaccatttgtgtctggggatagtgggaggcagtcccatctatggcttggggaggctgtagccattcctcctctttcccttctaagagtgagaaacccatccatggccttctctagtcaatacagtggcctggtatgaattagacaaaggaatcccctttgggaggatacagccctatgccaggatgtatggcatggtgagcagaatgcaggctttcacttgcttctttggctaggtgtctttgtgcagcccccaaacacacaatgaacagtgactctgaatctgtcactttattttatatatatacatttttaaattttttatttgatttannnnnnnnnnnnnnnnnnnnnnnnnnnnnnnnnnnnnnnnnnnnnnnnnnnnnnnnnnnnnnnnnnnnnnnnnnnnnnnnnnnnnnnnnnnnnnnnnnnnnnnnnnnnnnnnnnnnnnnnnnnnnnnnnnnnnnnnnnnnnnnnnnnnnnnnnnnnnnnnnnnnnnnnnnnnnnnnnnnnnnnnnnnnnnnnnnnnnnnnnnnnnnnnnnnnnnnnnnnnnnnnnnnnnnnnnnnnnnnnnnnnnnnnnnnnnnnnnnnnnnnnnnnnnnnnnnnnnnnnnnnnnnnnnnnnnnnnntatatatatattnnnnnnnnnnnnnnnnnnnnnnnnnnnnnnnnnnnnnnnnnnnnnnnnnnnnnnnnnnnnnnnnnnnnnnnnnnnnnnnnnnnnnnnnnnnnnnnnnnnnnnnnnnnnnnnnnnnnnnnnnnnnnnnnnnnnnnnnnnnnnnnnnnnnnnnnnnnnnnnnnnnnnnnnnnnnnnnnnnnnnnnnnnnnnnnnnnnnnnnnnnnnnnnnnnnnnnnnnnnnnnnnnnnnnnnnnnnnnnnnnnnnnnnnnnnnnnnnnnnnnnnnnnnnnnnnnnnnnnnnnnnnnnnnnnntcactttagaaagtagaactctttacttttgccaactggcctttttataggcaggggaagcttggagagatgccataatttgttcttcaccccctttgggagggggagtctaaataacagacacaggaaagggtctcacctcagcccacgctccttaagcaggccnnnnnnnnnnnnnnnnnnnnnnnnnnnnnnnnnnnnnnnnnnnnnnnnnnnnnnnnnnnnnnnnnnnnnnnnnnnnnnnnnnnnnnnnnnnnnnnnnnnnnnnnnnnnnnnnnnnnnnnnnnnnnnnnnnnnnnnnnnnnnnnnnnnnnnnnnnnnnnnnnnnnnnnnnnnnnnnnnnnnnnnnnnnnnnnnnnnnnnnnnnnnnnnnnnnnnnnnnnnnnnnnnnnnnnnnnnnnnnnnnnnnnnnnnnnnnnnnnnnnnnnnnnnnnnnnnnnnnnnnnnnnnnnnnnnnnnnnnnnnnnaccttgctgttttttaagttggaggagaaggctcccacctccctgaacctcaccctgtgtcctttgcagctcctactccaatgtggccagatgacctgcaaaaccacacattcctgcacacagtgtactgccaggatgggagtcccagtgtgggactctctgaggcctacgacgaggaccagcttttcttcttcgacttttcccagaacactcgggtgcctcgcctgcccgaatttgctgactgggctcaggaacagggagatgctcctgccattttatttgacaaagagttctgcgagtggatgatccagcaaatagggccaaaacttgatgggaaaatcccggtgtccagaggtcaggagttttctggggagtgaagggaggagggctgcattaacctcattgatctgtacactgaataattccccttgataccagctccccatctcaaatactttctggttctcttcatcaccttaatttttccaccagccttggtctgcaccctgtgttcttttggtgggccgaagtacctagcatgtagtaggcattcagaactatgtattgaatgtgatgaattcaacaggtaccaactgatacctactgaatattaacacttgtgctactatgcccagcaagatggatgggaagagtggaaatatctgatgacgtgactatgtcttagtgagaagacagtgcatggttagacatcaatgtgagctctagacaggaagtgctgaaggaagtcatggtggaggggtccagagtagcctggatctggctctgcttctacgtctagctgcagtccttgcctggaagaagacctcccttcagagcccagctcctcgctcatctctgtctcccaaagcctgacccactgtgttcttctctgccctcccctccatatgccatggcccctccaaacacagagataccatctaaactagtctctttttccccctacacttcaatccccccaccagggtttcctatcgctgaagtgttcacgctgaagcccctgggagtttggcaagcccaacactttggtctgttttgtcagtaatctcttcccacccatgctgacagtgaactggcagcatcattccgtccctgtggaaggatttgggcctacttttgtctcagctgtcgatggactcagcttccaggccttttcttacttaaacttcacaccagaaccttctgacattttctcctgcattgtgactcacgaaattgaccgctacacagcaattgcctattggggtgaggctttctccctggaattctggtccttttgggggcaaaaagggatagatccatgggaggaggcttctttctccactggtaccttgtttagtccattcctaccctaagcccatcccagtctcccatgtcatcccagacacccacgtcatttccctgggtgggaggctccctaactaggtccccaggctgagccactcatttcctccagtaccccggaacgcactgccctcagatctgctggagaatgtgctgtgtggcgtggcctttggcctgggtgtgctgggcatcatcgtgggcattgttctcatcatctacttccggaagccttgctcaggtggtatgtcatctggagggggcgggtgagcctgtgggagccagatacagtggtgcatgcgtgcatgtgtcaggattattttgtggcatggggggacatatagcgatcctcaggcccttgggtgtgggggcctgtatccagcaccatgggggcacatcttcccagttggggacccagttacacacacacagttatgggtcacaagaattgctttgagtgaaaaaaggaatcatggggtgctgtaggaagggtgcttggagatgatttgggaacaaggagagatcaacttctgcagggtgtggtgcaggcagggcgagcaaggcctttgtgggggaggaggaggaggagaaggaggaggaggatggatcccctgatgcctttcctccatccctgtctctcccccagactgattcttccagaccagagtttgatgccagcagcttcggccatccaaacagaggatgctcagatttctcacatcctgcccaggatctcctcttagggtagaagaagtctctgggacatccctggggtgtgtgtgtagatttcccacctggggactctgctgtccctgggcttgcatcccagggatcccagagtggcctgcctatcacaaccacatcccttccccccacaaggcaataaatctcattt

SEQ ID NO: 48666 - DNA, 1979 bp, Homo sapiens
gacaattccatgaataatttgaggttttattcatattgctaatgtctacaattgttctaaagagtattttaaagtagtttttttcccccagctaatctttccctatgtatgcccccttttaggagatttctcaccattttgctttaacacaataattattggcctacttaatactccagtgccttgagatagttggacatattttaggaagattttattgtatttggaaaattacgacacattccatgcatggatcttttgtagttacgtgttttgattagtcctgtcactgtttttatttaaaatgcagtgtcagcaaaccgaaatgctcatttcttttttagtaacagagtactcgtatacttatcactgtatgcactcattgggtctaagggagatgtctgaagtccttcacttaaattattttatgatactactgttttctctatttttgaggttaaaattattttaaaaaaatattttgaagagaagtttattagtataagcattcatttaatgcaaaaaaactcagcccttgggacatataaccatgtaattctatatgaacgtttagagtactacatggttgaccaatatctagttctttactaaaagtaaactcacctctttatatatatttcaaaactgaatttgaagcctattagagaccaactgaccttttagttgtaatgaactgtatggtcttgcatggtgacacacctgtgtaggagggccaagacttggcagaggatgtagtctaggtgtcctggtatatataaatggtcactcacttcgtttatatattccacactcagaaaagaagtcagagttttttctgagtaatacaaaaaccatcacttacataatttgtataagaaactttaaacagttttaatcaaaactatgagtaacatcaaaaatgctttaagattctatattttggaatacctgtgaagtagtatgactacatcatgttaaatatttattttcttctatgattttggagcagcaatttttattttaaataaaattccacttttaagaaattcagggaagatttggtcacattgaagatacagtatttttgtagtatttataaactgttctaaatgatagactatagaaaacatttttgtcatatgaaggtaaatcagtccattattttggatcatttaaactgaacattacaccttctgggctttgatttatgaagtggcacagaatctaactttgcactgaatatcttttcattcacatctcctctgccttagtcacaatggcaacagtacagaaaattctatcaaacctcagaatatagtagaaataattaagctgttgaatgagtcttaaaaattatactactgttaagtggaccaagtttggtgaagcagaatgtgacaaaggttgattaaggaaggaacaactcaaggacattgggaatgataacttttccacttgagaactactttatgttttactgtaatttttaaagtttttttgtcctttttgttattttgcaaaagaaaatagtatttacaggtggcttcttttaaaatataaaaatataaagcaggaatgtatatgaaatgtccagattttattgtatttgcagagtattagctttgaaattgaataaagaaagctgtttgtagttttaaaaatgccttattggtatcaattagaaatttcttctattttttgatgtacttagagctttttgagtgtagaattttaaatggcaggattttacagtgtttacatgcaagtgcattttataagtgttcctatatgtgtaaaatagtattttcaactggaaagtgttggctagtgcaaaaggcctggccattttctggttcccatgatgttgcctacactgctagactacagtttagtatcgctttgtatcatgaggccaagaaattccatgttgtttgtaaatagaataattgaaaaagcaataaacatttattgaacaaaag

SEQ ID NO: 48667 - DNA, 627 bp, Homo sapiens
aaacaaccctggcaaccctcggctctctcctcttcccagcttgatggtagtgatgcctcttgcacaaatcaagcagccaatgacattggggaccatcaccaaacgaaccggcaaagttaaacctcctccacaaatttcacccagcaaatcgatgggcggagaattttgtgtggctgctatcttcggaacatccaggtcatggtttgcaaataatgcaggtctgaaaagagaaaaagatcagtccaaacaagttgtagttgagtccctgtacattatcagttgctatggcaccttagtggaacacatgatggagccgcgacccctcagcactgcacccaagattagtgacgacacaccactggaaatgatgacatcgcctcgagccagctggactctggttagaacccctcaatggaatgaattgcagccaccgtttaatgcaaaccaccctctgctcctcgctgcagatgcagtacagtattatcagttcctgcttgctggcctggttccccctggaagtcctgggcccattactcgacatgggtcttacgacagtttagcttctgaccatagtggacaggaagatgaaagaatggctttcccaggttgaaattgtaacacacactg

SEQ ID NO: 48668 - DNA, 846 bp, Homo sapiens
tttaacagaggacgtcattttattggctgtccacgggaagtttcatcacacacggaggtgaagactgtgggggttgtggcacacaatatctcaacacgagacctcatcgagcggccaaacagaaggtgaagtgacacccgacacgacggaaccccagccgccctctgcagccccggtgccacctctccacagacgcctcagcccagtaagctgagtgatgacactgtccattagtctcagttcgttgcactgtcttccaacaaaacagcacttgaaaattcacaaaattaaaaaaagaaaaagaaagcagcacttcctttggaaatagcaacaccactgtaacacagacggcagcgtggcatgcagatccacacctggtcggttttttccctttaggattttttttttttttaattaacaaatggaatggcaggtctgtttcaaatattagtagcataacacataagtgcaattgcagtctggccacaagcgtcagaagccttccgtgtgtctgtcacaagggcgggcagacacactccgattccacccctggagggtcaccaaaagaaagcagccacttctctatttccattgttgtcaaagcactcaggttggggaagaaaattcaaatgaaaccaagctctcagcatccggggccagccaccctgtgccatcctaagtggtctctgtaccccagacctggggctgtcatctccaccgtggcattggctgggaaagtcgctgtgggacacacccctccgctcactcctgctgcccatggaggagcctctggtgtcccccggcctggggccatgtgggtcacacggagctgagcttcaccagggc

SEQ ID NO: 48669 - DNA, 373 bp, Homo sapiens
gctcaaggtctttgccctgggcctgcgagggtacctgtcctaccccagcaacgtgtttgacgggctcctcaccgttgtcctgctggaggccggagatggtgggcctgctgtcgctgtgggacatgacccgcatgctgaacatgctcatcgtgttccgcttcctgcgtatcatccccagcatgaagccgatggccgtggtggccagtaccgtcctgggcctggtgcagaacatgcgtgcttttggcgggatcctggtggtggtctactacgtatttgccatcattgggatcaacttgtttagaggcgtcattgtggctcttcctggaaacagcagcctggcccctgccaatggctcggcgccctgtgggagctt

SEQ ID NO: 48670 - DNA, 2990 bp, Homo sapiens
tttcaatattaaaatattattttattttaaagcccaatctttcagaaagcttcttagtatagctttgagccttcaacgtcaacatgtaagtcaaatatttaagttaaatattaacatcaagttaagcatactagattaaaaggtactctgaacccacccaccaggttatacatactctcactcaatcatgtaaagaattgaattctttatttgtgatatccataaacgttgctattctctatttctatccagaaaggcaattttcacctattatcacttttgttcttctcttataaacaacaacttgaatgctattgcaggaaagggctacaaatatacatttgttaaccaagcagaatacacagatattttgctttacaacttgcacctaaaataccagtatacgtagctggttcattagttgtcatagcaatttagggctattgcccaagctatgcatagcagtttacattttcaaacctcatatagaaagggctattgtgatatgaactggcaactacattcctgtgaagcccatctcagttacaagcaaatgtgttaacttccaattctgcaaagaattttgatggcaaaacttccaaatctgatgcaattgtcttaagcaagtttttaaacaaattgtttcgcagctactctgccattctgccagtagatggtgctacaaagatcgggaaagggatttccatgaggccaacagttcggatataggaaaaaaaaaaaaaaaacgtttaaacctgctctgaaagtacaaaaacgcatttgagggtaaaatataacccttatttttaaccattcattacagacaaaccagtaagagggatgaaactaggccatctgaaaaattttaaacagtttatatgaatgacatgcttaacacaaactatatagaactacacagtacaccagtttgaagtaaattggtcatagaaatgacccaacccatgtccaagatggataaaacaattcggcttagtaaccaagagatggatgccacagaaacttaaagagttttaaaaagcccacatccacccacttccaaaagttttgcccctgtaaggggatataattcaacacgcaactagcagggccaacaggagaggggaaaaaaaccacaggacctcttaagtttctctaagtacacatcaagaataaagaattaacacgtaaagtccttaaacaaatatcccttaaaaaacggtacgggaatggatcctagaaaaaaaatgttagacatgtacggtcaaacacaatgatttattaaaaataaaacgtaaaaatgatttttgtacatatgcttccaaatttcaggcatgggatccaagtagatttcatagaaaacgctgtagccaggttatcaagtccttacaacaaagtaaactaccccccaccccaacccccacccaggttttgctacagaatcagcaagttcactccctccctccccccaaaaaacacaaattaaaacaagacattttgctagtataaaaacgaccaaggtccaagtaataataaaaaaatagagtccatcaatgactgtaacacaaaaatgtgtatgtggggccgagtccatcttcagagggagagacaagagaggtggcaggcaaatagaggaacacccccaagggtaagcagccttagaagtggctcccccaagggcaaaacagggaaggcggtgtgtgtgagggggtggggcttaggagttgaccccacttgggctgttggaaagagctacccctatagccactcccaggcattttaaattttcttttagaaggagctgcctccatagccacccccaccgccatagccgcctctgtaaggtccactattactgcgaccgccccagctactgcctccaccgccgccgccgccgccgctcttcatgggcccataggaggactgatgctggctgtagctgccgaagccgccgaagccgttaccgtagtcgctcccaccgtaggacgaaccgccgccgccgcctccgtaggcattgtagccgccgcctccgccgccgccgtaaccaccgtagctgttgtaaccgccgccgccgcccttggaaaggccgttctggtctcgaccaccgccgcgcccccggccgcctcggccgccccgggaggatcgggagccgcctccacccccaccggagtagatatcctccttggggactgctttcttcacctccacgcgatggccctgaatcggatggaacttgaccaccgcggccttgtctgccgcgtcgtgattctggaaatacacgaagccgaatccacgcttcttgccggactgcttgtcggcaataatctcggccttttccacggtgccaaactgcgagaagtgctcgatcaggtcgccctcagccacgtctcctttaaggcctccgacaaagagcttcttaaccttggcgtgggcaccgggccgcgccgaatcctcccgggacaccgctcgcttcagctccacagtgttgccgtccacggcatggggcgaggcggccatggcggcgtccgcctcctccacattggagtaggtcacgaagccaaagcaacgggagcgcttggtctggggattcaccaccaccacgcagtccgtcagagtcccaaaggcctcaaagtggccgcgcaggcccgactcactcgtctgcacattgaggccgccgatgaacagcttacacaactgagaattctccatctccaaggcccgggccttgcccccgccctgcgagctccgacggtttcgccgtcgccgccgttatcgttggttaaggcctctacacagcttgggccagccgttgctggagccacccccgccgctcaccgacggggaagggaaaaagggaaggggagggaaggaaggaagagaggaagggggagggaaggggagcggtgccggctaaagggcgagccgaggtgactggaagacaaccaaggccaccgtaaacgccgccgccgccacctccgctccccctcgtgccg

SEQ ID NO: 48671 - DNA, 1869 bp, Homo sapiens
tgactctgggctagagacctccccaacagagctgaggccaaggccgactccccctctcaaatggcgtggtctgggcctatgacggcccctgcagtggagtctgtactggctgcgggggaccctgctcatttgaaaatctgacatcagctgggcagtcgcccccctcctcctttcctccctctactctgacacagcacttagcacctgaatcttcgtttctctcccagggaccctccattttccatatccaggaaaatgtgatgcgccacaggtatcagcgtctggttcgccacttcacgttttagccacaagtgactcagtggaagatccagagtcaacagaggctcgtcaggaagatgtctacagaaaaggtagaccaaaaggaggaagcttggggaaaaagagggtgtgcggagaccaggatcaaaggaccggacaaagaggaggaaccaccaagcttgctgcatcccattggccaaggggttggcgtccaggttggcagagcagcttagggaacgcaaggcctgaaccttgggggccagacaccctgttttttcccggcctttgttcaacgaccctccaagtacctgccttacttgtgggcccaggaggtgggccaagtcttggcaggccgtgcccgcaggctgctgctgcagtttggggtgctcttctgcaccatcctccttttgctctgggtgtctgtcttcctctatggctccttctactattcctatatgccgacagtcagccacctcagccctgtgcatttctactacaggaccgactgtgattcctccaccacctcactctgctccttccctgttgccaatgtctcgctgactaagggtggacgtgatcgggtgctgatgtatggacagccgtatcgtgttaccttagagcttgagctgccagagtcccctgtgaatcaagatttgggcatgttcttggtcaccatttcctgctacaccagaggtggccgaatcatctccacttcttcgcgttcggtgatgctgcattaccgctcagacctgctccagatgctggacacactggtcttctctagcctcctgctatttggctttgcagagcagaagcagctgctgggaggtggaactctacggcagaactatagagagaactcgtacgtgtccgaccactggagcgatcattgagatccacagcaagcgcatccagctgtatggagcctacctccgcatccacgcgcacttcactgggctcagatacctgctatacaacttcccgatgacctgcgccttcataggtgttgccagcaacttcaccttcctcagcgtcatcgtgctcttcagctacatgcagtgggtgttggggggcatctggccccgacaccgcttctctttgcaggttaacatccgaaaaagagacaattcccggaaggaagtccaacgaaggatctctgctcatcagccagggcctgaaggccaggaggagtcaactccgcaatcagatgttacagaggatggtgagagccctgaagatccctcagggacagagggtcagctgtccgaggaggagaaaccagatcagcagcccctgagcggagaagaggagctagagcctgaggccagtgatggttcaggctcctgggaagatgcagctttgctgacggaggccaacctgcctgctcctgctcctgcttctgcttctgcccctgtcctagagactctgggcagctctgaacctgctgggggtgctctccgacagcgccccacctgctctagttcctgaagaaaaggggcagactcctcacattccagcactttcccacctgactcctctcccctcgtttttccttcaataaactattttgtgtcagcttcaaaaaaaaaa

SEQ ID NO: 48672 - DNA, 1039 bp, Homo sapiens
ttttttttttttcttgtaaattttttctttatttaaacttcaataaaaatatagatttgtaactcaatagaaagacagcagtgataataactcacacatgagcagctcgcaaatttcaaagtctttggtcttcaagtcctatgtcacagcttcctcagtctgattccctccttctctgtagaattccgagaactagtttggttcacttaatcatctcaatggagatggccctttcctgccattcactcaaatctagaactcccaatatgtggctcacaaatacttcagtcatctacaaaagcatctggaaattagataattttagccagagtcagggacataaaacttctttaaagggatgcagtcaatcctggtattcaccacaaagaagatcctcatgtataaaaatgtggaatctgtgctgcttttaataatagaacctttaaggttcaaagaaaaaaaaaaatgctttcctgaactacatcatttccagacacatcagccacacaaggagctgacaagacctgctgtttctattatagagaacgtgagactttaaaaccacatcaaaagaaaatggtgggagcttttctgctatgcagagaattccgcatagcactcctttgcccagactgggagacaaacatacccctccctcctgaactggatccccaccacctttccaaaggccactggacatgtctcttaaacgctgcatttcagctcttgatcattctgccctggggatcccttctctttaggttctttgttatggtctggggaaacactctgactttctatggtgttgacagcatctgagtccaatcttcttcttttcttcagttggttcaagtgggatttggattttatgtgcgctgcccattcgcgatccccaatgatgattcgatcacagaggtcacacaggtgataacttctcttgttctcagcttcattgtatggcatctttattggagtggctgtaggcttgtggccctggatgaaactttgcacgatttcaagagcaggttcaagaacagac

SEQ ID NO: 48673 - DNA, 570 bp, Homo sapiens
  misc_feature (1)...(570): n = a,t,c or g
aggcgctggaatccaactgccaagcactgctgctgctgctgctgccgtcgccgcccaggctgctgccttgcaactgaatggagcagttcccttgggggccctgaatccagcagctctgactggtagtcttggacatgggaaaggaagggaaggtttgggggtctggaaagaaggagtgcgcggtgcttgctcactcactctgcctgtctttgttctagctctgagtccagccctgaaccttgcctcccagtgtttccagctctccagcctctttaccccccagaccatgtgagtctcagggtctagctcattctagcctttgattattctctttcctttggcttcccatttacctcttctttccacaggtaaatcagtggcacagtatactgcctccttgtgcctctggatcctgccacttcacatctacactcctntgtccccatttctccattttgtgggccaagccatcctgagggcatggacattgttctctgctggggattggggggacccttaagataccaagaattgctcgngncccatggtcttaaagngaataaaannaga

SEQ ID NO: 48674 - DNA, 1786 bp, Homo sapiens
ttgtgcatgtaacttttttattgaggcacaacaaggcattgtaacttgcctggacttgaggcagtcagtttagtaagctgaacgttaatacagttaaggattaagtgcaaacaatatacattcacagcttgactagcgaggctacatcacaatttataaagtgccagattagtgctaattgtcattcagcttgatttttcacctcaggaaggaaaacaaaaaagtaagggacctcctccctctaggaacaaaaacattttcctaaaccaatcagtcatgagggcaaagactacttttccttcaatcccactaattagaacaccatccttttattgtcaatactgtactgactttcaatcttgataaagaagatagcctgaaaacgtagaatatttccagctacttccataaattgctcccctgtgcagacgtaaccatatctggtctccctggaagagctgaagaattgcatgattgctagcagtttcatggtctggagcaccatcattggcataggctgataccaagacctcttcattcttcatgaggttgacatacagtggcacattcactgccagctttagcatgtgaaaaatgaaaacgtaagtgccattcactgggcaattaaatctaccaagctgaagatcaaaagtttctcctaagttgttcagaagaagatcaaacacaataggttggtctaaagttccaggggccagattagaggttctggctgctgagaaggcaactcggcatctgctgaggcagagggtagacgtgtactggcagtatggtggctgctggatttgtcactggcacatccacaggggtcatgctacgggagtctccttgtccagagtcaccactgttaaaggtttcgttgtctctttctgggctgctcacctgagaagaatcactccaccctgctctcgaaatttggctcgtggaccaccagatgtccctccctcgccttataacactgctggaaattaatcctttgggaataaggtgctcccagaatactctctagcttggaactgcagctggctataatttccattggaaattgaagggagtcctctataagtatcaaaacctttataaccaccaggggaccgataggaattggttattaatctcccaccacgagtaacacccctcctaaaaagatcccccggcctattgaacaaaatggcctgagtaggtcctgggaaaatacattccgtcctgtgcctgggtaaaaggcaaggcctacccattgccttacttgaatagttcccatcaggatgataatttgctgcagtctcttgagaatggacagtttgttcctacatgtatagatggcagttggcactggggtggtgtttgtgtacttgctgtggtaaaactttgattgtagccaggtgaataaggggattcttttatttcttgttcttttcgtggaggcaaaaggtgccattaaacgttaaaataccctgtaaacggctccttgaaagaaaatcactttgactggacagattttgttcctttagatgcctacggggctaccctggagtagctgaaggcggttgtgacgttggaattgcacttgaaggtttgtcaaagtcaagaacagactcttgcataaagttacaagttccttgaatctgagtcatcagatcctgcagtttttctttcctcaatactggcatcttcggaagggtagaggaagaacctacaggctgatgcacaggcttaggcacatctttgggttctgtgttcaacttcctgggcagcagctggtcatttg

SEQ ID NO: 48675 - DNA, 1804 bp, Homo sapiens
cggctgaccgaattattcaatgtaatgggatttcctgcagataaagattgggaagatataaaaaagatgcctgaacattcaacattaatgaaagatttcagaagaaatacgtataccaactgcagccttatcaagtatatggaaaaacataaagttaaaccagatagtaaagcattccacttgcttcagaagctgcttaccatggacccaataaagcgaattacctcagaacaggctatgcaggacccctatttcttagaagacccacttcctacatcagacgtttttgccggttgtcaaatcccttacccaaaacgagaatttttaacggaagaagaacctgatgacaaaggagacaaaaagaaccagcagcagcagcagggcaataaccacactaatggaactggccacccagggaatcaagacagcagtcacacacagggacccccgttgaagaaagtgagagttgttcctcctaccactacctcaggtggacttatcatgacctcagactatcagcgttccaatccacatgctgcctatcccaaccctggaccaagcacatcacagccgcagagcagcatgggatactcagctacctcccagcagcctccacagtactcacatcagacacatcggtactgagctgcatcggaatcttgtccatgcactgttgcgaatgctgcagggctgactgtgcagctctctgcgggaacctggtatgggccatgagaatgtactgtacaaccacatcttcaaaatgtccagtagccaagttccaccacttttcacagattggggtagtggcttccaagttgtacctattttggagttagacttgaaaagaaagtgctagcacagtttgtgttgtggatttgctacttccatagtttacttgacatggttcagactgaccaatgcatttttttcagtgacagtctgtagcagttgaagctgtgaatgtgctaggggcaagcatttgtctttgtatgtggtgacttggagtgtaacagcgtgatctgaccaatagtacacacagacgcaaggtttaactggtacttgaaacatacagtatatgttaacgaaataaccaagactcgaaatgagattattttggtacacctttctttttagtgtcttatcagtgggctgattcattttctacattaatcagtgttttctgaccaagaatattgcttggatttttttgaaagtacaaaagaaccacatagtttttccagaaaggtttcaaaactcccaaagattaacttccaacttataagtttgtttttattttcaatctatgacttgactggtattaaagctgctatttgatagtaattaaatatgttgtcattgatataaacctgtttggttcagcaaacaaactaaaatgattgtcatagacagtgttttatttttcctgttggtgttgctgatttgtgagcatgctttaagatgaaaaaagcatgaatgataacttccttaaaaaggtgcggcatccaattcaaatattttcgtcctgattttaaagctggttggtgtagtgctattaaaatttcgttcagttaattttccttttgaaaacttgttcgcacgttgtttagggtgcccttacttcagcaaaggagaaggagtaggagagccttagaatttttgaggaaaaaaaaacctataacatacaatgtactgtatcaaactattttacatgaatgacacaagtattctgaataaaaaataattgaacattgttaaaaacaaggtgttatgtaataaatttatttttcataaatcaaaaaaaaaa

SEQ ID NO: 48676 - DNA, 581 bp, Homo sapiens
  misc_feature (1)...(581): n = a,t,c or g
gcggttcagcgttcaacaacaagcttccaagatgccgcccaaaggaaaaagtggttctggaaaagcggggaaagggggagcagcctctgggagtgacagtgctgacaagaaggctcaaggtcccaaaggtggtggcaatgcagtaaaggtcagacacattctatgtgaaaaacatggcaaaatcatggaagccatggaaaagttaaagtctgggatgagattcaatgaagtggccgcacagtatagtgaagataaagccaggcaagggggtgacttgggttggatgaccagagggtccatggtgggaccatttcaagaagcagcatttgccttgcctgtaagtgggatggataagcctgtgtttacagacccaccggttaagacaaaatttggatatcatattattatggtcgaaggaagaaaataaaatcatatgaaagactgaataagttttatacattttgttttcttttaaaggtattaccntttctttttgagcttgggctgccagggaatnccaaaattttttaaaaaggaaaggttttggtgccccntgtattctgtgaaagctcttagtatgg

SEQ ID NO: 48677 - DNA, 1868 bp, Homo sapiens
  misc_feature (1)...(1868): n = a,t,c or g
ggcagcagagatttacccgagcgtgttgcggcacggcctgggcttgcaaggcgcgatccaagagggatttaagcagcccagagctccagagaaaaagagagcgagagagaaccacacacagagacggcttaagcgtttacccgaattaaatatatatttttaaaaagaactgttgagttttatcattttcgttaagtgaccgtgcgcagcgctggttaactgcaggatggggaagcagaatagcaaactggcccctgaagtgatgggaggacctgggtgaaggagcacagagttttaatgaggcattgaacttcaaggcagtgggtacaaaggatttctcaaggactgtccaagtgggaggctaaatctcgaggaatttcagcagctctatgtgaagttctttccttatgggagacggcttccaagttttgcccagcatgcctttccgaaccttcgacaagaatgggggacggcaccattgacttccgagagttcatctgcgctctgtccatcacctccaggggcagctttgagcagaagctgaactgggccttcaatatgtatgacctggatggtgatggcaagatcacccgagtggagatgctggagatcatcgaggctatctacaaaatggtaggcactgtgatcatgatgaaaatgaatgaggatggcctgacgcctgagcagcgagtagacaagattttcagcaagatggataagaacaaagatgaccagatttacactgggatgaattcaaagaagctgcaaagagcgacccttccattgtattacttctggcagtgcgacatccagaaatgagctgatgtcaatgctatgggctncncccaagtctcnatgttccattcagtctgcagctannnnnnnnnnnnnnnnnnnnnnnnnnnnnnnnnnnnnnnnnnnnnnnnnnnnnnnnntgcttggactacctataaatggacttgcttcttgtgtttgaaacactcgtgtgcatgagaatgtcatttgctaatgaattttaaaagcatatataaaacaaaacaaacaacctgccacaatgtgatatgtgtaatatcatttcataaaaatccctcttcctccaaagcctgggcagaaatgtgctgcaaagagttatatgacttcttgttcatgttttgctaatgctcgtatctccttgattacataatgttagtagcactgagacccccatggtaatgtaacttaattataagctatgtcactaccctcctgtaaaatactattggacagacacagagggacccttggctcctgtgtctggtccacacaccacagaagcttgtattatcagtgaatataaatgtactacatttgcatgccttttgggtttgccttaattcttacctcatttgcatcctatcgatctggaaagagctgttttggatgaatgcagtataaaatgtaaaaaccctgctaaatgacttattgattaagtatatctatctatatatacatatacacaaagatattatttatcgaaagtaaaaaagatggaagtgtattggtttctgtttgaattttcaaaggcttccaatgtggtggcaataaatgtcccaaataaatttataacaattgattttccccctaattcttattttataattttaaaattgcagcagttgctagcaacaacttactaaatctactcttaaatatacaactttggaatttgaagaattaatgacaacgaaaagggaaaaaagcaactttccaacttttcatccaggctcccaaaagagggacaacgaacatggcatgtgaaaagtaaaacagatttgttcattccgaaaaaaaaatgttcattctatgacaataaattttatctcagtgtg

SEQ ID NO: 48678 - DNA, 879 bp, Homo sapiens
gggtgaaatgagttactaaatgtagcatttatttataaggaatgcattgtgaatagtttctcagttttcattatggaaagatgatgatttcagcccacattcagtgtatgtttctaaataacacaatcgacaggactgtctgttcagtacaatggaggacagctttttcagggcaaatgggatttcttgataatgctaaatctgtcttgtcagctgaatttcttgggctttatgtggcagtgtggtaaaaatatatgatcagatttcactgttaagaaaattctttcagcaatacatgtagagtcaagtttcttgcatggataactgaacatgtgggttatgagattttaaaaaatgtctcgtgacaaactttacggaaatgcaacaatctggacatctagttttgtctgagagtggcgtggatatgaagaactgtgctgttggtgctgatgccacactaagttttggcagtcacactcttggttcttcatatttgaggagatgggatggtgaggaggcctgttggctttattttattaatgccaccatctagaatacagattcttggatatttcatcttcacaaggtgagctgcaaactcagctgtgtgttttgccacatgccccacgatgacaatgaccttccctttgaagttctggagcatagcagtgtaagggccctgggtaagctccccttctgcagtgaaggcagcactgaatggaatgttgatgcttcctgaaatgtgaccacgaataaagtcttcactattccggatgtcaaccaccaggagctttggtttactggactttgttttcttgctgggtgttttgaagtggcctgtcactgtgagctcacacaagtcaatcaggtcctctgctg

SEQ ID NO: 48679 - DNA, 1110 bp, Homo sapiens
  misc_feature (1)...(1110): n = a,t,c or g
ttttttaaaaaacaaaacaaaacatgtttttattgtttgattaacaaactggttgggggaagggcaagaataagacatgcggggaaataccagctttgattagtcagaaactcctgttatctgtacaaaaaaatgaatgttacaaaaatcacgtaaaaaaactaggctcaaggaagcagccgcccttgcaagagggctcaaggcacctgggaggctgagaagaggccaacctggccatgggcgtggctgcatggacagctcttccctcctgcccttccccagatgcccttccctccctggccccgaggggcacactccctctccccaattacaggtgctacaaaactgccttgaataccaccgccaaggcactgccagagatgaaatgggccctgagcagagcctcaggctctccctcccctgtagcccaggcctggagaaaggagggccttgttccccaggccccaggtgggcacagattccagagctgcctcggggaaagcctcttaggggaggcccaggctctgctccctggggaggcagaggccgtgggacctacacacaggcacacacagccctggctttggtcagtactgagtgtgggcagaggggccgcagccctgtccagccccacgatgttgactgagaggtgctatcccagacggtccttgttggagctgccatggcaggctgggccctaattggggtagcacaagcagcatcccgtgcctgccgcctccacgctgggcttggcaccgggccccaggagcccatcagtgacagagtgctccatgatgatgtcctccacccgggtgatgtacagcagcgtcagcagcacccccaggaactggggaagcaggatgcccaggaggatgcccgccatgatggtgtagttgtccatgaaccagatgatcacggcgttggtgcagccccgcacgtagatgacatcctgcacactgaaacgctccttgtcgatagttttntagccacacatggtgttgacaacttctgtcgtgttcctgatgcagcaggtgtagggcaccccacaggccaggggtccaggggcactgcagtcgtggtactgattcttgctccaatctcggtagtcct

SEQ ID NO: 48680 - DNA, 1151 bp, Homo sapiens; identical to SEQ ID NO: 8161

SEQ ID NO: 48681 - DNA, 1928 bp, Homo sapiens
  misc_feature (1)...(1928): n = a,t,c or g
cagatatggtactttacacaatttatgtaattaatattttctcacagacaaggttccttgtggatatcactgaataatttttgtgtagtttctatgcccatgaagtgcctggtaggtagtaggaactcacacgttctgctatgctggttgcagcacaggacacaaaagttagaattatttcaaaggacttatactctactaggaaagagagaaacatagaaatatagtgttgtatgtgggtatcttccctaagataagtacaaccaaagagctatgggatgttcagaggataggaatgtagtactggggatgatgtcaagggagggcagtgggtactttaagctgctccaaggtaggggaagcagttttactttgctgggttttttccatagggtaagctctttcagagtttgtctccggtgtttgaagtgaatttttttaaacctcagatctgaatatattcaaacacccatatttcatcaagtctagggcatatcatatacctttaatttaaaaaaaaaggctgagcagagttgcttgtgtctgggagggctgaaannnnnnnnnnnnnnnnnnnnnnnnnnnnnnnnnnnnnnnnnnnnnnnnnnnnnnnnnnnnnnnnnnnnnnnnnnnnnnnnnnnnnntgctgccagttgatcattacatttatcccgacatcagatatgtcaaattgtgaaaagcaccttaattttgatgaaatatgataggtaaaaaatagcgcaaagctaagtataagtgacttttaaattatctgctcttttggattatcactactgctactagccgttagaatattggtttggataatggaaagttgactagagctacaaaatctgtttcaaaataaaagatctgctcaaacaagaatgtgatgatcacttgctgtattgtacaacaaagtcaaactgctgttagactcaggtgacagtcaaatgttggaggctgtgttgggatgagttgttacaaagcctctttcattcttcccatgccatgtccaggagttcttctctgttaaacctgaagagatgccagccctcctcagaggaaaggtctaaagcccctcgactagtatagtagttgatagaagcctggttccaaatgacgacaagaaagtgcatgcagttacattgagttgtgatggctatctgtttaaaaacaaacaagcaaatattactttcatttgaaagtataatcttcgttaacacatatattttattgaaggtctactctatgcaagacactatgtgtgaataatacttccaaatatagtagttaccttttgaacttttctatagctgnaaaaaggaaaaagtctcactgtgctgagcttgaaagccctctttaaaatcgcaaaactgagttcaaagcctgtatcatacagaaaaggtgtgcctaaaagaacacatgttctcatatgtgtccaaaatacaagaagatctggcttttatagtcttgtaatattcatactgtgagcctgtgtttttgaataaaaatgctttctaatctccctccttcttactttcccttgatagcaaaaagggtgtatagtgtggttgtggattatatataaatcaattttaattgactataattcatatactgtatatgatcatcctgatttgaaaatccagtttaatttgggtagaaatttgaagtatatgttggggttatgttcaaatggtgagattaatgatttaatttatgccctgtgaatatttattaagaaaaggttaatgtatagaatatcaatactaattgtaatacatacctgacttagcctcttcagcatttcagctccaatacctaggccttttaaatagacaatgcaaagtgaaaactgcaaatttcacttaacttgttatttgctttagtttaaaataaataatatctaaaactctgaaaaaaaa

SEQ ID NO: 48682 - DNA, 762 bp, Homo sapiens
tttttttttttttttgaatgcataaagtcctttattgaaaatattgggatagcactgcattacatatagtcaatatccataaatgaagggtcacacatttctgaatggacaatactgttttacatagagaacacagcatctggatatgctctcacaattatagtatcatggactaaactaggtcagagtgaagtatatgcaaaatgaccattttgtttttttccattttattaatagcatatggttgcagatggtgtaaatggtaaacgtgatatcatgagacattcctgatatctcacaccaacacattatttaacgagcaggttaaggtgaaactgccagtatgctgttagtcaagagtcctcagtaggagaacttgagtgaaacgtacacccaggctacagatttaaaattttatagcattcatttaaatttgcatggaattaaggagtataataattgttgatctgacaggaggccactggacaatttgttctctttcacaaaatgtctaaaataggagaataatgtaaaggaagtattctaagaattgcttttttaaatgcagatatgtaaatagtacttgttatacatttttcctttcaaaaattaccggggaaataatttatgacagaccatttttcagctttggttattatttgaaattttttcctactagcaagcagtctttggctttcataaaagtctggtaatcaataatattggttaagtaagtctttattattattattattgttatta

SEQ ID NO: 48683 - DNA, 4438 bp, Homo sapiens
  misc_feature (1)...(4438): n = a,t,c or g
cggctgtcctcgccgcgacccctcctcagccctgaggcgcgcaaagtggggccccgcgggctggccgcctagcgagcctgccggtcgaccccagccagcgcagaccggggcgctcgctgccgcaggcgcagcacggaagtgcgttctctgaagtagctttggaaagtagagaagaaaatccagtttgcttcttggagaacactggacagctgaataaatgcagtatctaaatataaaagaggactgcaatgccatggctttctgtgctaaaatgaggagctccaagaagactgaggtgaacctggaggcccctgagccaggggtggaagtgatcttctatctgtcggacagggagcccctccggctgggcagtggagagtacacagcagaggaactgtgcatcagggctgcacaggcatgccgtatctctcctctttgtcacaacctctttgccctgtatgacgagaacaccaagctctggtatgctccaaatcggcaccatcaccgttgatgacaagatgtccctccggctccactaccggatgaggttctatttcaccaattggcatggaaccaacgacaatgagcagtcagtgtggcgtcattctccaaagaagcagaaaaatggctacgagaaaaaaaagattccagatgcaacccctctccttgatgccagctcactggagtatctgtttgctcagggacagtatgatttggtgaaatgcctggctcctattcgagaccccaagaccgagcaggatggacatgatattgagaacgagtgtctagggatggctgtcctggccatctcacactatgccatgatgaagaagatgcagttgccagaactgcccaaggacatcagctacaagcgatatattccagaaacattgaataagtccatcagacagaggaaccttctcaccaggatgcggataaataatgttttcaaggatttcctaaaggaatttaacaacaagaccatttgtgacagcagcgtgtccacgcatgacctgaaggtgaaatacttggctaccttggaaactttgacaaaacattacggtgctgaaatatttgagacttccatgttactgatttcatcagaaaatgagatgaattggtttcattcgaatgacggtggaaacgttctctactacgaagtgatggtgactgggaatcttggaatccagtggaggcataaaccaaatgttgtttctgttgaaaaggaaaaaaataaactgaagcggaaaaaactggaaaataaagacaagaaggatgaggagaaaaacaagatccgggaagagtggaacaatttttcattcttccctgaaatcactcacattgtaataaaggagtctgtggtcagcattaacaagcaggacaacaagaaaatggaactgaagctctcttcccacgaggaggccttgtcctttgtgtccctggtagatggctacttccggctcacagcagatgcccatcattacctctgcaccgacgtggcccccccgttgatcgtccacaacatacagaatggctgtcatggtccaatctgtacagaatacgccatcaataaattgcggcaagaaggaagcgaggaggggatgtacgtgctgaggtggagctgcaccgactttgacaacatcctcatgaccgtcacctgctttgagaagtctgagcaggtgcagggtgcccagaagcagttcaagaactttcagatcgaggtgcagaagggccgctacagtctgcacggttcggaccgcagcttccccagcttgggagacctcatgagccacctcaagaagcagatcctgcgcacggataacatcagcttcatgctaaaacgctgctgccagcccaagccccgagaaatctccaacctgctggtggctactaagaaagcccaggagtggcagcccgtctaccccatgagccagctgagtttcgatcggatcctcaagaaggatctggtgcagggcgagcaccttgggagaggcacgagaacacacatctattctgggaccctgatggattacaaggatgacgaaggaacttctgaagagaagaagataaaagtgatcctcaaagtcttagaccccagccacagggatatttccctggccttcttcgaggcagccagcatgatgagacaggtctcccacaaacacatcgtgtacctctatggcgtctgtgtccgcgacgtggagaatatcatggtggaagagtttgtggaagggggtcctctggatctcttcatgcaccggaaaagtgatgtccttaccacaccatggaaattcaaagttgccaaacagctggccagtgccctgagctacttggaggataaagacctggtccatggaaatgtgtgtactaaaaacctcctcctggcccgtgagggaatcgacagtgagtgtggcccattcatcaagctcagtgaccccggcatccccattacggtgctgtctaggcaagaatgcattgaacgaatcccatggattgctcctgagtgtgttgaggactccaagaacctgagtgtggctgctgacaagtggagctttggaaccacgctctgggaaatctgctacaatggcgagatccccttgaaagacaagacgctgattgagaaagagagattctatgaaagccggtgcaggccagtgacaccatcatgtaaggagctggctgacctcatgacccgctgcatgaactatgaccccaatcagaggcctttcttccgagccatcatgagagacattaataagcttgaagagcagaatccagatattgtttccagaaaaaaaaaccagccaactgaagtggaccccacacattttgagaagcgcttcctaaagaggatccgtgacttgggagagggccactttgggaaggttgagctctgcaggtatgaccccgaagacaatacaggggagcaggtggctgttaaatctctgaagcctgagagtggaggtaaccacatagctgatctgaaaaaggaaatcgagatcttaaggaacctctatcatgagaacattgtgaagtacaaaggaatctgcacagaagacggaggaaatggtattaagctcatcatggaatttctgccttcgggaagccttaaggaatatcttccaaagaataagaacaaaataaacctcaaacagcagctaaaatatgccgttcagatttgtaaggggatggactatttgggttctcggcaatacgtttcaccgggacttggcagcaagaaatgtccttgttgagagtgaacaccaagtgaaaattggagacttcggtttaaccaaagcaattgaaaccgataaggagtattacaccgtcaaggatgaccgggacagccctgtgttttggtatgctccagaatgtttaatgcaatctaaattttatattgcctctgacgtctggtcttttggagtcactctgcatgagctgctgacttactgtgattcagattctagtcccatggctttgttcctgaaaatgataggcccaacccatggccagatgacagtcacaagacttgtgaatacgttaaaagaaggaaaacgcctgccgtgcccacctaactgtccagatgaggtttatcaacttatgaggaaatgctgggaattccaaccatccaatcggacaagctttcagaaccttattgaaggatttgaagcacttttaaaataagaagcatgaataacatttaaattccacagattatcaagtccttctcctgcaacaaatgcccaagtcattttttaaaaatttctaatgaaagaagtttgtgttctgtccaaaaagtcactgaactcatacttcagtacatatacatgtataaggcacactgtagtgcttaatatgtgtaaggacttcctctttaaatttggtaccagtaacttagtgacacataatgacaaccaaaatatttgaaagcacttaagcactcctccttgtggaaagaatataccaccatttcatctggctagttcaccatcacaactgcattaccaaaaggggatttttgaaaacgaggagttgaccaaaataatatctgaagatgattgcttttccctgctgccagctgatctgaaatgttttgctggcacattaatcatagataaagaaagattgatggacttagccctcaaatttcagtatctatacagtactagaccatgcattcttaaaatattagataccaggtagtatatattgtttctgtacaaaaatgactgtattctctcaccagtaggacttaaactttgtttctccagtggcttagctcctgttcctttgggtgatcactagcacccatttttgagaaagctggttctacatggggggatagctgtggaatagataatttgctgcatgttaattctcaagaactaagcctgtgccagtgctttcctaagcagnatacctttaatcagaactcatt

SEQ ID NO: 48684 - DNA, 1430 bp, Homo sapiens
acaatctataacattgtttatttgtttaattattttccatctctccactaaaatttaaaactcagtgagggcagggtcttttttggtcctgttaaccagtgtattcctaatacccagaacaaatctggctcctggcaggcattcaaataattcttaaatgaagagatacaaaagcccactgagtcatttatgcaaatcagatggagtggcggtcttctccacaattcccaagtacagcttccacttttccctcaacctctcataaagtcacagagtaaatagaaggtgagtttatttctccagtcttgaaattaacaattttcaagaaaacaaattattagaataactggtggagtcacagacatatttctagctccattaggtcaaaggaaaggaaagaggacaagggtagaaaggagacaagccctctaagaaactgtccattcagtctgtctgcagtcaatatgaagagatagcctttggagctacagaaaatattacattgaagtggattatgcttgctgttaaagaagctggtccagccgagcagcagcagaagacgaagactcaaatgtccatgtagagcatcatggtccctgaccaaagagacttcttctggttcctcttgctctcctcaccaagagcacagatgtgcccagcagcaatatgacagcaaatgtctctatggcttcgggatgaaaatgtccacacactttaagacccgagaagaaatggggagtgctccacacccaaggaactgaagctagggaaagacagttttcttgtgtttctgtcatagaggtggactgatgctgaagtcaactggtctataccaatctagagcatccactaggtgtaacaaggtgtctggttgtgcacgggttggtgaggcaggaggggccagaccagcacaaagtcagggccctattcttctagtgttgggtccacttgatgctcttgaggtcaatgccatcctgaaccatctcccagagagggctcatttctcgaagacgcttcacatgctgaatgcatttctccactgtgtagtccacttcctcctctgtagtgaagcggccaattccaaacctgatagaagagtgcgctaaatcctcatcagtgccaattgctctaagcacataagagggctccagggatgcagaggtgcaggcactccctgaggataaggcaacgtccttcagtgccatcagcagactttccccttccacatatgcaaaggagaggttgatacagccgggataatggtgcttagggtccccattcatcaccacatctggaaggctcttcattatattctgtatcagccgctctgacaactttgagattcgcttgtggtcatactccatctcttgctgtgccacctcacacgcagcccccagccccaccactaagggtgtgggcactgtcccaga

SEQ ID NO: 48685 - DNA, 4023 bp, Homo sapiens
ggccttcgtcgaagatgtctccgacgccgccgctcttcagtttgcccgaagcgcggacgcggtttacgaagtctaccagagaggccttgaacaacaaaaacatcaagccattgttaagtaccttcagccaggtacctggcagtgaaaatgaaaaaaaatgtacccttgaccaagctttcagaggtattctagaagaagaaattataaatcattcatcatgtgaaaacgttttagctattatttctcttgctattgggggagtaactgaaggtatttgtaccgcatctacaccttttgtattgttgggagatgttttggattgtcttcctttggatcagtgtgacacaatattcacttttgtcgaaaaaaatgttgctacttggaaatcaaataccttctatgctgctgggaaaaattacttactacgtatgtgcaatgatctcctaagaagattgtctaaatcccagaatacagtcttctgtggacggattcagctctttttggccaggcttttccctctgtctgagaaatcaggtcttaacttgcagagtcagtttaatctggaaaatgtcactgttttcaatacaaatgagcaggaaagcaccctgggtcagaagcacactgaagatagagaagaaggaatggatgtagaagaaggcgaaatgggagatgaggaagctccaacaacgtgctctattccaattgattacaacctgtatcgaaaattctggtcacttcaggattacttcaggaaccctgtgcaatgctatgagaagatttcatggaaaacttttctcaagtattctgaagaagttttagctgtttttaagagttataaattagatgatactcaggcctcaagaaaaaagatggaagaattgaaaacaggaggagaacatgtatattttgcaaaatttttaacaagtgaaaagctgatggatttacaactgagtgacagtaactttcgtcgacacatcctgttgcagtatctcattttattccaatatctcaaggggcaggtcaaattcaaaagttcaaactatgttttaactgatgagcaatcactttggattgaagatactacaaaatcagtttatcaactactatctgaaaacccccccgatggagaaagattttcaaagatggtagagcatatattaaacactgaagaaaactggaactcgtggaaaaatgaaggttgcccaagttttgtgaaagaaagaacatcagataccaaacctacgagaataattcggaagagaacagcacccgaggacttcctagggaaaggacccaccaaaaaaattctgacgggaaatgaggagttaacaaggctttggaatctttgccctgataatatggaagcctgtaaatcagagacaagggaacacatgcccactttggaggaattctttgaagaagccattgaacaggcagaccctgaaaatatggcggaaaatgaatataaggctatgaacaattcaaattatggttggagagccctgaaactattagcacggagaagccctcacttcttccagccaaccaaccagcagtttaaaagtttaccagaatatcttgaaaatatggtaataaagctagccaaggaattaccgcctccttctgaagaaataaaaacaggtgaggatgaagatgaggaagataatgatgctctactgaaggaaaatgaaagtcctgatgttcggcgagacaaacctgtaacaggagaacaaatagaggtatttgccaacaagctgggtgaacaatggaagattctggctccctacttggaaatgaaagactcagaaattaggcagattgagtgtgacagtgaagacatgaagatgagagctaagcagctcctggttgcctggcaagatcaagagggagttcatgcaacacctgagaatctgattaatgcactgaataagtctggattaagtgaccttgcagaaagtctaactaatgacaatgagacaaatagttagcttcttttttttttctttttattaaaactgtgatagattttgttaccaagcagcatttgataagaggtccactggttttggtaaacaataaacatttttataacaattgttgtacagtcggctggtgctctgagaacaatagaacacatattggctcaaaccagagtttggggaggttgggttgagataatgacctaaacgaagtgacctcaagatcacaaaatatatttttttgttaagtaggatgtatttataatgaagttaaataaggcactatttaggggatatgtcgtttcttataccaaattagtttcctgtgtgttgtttgttagtagttttacaaaatttatcctgaaatcccagaataacactttctgaaaccatatgactgctctgttctcacttattcgtgctttcaagcagaggatcaacaaatgatggtttgttctgcctgccacgagtcttgatcattaaaattgtactggcacccagctgtgctcactcataactaactaactgtctatggctccagctacactataacaacagcaaagctaaggagctgcagcactttatagcctgcaaagcctgaaataatttactatcaatcatcaatcatcaatcaatcatcatctatctatctatctatctatctatctaatctatctatcttgtccattacagaaaatgtttgtttgccaactttaaaagaaatgaagtctaaaacctcacttttccttctagccttacaaaaattgcctgacctctcaagacttttaatcacttcagggattcttgtgacattcaactgagatatatgtgaacacaccctatacacagcaaagcactaggtagtagtagcagaagacagtaccaccgacttttcttgttcccacataagcatttccctttagggctctaagatgaggtcatcatcgtttttaatcctgaagaagggctactgagtgagtgcagattattcggtaaacactattaggcctaacctagctagtcagtcaagcagtaatctagcacaactctaatgttgagatgatggcctcggtgtgagtggcacagcatataaggcacattcaggaatcaagacttttttttttttggcctactcctctcccttctcaaagaccttacaggcaaggctgaattctaaaatagccttattagttaaaaacaacactggtataactaactcccatttctacttgaaaaaattctttggaataatgcttttttagatcaaataaaaaaatcaagctttttataatgatgataaggaattaattacaatttttaaaattctaatatagtccatacaaggcttatatactttgctctaaacctagctcacctggtctagtagctacaacatttagtagctacagtcagaaaatctaaattctaattgttaaattcatgtcctcaataaaattgttctgaccaaatgagacaatgaataaaaaagactttgcaaagttacaagcatcatacaaatatacatgaatcattataattttcatggtctcatcctgcccattctattcttaatcccctccacaaagtagaaagtattgattgccaagtcaaagtttaggtgaggaagctatttacaaataagtttccctgcaatgcttattttatcccctcctagtgttcacagattgcatcacatcagatttgaaagtaaaatggctgttattttctatttttaatagttatcatcacgtgttgtcgtctgccgagcattaaaacaacatacacaaagatatgagatgttatgataatccccaaactttattataaataactcaaaatcagagccaaactggctggtattctatgctttatcctttccctagcatcagtcaagggtcctggaacaaagatgagtaactattaaaatgtaagaagcctatcatattgaaatacctcatatgcttggtattttctactatcactttaaaatcactaaaattctgaaacagacattaagatttgggaattttttcttttttttttt

SEQ ID NO: 48686 - DNA, 427 bp, Homo sapiens
  misc_feature (1)...(427): n = a,t,c or g
cttgaanacanctatgactgattacgaatttaatacgactcactatagggaatttggccctcgaggccaagaattcggcacgagcaaactcttcgaggccagcattgaaacaggggaccgtgtctggtggatgcctctcttcgaacattatacaagacaggttgtagattgccagcttgctgatgttaacaacattggaaaatacagatctgcaggagcatgtacagctgcagcattcctgaaagaattcgtaactcatcctaagtgggcacatttagacatagcaggcgtgatgaccaacaaagatgaagttccctatctacggaaaggcatgactgggaggcccacaaggactctcattgagttcttacttcgtttcagtcaagacaatgcttagttcagatactcaaaaatgtcttcactctgc

SEQ ID NO: 48687 - DNA, 822 bp, Homo sapiens
ttttttttaacctttaattaagtctttatttaagatacttcaagagctggagttaacatttttctttcagattcgtatttccttaacatgaaaagtcaacaatgaaaacagaataagttactttattacaagaacaaaacagacttgctaattttatgtctcctttcacccatatcacaaatgcaaagtatatattatcataagatggaaattaccaaactccaagatactctgcataaatgaaataaactcaacttgcaaaattagcaagtagaacattcaagtatctacagtcattataaatagtgtaaagtacatgccatatctacagtgtgggaagagtataaacatgggaaaatgagttcttaaggaacaattagaatgtttgtttggacaatttaaaatattaacaagggtactcaaatacagaatcaaccaaaacatttattttttctcttttttcaagaaaaactgtcgagcttctttccccaggccctgcctgaggaaaatctgttagccagctcaagatagtcttgggaaaccaaggcatttccctttgggttggtaaggctggttttccgcttgacctggagtctgtgccaaatcctgaatgaaagtggccagtaaaacacagctcatctcttgctccagaatgatcttgttctgatggttgttgtaacaagcagcgataagtgaagggaacagtactttgatgagccgtgggtcactgaaatactggaagggcaactggcagagcttctgcagcactgtggggtggcggccggactgcacgatcaccctggttatctgggtggttgacag

SEQ ID NO: 48688 - DNA, 1938 bp, Homo sapiens
gaaggattaaaaatatataatcaaatttttttttatttttctacagcaaaataaaaacattattttaaaaagcaatattctacattaaatacattaagatattgacaattttataaatacaatcattttaaacagtaaacatgataaatttctgatacaaggttttacatacgttaattgtgaaaatataaaaactttacacacttctcttaaaaagcattcaacgtaatcaattttacaaaattatcaatttaaaaagtgttagatatgcttctattttgttccattattaaggcaatgatagcatatcagatcttaaaaaagaaatggtgaattagggcctaagacatcctatattgcctaaaaacgaacatttcagagactttcttaggcactgagttcaaaaccagtgaaggttgccttctccctagcaccactacccctcatggttgtccgaatcaggagacttcttcctggctacccttagggagagtcttctacacctattatttcctagtttctaggagaaagggtttcagaaagaattttgacatttaaattctatgccagtactgaaactctcccaaagattgaggcattctgcatttgaattttatacagaaagtcatgaatctaattccaaaagaaaagagtgcacttcatttggtcacttaatttcataccacttggcgaggtaggataactttcttctttgacaactgtctcgactatataaatggtgattataccggaaagggttctaatgccttttccacattcttccagttgtgaaaattctctctgtaccattcaattgttttctttattccttctttccaaggcactttaggtctccatcctaagccatgtattttttctgacttcattgggtatctcatgtcattggtgggtctatcattaacataatcaacccaattttccatttcagactctgaattggtctctttgatcagttgtattagttctttggcaagctggacaactgacatttcaaaattggttccgatgttataaatttcacctggtttcccttttttgaggacagtgagaaatgcttctacaacatcagtagcataaaggaagtttcttgtttgaagccctgacccatgaatgcaacatttcctgttgtgctgtagcaaagatataaattttggaataaccttttctggatattgatgtggtccataaacattactgcttcttgtgatgacaactggaaacttatattgttcccagtaagactgtacaaaacatttcagcagctgctttagatgatgcataaggatttgtaggttgtttgggtgaagattcatcaaattccttatcaagactgccaccatatacttcatctgtgctgacataaataaacttctccactctggcttcatgagcagcacttaccaaaacgtgagtgccataaacattaacataggtaaactcaaaggcacgtacgaatgaaagatctacatgtgtttgtgcggcaaaatgtagtactatatctattttctctgtttcaaaaagcagtttcacaaagtgagaatcacatatgtcaccctgtataaatttgtagttctgtttgttagaaatggtttcaagattcttcaagcttgcacagtaatccagcttgtctagatttatgatcatatagtttggataatcttccactaaagagacaatcatatgtgatgcactagggcaagcagagctgcgggaaaaggtaggggtttctggggagccactgcttggctagcggcgccattacctacatgaaaccagcaccgccggtcaccaggacccgcttcgcaaagccgccgggaagaccccacggttcctcccaacacgccgccgacatctcccagctcagcagtgcctagtaccgtaaagagtatggtctgaaaagcgcagggaagttccgcc

SEQ ID NO: 48689 - DNA, 1130 bp, Homo sapiens
  misc_feature (1)...(1130): n = a,t,c or g
tttttttttaaagacaaaattctcttgaaaagtttattaatataagtaacaataaatcattcaacttttcggtcttcaggaagtttgttttaaggattaatttcagaagtcctcatgtaaacaaatcaggcatgaataaagcccttataatgaacttttcaaataaatttttaaaatatcttttttcttgggatgacaataatagtattaacatgatagtattaatttttcttatttttattaaaattagctcttcaagattgttactaacaaatcttgatttttattactgtgctggggcaagattttaatcactaagttcttcctcatcactgaaatatgtgcttttctttatccttgggcgtcttgaatcatctgatgttgaggggactcctgaactgggtttccattttttttgttcttcttcaattttggcttgctggaatgctatggcctgactgaggctgtcaagagcaggatcctccccttcatcttcactttcttctacttcctcaatttcttcttctggttcaggagctttcttttttttctttttttctttcttctttggaggctcacgttctccgagcatatttttcggacaggcataacttaagtgtccactttccccacattcataacacttagatttatcaaagtagtttcgccttcggatgaactcagctgctcttccattgtcaatagcaatgcttgcttttatcactctaccaaataactgtttgttgtttattgccctggtacagttttgtgcagagtctttatccaaaaataaaataaatgcaacccctttactcttcctggtatctttatctttcatgatggtaacctttacaactttgccatacttggaaaatatccggtacaagtcattgtttgtcagggaaaaaggcaagttggatacatacactgtgctcttacttggagccaatccaccactcatttcttcaggtgggttgggcctgggagaccagaagagtgcgagccctcggctcagctggggctcaaccccgactcttcggtnacgctcgcagcggccttggcatcacgagtcctgggaggggtcaggcgcggagagcagataatagcagccacggtgcttctctcccggc

SEQ ID NO: 48690 - DNA, 2536 bp, Homo sapiens
gcgctctggagcggcgggtgctcgggctgccgtccgttccgccagaagcaccgagcagccgagccggggcccgccgccctcctcctcccatgaggcccgagtgaggtcgcggcggctatagccgacccgcggcgcctttcccccgcgttcctatcgcgaagcgtcagtccaagctgcccccctggaggaggaggcggaggaggaggagcatgtcggacgggtttcgattcgggggcccagagcaaacgaggcccctgagagctccacctagttcacaggataaaatcccacagcagaactcggagtcagcaatggctaagccccaggtggttgtagctcctgtattaatgtctaagctgtctgtgaatgcccctgaattttacccttcaggttattcttccagttacacagaatcctatgaggatggttgtgaggattatcctactctatcagaatatgttcaggattttttgaatcatcttacagagcagcctggcagttttgaaactgaaattgaacagtttgcagagaccctgaatggttgtgttacaacagatgatgctttgcaagaacttgtggaactcatctatcaacaggccacatctatcccaaatttctcttatatgggagctcgcctgtgtaattacctgtcccatcatctgacaattagcccacagagtagcaacttccgccaattgctacttcaaagatgtcggactgaatatgaagttaaagatcaagctgcaaaaggggatgaagttactcgaaaacgatttcatgcatttgtactctttctgggagaactttatcataacctgggagatcaagggaacaaatggacaggttacaagagcagatattcttcaggttggtcttcgagaattgctggaatgccctgtttttctaatcctatgggtggacaatttaattttgtgccagtaaaatttgttaaagttgacagggtcagttttggaagatgcttggaaggaaaaaggaaagatggatatggaagaaattattcagagaattgaaaacgttgtcctagatgcaaactgcagtagagatgtaaaacagatgctcttgaagcttgtagaactccggtcaagtaactggggcagagtccatgcaacttcaacatatagagaagcaacaccagaaaatgatcctaactactttatgaatgaaccaacattttatacatctgatggtgttcctttcactgcagctgatccagattaccaagagaaataccaagaattacttgaaagagaggacttttttccagattatgaagaaaatggaacagatttatccggggctggtgatccatacttggatgatattgatgatgagatggacccagagatagaagaagcttatgaaaagttttgtttggaatcagagcgtaagcgaaaacagtaaagttaaatttcagcatatcagttttataaagcagtttaggtatggtgatttagcagaacacaagagagcaagaaaatgtgtcacatctataccaaattaaggatgttgagttatgttactaatgtatgcaactttaattttgtttaacactatctgccaaaataaactttattccctataacttaaaatgtgtatatatatataatagtttattatgtacagttaattctactgttttggctgcaataaaatcgattttgaaataaatgaaatgttgaaaattttgctagttggttagatgcttatcctttaaattctacttttcttgaggggaaaaagtcttcgtctggaaatacatattactgcaaaaatgtagcatccttttttaggtaggagtattatagctttcattttagtttgacatttagtgtcccaatgaattgaatttcaaatatgaatcataatcttgaaaatctttagcactaaagtcttggaatatatcaacaactgatttacatatgcagatgctatttgataccaagggctttttaaatgtcatgggggggaaaaacccaacttggtgaactcccagctaaacaaccaagacttcactgaagatttattccaattctagaattgttcttttttatttttattttttcaactgactaacttcattaccttaaagcctagaacattattctgctttatttatatggctttctcacttttattttgtagcatgggttgcatcgacttttttactagagaattttactagatatttgtcattcaagttttcatctgctttataattgatacaccttgagggtcacttttctaatacttttactataatgtggtaccacctcagccctaataaataatatttttacctaatgtcaaatctttttccagctaactaaaaactgtgtacaaaaggattgcttgtaaatatgcatgtaaatagttctgttaataacccactgttttacatttggtacatctgtgtctgctaatacagttagctttctcacttttctgcttgtttgttcagtctgaattaaaattagactttgaaaataaagcttaaatagttgtttcctctaaaaaa

SEQ ID NO: 48691 - DNA, 499 bp, Homo sapiens; identical to SEQ ID NO: 8198

SEQ ID NO: 48692 - DNA, 474 bp, Homo sapiens
  misc_feature (1)...(474): n = a,t,c or g
cctaaacggcaacccctttatgactagacacatttctcctttttccttttaaaatctaagcgacaggaggtgttgcattaactccaaggaaaagtacagaataaacaatgtagaaatgtcactcctcatttacaccttttagacagacagacacacacacacacacaccccccccaaaataattgattgcttccagtgagtgggtggagatgaatctcagcagcatctgtgagtactacaggttggagcttcctgtctgtaaaatgggactgcaggggagggggtgttgtgaataagttggactggatgacttctaacattctgtgatgcctaattttgcaaaatcacttttcattcacccaataaatttttttcttcttttttccacggagttttggctctggtctccccagggcaggagttccagtggcgggggatnttgggctccgctggcaacctcctggccttcccagg

SEQ ID NO: 48693 - DNA, 1734 bp, Homo sapiens
ttttttttatttttttacaagactttgtttattaataaagtaattcattatgacttttgaaaaaaaaagttttaaaatattctgtgtacatgtcaatgtaggttaggccagccaaaagacaaagcaaagtcatcaacattaagtcacaggctaggattatacaaataagaacaaacacaaggcttatgggtacttgttagggtaaacacaaccaaactaaactgtacttcaaatttgtttatataaaagcatattaaagctcactttaaaatagtgtccatcttttcttttaaacgggcatagactcatttgcagtcatgtacaaatatacctaatagctttcttcatcttttaatacaagtacaattccttgcttctttatgcaacctaacaaaataatatagaatgaagtcattagaaaaatatgaacctttctgaatctatattacatttttaatttaaattggaaaatacagtttagatcatatgaaacatatggatttcagacatgtattatctgtttctaacagattattacaggcggtctttattttggctgaaatgcaaaaatatgactttcttaataacagattagttaaaaatactttccattgatagcagtgctagtccctagaacaaaaggtaagcaaaacttatttgtaagttactgcctattcaatgcccagaatatggtagatccctaaatcctaagccccttaatatacatcctactttaaagataactgaaagatcctcacatgccctgataatcccttaatttaaaccgtccctgtaaacatagtcaaaatctgcctaatagaaatacaattcaagtaaacattgcatatttgatttaaaccaccttacagttaaattcactcatgacacattggatcataaccactaatatgtaaaaagttttaaaaaaatcatccttacgtatagatgaaaataaactttgtaaacttgttcatttaaaataacgaatgtactgcagctgctctttggtttggcatagtttcaggtactgaatattcaagtaaatttgttcccaggtaaaccaagtctcctaatttgtctgtaatggcaatggcaagacctgaacttcaactttatttttcttaaggtgtcatcacaaagtgtttgaaggaccaaagatagtacttctaaaatttgacagggcttcattttgattttttctccccaaatagttgatagcaataatcaataccagttgagataccaaagaggcagcctttccctgattcccacaccacttgtaggcctttgcctagaatggtcattaatacgtatgaatcagttgagctaaatattatttagaacgtggcaaaatgctggctgtaaattaaatcaaagataagtaattcaaaggctttaactgaaaatttctgaaaagatgtttgctgtgctattaaagatgttaaataacaaaaattaaaagaactgagaaagactataccatgaaagtgcataatagtgaagaaaaaaatgaagttcccttggcgttagccaggtgcatgcaaatctttttatctgaatgtagaaatgcaaaaagtaccaggagaacatttctgaaagtagtcaagtatgttttaacatttatctccttataatatgcaaactgccaaactggagttatgtttttagttggtaattgatatatatatatatttttgagatggagtttcactcgtcgcccaggctggagtgcag

SEQ ID NO: 48694 - DNA, 946 bp, Homo sapiens
ctcactatagggaatttggccctcgaggccaagaattcggcacgagggcgtgtgtcactgtgctgggcctattttatttatagaactcatttaagctgtttttattttaatatgccctataaacatttttatattttttgaaattggttcttagtgttcacaacttccataagatactgctaatgcaccagtattaaaacacatcgacgtaagtagctcatttagctttttctgctgttcttggcccaagttctttccaaaaccaactcttaggcctgctctttactagggatcttatgtcgtattgctttacagccacaacacttggattcctgttgattaacttctccattctcttaagcacctttagaagatttagaagtttcctagttttaagtgtttcaccagcaagtattccatacctacttgatgttgctggtctggtgtcttatttcctaaagtgaagcatctttttttaaaaaagaatttgattgacaatatatccagtccaatataagtatgaaggattctctctcctgagattgtagcaggcagccaaacattttcaaatgatgcccaaggttttagctgtcttgtgtgcatccacagtctgcgaagaagacatgataaggacatcagggagccaacaagactcctaatagcctcactacattcatccagtgcctattctgcatgcctaagcttagagttcttttatatacctctacggccagcaaaatgctcaggtctgctcttggtagggtaaacataaagaagatacacaggccgggcatggtggctcacacctgtaatcccagcactttgggaggctgaggcggatggatcacgaggtcaggcagtcgagaccatcctggccaacatggtgaaaccccgtctctactaaaaatacaaaagttagcccgggtgtggtgggaacgcccctgtt

SEQ ID NO: 48695 - DNA, 1002 bp, Homo sapiens
gccattaggcaccaacttaaagagggttgtaaaaatattaaaagtatatcgttaattctgtatctgttgcttgtcttttgtaagtgattatgtgttatgaccataggtggttacagctgccaaattatttttaaatggtcaaaaagaagagtgctatttaaacatctgtcttaaacaaaaactgtcataacttttcttttttctttttccattaggagaacattctagttggtaaatttcaaaatgtgcttgacacctgccttaaatagcacagacctattgtgcacatctttaaattatttcagctggcagaaaagaattacatttaaaactgaaatcaaggcctcaatacaaagattatcctggctcttttctatctctgtgggcctaattgaaatatgtactcttattttagacacgcctctgttaaaacagaccaggttttcctggtctcagacctatgatgacttgtccctttgatgtcactactgtgaattgaatataattagtaaaaatagacgatgaattaataacactttatagtaagaaaacaatatattttggccatctaaaaatgagaattataattatatgaattataatttaaactgtttaattttgtttaatgtgtatattgaatcttccaaattgaagccattattctcaattaagtactacaactatgacaatgcttgacctacatttctaaaataaaaattcacattttttgataaataaactacagttttaccagaaattactatctaaatgtgtattagcagtattttttaaggtgaaattgccttggtatctaatgaatgtgtagacagggagataaaatgaaggattgccagactagttagaatagaatttaggattaggttagttttgaaaaatgatgttgtaatatatgggttctaacacatcctaccataaaaactgggaggagatatgtgtaacctggttaatttgggatggtggacattttgggctaatactgac

SEQ ID NO: 48696 - DNA, 7457 bp, Homo sapiens
  misc_feature (1)...(7457): n = a,t,c or g
acaaaaataagaaatctcatgaacagctgtcagctctgaaagggagcttctgtcggaaccagttcccagggcagagcgaagttgaacatctcacaaaagtgacgggcctcagtaccagagaggtgcggaaatggttcagtgatcgtagataccactgccggaacttgaagggctccagagcgatgatacctggagatcacagttccatcatcattgactctgtgccagaggtgtccttctccccatcgtccaaggtccctgaggtaacctgcattccgacaacagccacactagcaacccacccttctgccaaacgacaatcttggcaccagactcctgacttcacaccaaccaaatacaaggagagagcccctgagcagctcagagccctggagagcagttttgcacaaaaccctcttcctcttgatgaggaactggaccgcctgagaagtgaaaccaaaatgacccgacgagaaattgatagctggttttcagagagacggaaaaaagtgaatgctgaggagaccaagaaggctgaggagaatgcctctcaggaggaagaggaggctgctgaggatgagggtggagaagaggatttggccagtgagctaagggtctctggtgaaaatggctctctggaaatgcccagcagccatatcttggcagagcgcaaagtcagccccattaaaatcaacctgaagaacctgagggtcactgaagccaatggcaggaacgagattccagggctgggtgcctgtgaccctgaggatgatgagtcaaacaaactggcagagcagctcccaggcaaagtgagctgcaaaaagactgcccagcagcggcacttgctgcggcagctctttgtccagacacagtggccaagcaaccaggactatgactccatcatggcccagacgggtctgccacggccagaggtggtgcgctggtttggagatagcaggtacgcactgaagaacggccaactcaaatggtacgaagactataagcgaggcaacttcccaccagggctactggtcattgcccctggaaccgggagctcctgcaggactattacatgacacacaagatgctgtatgaagaggacctgcagaacctctgtgacaagacccagatgagctcccagcaggtcaagcagtggtttgctgagaaaatgggggaggagaccagagccgtggcagacacaggcagtgaggaccagggccctggtactggtgagctcacagcagttcacaaagggatgggtgacacctattcagaggtgtctgagaacagtgagtcgtgggagccccgtgtccctgaggccagctcagagccctttgacacatcgagtccccaggctggacgtcagctcgaaacagactgaatttgatctgattaatgtgaaggactggccagtctgggaaaccgcctgccacgtggaagagccaaacccgactctctgctgccacatgccgttcccatgcccggctgctgggcacctgggagagcttccagaatcctcgcagacagcccagagcctgccgctaccctcggcctgcccaccaccaagcaagcagcaagcaagatggggttctcatcagttcttcctcccacaatgtaggacctttcctttaccttccaatggataaaatagttcagagttcatagtcatattcatagacacagaatcaagcttttaacatatacatccacctctatatgttaaataaaacatcagattatcaacactgtcattacgtagaaactttggttagccaagcagtgcattgtcagttacgtcatctctaaaaatgacctgtgtctgttctctggggattgctgggtcacaggtgcccctcaccttccacagtcaggcagggaagttataggcacaaagctacgtctggaacccctttgtgccccctttgtgttcctcaaggaagcagtacctttgaagagatctctgctgcattaagtgatgaccggctacgtttcatgtcaggcttgctttgccttgtgggctactcagtgcagaacctgctgtaaccctcagttcaaaaaatggactggcaatgtgattagcgttggatgctttaccattctctttagttgttaccgtaattctgctttttcatgggagtttgaatcatggaccataacttttcagttatcagatcaactaaagaaacatttgttgttaagcctaatgtgctgacctatgtgcctgcattttttttttaatctagacatgtttggagtgagagaaagatggaaaaaagacatggggtagggacgtaagtggaaatctatagccacagcctgaagctttgaccactgcggttttcagagccctttctccacactcatttcagagcctcctatggtttgggaaggaataacacactggcccattagtaagggtgaaggctggagggatttgttgacttcttggaattatcagaggtagggtggtctttagcacaaagacttgcatgcagagatccctggcagaacacccagagtgcccgtggctcccaccccagggtctggccggtgtgctggatgcatgcccaagggtgctgggcatcactggtccttgtgaggatgcttttaaagttttatatttatgtccccaaacttggaaacaagaactctactttagcctaaccctcatgtccttttttgaattgagaaaattacaggaaatggtgcctttgaaaattagaaaacttgcttacagagctgttctaaatggtaaatcctcaatttccccaagaccggttgctctgagagtagctggtaaagaggggcgaactaaagacctgtccacctgtagctccgctcatttcttagaaaccacctgcttcccagagtgccaagccacaagtaccaggcttcgtgggcacagacacctcctgggctgggcagagtgacagtgctagaagaccccagagagagggcaagggctttgggcaagaagcactggtggtgttttagggaccgtccttctcccctacccagggaactggacctggcagggcaccgtgctcatgtggctccaaggacaagcatggcggtggccccttctgccttccaggagaggtcttgcttttgaaaccaaaatcatgttcttctaaagtgtcatcttctgccctccctgtcccaatagggaccacatcttatttgtctcaaacagggacttgtgagtacttggcaagttttgcagcctatttttgtattcttaatttggggagtaaagatgtttggtctcaaaaacctttgaggaattgccaagaatggcgagtgattgctttccttcagagaacagacacttggaatttctccttttagtgtttatatacgtgcagattaatttatatatatatatatacacacacacatatacagtataaatactcatttgattctcgtaaaacgcgcatctggcgtgtgcagttgagaaacttggtggcacatgggtgttgggggagtagcctgtgttggagggacaccagtgcactaggcagctggggcggcccaggctgaagccatctccgggtgtctgagaaaccacccagtgcctcacctccagatcctgctggcatcacctccagagccctgcatgcactggctgaagagttggtctgtggagaggattttcttggttacttgtattcacggttaatttacaacccaaacagcaaaacacagttggtggacaagttcatgcaggacctacagtgacccagccatgggcactagctcatctttcaggtggaaaagtacagtgctgcctgccctggtatgtttttcttatagatgttagccctgcccaacagccagggctacactacaaaaggcaagaatgcccatgtaaggagcccagcagtctggacagatccttcttcctctgctgttggatgagagtgagtgagtatggtctggaccttatccttgaaagatgatcaaaagcgatgatgagggaggcagtcatcacgcaggtgcttaaagggacattgtaggaggtactcaagggtttgggggcaaaaccctgaatccagccagtcgtgcacagagacacacccacactagcccagtggcagtgggggatgtgggatggcagcagccaggtatgtagccctgtcacaggacagctcactgtggttttgcacactgcctaagggttaaattgtgttgttgccttcagtagaaggcatttgtgggctgcagagttgagagttgggtgaggttagtctctcctgaagaaaaagcctataaaaagtggctaatcttatcccttttctctgtatgcagttggactcgtcagagatagtaaaatcatcttttagtgtttttttgttgctgatgtcttgtacccatttgttttttacatggggttgtagatcgagttctcaaaggtgaaaccagatgatcattctgataaaggaaatttaaatttgatacatatgctttgtatattttgattacttgttttcgtttttgactataaaggagctttttttcttgctcagagtttacctgggagatttcaccagtttgactcaccatttgcagatgtgcttttgtattaaatttaaattttcacatatcacatccattctcaaggtagttatatgctggagaagaaaaatcctctagacacatgaaggcccacatagtcaagtcttccagggcaaagccagcagcccacccaggtcaggtagccagcagggctcagttcccctcactccagacacggaccctcctcttcagggtctcttgacccagcttccttctctccttttacctgagagcacagacctctctcagccagcctgcccagaccacggggggctactcccatgtagtttggggagcacttgatctcagaaaagctccattgtctgagcaaatgggcagttgtggagctcaagcctttctcctgtgctcaagtcccttccccaagcaaggcttcaacctcatctacccaccatgtagttttctctggccatttaagtggggcggcagggacatggttgggccatgccacaccagggctggtgaggcaaccagttttgattttgacagagtggctggaggaaaagtggcaatcaaggtgctgcttggtttgctctgagtgcaaatggaaccaacaggtttctgctgcaatctgtgtgttcccagtgccaggtcacaccaggaggggtggggcagggctaaccaagtggtctctgaactcaccgagcgtctgcacttggttgtgaagttaatgggagtacagagagcgtctggccttggagaggggttgagagcctcctttttggttcttcattcctgagctcttgcctgcccacaaatctgacctctttgaatggggacgcagtccttcaacagagaagtttctatggcaaagaagtttctatttagctctagatccagcagagtcatccattctaactgccctgaagtctagagcaggggagggaacccagaggctggggatgagactaggcagaccctggttaccatatggacaaggacaggggaaagcacccccttcctcaatttctgaaagttctatctttgggttcgcaggactttgaggatgataaagaacatataggtactagcttgttgttgctggtccaaagcttccacagccctgagaatttggctttcgtggctgctctggcagctgagcgaagggaggaaggcagccgctctggtggggactctaggcaccttccctgctgtccacttggataggcggtgagccccagggtactgagaggagcctgagcatttacctgccattagtgcctcttccttcaggagactggcttgaaacgtgtgttcatgtgcgcgtgcacacacacacatgagcaactgtatgtgttaatgaatagtttttcttggttaatgctttttaacttctgttcctttccgtaagtggatgattcaaaattaacgtgacnnnnnnnnnnnnnnnnnnnnnnnnnnnnnnnnnnnnnnnnnnnnnnnnnnnnnnnnnnnnnnnnnnnnnnnnnnnnnnnnnnnnnnnnnnnnnnnnnnnnnnnnnnnnnnnnnnnnnnnnnnnnnnnnnnnnnnnnnnnnnnnnnnnnnnnnnnnnnnnnnnnnnnnnnnnnnnnnnnnnnnnnnnnnnnnnnnnnnnnnnnnnnnnnnnnnnnnnnnnnnnnnnnnnnnnnnnnnnnnnnnnnnnnnnnnnnnnnnnnnnnnnnnnnnnnnnnnnnnnnnnnnnnnnnnnnnnnnnnnnnttaatgtgactggagttaaaagtgaaatgtcaggttgtttagtcactgaatagagagctacaagtgcttggtctttcccaagaatcaaacctgagtagaaatacatttaaaagaaaaatctacatggtacctatgaatcctgtaatttgtttagggagatcttgtcactcatccctggttcctgcccatactgtttggtctcgttcttgcagtttgcttggaacagggccagagccccacatgagattgtcagcaggagtgaggagcgccagtccctactcctcagcagggacccagcacagcaatccggttgttctcggttagactgggtcggggccaggggagaagcagtcacccctgtgtagagggttcccgctgtgcttctgagcagttgctttgttcagaagtgttaggagggtcagattgtgccataattgttattaaagagaaaacacgcccaccttcctttctcccctgctggccattgttcattgagttttactgagggcagcctttgtggaagtcagggaggttgccaaaggcctgtagatgcctcctgacaaggtcttgattcctggttttctagcacccatttgcattttggtcttcagcacaaagccttgttccctgtggccggacttctgggcaataagactggggagtgactgttgagcagtctgctgtcaggagagatggctgaaaaggtgatcatcttggtgctaaacaagtaagaggcaactgccctgtttttgtttgttttgaggcacaatgaaactttagccaaactctgcaagagggtcccatctcctgccatggccaggtgtgagagaccaaaccgagaaaacagcatactctatcacttaagccttgggtaagaatgggaattctttaccctgggtaaacgttttaacaaaaaaatggaacttaacttcggtttggactgtggtcgtgctgaggcaggagtggggttgccctcttggggctgaatctccaggcctcacgaggtcccctgtggggatgctgctatttctaagatgcaaattgcacatttcctagattttgtatctgtggatttggataagggaggggaacacggacaaattgcttgtacaatttgaaatgggcctcaatggtacttcaaaccttttgattattcctaaataaaaacataaatatatttcaaaa

SEQ ID NO: 48697 - DNA, 658 bp, Homo sapiens
gtcttagatccctagtctacccaaataattttaacagtactgttttttctaatcctgaagtctgatatttatgactcattagcaggaatcaaaactagtgatcagtagaacactttcaaaataaaaatttggaatgcagacttttatgaaaatttaaaagtgctccttaacagaatatcatgggttttcctataaaacttctttaagtattgtaattccagtctgccccaacttaaaaaaaaattcttattaatatgtcagtcattaattgctagtttgggctctcattatttcctgttttttaacaattttgtgataattttattattggcaaattaatacatcaacacttaaatcattgactataataataccttctggctacctctgtatcaaccaaattctgtaggtgcaaacatataccagggaattcttactggcaaaatgatcaatctggagtgtgcatccactgtgaatggagcaaattgccctatacccattggataacctagctttcttagtttgtagatgtagggaaacaaaatagtgacagagagagaagggggtccacagggcatggtatatttatcagcagtggaaaaaaagtgcatagatcatttagtccaagaacttaaaactaaatagagccataatttac

SEQ ID NO: 48698 - DNA, 975 bp, Homo sapiens
acaattctttctcaaaatttattgtgcagaattttaagactatacccagggttgctcatttattaaagcaaagacttagtaaggtaagtgtgtgggaagaataaatggattaatcatagtctgtttcctatgaaaatgcctcgttgagtaattgcagatagactagtgcctcttttttgttttgttttgtttttaaacattttacagccattatccaacagacagtaaagcagtggaccagttgctgtgtgggtataaagcaaacagtctctgggctcctccaagctgtggatatctctggccattatcaatagctgattctcacttgtcctaatgaagtactcagtgcaggttagcctccttctcccccgccagcttctcttccacttccccacaccgtacatgcctctccctttctctctataactcagctcatctcatagcctttttctttggaaatgcaactctgctgatcacttgtgggctgggatcccagctgccttttgaacagagcagacatcctttacagagacaggtggcctggaggggagaacaggtaggggcacactgagatcccacagcaacctgagagattctgccccgtgacctgctggccccctccagggcacttcctattttcatctttcattaattaggcagctaagaagctgctttccagcttgtagagccaagcaggcagcatcctgtcagaaacaaccagataaatagagattaaaaaggaatctgagaaaaccctgctctctcccatgcagggtgaaatcctcgtagagctcatttcctttcccctcattaatacttaatgtaatttcctaaatagaagtttaagaaataacacaaatgaaatgttcccctgaaagtaacccctaacaaaacaacccaaatcctcctcctcggtccttctcaaagtgggtcctgcagtggggaaagaagccttcaccatggcccacgcgtccg

SEQ ID NO: 48699 - DNA, 753 bp, Homo sapiens
  misc_feature (1)...(753): n = a,t,c or g
gtgttcttcagctagaggcagctttttaaataatgcaagtgtatttattagcattaaaattaacatctcagtaatcagcattagcatttctgaggaccattattaattctgagaacagaaattggtgccttgcaaggaagtttactagctctatcaacaagcattcaaggttacatctgctagcagagtagtgttaggaacctggccttactctcctctgacaatcgcaattttttcttattttttataaattcaagaagatacacttggcatcgtgtatcgaggctaagtttttcatgcatttcccagactacttatggagaattgcagtttaagttgctgaaaagtattaacatggtattaagcttaaataatacgtaatgggactagatggcccactaagccactgttattttccttcctctctggcagggcacttgatccattccaaagtcaaaaactggactgaagctaaatttgtacttttcataatatacattctgcttctggcttatcttcttggtacatcaatatattaattgtaaagtttattgtatagtatttaaccgctgaagttcctattttatgttgtgcttatgtgaaccccttgggtgaaggtcccttttccttgggatgtgtagttatatgatctttttaaatgtacagatattttgctataaaatcggtgcagttttttatggggttttacactnctctttaattcccacctaagcctcngggtaatattgtaaa

SEQ ID NO: 48700 - DNA, 1988 bp, Homo sapiens
gctgtcatttaatagtagtggacttttattttcaccattgactgcaggacttctggatctttcttgacagggtgaattaaatctatgtaaaattgctgaattttcttcttccagagcttgtttcaaccatcgcttcttgcatgaaccagaaatgttttcagtaggttcttttcttctccttttttctgaaaggaatggtgaagtaaatctaatataatgcttaggagtggagtatacatgggggctgtaagtgagacctggtaaagaattgagttgtgtagctaacacttcaggatctgtagttatgcgtagaggcctttctgaaaggccatctgaaggttttcctgtcttctcattcttctcacttaaccattcattaaccaagtgcttctttgttttggggtacttggtaggacatttattaagtgctggaacttcagtttcagtaattatttctgctagtgcagtttcagtttctggttctattgtaagtacagtattttcaatatcattttgttgtgaagtaacttctatatcaggagaagatggctggatatctgaacacatgctgacagttctgtgtctccgacgctgctgtccaatgtgagtcctactccgagaaaaactttttctctgtttagttctatttactttggcaggggttggcttgctagcattttcttcttttgcttgttcctgaataacttcagcatcactgacaatctgtgtatctttacattcagttttaacttcagttttggctgtgctgatcctttccaaagcttgttctcttcttttctctctcttttcaagtctggcaaaagcttgcaaaattgcttccatttttctttcttctcttgtcatcttccttttcctttctgcaatctgctcctctgattccatttctacttcattactaataggagttttttcttctatatcatcaataaaatctggttcctgattatttgatactgatagtctcagtggagaaagctttctttgtttagtttctgggctcttcattttgttggtcgttccttcacaatccaaagtaatattctgattttgtgtatctttttcttttgaaatatctttgtctttttttccttttttccgtctggtctcataaccactattgatattttccatggattcagaactacgttttagaacagggcactctgggttttctttgaggcatgcacagtccaccttgtacttacaatttccatagtcaaaatcaaaggcaatagtaatttcagttccctttggaatactgtgtatagaataaatataaagatgtatggttccatcttgaatttcatgcctcacctctgcattgggtgtacaagaccgcctgatgaatcgagcctcattcccaaaagtccttgcatcaacacacatttctagcccatggaaatttagagtaggaataacacaaaagggtatgggtcttttaaaagaaatacccatttgcttcaaactgttctctcagcataaacttccctctgtattcaatgataagtgcatcaggaggcaaatcttttgcagatttaagaattttcttattcttttgtatatggctctctacaggagggtttgaggggcaaattgttggggatttcaaatcggatttaattcatctcttttttgtcatttcccattgcctaatctcagagctattctttgtgcctccctctgaacaccctcactgtactggttgttatttgcttcttcatatcgatccatccatgctttgatctttgtctcccatccaaaatttgaaccatcagatgaaggatcaatctctggagctgaacccttaactcttgatgacttcctagatccttcacgaaatgcctttttacattttgaaatgtgttgttctttctccccgctttttttccttcttttatcattaactttggaaactcttgaagcaagttaaaagtaacttgatgttggagtactgcttgaaactgcaa

SEQ ID NO: 48701 - DNA, 2732 bp, Homo sapiens
  misc_feature (1)...(2732): n = a,t,c or g
tatgacatgattacgaatttaatacgactcactatagggaatttggccctcgaggccaagaattcggcacgagggacagtgttggaaggatcagcaacacaaatctcaaagttgctgatcatggcgactggacatgtagctcagagtctggtgcttaagattttagggagagtggagccgataaggcggccgcaggggcggagccaggggcctttgcctggcttggcggccgggctctacgttccctgttctcgcctgcagctccgccatggctcctaaaggcagctccaaacagcagtctgaggaggacctgctcctgcaggatttcagccgcaatctctcggccaagtcggtccgcgctcttcttcggaaacgcgttcatcgtgtctgccatccccatctggttatactggcgaatatggcatatggatcttattcagtctgctgttttgtataagtgtgatgaccctaagtaaagcacatatttggtagcctttgccatacaagaatgtgaaatttgttctcaagcacaaaagtagcacagaagagggaggatgctgtttccaaagaagtgactcgaaaactttctgaagctgataatagaaagatgtctcggaaggagaaagatgaaagaatcttgtggaagaagaatgaagttgctgattatgaagctacaacattttccatcttctataacaacactctgttcctggtcgtggtcattgttgcttccttcttccatattgaagaacttcaaccccacagtgaactacatattgtccataagtgcttcatcaggactcatcgccctcctgtctactggctccaaatagaccatgtcagcttcaccccctggctttgtgtctatgggtggcctgtggtatatggaaaagtagcagggtggtcagggtgggagacacaagatgtttttatagtctagagcctttaaaaaacccagcagaatgtaattcagtatttgtttattggctgttttttgacagattgttgaaattaaatgaattgaaagggaaactcagagtactaggacgtttattaaaaggaaaaaaatgtcttgcaatgtgctgtaatcacaagaggagaaaataacttgtttccttgatctgtcagaggtcacagtaacctgggccgagctgttattatttattatataatagtagtaggaagttaataactggttctctgtgttccaagcacaatattacaacttcttttgaaccgtaaatatcagaatgaatcctcttcccaggggattgaacagaagcttaatgtttacaagtgtttgaatttgtgatctgaaataacacaaaattaaaaacatgatttctctaattttccaactagaggaagagaaacttgtggaaaagttctttttttttcttttttttttcttaaagaagggcagccaaggtagtaacctaaaaatagtgcccaggcatatgagagttgtcctacgaggttaaagaacacactgttccactgtatggctttggccctgaggggccagggaggtcaacttgaccctgccatgttggtttgacttactaagacacaggaatcattgttttccttgaccagggtctcacaccctggaggaatgttaagtaagagaaagaacctctttcctgaatattgacatgtaaaagaccaaagtaatttttctgaacttctgcaattctgagaactctccaaggaatttacagtgattttagtgcttgtcagcatttttccatgaggactttcatacatttgactctttagttcacaggttcccattgattgtgagcaagatatttatctctttagcccttggggatccagctgagagcaatctcttgcatttttttacccgtgtatgtacagatatcatttcttgtgtatgccatgacttgaaaaagtttgggaagctctttagcaatatcagctaaaaggatatgaaatcacaggtgatagcagttgtcattcagtaatttcctacaagcagcaccccaaaggaaatatagtcctaatctttactatccacttctaaatttaatgtgaatttcatacatgttattagttgttttctttataattttataaaaattattcatcgggagtttaacttccacttccatgctatcggatgtgttgggctccatgcaagaacttggaagaaaaacaggcaggaatgcatttgcataatgacccagatcatcattttctgcaactgagaattatatttcatcattgcttctagaagtctgcaattctttacttttctttggtgcattattatctaggtgccatcactggataatgtgggagtgactagagaagtcatatatcactgtaaggtacagttagggtaacactttagaggtttattatttttaaaaaacttttcttgaacnnnnnnnnnnnnnnnnnnnnnnnnnnnnnnnnnnnnnnnnnnnnnnnnnnnnnnnnnnngatggtgggtgcctgtaatctcagctacttngggaggctgaagcagggagaactgcctgaacccgggangcagaggtttncagtgagttcgagatcgtgctactactgccggggtggcaagggtgagactccatctcaaaaaagaaacaaaaaaacccaaaaagttttctttactgttggttaaaaaaaaaaagccagaccatagtttgactggtggcatggaatttgtgtatcaaataaatgcatttgcttatttgacaaac

SEQ ID NO: 48702 - DNA, 4380 bp, Homo sapiens
ctcgaggcgcggagctgggagtggcttcgccatggctgtgagaagggactccgtgtggaagtactgctggggtgttttgatggttttatgcagaactgcgatttccaaatcgatagttttagagcctatctattggaattcctcgaactccaaatttctacctggacaaggactggtactatacccacagataggagacaaattggatattatttgccccaaagtggactctaaaactgttggccagtatgaatattataaagtttatatggttgataaagaccaagcagacagatgcactattaagaaggaaaatacccctctcctcaactgtgccaaaccagaccaagatatcaaattcaccatcaagtttcaaggaattcagccctaacctctggggtctaggaatttcaggaaggaacaaagattattacattatatctacatcaaatggggtctttgggaggggccggggataaccaggagggaggggtgtgccagacaagagccatgaagatcctcatgaaagttggacaagatgcaagttctgctggatcaaccagggaataaagatccaacaagacgtccagaactaggaagctggtacaaatgggaagaagttcgacaacaagtccctttgttaaaaccaaatccagggttctaggcacagacgggcaacagcgccgggacatttcggggggaacaacatccttcggtttccgaagtggccttatttgcagggattgcttcaggatgcatcatcttcatcgtcatcatcatcacgctggtggtcctcttgctgaagtaccggaggagacacaggaagcactcgccgcagcacacgaccacgctgtcgctcagcacactggccacacccaagcgcagcggcaacaacaacggctcagagcccagtgacattatcatcccgctaaggactgcggacagcgtcttctgccctcactacgagaaggtcagcggggactacgggcacccggtgtacatcgtccaggagatgcccccgcagagcccggcgaacatttactacaaggtctgagagggaccctggtggtacctgtgctttcccagaggacacctaatgtcccgatgcctcccttgagggtttgagagcccgcgtgctggagaattgactgaagcacagcaccgggggagagggacactcctcctcggaagagccccgtcgcgctggacagcttacctagtcttgtagcattcggccttggtgaacacacacgctccctggaagctggaagactgtgcagaagacgcccattcggactgctgtgccgcgtcccacgtctcctcctcgaagccatgtgctgcggtcactcaggcctctgcagaagcccaagggaagacagtggtttgtggacgagagggctgtgagcatcctggcaggtgccccaggatgccacgcctggaagggccggcttctgcctggggtgcatttcccccgcagtgcataccggacttgtcacacggacctcgggctagttaaggtgtgcaaagatctctagagtttagtccttactgtctcactcgttctgttacccagggctctgcagcacctcacctgagacctccactccacatctgcatcactcatggaacactcatgtctggagtcccctcctccagccgctggcaacaacagcttcagtccatgggtaatccgttcatagaaattgtgtttgctaacaaggtgccctttagccagatgctaggctgtctgcgaagaaggctaggagttcatagaagggagtggggctggggaaagggctggctgcaattgcagctcactgctgctgcctctgaaacagaaagttggaaaggaaaaaagaaaaaagcaattaggtagcacagcactttggttttgctgagatcgaagaggccagtaggagacacgacagcacacacagtggattccagtgcatggggaggcactcgctgttatcaaatagcgatgtgcaggaagaaaagcccctcttcattccggggaacaaagacgggtattgttgggaaaggaacaggcttggagggaagggagaaagtaggccgctgatgatatattcgggcaggactgttgtggtactggcaataagatacacagctccgagctgtaggagagtcggtctgctttggatgattttttaagcagactcagctgctatacttatcacattttattaaacacagggaaagcatttaggagaatagcagagagccaaatctgacctaaaagttgaaaagccaaaggtcaaacaggctgtaattccatcatcatcgttgttattaaagaatccttatctataaaaggtaggtcagatccccctccccccaggttcctccttcccctcccgattgagccttacgacactttggtttatgcggtgctgtccgggtgccagggctgcagggtcggtactgatggagcctgcagcgcccggtgctctgtgtcaaggtgaagcacatacggcagacctcttagagtccttaagacggaagtaaattatgatgtccagggggagaaggaagataggacgtatttataataggtatatagaacacaagggatataaaatgaaagatttttactaatatatattttaaggtttgcacacagttacacaccagaagatgtgaaattcatttgtggcaattaagtggtcccaatgctcagcgcttaaaaaaacaaattggacagctacttctgggaaaaacaacatcattccaaaaagaacaataatgagagcaaatgcaaaaataaccaagtcctccgaaggcatctcacggaaccgtagactaggaagtacgagccccacagagcaggaagccgatgtgactgcatcatatatttaacaatgacaagatgttccggcgtttatttctgcgttgggttttcccttgccttatgggctgaagtgttctctagaatccagcaggtcacactgggggcttcaggtgacgatttagctgtggctccctcctcctgtcctcccccgcaccccctcccttctgggaaacaagaagagtaaacaggaaaccttactttttatgtgcttattgcaaaattaggacatctttaaacatagttcctgttaattatggtaacactttggctttctgaattgggaaggggaaaaaaatgttaggcgacagattttttaaggtttttcagacctccagtgagtacctgcaaaaatgagttgtcacagaaattatgatcctctatttcctgaacctggaaatgatgttggtccaaagtgcgtgtgtgtatgtgtgagtgggtgcgtggtatacatgtgtacatatatgtataatatatatctacaatatatattatatatatctatatcatatttctgtggagggttgccatggtaaccagccacagtacatatgtaattctttccatcaccccaacctctcctttctgtgcattcatgcaagagtttcttgtaagccatcagaagttacttttaggatgggggagaggggcgagaaggggaaaaatgggaaatagtctgattttaatgaaatcaaatgtatgtatcatcagttggctacgttttggttctatgctaaactgtgaaaaatcagatgaattgataaaagagttccctgcaaccaattgaaaagtgttctgtgcgtctgttttgtgtctggtgcagaatatgacaatctaccaactgtccctttgtttgaagttggtttagctttggaaagttactgtaaatgccttgcttgtatgatcgtccctggtcacccgactttggaatttgcaccatcatgtttcagtgaagatgctgtaaataggttcagattttactgtctatggatttggggtgttacagtagccttattcacctttttaataaaaatacacatgaaaacaagaaagaaatggcttttcttaccccagattgtgtacatagagcaatgttggttttttataaagtctaagcaagatgttttgtataaaatctgaattttgcaatgtatttagctacagcttgtttaacggcagtgtcattcccctttgcactgtaatgaggaaaaaatggtataaaaggttgccaaattgctgcatatttgtgccgtaattatgtaccatgaatatttatttaaaatttcgttgtccaatttgtaagtaacacagtattatgcctgagttataaatatttttttctttctttgttttattttaatagcctgtcatagggtttaaatctgctttagtttcacattgcagttagccccagaaaatgaaatccgtgaagtcacattccacatctgtttcaaactgaatttgttcttaaaaaaataaaatatttttttcctatggaaaaaaaaaaaaaaaaa

SEQ ID NO: 48703 - DNA, 718 bp, Homo sapiens
gaagaagacagccccaagtgggtgtccggggagagcctggcctgccaccagcttatgtgatcttgggcaagtccctgccctccctggaacgaagggccagggggctggactttcccacacaacttgctgggcaaagcacgatctgcagctttgaagactcaacagaccctggaccatacggagagcaggtggcccaggcctcagggcggcagtcccggctttgaggctcacgcgagggcctggtatgcagggaccactgctcagctgggcctcggaccttggggatattggacgcaacctggcaaatgaagctgggcgcccaagtctctgggtactccctggaggacactgtctcactgtctcgggttggctcccagcctggaggtcccagatggggactgttctgacaagctggcatcaccaggggtgaaggccctggctgcagctgtacaccacctgtgcccccaggctcaaggtctctggcaggtgcacaccagcccaactctgcagggcttctctccctgccaccaccccccaagccaggaccccactccttccccgaggctgagctgagccttttccaggggcagggcccaggagaccattcccagaatccatggggcagtagccagggctccggctgctggaggaagcagctatccacaaagcttctgcccaaagctgagctgaggccccgggagaggcggccctaccaaac

SEQ ID NO: 48704 - DNA, 1497 bp, Homo sapiens
atttagtgccccttcaacagccatactcagcaagaagaatcagaagcttgatcctctaacagaaatagaagagggtagctttgcccattgccactgtctttactgccccttctgcccctccacccacatccacattcagcatcactccaaggatgtgtcagcatcttgcccatgcaggtagaaatttgtgagtaggcctccatacttcctcgggggaagaaagagaaactagtgctggttttaagaatgtagctggcttttcatcagaacccttatgctaacctgaccacacttgctctcggggaagttcaagcctgtgatgtgcataaactccaacaagcctggctttggtgttcagcatgcacattccataaatatctcttgcaggcataccccacagctagactgcaggattaaaataacttccaaaaggtgctggattggagtttgttcaaatttctcattaaccactaatgttaattcataccaaatgcaaagtattctaaaccaggctgatgctggtcagtgttcaagttttaagtgacttcaaacacaatggaagtgtttcaatgggagccacatctcatgagtaaaaatccattttataatagctctgtgatatatcagtgggagatgattcataggggagagatttgaacaagcagaattaagtgttagcaaaaatgctgcattgctttgattcatgtttaaagacctaaatttctatgcacaaggaataaagggcctacttaccaagtgtaaatcacaacataggctaccaaaatatttcttatttgctaggagaacaaagctgtcacggtgcatgatagttggacagagatggctaaaaaagaggcaaattcagatttggaaacagggtggcctcttcattatttattgccaagatctgaaaatcttcaacatcttataagacaacaatgaagtagcccctgaacagcatggagttgctgtgagtttgttcgttgcagacctttgtgttgggtcctgggaatctgagctttgttccctgtgcatggtggataattgaaaccaagaggacatgggatagaccttgtgacagaccaattctgtgacccctgtcttctgggtcacattattcattgttgatttaaatacaggactacccaaacagtacaaatctatcatgagtctggtagaaaagtaaaagtaaaagctgcacacgttacatactgtttattgttctaatgtacaactaactatttgcatataatgtgatttaatttattgctgttttgtgtagaaaaggagaactaatgactgtggatataacccatgttttgtataatatattttatttcttgtgcgaactggtcatttaaaatatctacttcatttgatgtttggatataaatgtgtatgtgtccttgtaaatgtttctatcaagcaagaatgccacgtactcagagtataacaatgtgttctcattaaaaaatacatcccacggaaaaaaaaaaa

SEQ ID NO: 48705 - DNA, 2298 bp, Homo sapiens
gcggccgcggcataggggggcactgtggacttgcgcgagatgctggctgtgtcagtgctggccgcagtccgccgggcagacgaggtgaggcgcgtccgcgagagcaacgtcctccacgagaagtccaaggggaagacgcgcgagggagccgaggacaagatgaccagcggcgacgtgctgtccaaccgcaagatgttctacctgctcaagaccgccttccccagcgtccagattaatactgaggaacacgtggatgcagctgatcaggaggttatcttgtgggatcataagattcctgaggatatcctaaaggaagtaactactccctaaagaggtaccagcagaaagtgttactgtctggattgacccacttgatgctacacaggaatatacagaggatcttcgaaagtacgtcactactatggtgtgtgtggctgtaaatggtaaacccatgctaggagttatacataagccattttccgaatatacagcttgggcaatggtagatggtggttcaaatgtgaaagcccgctcttcctacaatgagaagaccccaaggatcgttgtgtctcgttcccattcagggatggtcaaacaggtcgctcttcagacttttggaaaccagactacaattatcccagctggtggtgctggttataaagttttagcacttttggatgtgcctgataagagtcaagaaaaagctgatttatacatccatgtgacatacatcaaaaagtgggatatatgtgctggtaatgccatcttaaaagccctaggggggcatatgactaccctgagtggtgaagaaatcagttacactggttcagacggcattgaagggggactccttgctagcatcagaatgaaccaccaggccctggtcagaaaactcccagatctagaaaagacaggacataaatgagcataactgattacagggtacagttcttcacagctgaaatggttagcctgagatgctggaagcttcaaaggattggtggagactatgcatggttaaggccatcccgaactttttaaagtatttatgaagcatcagagacttattttccctgtaatagaatgcaaaatcagggaaaatgggttgctttgtgtctcaagtattgtctttatttttgagactattttcatacagttgtcatacacaaggcgcatatatatatttgtgaattaaaatctgtagctgagtctacattgttatgagtcaccattttcacacaacatcatgaatcttcactgttagtactttcatatagaattcggttgaaggaaagattgatttttgtgtagatgtttaatataactttacaactatatctcattgaaaataaagtcattggggatttttacctctaatttggatggaaagcacaagaagccacacattcattaatatgcaacaaatgttgtatttatgttactgaatatttctatggattaaaatagaaaaagtttaattgattttttcttttaaattttaataacaggttcaccagctggtagaaaatagagacacatgatgatttgcattgtaataatttctgtgtgtatgtgtgtgtgttgttttgtttttataaagaaaagtgtgtttgtacccatgagttcagcatttctgccatcttgctattttcattttccctgtggaagatgcatggttgcatccttttccttctgaccaacacttaatctttaactttgtaaggttcggtttaaggtttcagggttagcactatagttttggttcattttctcattaacgataaaatatgctgtaaggcactataagaatataaatgattctattacaattgaaagttacttgacattacatgaattgaactgcctttcattatcttcagacactttgttttagtatttttttttaatttgctaggtttgtatatagaagatcctttcattatcaagaatgagtatggttgcttttgccatggttgcttttactattaataaatgtatctagcctacccaaactctgtagtaacttttgagattctcttaatttcccctcagattaaaatagagaaggttgaaggtactttttgatgaaatttttttctagtctggttagaaacaaaaagttgtgacatattcattgtgttaccgtaactagaaccttgctttgtgaactgtctttcattgggatgtatggtttctctcaatgtgaaatctggaaacttcatgtaaactacccatgccgttatttcaagtgactccagtgcccttgtattccataacatgctgatgagagggaaaaaa

SEQ ID NO: 48706 - DNA, 1547 bp, Homo sapiens
caccaaagtcatcgacacaaccgcactgccggtgtatcccaagaagatcagacctcttgagaagcagggacccatggagtccaggaacctctggcgggaggtgacccgatacctgcggctgggggacattgacgcagccaccgagcagaagcggcacctggaggagaagcaacgggtggaggaacggaagcgcgagaacctccgcacaccatggaagcccaaatattttatccaggagggcgatggctgggtatacttcaatcccctctggaaagcacactgatggggtggaggtgcagagctttccagtatagccctgtttttgtaggaatattaaagtagtagagtatcaagggttttgttggcattcactgagaccttgtattagcatccaagaaatgatgagagagagagaaattatatactatgaaaagtgcacccccacactctgctagaggaatgaatttattcaagagccattcggggcacgtgtgtgtacacacccgtatacgttcacacacatgcactatgtaaacatctgagtatgattacacatttaaatactgcactcaccaaggttaaagtgggtaatcataagctcctttttatcaatgaagtttgaagtttttctatttttcactttgccaaaaatgttttacactcacaaagatattctcacttagtcaactcccggtcaaaatgaaggtgaactggcatggcccgatcactgtccataagggagaaagtggctcattcctggtagaagtatgggtgggtatccatttcaaaattattgtgattctcacctccctccccacctcagtgttttgtctgtccgcgcccaagaaagataagcaagtatttcctgctggatgggggttggcaggaagctgttaaagatttatgccagagccttgcaggatggagcacctctgggacaactaagagccaaggcccaccaaggagttttccacccgtctctcatggtcacagcgctagtcattcatttttgagaagttgcttcttttacatcagaaaactagtcaatccatatggagacttcttttgtgatgaaaaagggctttagaagttaaatacatgcatgcacatgaaaaccattcacaaccacagcctcaatcttgtatttagtttggggaaagagaagagaatttcctgtggattattttttcctcaagtgcacctctctggttaacccaaactctgcaagaaagcactgtgactaaaacatacataacgccctgcataaatattccatggtttcagttaaatttcagtttttagcctttacacatgaggtcaaaggagtgacgaaaatacaaagcaaggaaaaaatgaaatatctggtttttgctgaatgcttaatttattttttactgtgccactccaatatttatcaaatccaaatagcatgaatgcttctctgtagtaatactaattttgtgccttttgtctgctttcttaagaccagttgttcacactttgtagatattagacaaatatatttcgattgaatacaaaaaaaaaaa

SEQ ID NO: 48707 - DNA, 1160 bp, Homo sapiens
aaggtgtagggccatgaggcctggacctatgctgcaggcaagggtttccatccccgctgccctaggactctcttcccaaggccaggttgggcacctggggaggtcagttcagaaatatctagcagagacctcttaaacccccatcccagcaccccatcctgttgttcccagagctggtctcccatgagtgtgctagagccagatagccgtggccccccacccatctcactcacacacacaggcatccatacaccccagaagacttcccaaatgaggccagactcagggtcacggggaatgtgcttctgcccctgtaagggctttggggaagggggcaacatagtagaggctggaaagagcccccaaacctgtgcccatgcccctccagccctgcgtttccattctgccttctcagagtgcccttgctgcacccagaccaccggccaggagagaccttctctcccactccagcccctctcactgcccttcaactagagctttcacctttttacatttcccttctgaaggacacaaatctgcttttctgcccatacactggcccaagggctcacctaacttgggagggaaggggctgttggtacaaggatgattttctgttagactgccattttgcacggtctcccccttcccatctgatgtgtcctgcccctcagctctttgccttatctgtgtcactgtcactttagcaaaaatacagcggccatttgtatcagcctctggtggttgcttgtgaggtgggactcttgcgggaacaggtgggatttgggaggagtgggcagggaggggagttggtagttggcagttttttggagctatctgattaaggccattccgttagttcagttgtgccctggagggcaggggacagggtcagtatctctggggctgcaggcttctttgccttggccctcctgggcatggggtaaccaccagctcagctctcctcctccagctttcctctctctagcacaccccagccagggcaaggatgcccacgggcatagctacagcaacccctgcgggatttggtgtccacacccgagaggccagggcagatggggaaagggattagcgcctcttccctcacactctgccagggttgccgggagcttgggccaggtcttaaggtaatgaggtgc

SEQ ID NO: 48708 - DNA, 979 bp, Homo sapiens
ccagtttggctatgtatacgggatcagtgcaattggatgtctaggaatgttttgtttattaaacttaatgagtatgacaggtgtttcatttggttgtgtggcaagtgtccttggatattgtcttctgcccatgatcctactttccagctttgcagtgatattttctttgcaaggaatggtaggaatcattctcactgctgggattattggatggtgtagtttttctgcttccaaaatatttatttctgcattagccatggaaggacagcaacttttagtagcatatccttgcgctttgttatatggagtctttgccctgatttccgtcttttgaaaatttatctgggatgtggacatcagtgggccagatgtacaaaaaggaccttgaactcttaaattggaccagcaaactgctgcagcgcaactctcatgcagatttacatttgactgttggagcaatgaaagtaaacgtgtatctcttgttcatttttatagaacttttgcatactatattggatttacctgcggtgtgactagctttaaatgtttgtgtttatacagataagaaatgctatttctttctggttcctgcagccattgaaaaacctttttccttgcaaattataatgtttttgatagatttttatcaactgtgggaaaccaaacacaaagctgataacctttcttaaaaacgacccagtcacagtaaagaagacacaagacggccgggcgtggtagctcacgcctgtaatcccagcactttgggaggccgaggcgggcggatcacaagggcaggagatcgagaccatcctggttaacacggtgaaaccccgactctactaaaactacaaaaaaattagctgggcgtggtggcgggcgcctgtagtcccagctactcaggaggctgaggcaggagaaaagtgtgaacccaggaggcggagcttgcagtgagccgagatcacaccactgcactccatcc

SEQ ID NO: 48709 - DNA, 1368 bp, Homo sapiens
taagaaggagcaagatgctagttctgagcagtttatacaaggatggtttggaaatccaatctgagtagttcagaccatgaccctgcttagcatgggatgcaggagaaagcagaggcagggtacattcagggcaagatctcggcctggggtctgagtcctgatgggaattcctttcactgcttgaaagttctcgtggcaaagaacttcctctgtatcaacaatacccacttctgctcagagctcatactgctgcctccccatctgagggaatcctctggaagagccatcaccttccccgctctatcccatgggcccagggcagtgcttggtgcctgggcagggcctcaagcagtgtgctatgcgaaggcagaggcatcccctggagcagggctgaccagcagaactctcttgatgatgaaaacctttctgtgtgctgtccaatactggaggccttacccagtgcgatggaggaactgcacttctatttcatgccagcagtcacatgtggccggtgcctactgcagtggacaacaatacagccctagattctccttggccactatcacaactggcctctctcttaccaacacgggggaagagagggaaggcaagtgcctggtcagtgtggttttggcgtagtccagtgcaagggcgggggctggacaatctcatttagcacagtccttgattgagtcatggggattctaggacaaggaattagaacccaacacacaaaacttaagttacttatttggtcatagaacctgggatctgaccctgtacagagctgacactaggggcccactcatagagcctggctgcccaccacccctgtctgtaccagcaaggtacagagtagcagacacgggccaagttcagtgacaacttcctgtgaccttcgatttctggctctggggtgtgccacaggcggggatctgtgggaaaaccccattccggtctatcgaggacagcaggccacacgcattctcaggtccccactggtggggagggtgtgtgcacttgccatctcagcctttgttctctggcagggaaggcagctggcagaggccgagtcgaggtgggggtcagagagaacttcgggccgtctcatctcctccatatccggaggcatttgtccttcccaccacttgccactctctggccatctggactccagtcaacagcatatacctcatccgcgtggccgggcaggtccatggccagcttctgggccttcacatcccacaccttcagtgtgctgtcaacttgccgctgaccaggagccgactgtcagctgaccacgcaatctggtacacggcagccacgtggccgcgtagggaagccaggtacttgcccgtcctgccatcc

SEQ ID NO: 48710 - DNA, 1480 bp, Homo sapiens
  misc_feature (1)...(1480): n = a,t,c or g
gtggtaagcggcggcaggccggcggttggtgtgtcccgggtgtggggaggcgacagagccctggcacttgagggttgagggggcctccccagcgcgggcgaaccgtctagcctccggaggccaggccgtgagtgcgggaggtatacgccaaggcggaagaattttgccactcactacctgtgtgacctcgggtaaattagccttggaacgtcagtttcttcgtctctataattgaaataataatagtacctctctcaggattgttgtgagccgtcagtgaaacacttagagcagtttctggcacatggtagaattgggctatttgctgaagcttcttggtgggcccttgctagcccaggaagaaacttacattttgatttttttgtaccatggctttggttcacaaattgctgcatggtacttattttctcagaaaattctctaagccaacttctgccttgtatccatttttgggtattctctttgcagagtattccagtagtcttcagaaaccagtggcttctcctgggcaaagcctcctcacagagggaagactgaaggggatttgcaaggagatcaccagaaagaagttgctttggatataacttcttctgaggagaagcctgatgttagtttcgataaagcaattagagatgaagcaatataccattttaggcttttgaaggatgaaattgtggatcattggagaggaccggaaggccaccctctgcatgaggtcttgctggaacaagccaaggttgtctggcaattccgggggaaagaagatttggataagtggacagtgacttctgataagacgattggaggcagaagtgaagtgttttngaaaatgggcaagaataaccaaagtgcactgctatatggaactctgagctctgaggcgcctcaggacggcgagtcttcccgaagtgggtactgtgcaatgatatccaggattccaaggggtgcttttaagaggaagatgtcttacgattggncccagttcaatactctgtatctccgtgtacgtggggatggtcggccttggatggtgaatatcaaggaggacacagatttcttccagaggacgaatcagatgtatagttacttcatgttcacccgcgggggaccctactggcaggaggtcaagattcctttttccaaatttttcttcccctaatcgaggaagaatccgggatgttcagcatgaagctcccgcttgataagatctcttctataggattcaccttggctgataaagtggatggtccattcttcctggagatagattttattggcgtgtttactgatccagctcatacagaagaatttgcctatgaaaattctccagagcttaacccaaggctttttaaataaagatcatatggtagttttgttttactaatctaagggtactagcatctacaatgatatagacaaaataaaatatttctttaatggcatccaaaaaaaaaaaaaa

SEQ ID NO: 48711 - DNA, 1003 bp, Homo sapiens
cagcgcttgcgcgctcgcgggccgctccctccgctcggaagggaaaagtctgaagacgcttatgtccaaggggatcctgcaggtgcatcctccgatctgcgactgcccgggctgccgaatatcctccccggtgaaccggtgcggctggcagacaagaggacagtcgccctgcctgccgcccggaacctgaagaaggagcgaactcccagcttctctgccagcgatggtgacagcgacgggagtggccccacctgtggcggcggcaggcttgaagcaggaggatggtccgcacatccgtatcatgaagagaagagtccacacccactgggacgtgaacatctctttccgagaggcgtcctgcagccaggacggcaaccttcccaccactcaacacaatggccctgcctcccaccgctttatttctttcggtttcggatgcaaaacaaaaaattttaaaagaaaatgtgacttcaaaggaaaagaacaaatttccaaagacttgggggagtgaaggcagagcctggtgcagatggacgaggtctgcagacggagggcagaggtggtggaaggggccaggggcctgcaggcctccccctggaactgggactggtctcggtctgctgacgtcagggtcagctcccccgcggagctgacttcagcagcccacagctgtggggcttcagcagccacaccagcccagcccagcccagctctcgatacgtttggtctttcatgctgaaaaataaataataaagcctgtcccgtgtctactgcctcccccaactgcacagacgccagcctctaggcctgactgccagggaggtggaaacactggccaccagcccggcagcccctacaggccccccagatgggctgcctcagtcgtcctctgagagctgcagatcctccagctcgtcctccggcccctgggccagctgctgcagctccccaggggccagccccgcctctgcgtctgggtctccatcccaagaccattcaccct

SEQ ID NO: 48712 - DNA, 1643 bp, Homo sapiens
ttttttttttgaaagggtcaaaaattttattagcaggactttttgtgtttttgaatatacaggtttcctgctgtccagggtaaaggggaagtggtgtcttgtggcccgaggtttggggcgcttgccttgggactccatccccatctctttcccgctagcgcagctgggggaaggtgcctgcttgccggccccacggattcttcggctgtggcataaggcactgtgtgttctgcaggaaggcgctcatggctggctggtagatgagaggcggccttctcaggggctgcaaagctgaggctgttgaggggttgagttgaacttggggcccctagtgaggaggccccaggcgatgggagcgcggcctggtgagtctggtgccgctgcctccccactggccctgcaccaggtctcaggatgggatcatgcctttgctcctcttgcggtcggccatggttctccggttgtggttggctcttgtcgccttgttggcttccttcttcctgcgttcctgggttgtctcgcggctctgcccatggcctcgggggctgccggccactgctgttgagctgtcatgccggtaccctttcttggcgagaaaggccatgcgcctggcttctgccttctctctcagcactgcagggtcctgaacaaaatggtcgggcttgggagcctcctcgtcagcatcgtcttcctcatcgtcgtcatcctcctcctgcccttctctaggcactttggttctcagcacctgagggatggtgagttgcctgcggctgatgagctcgtcatcagagtctgcatcattggcgcccacctggttgccatcgtatgtgtcatcgtactcatcctcgtagtagacactgtggtagggcaggctctcgcctggctgcagtggcacctcctccaccaccacgctgtactgctcgtagcgctgccgctgtgccgccactgcacgcttgtcgttcagcaaactccgcgtgttttcctccttcctggtgctcttgcccttgtgcacccggctcaggtctactgagtccctgctgaacacatcaaactcgtcattctggaagacgttgtggcgagacgtcagcaggggtgtagggtctggtttcatttctctgtctaggttgcggtccagctggctgagggtgggggccagccgctcctccaggatattgttgatcacctgctctgggtcgtagtggtagtactccaggcaggccaggatgaagccctcaccaaggtctggcagcaggtccttcacttgggagatgagagagtccagttccaccccacacatggcagggcccacagccgcggctgctcccatgcactcctcttcctccgagttctccggatgtgatgatgcttgactgactgcctctgctgtcaccgtgaccccgttaggctccccattaggctcctcaatcaccgatgggtctttagcatctgtggctttccgtctgtccaccccttcccatgcactctcgactgcctggaggatgtaggcagtccgcgtctcgtccaagactgatgaggcctgctgcagcaagctgatgtcttcggccacggggaagagtgcatcatagtcccggaggaacctcttctcctgcagcaaggagctgaagatctgaaggaactcttcg

SEQ ID NO: 48713 - DNA, 392 bp, Homo sapiens
gcaataagcaatcatattcttacgattattcacatgtaagtacttaacagtaagggatatggcgtaccattaatacaattaaaaaataatgcgtggagggtaactaagcagcatagttgtatcactggaatacctgtaaccgctattaaacagcagcagatgcagggggctgggagggtctttttccccttggagacgcggaataaactgtgttgtgtgcctgcattttgactgtggtctgtcacatgaggtcaaggtgggaattttttacttgtgggtatttaaaaatgtttgggattttgggagcatttctgattttggattgtttgatgagggacgctcaacctatacttttatattgcattcttaaaaggttgttttgcctaataccc

SEQ ID NO: 48714 - DNA, 1190 bp, Homo sapiens
ttttttttgtttccttttttttaaattaaaaaacaatttattgaaaaagagtaatgctttatacaaattcccattataaaaccccaaaatgtctattggtctgtttccaggtgtggtagaagaatataaaaagatcaaaattggataaattctattgtaacaatttcgttggtcattttgggccataaaatttttttgtaatgtttggtaactgatatccacatggaattacactcacacatcatgaagatctatgtatgtggcaaaagccatttaaattttaacttccaaaagcatatattctcaggtttggaaggcacactaaaatttattaggtccaattcctcataagacacagtggctgactttccttgtgtagtttattatgaagtaccatttccaaactaactatcctagcagcgtcagctgccagctaacagcaagagctctgagggcatcactgaacagatagcaccttatgagttattatgattcaaaaatctcccttgctgttggatttaccaacacgtaggcttttatttcttcccattacatctgtttagccacagaaagcattgggccatactcactgcagaagataagacttcctcagaatcttattcgtttagtgcactcaattttacttcactgtctcatcacttgagagactggttaaggcaagaaacccatttcttaacattttttttattttcaaacatttgaaaagcaacaccaaaacgtatgcagttaattcctcaattctttcccttagtatagcactttttaaattacaaaaccacacttacatgtattctatctcactggatccccacaacatcactgtgaggtgggaagatcaggaattacaaaccaccgcttacagatgaagcaataagcttacagcagccaaatgccttgctcaaacacagacggtgattgatagcaccaagactcaaatccaggtctccagacaccagtgccaacaccctttccattacatcatcttgctcaagtgaaatagcattctgtacagactggaaaagtaagagcagttgttaaaatggaacagagcacaaacatgtcagacacagctgaaagaatggaaatagactggtagagagaggaaggcactgagccacatgaaggtatgtgcgtaggttttgttcagtggaaatagactggtagagaga

SEQ ID NO: 48715 - DNA, 791 bp, Homo sapiens
ttttttttttttgatgccgaagtgaaacacgcagctttattaagacaggggcggtagaagaaggtctccatgctgaacagattacattatggagcccgggagcctgggaaggatggggcaggagagtgaagggggctttgaggagaggtcctgccaggaacatctgtccctgttgggggtgaagggtaagggggccagggcctcagaagcggccatgccagtgatcaggggaacaccgatggttcctctctcggggatggtggccagtatggaacctcgggggtgacctgcgcctgggtccccgcccatagagctgcctctggaggttctgggaaatgggccgcagatgcatgaagttgcagaagccacctcgggtacattcccgtgcacagcctgcccgttgaaccagcggttactgagttcagccacggcccgctctccatcctcctccctccggaacttgacatagacgttgcccacgaggtggtccccaaggttgtcgcacacattcatctcttcaatctccccatacttctcctgcagttctgtgaacacctcagtgtgatccgtctgcagtttgggctgtgttctgtggattccggtacaggttgagcagcactatggtctgcacagaatttaaaaggggcggggcctgagctcatgtggcagcggctggctgaatgtcggcttgttgtgaagccgggagcaccggtccccgtgccggcagaccccgatttgtccttctcagtcccgaatatcgaagctaaatattcagccatttttacccaagc

SEQ ID NO: 48716 - DNA, 482 bp, Homo sapiens
  misc_feature (1)...(482): n = a,t,c or g
tttggnaacngctatgacatgattacgaatttaatacgactcactatagggaatttggccctcgaggccaagaattcggcacgagagagctgcacggtttccattaactttggaccatgcttcaagtatcctccgaaggatctcacttaccgccctatgagtgacatgggctggggcgccgtggtagagcacaccctggctgacgtcttgtatcacgtggagacagaagtggatgggaggcacagtcccccatgggaaccctgaccaggtccctcttttctgtcaaggactttctgggaataatactgggggttttgnttttgntnttgaactgnntcatatgttctgccaaagatgctaaaaacacanactatccttttagcactgntaaaaggctgtntnngactgcnngagactgncngcctttnaccatttnctccncacttccagggactgctcttatttngtgtacnataaccaac

SEQ ID NO: 48717 - DNA, 2204 bp, Homo sapiens
gagagggagcagcgtcacgggcgcccggcccgttaaaacgctgctggctggagccaccatccctccctgcagcccgcaacgggaaatggagtaaagggagacccgtcgacctggccacggggatcagcgatggaattaaagcaatctttgtccacccatctggaagccgagaagcctctgaggcgctatggggcggtggaggagacggcttggaaaacggagagactggggagaaatcagctggacatcatctccatggcggagacaaccatgatgccagaggagattgagctggagatggcaaaaattcagcgtctccgggaagtcttggtccgccgggagtctgagctcaggttcatgatggatgacatccagctctgcaaggacatcatggacttgaagcaggagctgcagaacttggtcgccatcccagaaaaaagaaaaaaccaaacttgcagaagcagagagaaggatgagctaatcccagaagattccacaaactggtgcagaagagagacttcctggttggacgatgcggaggtcgagcggttaagggagcaagaagaagacaaggaaatggctgatttcctgagaatcaagttaaaacctctagacaaagtaaccaaatctccagccagctcccgggcagagaagaaagcagagcccccacctagcaagcccacggtggccaagacggggctggcactgatcaaggattgttgcggggccacccagtgcaacatcatgtagcccccacgtgggttgccctgggccatggggacccccccccaccctcttgtctttatagcccccatttcaccggggcccaagagctctccaaggcagaaggggttgaaggcaagcccgtgactgtcaccagaggccatgggcacggcaggcgggcctgggcaccctgttacagagtgttagcagttagggagtcttttcaccgttcgcatggttcctccccagagcatgccgaacccaggagtctgtctcactgtttatccaaacaccaggaaaggtcctccctcaaaaaagcatatctccacttctctctagctgtatctaacccaccgtgtgaatgaactggggagaggggcatgctccccagctgtgtgtagtcgtgacttctcaacaatctaggcaccatgttcgggacacgtttccccattccaccctcctaggctctgctctcagagctagggcacatgggcacagggtcccctcccgtctgtcctctcccaggcaactgtgccctggagggctccacatgggcccccgtgtctctcgggcaccacccatatagcagtcccagagggcccatctgtaaagatcgagcttgtgtgtggtgtcgtggtcacatctcccgcttccccccatcctgtgtctgggcacagttcacatcaggacagcgtccattgtgctctcagtctgcctcaggtgtgtgcctggagggggcctggactggcatggatccagtgtgcagaagagccagcagggaaccggaagctctgatgtcaaggccagagcagttgagaatgggacccagagtagatgctgacctgggcactccaccattccggggccaccacagagatgccagcaggatgccactttgccagcccgacacacggacctttgtaaagaacagcaacaggcaggagaggcagcgtgtgacccagattgtgtccccgtcattgggtggcatatgttaactagctgccaaacaactttcaaccccgtgtaattcatgtacatttgcaacagccagcccggtacagcctgtgtgacttctctgtatgtgtgtgtgtgtcgtgaccagcctaagtagttagcataactcaagatgctgatgtgcagtcacccatcagagaaaataaaaatggaaaccacgttcacagcattttaaaagtttttactttttttcttgattatggaagtaatccatgtacatagtaaatcattttaaaagtacaaaaagtatgaagaagtttgtcttaaaaaaaaaaaaaattattcctccaactagagaccactctgatgtttcgacgttttaaaaaagtctttttttgtgcattttttcatcgttgacatcatattgtggtatcatttataaccagttttttcctacttattataccaccatcttccacatcattaaaagctctttgtaaacattaaacactcttcataaatcaaaa

SEQ ID NO: 48718 - DNA, 2404 bp, Homo sapiens
tttttttttttttttttacaagctccaatttttttaattagacccaacagaaacaaaaacactccaataaattgtttataaaagcttcctgtcagtatctgtacttatttcctcacagaccagtaacatctggttggcaggcactggtctgaggaccacacttcggtgctaaaagcctgtactatagtgcatccaattcagtcagcagaaccggggttcaagacctgacttcattactactagctggatagccagagaaagatcacttagcctttctaaggtccactttactcatttggatcaggttaattatatctatgattaagctttctgtgagagctcaataataatgtactaacctctcaggaagtacttgaaagttgaaactgaatcacataattggtacatttacatattaaacgtgaattgttttatctgatatctactccatcttcttactgaatggtgttttctccttgaatagaaacgtgttcagttgatcatcaaatacttaaaggaccttgaaagcttgtctggctctaattaaagcacagctacttggtgatcttaacagaaacctgtcctctctcggagaagtgcaacctcttccactgcgctgacagctttgtgggaagagggagaactacaggaaacaatgaagaagtcagaaggtgcctgtttacccaaacgtgtctgcagccatgttcctgcataccccggttagaagaaccgctgaagcactatgctatcagcttaaaatctaggtgactacaaaaccctggaaagtttggcacataaactacattaggcaagatcaaggatgacatttgttctttgattaatcattatcactgccattcaatgtgacctgccaaacatacacaacttacatctttacagcaatcctaaatcctaagatttagtgatgttagtatgcttaaagaacacaagccagttactagctagttccaaaatctcagccagaaatatgtgttaacactggatttgccacatctagaagcacaatcactccagttatggtgtctaaacgaatgtctaaagttaggtgaatggaatgtaatcagactatactaaacttggttccaaaagttatagaagttgtaaagttagtctaaactaaagcacttaagtgaaaaagtgtaactgccatatcagaaagaagagctcccaccatgaaaatgtcactgaatgtattttttatttttgaaggtatttttaaaatctgggcacaccatatctatctgtaggaccctgggtccaaaggtcctacataactgatatgaaccataattctccatattaacaaaggctcggaaattgaaaccaagatcacctaactcgctcactttggccaatatagtacgaatttcagcttctttacaagagaagagtcctgagatgttaatatgcagcaattctgctgatgtgcattttaactttatgcaccaaggaagaaaggctaaggaattcacaaaagtaaaatcaccccctgaaaaacagatgctggtgattggagaaaaaagagcagtagaattaaggtgttttataaaccagagagtgttttgtttctgataggtaaagggatttcttcatatgttattttaataaaagggaatttcataggtaaaaaccaatattcaaaattataaaacaaatagaactgtttgtgcacaatcactgcatcaaaaatttgcaagagactcaacagaaattctttagttggcaaatgtggtttgaaggggtaataaaatctttttatggctaaaccaagagtcttgtttcctgttggcccaaaaacagatgtttcatttcccagataagtaggttctccactgtaaagaaatattcttgtatagttggtttctatgttcttgaactctgctccaaattcagccaacttgttaaaggtccttaacacaaatttggaacagtcgtaggaatcaaaccatgtctctgcccccttttctgggctggcttttacattccatgtctcataataaattcctgtttcattgtcctgtttcacccactttgccatttggttgaacatgtttcctgatatagttgctacttgaactaatgtcccattttccttccagtgaacatcatcaattccctcaaaaaagcaggcagcgccttgattacaccagaaaggggcatccatttcaggtcggagatggggaaatgtacagttgccaagttggaaaagttcataccattccattgtgtagttcttgccagttaatgtacttctgaatccaatggcatcatgcataattttcaagtgtcccaggaggtctccatatttaaattcccatactggggcttgtaatcgaaaaacttcaatgtcatcatcaccctccataactgggataggtgagcc

SEQ ID NO: 48719 - DNA, 943 bp, Homo sapiens
aattgttgtccccattttatagatgaaaaggctgaggcacagaggagctaaatatcttgttcaaggctatacaatgtgtgtgattattaggcttggaatcagggcctctaactctaaagcacatgttttttcaactatatgcagaaattgcctagccatggacacaagaaagctgggaggaagagttctacttgtggatgtttttaattttttttaaatatcaggagcaatccagggccatacagctatgaagcacttagtgaaaagaacacaagaagatttactaactgaagttagtattagtgattagaaaacaaaactgccagtttgtgcttcattaaggtgaactcatctctccaagcaggaagggaaaatttgctttccctagcagttgctgcatatgtgtgtacagactgcacaattcttaggaatttttgcaaaatggcatacctgtctttctcccagatacaccgccccctgccccccccaaaaaaggtcaggattaaaggtggtgagaagtgaacatttattaaacagaagttaaaccaatagagagaaaggaggtttgttggagtctaagaggattttgaccatgtagaaattccttgaaacagaccttaaaaggtattgaaaaattgaatcacaaagaaagtttacctttaaatacttgttaatggctcctagatcatggttataatttttctcaatgggaaaaaaagtcttaaaatttgttttaaataagatcctctaatgtctcgagctttttgattctggaaataatttgctttaaaatataaatcaatcagaaagtgatctaccactgaaatcattctaggaaactagcatgggatgcactgcacaatgttctttcctctaaaggcatgggccccataaactgtggcatctggcagcaggatgccatcagtcctttagaaagcctaat

SEQ ID NO: 48720 - DNA, 424 bp, Homo sapiens
acatttcaacatgagggacccactgacagattgtccgtataataaagtatacaagaacctaaaggagttttctcaaaatggagagaatttctgcaaacaggtcacatctgttcttcagcaaagggcaaacctggaaattagctatgccaaaggacttcagaaactggcaagcaagctgagcaaagcattacagaacacgagaaaaagttgtgttagcagtgcctgggcctgggcctcagagggaatgaaatccacagcggacctgcatcaaaaacttggcaaagcaattgaattggaagcaataaaaccgacttatcaagtcctaaatgtacaagagaagaagagaaaatcacttgacaatgaagttgaaaagacagcaaatcttgtcattagcaactggaatcagcaaattaaggccaagaag

SEQ ID NO: 48721 - DNA, 488 bp, Homo sapiens
gcaaagccacaacaagatgagacttcactgcagttagaatgactgtaagtagaaagacaaaaaaattatgagaaggtatagaaaagttaacatattcagctggtaagactaagttagtacagccgttatagaaaaaatgtatcacaaagtgacatatatttaaacaataaacattgtaatttaagatggttcttttgattgtaagacaataaacatttgtgaccatgcaagaaaaaaaaaattcaaattgctggatcatgttacagaaagaaaccagatacactgagacaaatactacatgaccttacacatatgtggaatctaataaaaacagacagtgaagccttcatgcaactggtcttagcaaatcagtttttggatataacatcaaaggcttgggaaataaaaatacgaacatacacatagtactacaacactgtatccaaactattccaagaacatttaaagcgggacttttaggcgggcat

SEQ ID NO: 48722 - DNA, 920 bp, Homo sapiens
gtgggaacgggggatccccaaggtctgaggtggactaggaaggctttctgaagaacctgggtctgttagggcatcagccaatcaaggtacaagtaaatagaggcaaaatgagggtttgaactgtgagcagttggtcctggaaaagaaagaaaccaagagattatggggactcaatgggcttcttaagagagaataagttgaaatcaatgaccagaagaccctgatggaagtggaggagaatcatctcaggcaaactttttgtgtgccagtaacagaaaccctctttgtgtgatcacatgcaaagtataggatatttgcaatatagccatggggaggagtgcagggcccaagggtagattttagccaggcctcccaggaacagaactcggatccgaaaagcccagagaagctagagctgcccctccaacactctcggatccacatggtctgtgttctctagacccccctgcatgttagcggtgttctctctctgtggactgactgtccttctcagtgaacatgtccacccgacagctcctgagtttatatcatctcaaccctcacaacccacagaggctgtgtctcctagtcacagctttaaattactggaaaaataaatgactggccaaacttggagcaggtgtccatcccagccctgtgtagttagagcaggaatcaagatctcaacacaaatgtggctgccaagcactcagccccggggcgaggggtcaagttcttctcagagaaagaggaataagttggttctcagaagacatcacaagatacgtgtgtacccaacaatctctgatctctgctgatcttttgcttagacgttaacttgatgcatcattggaaaggtgtttctctcatctctgtcctaaggcttgataaagtcattaaaattgtgttcttttgactaa

SEQ ID NO: 48723 - DNA, 2746 bp, Homo sapiens
  misc_feature (1)...(2746): n = a,t,c or g
tttttttttttttttttttaacttaagcaaaaaagggtatttattggttcacataactgaaaagtccaggggatattctagcttcaggcacggttggatccaggggcacaaacgctgtcatcaggattcaagtctctccatattttggctctgctttcccctgcactggcttcattctctacatggtaggccctgttagtttgaggttttcatcctacaaagctaaagcaccctcagtaaagagagcttctcctccacagttcagatggatttgctgattgatgaggtctgaattacatgttcacccacaaagctcaaggttgggtcagactgtccaaaccacagactgaaaataggaagaggtggttttaagaaacatcagggagttgttacaagatggaacggatgctggggcaattaaaaactactgatgtccaggataagaacagatatgaaaaagcttaatctctgcttaagaagttgaatggtaacagctggcatggtttcttccttggttataaaagtattctaaaaaaacaccatgagagataagtttgtcctgtcctcaagaagtctgtaatccatttgaatggaataataatcatgtccaatagcatatgttggatgaaaccacagtttcaacacaagcaaactcagtggtcatgagtctgagagcccaactgtcctgctgatctgaagtaagacaactagccttctacatcaaataattctgtgaggcaatttgagtcagctgtaaattttaagtacagtggaaacttttcttcttttgctaggttgaactggtacagttctgtgtgtactggtgaatcggactcatttctgcactactgaaggagagaaatggacgcggctttcgaactgctgtattccttccagacccgatagatgaggttccaggtgctgaaaatgaacaattacatacaggaatagaggcctactctgcacttaaaaatatcttcaaaaaagttgctggtcaaggagtatgcagcaatggtccttcctgttgtgaacattgagtcctaagtgggtgaggtgtgggttgttactattaaaaatccttgttgtattgggcacaagatagactgaaattgactgtaagtcctcacggtgagtctaattgcagcaacatgtgaaaaaggcaggcaagagctgagtcaggaaaatagacaagcagggtaccttcagaaaggccagccataccaatagccagaatatgatctggaagaaccagcagatcaataaggaagttctgtaaattagtttttactctgggtactcaggggttaatccatagggcttattctggatacagttttctgatcttacagagccagtcaggtacatcagctttcagtttcttgctcatctgccaaagaactttcagctcaggagaaggccttatcctcaatcagacttgaggttctgtttaggagtctatgctacatctgggagtgacagggtcagcagagccagatttgtcaaagttggccctactttctttggtaatcaagtcgtcatcttttttaactcagccgatctctgagaatcatcttacaagcaagtcaaggcctcagattggttgaatggtgctgttcaaagatttagatgagatctgaggcatggagacatggagacagtatacagactcctagatttaagttttaggttttttgcttttctaatcaccaattcttatatacaatgtatattttagactcgagcagatgatcatcttcatcttaagtcattccttttgactgagtatggcaggattagagggaatggcagtatagatcaatgtctttttctgtaaagtataggaaaaaccagagaggaaaaaaagagctgacaattggaaggtagtagaaaattgacgataatttcttcttaacaaataatagttgtatatacaaggaggctagtcaaccagattttatttgttgagggcgagcagtctacagcaaccagaccttaggccttgtttgacgagatgtagagtcgagtcatgtaatcacaattggcctagagagagacaaggatataaacaaactatttccaatgtttaaccagtgcattcattcgagtagctcaggatagctggcctttaaattgactgggaagtaaagaatgagttttctcatgaccacacatcaaagtctccttgtnccaccaagatctggtctgaggagttccataaactgaatcccttcctgctgaaaccagataagtngtctttatgtctgttaccaatgcctgcccttaaatatatatcatggcaaggacctgaagtcagctgctctgagtcagtgtaaaatgacagtattgagactgatgtggttccactaaaatatccacaaggacaaaagctcttaagtctaccgataaaatccttagctgcagtcttcatagattttgttttctcaaatcagtttgtttccagcaaaaaggtaggcaataagctatcggaaatgcccagcaagtaagctaatggcctgctcaaagggccagcctccaactctccctaccacctatatttggtggtatcagacatcaaaagattcatcttaaaagaacatctctcgggcacaaggcagagcaattaaaaaaaaaatctattactggctagaagaaacttttccaaatggtttcattttaaatcacatgagaaggggtgttcaaagattgtcgcttgaagttcaactgttaaagtgagctgaatagtcaa

SEQ ID NO: 48724 - DNA, 565 bp, Homo sapiens
ggttgcattcattgttatgtaggtgataagtcactatggcaggtgttgtctctcttgacacccaatccgacacgcttttcttttgctttcctctattacagaggctggaaagcaaaatatttaccttcctagactcccttgcagctagatgaaggccaggtgacattgtcttgtcaatgaaatataggcacaaggccctatgcaggctgtccctttctgaataaagcctgggtaaaagaaaacctgagtctcttccccctttcttctttcctgaatgcacagcagccatgctgtgatcacttggacaaaagccacacaccacagatggcagagcaggaagatattcagcctgattcctgaacatcctttgtgcagctacttcagccctgggttgcctgccttcacccatcttgttacagaagaaaaagacacctctcacttgtttaagccactgaagtagtttttttgtaattgtgtttgttgttgttgttgttgctgttaactaaaaattaatacaatcttactcaatagatctttattaataaaaatcctgaaatgtaagtat

SEQ ID NO: 48725 - DNA, 492 bp, Homo sapiens
gcaatggcgacactggatcgcaaagtgcccagtccggaggcgtttctgggcaaaccctggtcctcctggatcgacgccgccaaattacactgctccgacaatgtagatttagaagaggctggaaaagagggtggaaaaagcagggaggttatgaggcttaataaagaagatatgcacttatttggccattacccagcacatgacgacttctatctcgtagtgtgcagtgcctgtaaccaggtcgtcaagccacaggttttccagtcgcactgcgccgggcctgcaactgttccaccttctggatcctccttcagcttctctgactcctgggccaggtgtgtgcatttagctccatgctgaagagctgcagcttctgcaggacatttgtaccatcgaggtcaaaggcaacaagaagtgacatgagtttcagtccatcttcatgaggttccagttaaggcctgtgaattcgcaattgttcttcccgactgcctg

SEQ ID NO: 48726 - DNA, 624 bp, Homo sapiens
gctaacttagtcttctcctttcctctgtctacccttagcaatatataggtaaacatatccagcttgtctaacacatcacagattattagttaacaaggtgtagattaatgagcttttatattgtattgctggatcttttgagttaataacaatggtaacttgtccagaaggcctatcatcattcctagtaggtgggcacagagtaacagatattaagaagcttgctgatgagtcgtcatctagcaaaggccctgtgtagggctatattataggagttacattgacttctggggcattcgaaggtctccccccttatccatgtctctgtcattttgcttctccagccacgacaacacactttcctctccaactgctccctccccaccaaaaaagaaaaccctctaaaaggccaaggaataaatattcttagaagtaaagtatcttcatcccatgctgcctttttcaaagaggtgttaggatatttatcctatttctgtatttcacagtagcttttcaggctgtcctgcttatgtataagctgatttctcgtgccgaattcttggcctcgagggccaaattccctatagtgagtcgtattaaattcgtaatcatgtcatagctggt

SEQ ID NO: 48727 - DNA, 1809 bp, Homo sapiens
tgagatttaaaaccagatttaaaaccatcagctcccaggagtgtggcctcctccacctgctccccaacttttctggttccaaaggttcaagccaggctcaactcccactcctctagtctccaaataagcgtagcacggagagtctgagtgacaatccactttaataatccagcttcagctcagctgagaacttcccctctcaggtgcaaagggatggcagagaagtctttccaagagggctcaatccactaagagattatggcttagagaagggaacagctcaaagaagcccttgaagagggtgagggtctggaggactcctgtggtgcaggccatctcccggatagagtgcatggccagttgggggctgcctaaatccagcacccgcagccccagccgagaagccaagataggtccaatggtggttccacagggggtgtcattccggaccatgagatcctgcagggggaccttgactttgttggccacctctcggatcagggcctctgacaccgcgtttgaagcatagcgttgcttgctgttcaccttgatcacggggcccttgtggaataaaggccggtggttctcctcatgcttgtccaggtagttgggatgcacagcatgggccatgtctgcgctgatcatgaaggacttgggtatggcttcctcgaaggctgtcgggtgctggcacgaggctgagatccgccgcagcaccagctctgtcagcagtgactgtgctccctgtgcactctcagaccccacctcttcgttgtcatagagtgtgaccatgcgcacgtgaggctctgtggccagggagccagggcctgcacaggaatctatcaaggcctgcagggcacagaagcagctgtgcagattgtccagccgaggagcaaagatgaactcatcataggcaccacccaagaccgcaggctgggtgtctgcaaggcagagctccatctccactatgtccttggggctcagccccagatgggcacagagcagggacatgaggaccgaatggtgccgctcatccacagcattgagagggccctggctcaggagtccccttctccagctcctcctggatggctgtggcaagaatggggactagatgcatctctgtgttgggcccaaagttctcgttgatatttcgctgcagatggatggccaggtgtgggatgcgaagaatgggccgctccacgtgcaccagctgctgctccagccgacctgaggtagggcacttgacaatgacgcgtccagccagagtcaggtcacggtcaaaccaggtgctccagatcccaccaccataggtctccacaccgacttgctggaagcccacctggctgcggcgagaccgacgtttcacccggaggcaggggctgtccgtgtgggccccgatgaggctgaagccattgccaggaacgtactggccccctacagcaaaagctatgatggtggaggagttcctggtcatgaagtacttgctctcgggcttaatattccatttctcagtctccttgagttcactgaagccagcctggagaaggcggttgcggcattcagccacagcatggaaaggagagggactccggttcacgaacttgaggagttccttagccgcagtctgcaccgcctctttgcgggccttaccgttcatggccacctgcatggccccgcgcgtggggctgtgtccgctcatctggcctccgggctcggcccgcccccaccgcgccgcctgccccgcccctcactagctttgcaggtcccccgcgtgccccttcaggccgcgccgcactcgtaggccttcat

SEQ ID NO: 48728 - DNA, 4286 bp, Homo sapiens
ttaatttcaaactccaattgttcactgctggcatataatcgatttttatatattaactttgtaccctgcaaccttgctaaactcactgattggtccgaggagttttttttataatttctttacacttttctacatgaaagaatctatctcctatgaatagaggaagtttaatttctctcttcccgatatatatgcattttattcatttatttttgcctaactgtactggctaggacttttactaccatggtaaatatgactggtgagaaaaaaaaatatcattacctagctccaaatgctagaagactgaatgctttccccttatgaagtattttagctgtatattttttgtagatgctctttattaagttcctttctattactagttcattgagatttttttttttaaatgatgaatagatattccccaggtgaaatggctccagcaacaggaagtgaaacgaagggtgaagagacaggtgcgaagtgacccgcaggccctttacttcaacgaccccatttggtccaacatgtggtacctgcattgtggcgacaagaacagtcgctgccggtcggaaatgaatgtccaggcagcgtggaagaggggctacacaggaaaaaacgtggtggtcaccatccttgatgatggcatagagagaaatcaccctgacctggccccaaattatgattcctacgccagctacgacgtgaacggcaatgattatgacccatctccacgatatgatgccagcaatgaaaataaacacggcactcgttgtgcgggagaagttgctgcttcagcaaacaattcctactgcatcgtgggcatagcgtacaatgccaaaataggaggcatccgcatgctggacggcgatgtcacagatgtggtcgaggcaaagtcgctgggcatcagacccaactacatcgacatttacagtgccagctgggggccggacgacgacggcaagacggtggacgggcccggccgactggctaagcaggctttcgagtatggcattaaaaagggccggcagggcctgggctccattttcgtctgggcatctgggaatggcgggagagagggggactactgctcgtgcgatggctacaccaacagcatctacaccatctccgtcagcagcgccaccgagaatggctacaagccctggtacctggaagagtgtgcctccaccctggccaccacctacagcagtggggccttttatgagcgaaaaatcgtcaccacggatctgcgtcagcgctgtaccgatggccacactgggacctcagtctctgcccccatggtggcgggcatcatcgccttggctctagaagcaaacagccagttaacctggagggacgtccagcacctgctagtgaagacatcccggccggcccacctgaaagcgagcgactggaaagtaaacggcgcgggtcataaagttagccatttctatggatttggtttggtggacgcagaagctctcgttgtggaggcaaagaagtggacagcagtgccatcgcagcacatgtgtgtggccgcctcggacaagagacccaggagcatccccttagtgcaggtgctgcggactacggccctgaccagcgcctgcgcggagcactcggaccagcgggtggtctacttggagcacgtggtggttcgcacctccatctcacacccacgccgaggagacctccagatctacctggtttctccctcgggaaccaagtctcaacttttggcaaagaggttgctggatctttccaatgaagggtttacaaactgggaattcatgactgtccactgctggggagaaaaggctgaagggcagtggaccttggaaatccaagatctgccatcccaggtccgcaacccggagaagcaagggaagttgaaagaatggagcctcatactgtatggcacagcagagcacccgtaccacaccttcagtgcccatcagtcccgctcgcggatgctggagctctcagccccagagctggagccacccaaggctgccctgtcaccctcccaggtggaagttcctgaagatgaggaagattacacagctcaatccaccccaggctctgctaatattttacagaccagtgtgtgccatccggagtgtggtgacaaaggctgtgatggccccaatgcagaccagtgcttgaactgcgtccacttcagcctggggagtgtcaagaccagcaggaagtgcgtgagtgtgtgccccttgggctactttggggacacagcagcaagacgctgtcgccggtgccacaaggggtgtgagacctgctccagcagagctgcgacgcagtgcctgtcttgccgccgcgggttctatcaccaccaggagatgaacacctgtgtgaccctctgtcctgcaggattttatgctgatgaaagtcagaaaaattgccttaaatgccacccaagctgtaaaaagtgcgtggatgaacctgagaaatgtactgtctgtaaagaaggattcagccttgcacggggcagctgcattcctgactgtgagccaggcacctactttgactcagagctgatcagatgtggggaatgccatcacacctgcggaacctgcgtggggcccaggcagagaagagtgcattcactgtgcgaaaaactttcccactttccaccgacttggaagtgtgtgcccagcctgtggtgagggctttctacccagaagagatgccgggcttgccccacaaagttgtgtcgaaggtgtgacgagaactgcttgagctgtgcaggctccagcaggaactgtagcaggtgtaagacgggcttcacacagctggggacctcctgcatcaccaaccacacgtgcagcaacgctgacgagacattctgcgagatggtgaagtccaaccggctgtgcgaacggaagctcttcattcagttctgctgccgcacgtgcctcctggccgggtaagggtgcctagctgcccacagagggcaggcactcccatccatccatccgtccaccttcctccagactgtcggccagagtctgtttcaggagcggcgccctgcacctgacagctttatctccccaggagcagcatctctgagcacccaagccaggtgggtggtggctcttaaggaggtgttcctaaaatggtgatatcctctcaaatgctgcttgttggctccagtcttccgacaaactaacaggaacaaaatgaattctgggaatccacagctctggctttcggagcagcttctgggaccataagtttactgaatcttcaagaccaaagcagaaaagaaaggcgcttggcatcacacatcactcttctccccgtgcttttctgcggctgtgtagtaaatctccccggcccagctggcgaaccctgggccatcctcacatgtgacaaagggccagcagtctacctgctcgttgcctgccactgagcagtctggggacggtttggtcagactataaataagataggtttgagggcataaaatgtatgaccactggggccggagtatctatttctacatagtcagctacttctgaaactgcagcagtggcttaggaaagtccaattccaaagccagaaccaggaagattctatcccccgcagcgctctcctttgagcaagccgagctctccttgttaccgtgttctgtctgtgtcttcaggagtctcatggcctgaacgaccacctcgacctgatggcagagccttctgaggagaggcaacaggaggcattctgtggccagccaaaaggtaccccgatggccaagcaattcctctgaacaaaatgtaaagccagccatgcattgttaatcatccatcacttcccattttatggaattgcttttaaaatacatttggcctctgcccttcagaagactcgtttttaaggtggaaactcctgtgtctgtgtatattacaagcctacatgacacagttggatttattctgccaaacctgtgtaggcattttataagctacatgttctaatttttaccgatgttaattattttgacaaatatttcatatattttcattgaaatgcacagatctgcttgatcaattcccttgaatagggaagtaacatttgccttaaattttttcgacctcgtctttctccatattgtcctgctcccctgtttgacgacagtgcatttgccttgtcacctgtgagctggagagaacccagatgttgtttattgaatctacaactctgaaagagaaatcaatgaagcaagtacaatgttaaccctaaattaataaaagagttaacatcccatggcaaaa

SEQ ID NO: 48729 - DNA, 2795 bp, Homo sapiens
cggtcattatgtcactcatgagcatgagacaatctatgctatctataccaaatttcagaactacttaatctgaattattcttaaatttagttacaatatgcaaaagcctacttagcatttagtactttgttacttaagtttcctcaggacatggccattttaaacaccacacatccaattttacagcactctttaaataaacagtcattaacccagccaaggaaaacacagattaaagacgtcccttatgttgtacttctccaaaagtatatattaaacatttagtaggtgtatctaaaatagatgaaaggatgatgacctttaaaaatgcccttaatattgtccctataacatggaaaataaagatacattccaggccctagaaaagaaattagaatatacactagaagtagtcataaaaaaaactatgaccatctcaacacgtactcatgataaccagtaaatgaatatttaagacgtttatttcagtatcttcattccccactgtaatacatttgaatgcccacgtatttgagttccgtaaatagactctcttaatttgggtaactatataattacccttcagagttgcagacaacaatggaagctttaaaacctcttcaacacaaatgctacccctaaaatgaaagaatttagaggttaaataaaacaagtgagagaccatttacttacatcagttcggtttatagacatttgaatcatatctgaatgactgacttgtttccaatgtgaaaaccaaattaaaaataacttgatcactgtgcttcaaacacaactgttcacatatcaaattctagctccagccatgtaaaattcaacttttctgtatcagagaaaaaagctatttaaattcaggggcattgaatctttcatgaacagcatgaaaatatgagttgacggagatattccaggatgctacaataagtagctttttgtcttacacattagtgcactgaaacaaaatactaaatttatgtaaaatatagatataagagtattccattttgtccaaacctattaaataccttcccaaaagtttcataattcagtcctaggaaattcttggagctgtgagaatatcctgttcaggaatgtgacttctacaaaagctcccaggaaatttcagaaaaaaatatatataatcttctaattcaaaagttgattgatttgccaaatgacgcagcaagatttgcttctctaaaagcttctgataaggtcggatgtgcatgacagactctagctatatcttcacaggatgctccatattccaaagcaagagcagcttcatttaccatttctccagcacctggtccaagaatatgtgctcccagtactctgtctgtcgatttctgcccaaggatcttcaccatgccatctgtgtcagcatttgtcttagctctgctgttagcagcaaatggggaatttcccaactttgtactcaataccctcttctttcaactgctcttctgatttgccaacccaagcaacttcagggtgtgtgtaaatcactgatggcacacaattgtagtcaatgtgcacagcacccaccagccattccttcaacacagataatgccttcatcctctgctttgtgagccagcattggaccagcaactacatcaccaatggcatagatatttggaattttagtttgaaatctggtattgactggaattctacctctgggatctagttcaattcccagctcttctagtcccaaattcttagtaaagggtcgtcggccaatgcaaaccaagagtacatcacaagtgataacttcagctttaccaccagaagcagcttcaatagaaacatcaatttttccatctgaacttcctgggtagccacccggtaaacctttgtaatcaaatttaaaatttaaaaccccctgtttttggaaggatgcgttggaaagtttttagatatctcccatatcaattcccaactcccacctacatgacctaaaaattcaactgctgtcacatctgcaccaagtctttgccaaactgaacccaattctacacctattactcctgcaccaataacaaccatcttttctggaactttttttaaagataaagcacctgtagatgacactattgtatcttcatctatcgtgattcccaggaaaaggagtaacttctgaacccgtggctataagaatgttctttgtatcaataacctgagtgccgccatcagctttcgtagcagtgacttgatttttgccagttatctttccatatccattgacatgaacaaccttattctgtttgaataagtgggcaattccacctgttaaagcttttactgcagtactcttctgctccatcatcttgtctaaattcaagcgaacttcggacatttcaattcctctagatgcaaaatcttttccatgggccatatggtaataatgagagttgttcaataaagccttagaaggaatacaaccaacattcaagcatgttccaccaagtgtttcatttttctcaatgcagactgtcttgaagcctaactgggcagctttaatagcagcaacatatcctccaggaccagaacctataactgttacatcagcatcaatcggctgatctgcgtaagttctcagaggcactgcagaaagtccctgtaggccatgagatattcgattgaaatggcctctcttggccaaggagcagtacacacgactccagctctgcatttttccgctgtattttcctttccgccaatactttcacctccgctggggctccgccgtccgccaaggtctcccctcc

SEQ ID NO: 48730 - DNA, 1789 bp, Homo sapiens
ctccaggaactgaccagggccaagtggcgctcggcgggcactacatgggcggagggtgaagggtacttcgccatgtctgaggacgagctggcctgcagcccctacatccccctaggcggcgacttcggcggcggcgacttcggcggcggcgacttcggcggcggcgacttcggcggcggcgactttcggcggtggcggcacgttcgcgtgggcattgcttggactattgcgaaacccgtacggcgcactgcaatgtgctgaactgggagcaagtgcagcggctggacggcatcctgagcgagaccattccgattcacggggcgcggcaacttccccacgctcgagctggcagccgagccttgattcgtgaaggtggttgcggcggcgctgggccgaagaaagcgcatttgcttccgcgacgtggcgcctcaacggctcggcagccagccatgtcctgcaccaggacagcggcctgggctacaaggacctggacctcatcttctgcgccgacctgcgcggggaaggggagtttcagactgtgaaggacgtcgtgctggactgcctgttggacttcttacccgagggggtgaacaaagagaagatcacaccactcacgctcaaggaagcttatgtgcagaaaatggttaaagtgtgcaatgactctgaccgatggagtcttatatccctgtcaaacaacagtggcaaaaatgtggaactgaaatttgtggattccctccggaggcagtttgaattcagtgtagattcttttcaaatcaaattagactctcttctgctcttttatgaatgttcagagaacccaatgactgagacatttcaccccacaataatcggggagagcgtctatggcgatttccaggaagcctttgatcacctttgtaacaagatcattgccaccaggaacccagaggaaatccgagggggaggcctgcttaagtactgcaacctcttggtgaggggctttaggcagcctctgatgaaatcaagacccttcaaaggtatatgtgttccaggtttttcatcgacttctcagacattggagagcagcagagaaaactggagtcctatttgcagaaccactttgtgggattggaagaccgcaagtatgagtatctcatgacccttcatggagtggtaaatgagagcacagtgtgcctgatgggacatgaaagaagacagactttaaaccttatcaccatgctggctatccgggtgttagctgaccaaaatgtcattcctaatgtggctaatgtcacttgctattaccagccagccccctatgtagcagatgccaactttagcaattactacattgcacaggttcagccagtattcacgtgccagcaacagacctactccacttgggctaccctgcaattaagaatcatttaaaaatgtcctgtggggaagccatttcagacaagacaggagagaaaaaaaaaaaaaagaaaaaaaaaaagagtgatccagcccttattagggatgtgttttgtgcaatgatgatatgctcctggttttaagtttggcaaagcttatgtatcttttaaatagatgggagcatgatctcgaaaggatccttttcccttctcttattctcctacccaattggattctatcctgcaaaaaaagagagacctgtcattagaagcaaccaggttctcctgatacaagagaagaaatgtgtgatgacaatatgggtttgctgtatctgctcccatagctttgccataggaaaaaaaaaaagtggaaagtttcttttaagatggaattc

SEQ ID NO: 48731 - DNA, 407 bp, Homo sapiens
gattccataataaactttagagtaattttgtcaccatccacaaaataatttactggtttgagattgcactgaatctatagatgaagttgacatcaatatagaataaaactgacatcaatagtgagtcttcctatccatgaatacaggatgtctttatgtcttttaaaatttctttcagcaacattttatagctttcaggtagttaactttttaactgtagggttttacatgagatcatgtgatctgtcagcagagataattatactttttccttttcattttggatgcttttttcttgcctgattgctttagctaaaacttccaatattatgttgaacagaagtggcaaaagggagcatcctcgtcttcctgatcttggaggcaaagctttcagctttcccattgag

SEQ ID NO: 48732 - DNA, 1626 bp, Homo sapiens
gtcaggaggacagggagccagcaggaaggtggaaggagggcaggccaagggtggaggagtcggggagcaagaaggagggcaagcgacagggcccgaaggaacccccaaggaaaagtggtagcttccactcctctggagaaaagcagaagcaacctcggtggagggaagggactaaggacagccatgaccccctgccatcctgggcagagctgttgaggcccaagtaccgggcaccccagggctgctcaggtgtggacgagtgtgcccggcaggagggcctgactttctttggcacagagctagccccagtgcggcaacaggagctggcctctctgctaagaacatacttggcacggctgccctgggctgggcagctgaccaaggagctacccctctcacctgctttctttggtgaggatggcatcttccgtcatgaccgcctccgcttccgggattttgtggatgccctggaggacagcttggaggaggtggctgtgcaacagacaggtgatgatgatgaagtagatgactttgaggacttcatcttcagccacttctttggagacaaagcactgaagaagaggtcagggaagaaggacaagcactcacagagcccaagagctgcggggcccagggaggggcacagccatagccaccaccaccaccaccggggctgacaccctgccccacagggaatggccttggcctggcccagcccaagatcccagcgttatctaactcctggagggtggactctgtcctggcttgtttggtgtcctcagatatctttcacacagtagagcaaaatcaccagccctgcactgatgtcactttatgtagaaaaaggccttagctggacctgcgttgccgtctatgcaaatgcatgcaaatactccaggccctgggatgtgggcttgtgttttgtcactgtgaagggggagatgggagaggagcctgttttggggtggggtctggggaaggcaatctgattctgaagctaaagagctttcatcctcttgagtgtatgtccccatagtgggccccttgacccacatgctgaccggtgccttgggatttgactagagttgctggctcgaggcccagcacgaggacttaccctggggttttgttaggtttggaagcagctgtccctagggggtgaagtccccccccttttttttttttacccctgcttctcccacggcttcacctccctatgtgaactgtagactcagatcccaataaagtgctgttgcagctatgatgctaggtggtttctaagcacaggggacaccccacaccccctgcctgaatggatgggtccatcccaggcactggtacttgcccccttgttctgtatccccctttgcccttgccttgcccttccaacaaaccctaggcccttgagaagctgatacttctccttttgctcacagctgccttggccccacccctgggagatgtagcaaattgagtgtgggttttggagtctgagcctcaggctcaaatccaggccaagtgatcttgggcaagttaatctctgggaactttgggtttcttatcctcaaaaaaggcgatggaagggctggggaagtgattaaataaaagcaacgcaagaaaaatgcc

SEQ ID NO: 48733 - DNA, 2692 bp, Homo sapiens
tttttttttttgatgtgtgtgaaatactggtttttattggttggcacaagattacaacctacaatttcaatgcccttccctcccacacagctcaaatggaaggaaactgattaacacatagaaaggaacggcaggctcacaggtttaagcatttgtttttacaaaaaggagtgggatatgggggtggtcaagttttacgggtaataacaacattctctctagatggcagggggtaagtctgcctgtcctccattgctggtaccacataagggatacattagtaaagtagggaaagggttatatgtgtggctggcctgttctttagagaggaaggtgggatggtatctgctgtgtacctgtctcagaccaaacctggggctggaccagtgcccctttccttctcagcccttcctccacagcctgactgtactgccagccgcacccatgagaaggaggtgtgaaggaagcctgaggacatccacctcgagaaaaggaaacaggaaaactatttccttccgccttctctggaccaaatttcactcccctcagctccagagagtgctgcaaaaatcttccttagggacgctgtgaagacacggggaagaggccagccctgagcgggcaagaagaaaagcttgaactttccatgcagtaccaagcaaggctattttggaaacaagcaaacaaacaaaaaatggaaaccaacaccatataaccacaggttgggtagctcctaaatcctggacagcatttggattgggggtaagggcaattttactccagctccttgttttataacccgcacaaggtgccaagaggtttaaggaccacaactgacctctctttccctacaagcaccattccttggattcccagttttgttgagctcatttgaggtcatccttgccatcctcttaaaaaatgacacagcctcttggttattccattttctatccctttctacaattatgaacacactctctaaacaggagatctatatatgctctcatcctgcaacccaagagattaggtgacctaatgatgagaaggctaacttatttgctttcctgggtggtcctgatggaaatgaacaggcagcagagttcttggtgggatagagcagtctagtctgagccactgtgtgattcccccaggggactggtccctgggtacatgggtccctggctctctgtctcagttccacagatattactcaacttggccatttacgcctcagctaaaacatatgagcatgagggaaaagggacaagaaatacttttgtccctcctagaaaaacttaaactccaatacatcttggctactttgcctcaaacccacggggttccctggaaacatttgttgaacttggccaagaggagattgtatatggatggcacacctggaaaaggggagaaagcacactagttcatctcttttataagtagaatggtcccagggatgttaacctttctgatgctgatagtagatgagtggagtggaggtaaaccgtgagaaaacttaaaaaccccttaagctgtttggagactacacaccacagtggagcaaaccaaggtggggcctcactgcctcctcagagcccatccctgaccatgtcattggataggatggaagacaaagtctttgaaatggaggctgggctggcaaaagtaagtatgaagatgctactactggccttccacttcctctctctgatacacctaagaaggtgagagacactagcttcaattccattttacaacagttctcaacatcctgaaatattcttgacttccttaagcacatggaaaactggtaagctatatctttctaactgaaattttacttattctaaccaccaaccttttctttgattatcaaccagtttgacagtcttcagatcacaaaacaacagaacagacctgacatttacaaaactgtactacatacttatttcttttacagtagagctgaccaattacttttctaactactaatgcaacaccatgccactgggccctggactctgatgtttctgatccctgagcaacacatctatgtccattcacagatggaaatgaaagagtgagattctcagaggctaaacaacattctgggagcaaattggatttttgaagggagagtcctcttagaaaattctgagcaaacatgctcccagtcacgagggatggggtgagcgggcaggtttctgtctgtgagctatagctcccttctgaactccctcatgttcttgggaggacacaagcctcttgctcattaagcaaaggccctccaagtctcctttttacttcagcactttggaaactctccaagacttaacttccgatctggggaggttctacgtggagcagacctatcccttcttattcctgttcctgggtgtctccataatcagcctctaccttccctggcataagtcatatctgttatgctgcaggaactgagtaaccaaagctagatatcccttggaccactgattagtgacacattttctccacaacaaagggaggttaaagacaaaggtttaacctgagaaactttttttttggcaagataataaagaggttaaagaggctacgtggatctgtcactgctttagcttaccattttcaattcagcaccaaagtgctcagaaagacaggctcagatcaggacgacttcttaaagggattc

SEQ ID NO: 48734 - DNA, 1516 bp, Homo sapiens
  misc_feature (1)...(1516): n = a,t,c or g
ccgtgacaagcccaaccggacggctggagagggcgagaagggcagacgggacatgcagcctcttccgcctgagccccggaagggtgatgtggctgcggcatcgccggcctcgctatgtctgccattttcaattttcagagtctattgactgtaatcttgctgcttatatgtacctgtgcttatattcgatccttggcacccagcctcctggacagaaataaaactggattgttgggtatattttggaagtgtgccagaattggtgaacggaagagtccttatgttgcagtatgctgtatagtaatggccttcagcatcctcttcatacagtagctggggaaaatgccagaatgtagttgccatcagatttgattgtgaacaaggactgactgcagaaaataatggaaaggatgtttaactcttttatctccgaacattgaatgagataaatttccagatgctgttctctattttaatgttattggaccaatgttctgtataaacaattaagatgtaaccatttaatagtctgtaacaatcaacctcagtactgtcactacaatattacattctgcaaatgttattctgttgtatcagatacaaaattttagtgaggtatctctaaggcacatagtagaaaacaaaattggttaattactcaagttcctttcactgtgatttggaaatgatttaatctttatagaatgagaaccttttttggactagcttttttattaaaatggctcaatttgtgttgataaggattgcattaatatttaatagtgcttgcttttcctctgggcacaccattttgatcattaacccagagtacctctactcttagcaaactctagtttatgacaagtatttaaaatatttaaaacaagcttatgcagttcttaaggacgaaggtaaatgagatgtaacttaaaaatagtattgggaaaatgttgatagttaacattagtggatttagactagccaaatgacatagtaggctctgaaacatcttgtcaagtatatgtattttgtgcatgaatttttgctggaaagctgtctttctctgaaaaacacaacgttcttagaacgcctaagaacaattataaaataattatcctatatgtgtttttcattctttttagtgtcatggcttcaaaaatgaaacatttattttaattgccgtaaaggaactgtatttttgttttgttttttaacacagcactttaaatccagtttgtgttttgtcaacttgaactggaatctcttttgttactttggaggtgataaatagttttcaaatctgctgatttgtatactgtggcacaagtatctttgaactttgatagtgaaaggagaccttcaacaatttttagtctaggcgagagggaatattagggaatgtgacttcttaaattttaccaatagggcagttattttaaagggccatgggttaaccatttccttaaaggttccactaaaattcagtttaaanttccggggctacgggggacnttaa

SEQ ID NO: 48735 - DNA, 595 bp, Homo sapiens
  misc_feature (1)...(595): n = a,t,c or g
ttttttgcaagagggatgacaaagccaggtttattgttctgggttaaacctgtggaggcaggacctgggaaggggcacggggacagatgaagttagtgactgtatcttcctggtcattgctgggttctcagcacccttggcccccactgaagttctaggtgaagcccagtgctgggggacagggtcctcttcctgacagtgcagcctgtgggatgacttgcaaggtcccatatggaggtagggggtgggatgttggcctgcactggggccagcgtcctcaggaaggtgtcttggaggaggtggcggcagctgcccctttcttcttggctggggccttcagcagtgccagcttcttgggcaggctgctgctggctttcatcaccacgtcatgttcgatcttcttccggattccgacttctaggttcttcttgagcttttgctgctgcacgacgcgcgccttcctgggagcgataacacgaccgccttttcttgggccccgattcttttcagaggctgccgctgccgtcttactctttgcgggtttgtgcgcctgaaacttgcgctgcccctgcgccatggtccggncctcgtgcga

SEQ ID NO: 48736 - DNA, 366 bp, Homo sapiens
gggggcccttgtccttcgcggagatcaacgtgctgatctgcttcttcctgctggtcatcctgtggttctcccgagaccccggcttcatgcccggctggctgactgttgcctgggtggagggtgagacaaagtatgtctccgatgccactgtggccatctttgtggccaccctgctattcattgtgccttcacagaagcccaagtttaacttccgcagccagactgaggaagaaaggaaaactccattttatccccctcccctgctggattggaaggtaacccaggagaaagtgccctggggcatcgtgctgctactaaggggcggatttgctctggctaaaggatccgaggcctcggggctgtccg

SEQ ID NO: 48737 - DNA, 1915 bp, Homo sapiens
  misc_feature (1)...(1915): n = a,t,c or g
ttttttttttttttttgccaaaacaaactttattgcaccaaaaaggaaaacaaaaaaaacaaaaaaacttcatttatatacagtcagatataaagacatctctttgactcctgtgcatatatttcctcaactcaagattagggcataaaagtcaggctgctatgccagacatgctctgccctatggcagggccaaggagaggattgtcacttgaaagtgggaacacttaaatggatgacagacaacactggacccacagaccaagagcattcttctaagccctggagtagctcgaggaatggaagagggaaattggaagcagggtcccttttcgatcttcatgtgaagagacccagcctcttcaagggtatccaagataaacttccgttccccaagcccaccaatccctgtccagttcctttgcttcctgccctcccaaataggacattctcctttgtgcccagcccccctttgcacagatcctccaaggggagtcccatgatccacaaggcagagaccttcatagcagagggcagggcaggtacacactatcctctcccttatgcatggctggacactgactgaggccctgcatcacaagaatcgccaatacccactgggagccataacaataaatctggaagtacggggagaacatatcaaaaaggggaaggatggattccccttgatgcccaggattacagggcaccttaaagcacatttttttttttctgagccaaccagctaaaggatcactgcagctaaatacagatagagaagcaacaaagccaggcaaatacccatcagagacagtgacaagagcagctgggggcacgggggaggcagaaggaagagaaagaaggggaggagcctccagagtcccagccccaaccccctctgccattggctacccttgctccccaaaaatccctggggttgaagtgaggaggactacaggctggggtgaaaatacacaaggacagcccaacaaaatacaacaaggactagcatcagtctcccccttactccacccccaagaaaaatacccttattgtgactagtatttatggaaaatctgtaagagactattctatgtagtggctctaatcccatatacacagcagctgcctgtgttgggaacttttcaaatcagtgattgcgggaacaaacagtattttcagcttcttacggtgccatgcaggctttaccaagaccttggttaagtccccagtcacatttactttctgtcttacatctagaaaagggtgaggaaagaggggaggggagaaaggtgctcaggtgcctaggttaaagcttactgatcagcagcctagactccaccactgttccttctctttggtctgtcctagaacagtgactataaattaggaaaaacaaaattatgctggcctgtgggaaataatgggggaaggaaggcagggaggaaaagggcattgggaagccctgcttcaagactgaagacagacaaatagacaaccacccagactgcttaagtgtcacagacagcccccaccccaagctccccttccaggtatccccataaatcatttgggcacactccctcttggaattgcaatttccatcttccacttatccctaaggagctggccctgtggagaggtgtgttggttgttttgtttttgccaaaggccctcgctctaggtgctcctgtaaaggtaccttggcccctgatacgggatgaatggatgaacgaagccccagatgctccagtgccaaggaggtcagaccgggaacaggcccccactcccacaccctgggatcggagcttgcttggttcttgccatcttgcaggatgacttcgagtctggagggagatanacagtgcctctccatccctggggtggggggaagggattctgctgggactcttgag

SEQ ID NO: 48738 - DNA, 480 bp, Homo sapiens
  misc_feature (1)...(480): n = a,t,c or g
gtgnnttgaacccttgactgattacgaatttaatacgactcactatagggaatttggccctcgaggccaagaattcggcacgagtctggccctggtgggcgttctaatcagcctggccttcctgtcactgctgccatctggacatcctcagccggctggcgatgacgcctgctctgtgcagatcctcgtccctggcctcaaaggggatgcgggagagaagggagacaaaggcgcccccggacggcctggaagagtcggccccacgggagaaaaaggtgagaaaggagattccggtgacataggaccccctggtcctaatggagaaccaggcctcccatgtgagtgcagccagctgcgcaaggccatcggggagatggacaaccaggtctctcagctgaccagcgagctcaagttcatcaagaatgctgtcgccggtgtgcgcgagacggagagcaagatctacctgctggtgaaggagga

SEQ ID NO: 48739 - DNA, 854 bp, Homo sapiens
atgacttcatcagcacagataattcagagatctttctcttctccagaaaattttcagagacaagcagtgatgaacagtgctttgagacaaatgtcatatggtggaaaatttggttcttcacctctggatcaatcaggattttcaccatcagttcaatcacacagtcatagtttcaatcagtcttcaagctcccagtggcgccaaggtacaccatcatcacagcgtaaagtcagaatgaattcttatccctacctagcagatagacattatagccgggaacagcgttacactgatcatgggtctgaccatcattacagaggaaagagagatgatttcttctatgaagacaggaatcatgatgactggagccatgactatgataacagaagagacagtagtagagatggaaaatggcgctcatctcgacactaacacatgttaaaaggacattgtttttatagggtcattttaggccctttgactaagttgatatggaaatattttgttgaaaaactgtacagagcagctttacaagttgtcacatttctttataaatttttttaaagctacagtttaatacaaaatgaattgcggttttattacattaataacctttcacctcagggttttatgaagaggaaagggttttatgcaaaagaaagtgctacaattcctaatcattttagacactttaggagggggtgaagttgtatgataaagcagatattttaattatttgttatctttttgtattgcaagaaatttcttgctagtgaatcaagaaaacatccaggttgacagtctaaaatggctactggtattttagttaattcaaaaatgaacttttcagtgat

SEQ ID NO: 48740 - DNA, 1478 bp, Homo sapiens
acatggcggggtccaggtggaggtcttgaggctatcagatcggtatggcattggcgtccgggcccgcaaggcgggcgctagctggctccgggcagctcggccttgggggcttcggggccccgagacgcggggcgtatgagtggggcgtgcgctccacgcggaagtcggagcctcctcccctggatagggtgtacgagatccctggactggagcccatcacctttgcggggaagatgcacttcgtgccctggctggcgcggccgatctttccgccctgggaccgcggctacaaggacccaaggttctaccgctcgccccctcttcacgaagcatccgctgtacaaagaccaggcctgctatatctttaaccacccgttgccgccttcttcgagggtgtaaagcaggccctctgggttcaccaagaccaagttaataggaagggccttcccgagaaagtgcttagccttgttgatgatccaagggaaccacatagagaaccaaggacgagtgcgttctgaatgtgatctctcacgcccgtctctggcagaccactgagggaaatccccaagagagagacctacttgcccggtcatcgtggacaacctaatacagctgtgtaaatctcagattctcaagcatccttctctggccagggaggatctgtgtccaaaactccacgttttctgctacctgggaaccgagaggtctctttctccttcaagtccgtggttctggtgggagcccgacttgagcacttaagggatcctcttgcccaccatcgcctccagaggagggagattgaagctactaaggaatcatgttctaggagaccttcttaccccatatcacccatcatcgatcttcatgaatgcaatatttatgatgtgaaaaatgacacaggattccagggaaggctatccttaacccctatccccataccctgtacttactggacaaagccaatttacgaccacaccgccttcaaccagatcagctgcgggccaagatgatcctgtttgcttttggcagtgccctggctcaggcccggctcctctatgggaatgatgccaaggtcttggagcagcccgtggtggtgcagagcgtgggcacggatggacgtgtcttccatttcctagtgttttcaactgaataccacagacctggactctaacgagggtgtcaagaatttggcctgggtggactcagaccagctcctctatcagcatttttggtgtctcccagtgatcaaaaagagagtggttgtggaacctgttggcccagttggtttcaagccagagacattcagaaagtttttagctctatatttgcatggtgctgcgtgaacggaggacccctctgaatcctgaaacccctcttgcctctcttccacggaagagggcctgggccccgtggagcctcagtgcccgtttggcctgctgctctcgctgacaataaagagcccttgcgttgcactgaaa

SEQ ID NO: 48741 - DNA, 687 bp, Homo sapiens
ggaacagagggatccaagaacaatggcagctttcttgccatcaaagctgctgatggcacatatattcttaatggtgactacactttgtccaccttagagcaagacattatgtacaaaggtgttgtcttgaggtacagcggctcctctgcggcattggaaagaattcgcagctttagccctctcaaagagcccttgaccatccaggttcttactgtgggcaatgcccttcgacctaaaattaaatacacctacttcgtaaagaagaagaaggaatctttcaatgctatccccactttttcagcatgggtcattgaagagtggggcgaatgttctaagtcatgtgaattgggttggcagagaagactggtagaatgccgagacattaatggacagcctgcttccgagtgtgcaaaggaagtgaagccagccagcaccagaccttgtgcagaccatccctgccccgcagtggcagctgggggagtggtcatcatgttctaagacctgtgggaagggttacaaaaaaagaagcttgaagtgtctgtcccatgatggaggggtgttatctcatgagagctgtgatcctttaaagaaacctaaacatttcatagacttttgcacaatggcagaatgcagttaagtggtttaagtggtgttagctttgagggcaaggcaaagtgaggaagggct

SEQ ID NO: 48742 - DNA, 1039 bp, Homo sapiens
acatgggggatactggacagcaccctctacctgccttcagcaaccactgagaacacccggggcacacacggggcaggggtggcacccagggtcacctgtctccctaaggaggcccactcctcccccagaaagccaggggggaaaagctgctcatcacccagggtggcagaaacgtctcccccagcagttgggctgcccagcagggccaccaggcctctgtcccagctgccttaagaggctctttcaatgggccagcttcagaaccatccagtgtaccgcagcggcctggcctgggaaaggatttctcagcctgactttccagagaccgaggatgagaaagttaggcggcaacagaacaaaacccccgccgcgagatgggtctgctgctgcctcatctgagtaggtgtaagaggggatgcgaggggaggggcagttcacatcgcagctctctccgaactccaccatttgggacgtctttattatggatccgtccactcttccaggagcagtagcccttctaggaaaggggtgggaagaaaaccagcctacccttcaagctgacttaggatgcaatggtacagacaccagccttgggggagggttctccatccacactcctaccccaaacgggctttgtgctgctcaatggggattcggggccatcagaagcgatgccgcggctgggggccaaagtgcatgggcaggttgtgctccaggggcatgtggatgggaccgaagtcatagttgacccgcacgttgggcagagggggcacgtacggggctgggataggccccatgttgagtgggaagttgttgaacacaggccgcacgggaggcagggggaagggtgggtgcgcgaaggcatagggtggcatctgtggctgtggcaggttctgcggaacgggcctcgggagggcctccaccctctgcaccttctccacaggctttctccagcgggggtccaatgcgtttgaaggtgttctctccattctttcttttctgttcctcttcagcctccttctggatttcctcaataagc

SEQ ID NO: 48743 - DNA, 394 bp, Homo sapiens
gcggccgcgctgctcctgctgctgctggcgctgtacaccgcgcgtgtggacgggtccaaatgcaagtgcttcccggaagggacccaagatccgctacagcgacgtgaagaagcttggaaatgaagccaaagtaacccgcactgcgaggagaagatggttatcatcaccaccaagagcgtgtccaggtaccgaggtcaggagcactgcctgcaccccaagctgcagagcaccaagcgcttcatcaagtggtacaacgcctggaacgagaagcgcagggtctacgaagaagcgcagggtctacgaagaagaatagggtgaaaaacctcagaagggaaaactccaaaccagttgggagacttgtgcaaaggactttgcagattaaaaaaaaaaaaaa

SEQ ID NO: 48744 - DNA, 1447 bp, Homo sapiens
ccaacacctactcacttaagcacttgtataaagcctccagggttgggaatgggagtaaagggcaagagggcggacacatgaagtttagtttctaacccatcatcaccctaactcaaccttttctgagccaaatggcttgaattgaagccagttgtcatggaaatagtaagaggttagggtttaagagctggggatgcgggggtgggagagagaaccctcaacatccaggatctatataatgagagctactttaaaccctcaggtccaccctcatgatgctgagttatttagccagagggtgcagcctgcttatgcccaaattccctcagccaagagagagaccaaagaggcctctggaatggccctgctcccagcctctatcttcaggtcaattagagagagtatagagaccccagagtcccctgggtctggaaagcgttaggagaggtcaagaaaggagcagtaaggaggctgaaggttacagggcatttgaatccaaatcactgctctgggctagggaatagagccagcagaccaaggtgggaaggattctggaagggggacattttagtctcctaaccccaaagctcagggtggaagaggggagaacaaggaagcagagtgtataattattttttccttttatttttggaatctaacagtacctggcagcagggaggggaaagtacagtggggaaaagcatctgacaaggccagttagaacagaggatgggaaggatggagactcccgggcttggaaggctaggaagcaggcagagactggttgccatttcaagtcactagctaggcccattcattcctcccacaaccctgacccattctcctctggactcactgtgcctcagtttcttcccctcaatggaatgagaaatgacagcacccgccacagccaagagatgaattctgagcacttaccacgggcactttatggacataaaatacctctcgctgtgggacagataaccagggcaccagagtagtggtgaagagatgtgaggcttaagaggagtcacaggcttcagagtacaagttcccctctgcctcccagctggacagtgcctagaagccaaggagttgagaatctcctgatccacaccctatccttacttcaccaccaggcctcttggctccaggcaagagcttagaggatgtcaggagaggtgggggtaagaatcttcagcaaaactgtcactctaagtagagccagcagttacgggtctgataaaaacagtactgaactaaagtaaagcccaagctggtgagcaaaactggatggctcattcttcccaagagcatgactctcccccttggccagttggtggaaggggcaaaggtatgtgaccacccttgagaaggtgatgttggtgagctttaacatcttattcctattcttatagtgagaaagtgaaacaagatctttcagtag

SEQ ID NO: 48745 - DNA, 408 bp, Homo sapiens
gcgtgagggtagccctggctgaggctcggaggtcctcccgggctgttcagagggccccaagcggtagccacgttctgatactggctagaagccaggggagggagcttggggtaaggggagggccctgagggaggggtcagacgctttaggaaagagttaatgcgaagagggggaggggataggacgaagaaaccgaagggaaagctcagggccgccaacttccagctgcagcggcgactttcagtttcatttccacggaccctcctgcctgggccgcagccgccgccgcgatgcccagtaagttcagctgccggcagctccgggaggcgggccagtgtttcgagagtttcctggtcgttcggggactggacatggagacagatcgcgagcggctgcggaccatttata

SEQ ID NO: 48746 - DNA, 364 bp, Homo sapiens
  misc_feature (1)...(364): n = a,t,c or g
cagggggtagtcaagatgttgctttaggaaaaccacggaagctgaaggtcttggtgttggtgcggaagtcgttaccttttgtcgtctttttacactaggtttttgttttaagttagtttgagaaataagagcagtcaccatagttagttagctttgcggcccaagccaatgaccgaggccatcacctgtgctctggggtttgtccctgggaaatgtcttttcatccttacctgccaccgtgtgcattgcaaagagggacaaaaggggctctctgggaagggctctaagttgtcggtgatgaggctaccgtgttgtttttgagactccgtctccaaaaaaaaaaaagggggtnataaccntttgg

SEQ ID NO: 48747 - DNA, 416 bp, Homo sapiens
gctttggcctacaccggctggtggagcttgggcagagctcaggcaagaaggcaggtgactggtatgggccatcgctagtggcacacatcctcaggaaagccgtggagagctgctccgacgtcacccgcctggtggtgtacgtttctcaggactgcacagtgtacaaggcggatgtggcacgcctggtggccaggccagaccccacagccgagtggaagtctgtggtcatcctggtgcccgtgcgactgggtggcgagactctcaaccccgtgtatgtgccctgcgtgaaggaactcctgcgttgcgagctgtgcctgggcatcatgggtgggaaaccgcgacactcactgtacttcattggctaccaagatgacttcctgctgtacctggaccctcactactgccagcccactgtg

SEQ ID NO: 48748 - DNA, 897 bp, Homo sapiens
tttttttttttgctcttccttttaaaaactttatttaaatggagactcttagtcaaatgattggaaaaccaataacgaaaaatagttcttcaggttcttctcctggaaaggcggaggacacaccaaactgcactggccctgtcaggggacacggcaccctcgtgggaccaggctcagccctcggggtggcacgaggtcctgcaggctgcaggaccctcacactccagccccgtctggtgacccaacccgggcccgtggtgcatgctggggaaggccactggcgttcccctgggcttcggctcctgaggaggcatggccccacaccctgcccggccataaatatatacagattcctgggcatccagggcaccaggaccgacgcagagctgggggtcctgtccctaagcctgttggaacaagcgactcttgacatgggagccagggagctgggaccgccgcacccctcccctgcctccctcctggggtcaccaccctcaggcggctgccagctggcctaggacgcggcggaactgctgggtgctgtggcccagctccttgaccctctccaccatgtcctgggccgcggaaggcgatgggtactgcaaggcagcggccttggtggtggccacgatgccgcgcaggaggtcgcacagcaggttgctgtagtgggtcacctggctgcgcacgtcagcagccttggcctgccgtgacagtgtgtccccgatgaacaccagcttgtgggcgctgaggatgacgaacttgctgtgcgccacaaagatcttgggcggctggttggtggccacggcggtaaagaaggcgtccacggcgttggtcagtgtggtcaggttggcctcacactgctccaggtagaagagcagcagctgccggtccgagggc

SEQ ID NO: 48749 - DNA, 337 bp, Homo sapiens
gggccctgttttcccaaactgggttcattctcaggctgggtcctccagagactggcaagacagccctatgagctctgggtccccatcttgctaccttcagaactagggagagaagagtttctctttctcagcagttctcataaatcctcttctactgagttttgctggttccagatgcccatccctgaattacctgctgggttgggaggccgatgttctgactggccaggcctgggccatgtgctctctcctggagcctgtggccaggcctaaccctgcttctagccacatttcatggactgagtgtggcagagggatgggtaccgcaaaaaactat

SEQ ID NO: 48750 - DNA, 1794 bp, Homo sapiens
ttttttttttttttgtgaaatttattgtttccacattaaaagaatttttttgagggaagtattttttgtaaccacatgatgatcctatacagctgcccagaggaggacaccatcagagtcattaacatgccgtatgcgttctgaataaataaaagctacaaagcccaagttatatacaaatatctcaggcaataatgtttacaaacctatgtacaataaaacaaatgtaaacagtaaatgcagcatgagagtaatcaaaggatgcacagggacagccgccgctgttcagtccaccccggagctggcaccggcccaccctggaaccagccactcacccttcctaacacaacgggacggcccttggaagagaaaacaaaaacactccaaagatgtcgttgaactgaaggacgggaaggctggcgagaggctgcccgcctccctcaccccgagtctgaggcgcacagaggaggagacagcacagaaggctgggcctgtgtgtgccccgtcccagaggctcctgccacgtggggctcagacgggcattgtgctgctctgggaggcaagtccatggaatggtagctgcttaagtaaaatcagaaggtgcagaaaatgttccctaattcagtaaccttcctgactctttgcccagaaacaggccccaaactgtgaggggtggagttgggggacacatgatcatgagcactggagatgccctgggtgggagctcaggagggcacacattgacctgatttgggggagaacttctagaagatttgcaatgtcctaaaacacaactaaatcctatcagtacagcagagtgggggctatggggcaggtgtgatgaatgggtacttctgcatccagtgaccaagtaatacacgtatgtatcaccttgcgacccacaaaagtgcaatcatgtgaaaccaacggcactacggcgagaagagaaaatagccagtattgatatcgcgcagagttccggggctgggcagggccccattagccgccactgcatgcagcctgccctctgccagccgtgcggaggcagacggaggggcacggggctgggccccaggcaccgaggggtgaggcgtgggtgtcctgggttgttggaggagggcaggagcccccacctggaggctaggcactcacacactgagaggcagcatacccggcgctgacgatggacgcgaggagcccagaccaggaggaggaggagcggggtcaaagccgtttactgcccctttgtcgaagaaagatgtatgccctgatcgagagaactttgtgccattgccattcagcaccccacagttaacattccctgaaatataggattttcgtgatgcttggtcctttgcaaaattcctgcaagctgctaatttgggattctaaagcccctactttccgtaagagatcccccacgatgtttaggtgctggatatcctagcagagggagttaggtgggactgggtaccaaaaccatttggtatagctttcggtgaaggaaaagtgttctccgttcctttgccaacaggggtagctggcaaagaaagtgatgcttggacggcggagtccatcttttcacagtctagagttggagagctaggagccgactttctagttacttcctgttgtctttcccgaactgctagttcttgccttaaatctcttgcttcatcctttaacctctgtacagagaccaacaaagattccttttcatcaagttcactttctaaaaatgcatttcgttcaatggcctggtttagcctttgttcaaagtcttccagtgaaact

SEQ ID NO: 48751 - DNA, 662 bp, Homo sapiens
atccgggccctctacaccaagatggttccagcagctgtttcccattcagaattctggcatcggtatttctataaagtccatcagttagagcaggagcaggcccggagggacgccctgaagcagcgggcggaacagagcatctctgaagagcccggctgggaggaggaggaagaggagctcatgggcatttcacccatatctccaaaagaggcaaaggttcctgtggccaaaatttctacattccctgaaggagaaccctggcccccagagcccctgtgaagagaatctggtgacttcagttgagcccccagcagaggtgactccatcagagagcagtgagagcatctccctcgtgacacagatcgccaacccggccactgcacctgaggcacgagtgctacccaaggacctgtcccaaaagctgctagaggcatccttggaggaacagggcctggctgtggatgtgggtgagactggaccctcaccccctattcactccaagcccctaacgcctgctggccacaccggcggcccagagcccaggcctccagccagagtagagactctgagggaggagggggccacagattagggtgtttgggctgactcggttagtggaagtttcaccctccaacaatggaagaaaggtcaagaaggcatca

SEQ ID NO: 48752 - DNA, 1187 bp, Homo sapiens
ttttttttttttggggggaaaaaaggtaaacctttatttggaaaaagagtttaaataacaatttaaaaccccatttcactttcaaaacagaaacaagaaagcaaggaaaagataatctatcaagcatctgccctctgctgtggttagccattttaaagctgcatttcccagcagaagagaacagtgatgggccctagtcctaggaacccacagggcactgtcttgagacccttttaggcagtgtccagggaacagacagacagaatgaatggtggggtgtagacagacctggggctcagacaggcacatgcccagtacccaggaaacaaagtttgaaaatatatacacatagaaaaataaattccctagaacctaggcatggaaagcttctaaccatgaatgcagcagcacaatgcaaactgggtctttggctttcaaaaaaaggaaagaaccttaacccctggcttactgtcccgaactcaagtctcttgaccactgtcttcagtcccactttggaggtcgagtgaggcaagagcaagtcaaatctaccagggccagcagccactctgacttagggagatgtgtggaggggctggccccaggatctcccaaggccacaccccagcaatgaaagattaaggcatgcaggtgacacagtgtggactaaggagtcccctgaataagccagggtacccttctgttaggggagggaaagcagacgcaacaagcagctgaggccttgctggacagagccaatccgcaagtactgccacttcaaattcttggaccagttttgtccaaggccacctttctgctgaggccagtttggcctgagctaaatacccagggttttctagaaaggaaatggaagggaagcgggagatgggagatagcagaaagtaaaaagtggtggaaggagaggaacagaaaattgcttcttaggagtggagaggaaagagaatcagcttaggtcttcagtgcccagctgaggcagctgaagagtctacctgctccttcccctactggaactcctacccttgccccagttctgcaggctgcagagtccagtgaaacaagagtttcctgaagactctttctcctcctaatccttaaatagttttaaacctcataccactaccctagcccaatgaaccccacataagggttcaaacttccgcctccctcag

SEQ ID NO: 48753 - DNA, 512 bp, Homo sapiens
ctcattctaggagacgagtaatagcctgataccaacaccagttaaagacacatcaaggaaaaagaaaaccacagaccaatatctctgatggacattggtgcaaaaatccttaacaaaacactatcaaaccgaattaaggaacatattaaaaagatcatgtatcatgaccaagtgggttttatcccagggatgcaaggatggttcaatatacatacacaaatcaatcagtgtgaggtatcatataaacagaataaaggacaaaacctatgtaatcatttcaattgatgctgagaaagcatctgataaaatttaacatcccttcatgataaaaaccctcaaaaaactggcaatagaaggaacataccacaacataataaaagtcatatgtgacagaccccagctagtatcatactgaatgggaaatactgaaagcctttcctctaagatctggaacacaacagggatgcccacttttcaccactgttatttcgacatagtacttgaaagacttt

SEQ ID NO: 48754 - DNA, 821 bp, Homo sapiens
  misc_feature (1)...(821): n = a,t,c or g
cacttggccggaaggaaaggtgctttggtacaacactgtcctgaacaaaagctccaactgggggacctccccgctgctgtggtacttctactcagccctgccccgcggcctgggctgcagcctgctcttcatccccctgggcttggtagacagaaggacgcacgcgccgacggtgctggcactgggcttcatggcactctactccctcctgccacacaaggagctacgcttcatcatctatgccttccccatgctcaacatcacggctgccagaggctgctcctacctgctgaataactataaaaagtcttggctgtacaaagcggggtctctgcttgtgatcggacacctcgtggtgaatgccgcctactcagccacggccctgtatgtgtcccatttcaactacccaggtggcgtcgcaatgcagaggctgcaccagctggtgcccccccagacagacgtccttctgcacattgacgtgggcagccgcccagacaggtgtgtctcggtttctccaagtcaacagcgcctggaggtaggatccacacacagcacggccctcccagaggccatgtgagggccccttgggggcgggggacagggcgatgtgggggccctgggcaggaccaccagctctcatcccacaggtacgacaagagggaggatgtgcagccggggacaggcattgctggcatnacacacacatcctcatgggaggtcggcccctggntttcctgggccttcttacaggggacacacaccgggtcctgggccagcttcgtnggggaccacaggtttttnagttttnaactttnacccaa

SEQ ID NO: 48755 - DNA, 1679 bp, Homo sapiens
ttttttttttcaggtaaaaccacactgcctttatttggctaaagaacaaaatccaaaataactcagaacaaactaagaacagacaggaaaattacagactgaaccccacttgaggaagacttccccacggactcacactggtgatggggcgaacgttcaagacgaagccagcagtcctttccaagactcttttgtcttttagggatcctcaatacaaaacaacccaactaatccaggatatgtgttcaaaacagtcagttttccccctcaaaaggcgggaaggcccacttcaaacctccaggaacacaacccaagtcatcccagtgttaaacctggtgcttccgttttctgcctcaatccgagcgctaacataaaatcttggcagacaacaatctttcttcttcaagaaaattaacatttaatggtataatcccaagaacatgttctacttatttacttggaaaaatagaagctagggaccactctttatccgatggcagtctattctatgagagaaaacaagaacaatcattgttatgactttgaaaaatagaacctttaaaaatacttatattggtaagcttaaaaaaatatcatcagttaaaaacattaagggggctttctttttctacctgtattggttcaacttctggtgagaatgtgtgctgatagaaaatctagaagctatggcttttagggaattaaagaaaagcagcaaaatataattgatttggaaagattttggataagtgatctggaacaggattaaaaaggcaaagagctcttgaaaataagctacccatagtcaaaataatccaggaagggggaatgacgccctatgaaccactgtggaaagaacatctagagatggtctgaccagctgtgcagcctccaaaaaaaaatcactatcgctcaggtgcagccccccaaaaaccaccatcactcaggtacagcctccaaaaacaccaccatcactcaggtgcagcctaaggagtcatcagtgatcagaaagtggctaagtttccttagcctccctcatattttttctcttcttcaggattttcaacctcctcacatccctaactttcttacccaagcctcagcaatataatggtctttggctctagctatcagcaatagctgcaagagcacaaatgatcccttcctagtcctctaaagtgtcaacctccattcttcagtgcttctgaatctagcataagaccaagctttccgtccggcccaccggaaggcaagtgtgcgccggcacctccccggctctggccttctaatgtctcacacacagaggctctgctctaaggccaacacttctggctctctcatcttggccacatttggcccacccatgttgactgctttctcgtgtgtgattcagggaaacagctccatagcctcaaacgttaatatctgaagatttagatcccaggcattgtggtggtgtgcacacctctaacctcatttaattaggcacagatgaccacattatgcaacttcccaacagctttctccatctacccgtgctagtccagcacctcagaccacatttaccccaaagtatctaacaggccacactataaaagattttagctttcagtcagacaaatagctttcagtcaaaacgattagactgaggtggtagaagctcaccaaaaggggaaaga

SEQ ID NO: 48756 - DNA, 1221 bp, Homo sapiens
cataatagaaattcaagaaagactttaggaaatcagtacccccttctatgatgctgagaagtcaagatattagcttgatataaaagctagatattagcttgatataaaagactcagttctaatcaattagacatttgaaatgtcttagacaattgaaatcaattaggcaattgaaaatatgcacattaagagtcatggataattagaaatacacattaagagtccccaagagaaggactctgggtttccagcatccctttctataatgtaaaaggggtagaatataggtttaaagggagagaccatgaacattggaattttgcacattcatagtcccagggaaaggtaacataggtaattaatatcccttgctgtaaaacaaggaggataaaatggatcctgaacctgaaaagacattgttgtgaatccagttgcccatggttccacattaactatccctagtgcaaaggtccttgactagaggtcatcccactgctgaacactagggaagtgagtggggtctttagtgcacaggaagagggacaaatgcaagtagcacattaacagtacaaaagaaatgtccttgtgattagcaccctctactgtaatgctaagagggtgtgagcagttgggatcttaatttaatggaaaagaccataattgcaattatgcgcattaacagtcccaagtaccccctgctgtaagacaaaaggaatatgaggggatgagaccccagactaacagcagatagggaaattgcattttgcacatcaataatttctggaggaggggcattaggtaaccagcaccctcttgatgtaaagcaaagatgatgcagggaccttgatataaaagactcagttctaatcaattaggattgtgcacataaactgtcctagtacagaggtcttgagtagtaagggtcccctgctggaatacaaagggagtggaagggttagtgcacaagatcgtggacaaatacaattatgaacatcaatgcacaagaagagtccttgggtgatcagcccacattgtagcgtgcaaataggatacagagtccctttctaatggacaggactctggacaattgcaactgtgcaaattaactgttcaagagctgttattgaataatctgcactcgttagcaacatcccacagaaggtgggatggggtgagaatccatttttattgcacagaaccatgaatatatgcaattatgca

SEQ ID NO: 48757 - DNA, 371 bp, Homo sapiens; identical to SEQ ID NO: 8403

SEQ ID NO: 48758 - DNA, 1977 bp, Homo sapiens
actcactatagggaatttggccctcgaggccaagaattcggcacgagctcggatataccttctcagaagctgcacaggaggaaagcagtgacaaagaaagaagttgtcattctttgcacgaaactggatggcttctacagggagccaggcctctgatatagacgagatttttggattcttcaacgatggcgaacctcccaccaaaaagcccaggaagctgcttccaagcttaaaaactaagaagcctcgagaacttgtgctagtgattggaacaggcattagtgctgcagttgcgccccaagttccagccctcaaatcctggaaggggttaattcaggccttactggatgctgccattgattttgatcttttagaagatgaggagagcaaaaagtttcagaaatgtctccatgaagacaagaacctgggtccatgttgcccatgaccttatccagaaactctctcctcgtaccagtaatgttcgatccacatttttcaaggactgtttatatgaagtatttgatgacttggagtcaaagatggaagattctggaaaacagctacttcagtcagttctccacctgatggaaaatggagccctcgtattaactacaaattttgataatctcttggaactgtatgcagcagatcaggggaaacagcttgaatcccttgaccttactgatgagaaaaaggtcctcgagtgggctcaggagaagcgtaagctgagcgtgttgcatattcacggagtctacaccaaccctagtgggcattgtccttcatccggctggatatcagaacgtgctcaggaacactgaagtcatgagagaaattcagaaactctacgaaaacaagtcatttcttttcctgggctgtggctggactgtggatgacaccactttccaggcccttttcttggaggctgtcaagcataaatctgacctagaacatttcatgctggttcggagaggagacgtagatgagttcaaaaagcttcgagaaaacatgctggacaaggggattaaagtcatctcctatggagatgactatgccgatcttccagaatatttcaagcgactgacatgtgagatctccacaaggggtacatcagggatggtgagagaaggtcagctaaatggctcatctgcagcacacagtgaaataagaggctgtagtacatgagcgagctagagaaatcaccaccgtttagaccaagctgtaaggccctactacagacagtgtttaacaagtaaacttacaagaacccaacacaattcccagaaagtaacaatagccagaggttgaagggcggggtagaagaggggggaatgttgcagcgtaatccttcataccacctggttcttgatattctgccgcctgttcaagttcaagaataaaagcgacagcaggacccaaatgcagctcccaacccactccccaggctagacatgcttgtgtccacacagcacaccaatgtgatacttccactgaccggctgcagctctgcatgaaggactcggggtctggatgccatggaatcactgtggctcttgttgcagttttgtactctatacttggtttttcaattaagcttaatggcttttttaaaacatgacttgaagctctagttttctagatcttttacagtgtacagtattttacataactaagctgtattaaaagcttgttcatttacttgccaggaccctggctctacttttagagtcattgtaagaaactctaacttgcatcaaggtactaataagcttaattttaataacccaaagtttaaaggttccgatctttctccttggggtggagtgatctcattctcaggacaaccgtttacttacctgattcctcggagcattatcaacttctgctctgttgtcctgaccatacatatgtcctagaactacagttaagtgtgttgtggaattttagttttgaatcctgtataaaagaactccaagacct

SEQ ID NO: 48759 - DNA, 573 bp, Homo sapiens
  misc_feature (1)...(573): n = a,t,c or g
ggccaagtggcttctcgggaagctgtaagaatccacagggcattgtaagatggagggaaatattaagttttcttcgtaaagaggtgaggggggcgagagcagcaaaggacactggaaaatgagaagcatggatgggaagtgttgcattgagcataatttggaggtaaaatctccaacaccgtaactgagtggcctggggacctgatagaaagccttgctcaggactaaggcagagttcccagttatatcgcagatacaaagagaccaggaacacgcttgtaatcacagcacttagggaggctgaggcgggtggatgacctgaggtcaggagttcaagaccagcctagccaacatggtgaaacccccatctctactaaaaatacaaaaattagccaggcgtggtggcacatgcctgtaatcccagctactcaggaggctgaggtgggagaatcgcttgagcccgggaggcaggggttgcagcgagctgagatcgtaccactgcactccagcctgggcaacagagtgagaccctgtctcaaaaagaaaannnnanannaaaaaaaaannnttttt

SEQ ID NO: 48760 - DNA, 2536 bp, Homo sapiens
  misc_feature (1)...(2536): n = a,t,c or g
ttttttttttttttttttacatcaaaatgtttattttttggatatagacatttaaaacattcatctccaagaacagcttcaatcaggtatacaataagaaatagactttaaatcctaatacagaaaaggtaacagaatttttttgaatgctgctgtagacactagtgttagaaaaaaaagtttataaatggttttgcaccaaaaaaatatgcaaagaaacttgaaaatagaaattgtttgccatttgttgctctggttgctgtttaatatagacccagtgactgattgtcttcagcacacatctaatttggccatttactgcatttggctaatgtgatcccaaaatgtgatctagatagtgcttttcactggaggattgacaaacacgctacatacattagtgaatcttcataccacctcagtgaggtagcttagaaatattatacagaaattgaggcacaaagaggtaagtgacttgcccaaagttcccaacagcacagtccctggaagaggaggtaactctccacacaggactcatgtgccagaaagctggacagggacaccctcatgtagcatttagtaaatacttagataaagctgtagctgatcctttgagttttcagtaccctaaagtagtaggggaagtcttttgggcaactctcctacccttggctctcaactttcctactgttgttctcttatgaactccttcacctctttgaagactgtagcagccttcaatggggaccagacctctcacctttattctgatctgtcatctatttggtagttttgtttgtttgaggtgtgtccgttggacagacaatggtcaaaagcaacaggattgggaaggtgcctatcagggtagtaactgcttattttctctgatcagtttgttgaggtgtcacctctctcatgcttttccagataatacagaagcaaaaaggaattgcctttaagacaaattcatatttaaatcctaatgctccatacagtgttggtaaatgatttcaaggaatatgtgatcaatgttatttgacttgaaaaaattttctttcctagatgggggatttggagcaccaagggtaaaaggtgccctgccacaagaaaagctcaagagttgccaattatgctgtttacttcttctggtttaatagaaggaaaacacagtggtattaaaactggtcatgagcagcaaaaattcaggaattaaaaaatcagcactaaaaagactacagtataactggatagagaattctttaaaaagaaaggcatgaataaaatgggtattttaaattctttcctcctgcgaggaatactttcaaaaagtacatagtaagactaagataccaagttgtatactaatatttttcaggccttgggcctcaaatatatatatttatatataatactccagtgtgaacagcaattcgatgaaatgtaaaatgtatctttttttttttaaatcacacacaagtattcataaccacagggttcaccagaaatctaaagcaaggagacactcactcatatagaaatggagttactcttccacagatcgttctgatcaaaggttttggaacagaaatgaattaatgatttttttgtataatatccaacatgtccactatcaaatacatttagtatgaaaaaacagatgaagaaaaggaacatacattaggacaaagtatctggttaaaatgctgttcatttaaataaagcccactctccttactttagagctccttggtgaaatggaggtgagtttgatggagtgcagttgatgaccactgaaaaacacgagccctttcaacaatgttgcaacactgttagtttttgggtttaaacacacacacacactcacaaatgctaagtgtacacttaccaaattctgcggtcagcttttcccaaggactantgggggaaagtttcaatgctgcaaatcctcgaggttgccctaacacccccaccttgtttccaaatgactcatttcacattttgttttgagcactggcagtatccctttacaatgcagaggtgcagtgtanacaagtgctacatagctgtagttttcaaacaaaaccacttatatcattgtgcttaagtggagactgtagttacaatactgacattcgcttactggccttgtattctctgtaaacaaggaggctgtttgcaacaaccacttcaactctatttacagaagggttcccacggtatacacacaggcacaagggttggtatgctttctaaaagctgtgcatgtgccttggtctcttaaaaagacagtgcccnaagnngganccnatgtgcaaacaacaaattaacgacacagagtagctcaagcagccatttngctcccaagtcgtctgaagaactttgccagattaagccaggccccagagtgcttacatccacttgcatttcttcttttcatcaaataagacttttacatgcaagagttgtttctgagcttcttccagccctcgntctctttctagtttatttagaatctcatcaaaatattttacgatgt

SEQ ID NO: 48761 - DNA, 1066 bp, Homo sapiens
ggaggaaatcagtgcggaagtttctgcaaaggcagaaaaagtacatgagttaaatgaagaaataggaaaactccttgctaaagccgaacaggtaggggctgaaggtaatgtggatgaatcccagaagattcttatggaagtggaaaaagttcgtgcgaagaaaaaagaagctgagaaaactgtcgctgaaaagcaggagaagagaaatcaggatcgcttgaggaggagagaggagagggaacgggaggagcgtctgagcaggaggtcgggatcaagaaccagagatcgcaggaggtcacgctcccgggatcggcgtcggaggcggtcaagatctacctcccgagagcgacggaaattgtcccggtcccggtcccgagatagacatcggcgccaccgcagccgttcccggagccacagccggggacatcgtcgggcttcccgggaccgaagtgcgaaatacaagttctccagagagcgggcatccagagaggagtcctgggagagcgggcggagcgagcgagggcccccggactggaggcttgagagctccaacgggaagatggcttcacggaggtcagaagagaaggaggccggcgagatctgaacccgtctcccgggtgctgtaaatagtctgataaacgttcacacagtctaaaattaccctttatatttgctgaatacaactcatcttttgtagtttaaaatttctattgttttggagctagctgtgagtttctagaagtgtacagagttgctcctgtgttcccgggtcatgttgagtaggaataaataaatctgatgctgcctcctgaggctgcggggggtttctgctgtcctctgcgtagaggcttttcactgtgaccctgtgccagtgccaccagcacctcacagaaaccgtgacttactcgtgggtcacgtcttgtcttctggcatccagtagatggcagggcacttcctgtcccctgcatctgactgacgggacccaggtgtgcatgggtgtttgtttgctcgctcccacacaaccttctgagtgtctgagctgccatctcccatggggaggagggag

SEQ ID NO: 48762 - DNA, 1624 bp, Homo sapiens
tttttttttttttttttgtgattttgggttatttattttgtgcatctgtggcaataaatgagatctcagtggtggtatggatttgactgatctctgtaactgtgtatggcaaaaggaccggaaaatgaaaaccagatcccagtaaggggtagagaggggccaagagaactgaacatctgggctgccggagaaatcaaagtctaggaagtaagaggtaagagtgtactacaggggacataccccaatctctttgctccctccctcttccttcctctcccagagacccaggtccctgggacttatattggatctgtctctgaagctgaaaaacaaaaggcagaggagacagtcggctctaagtgacccaatctcaagccagcttttgtcaggaaatcctaaataacaggagaagggtgggaagaaaggatatgattatttcttattccattttccataagaggtgagaatgacaaggacctcttttctaactcctcttgagggtgtgagaagggttagcaggaggagaagggctgggagctctgaggtctcctgtaagacctcatatctcacaggcaaggactaagaattaggattaaatattttagtgggatagctctaaaccaggattagcaagcaaagttagggcgcaaattcctggaatctgactgggaccctggcagtgaaagctgggactgttgaaaacccaatttaagtgttcgctactcatgttgagagtgcagggccaagataactagatcccaggacaggcagtttggcagtgagaacaaaaggaagacactgggaccaaggtgcctagatccctcgagagagaagggtgggtattgggaggaaaaatgaggactggggaaacccaggaggctgggttctggaatagcagcaagtcagaatttcaggatctctgttcgtcctcctcttcctcttccctctatcaggcagaagagagggaaggagggggctggagaagtagccacatggatacatttagggccagacagacacaggaatgctggaggagagagggatttagtgctgcattggccctggagggggctgggaagggtcaggaggctggggaggggtggtgggggtcggtcctagggttgcacgacgccgtcctttgcggtggccacgtacacagtgtgtatgaccacagccctcttcttcctcctcatcactttccgtggagctctcgccaaaggcccgaggtttctcataaatacagcagcatttggatgagcggcggcccatgtgttcattgtccacagtgtcacttgtccattctacctttttctctggcttccgtttccgaagtttgatggtaaggctccggttctcgggctcggttgtcacggtaaccgttgtctcagtgacggtctcgctcagcccagcccctgcctcggccatggctaaggctcaggacagggaggagaggaggaagggggatgagacacccttccctttttctgtcgctgaggtctaaaagaagcggtatcggattcagagtggtagccaggatcctccaccttctttattccccctcctcctgggcctccgcttctccacccctggggataacctggctaaccccacttccggctcgccg

SEQ ID NO: 48763 - DNA, 1327 bp, Homo sapiens
tttttttttttttagggtatacttcaaacacaatttatttttaatttatcaaacaaaaatcaacaatttaagtcactgattggcaagctacagcctgcaggccaaacccagccctccacctgcttttgtaaataaagttttcttggattacagccacactcatttacacgcatattgtctattgctgcttttgcatgtcaacagcagagttgagtagatgtgacagaggccgcatggcctgcaaagcccaaaatatttcccgtctggccctttacagaaaaagtttgctgacccctgatttaagtgatcatgatttaaggacagggtgatatctgacaaaagtatcagtaagaatggggacagtgacccatcaaatagtaagatccccgcaaacagaagggagatcaagaagtgtatatttgacatcgtttctttgacaaacgttttgatataaattataattacttcaactacacaatcaaataatttaacaagaaccttttcctccctgattcagtcactttattatttgagcaagagaacagattgctgcttagtccaaaagaggtcacatctgaaagggtgaagaacagcttaaccatctcttatctgctggttcttgaagcaagctgagagttgctgtttgtcttccagatgcccatttcctcattgcagcagctgaagacttgctgtagccatataacacaagctgggaagcaatgaactcctcctcatctctctgctcctaggctccatgattgttctatttctttccggggaagggttactgtcatttgttttgttttgttttgtttttctgagaaacagtgattggctcagtcatgattgctattgagtttgtatgctattggcatatcaggcacttgcctgactagaaaagttttatgcaataagttcatgtttttatggtgccagatggaagacagaccttcaagttgagttcccaggattctacacactcagaatctcaaaatcttcctccagatcaaactcctccagttgctcagtagagtcaatgaattctgccccagtggttgtcacttctggcttggctggaggtacaaagggaggccagtgtgatggatgtttctgaactaattcaaacatccttaaattctcctttagaatttccttctgaacaaggctacaccagttatcaaagtctttttcttctttgcagaaaaatcccaatgcaactgaaggatccaggtttaggatgttcattcgctgtggggactgcaggcaatggaaagtctggtcattaaccgttccattctcttcagtgtcaacaaaggtctgggttagc

SEQ ID NO: 48764 - DNA, 2082 bp, Homo sapiens
  misc_feature (1)...(2082): n = a,t,c or g
ggttccacctggcggctggctctcagtcccctcgctgtagtcgcggagctgtgtctgttcccaggagtccttcggcggcatgttgtgtcagtggcctgatcgcgatggggacaaaggcgcaagctcgagaggaaactgttgtgcctcttcatattggcgatcctgttgtgctccctggcattgggcagtgttacagttgcactcattctgaacctgaagtcagaattcctgagaataatcctgtgaagttgtcctgtgcctactcgggcttttcttctccccgtgtggagtggaagtttgaccaaggagacaccaccagactcgtttgctataataacaagatcacagcttcctatgaggaccgggtgaccttcttgccaactgggtatcaccttcaagtccgtgacacgggaagacactgggacatacacttgtatggtctctgaggaaggcggcaacagctatggggaggtcaaggtcaagctcatcgtgcttgtgcctccatccaagcctacagttaacatcccctcctctgccaccattgggaaccgggcagtgctgacatgctcagaacaagatggttccccaccttctgaatacacctggttcaaagatgggatagtgatgcctacgaatcccaaaagcacccgtgccttcagcaactcttcctatgtcctgaatcccacaacaggagagctggtctttgatcccctgtcagcctctgatactggagaatacagctgtgaggcacggaatgggtatgggacacccatgacttcaaatgctgtgcgcatggaagctgtggagcggaatgtgggggtcatcgtggcagccgtccttgtaaccctgattctcctgggaatcttggtttttggcatctggtttgcctatagccgaggccactttgacagaacaaagaaagggacttcgagtaagaaggtgatttacagccagcctagtgcccgaagtgaaggagaattcaaacagacctcgtcattcctggtgtgagcctggtcggctcaccgcctatcatctgcatttgccttactcaggtgctaccggactctggcccctgatgtctgtagtttcacaggatgccttatttgtcttctacaccccacagggccccctacttcttcggatgtgtttttaataatgtcagctatgtgccccatcctccttcatgccctccctccctttcctaccactgctgagtggcctggaacttgtttaaagtgtttattccccatttctttgagggatcaggaaggaatcctgggtatgccattgacttcccttctaagtagacagcaaaaatggcggggggtcgcaggaatctgcactcaactgcccacctggctggcagggatctttgaataggtatcttgagcttggttctgggctctttccttgtgtactgacgaccagggccagctgttctagagcgggaattagaggctagagcggctgaaatggttgtttggtgatgacactggggtccttccatctctggggcccactctcttctgtcttcccatgggaagtgccactgggatccctctgccctgtcctcctgaatacaagctgactgacattgactgtgtctgtggaaaatgggagctcttgttgtggagagcatagtaaattttcagagaacttgaagccaaaaggatttaaaaccgctgctctaaagaaaagaaaactggaggctgggcgcagtcgtcannnnnnnnnnnnnnnnnnnnnnnnnnnnnnnnnnnnnnnnnnnnnnnnnnnnnnnnnnnnngatgagatttttaaagtatgtttcagttctgtgtcatggttggaagacagagtaggaaggatatggaaaaggtcatggggaagcagaggtgattcatggctctgtgaatttgaggtgaatggttccttattgtctaggccacttgtgaagaatatgagtcagttattgccagccttggaatttacttctctagcttacaatggaccttttgaactggaaaacaccttgtctgcattcactttaaaatgtcaaaactaatttttataataaatgtttattttcacattgaaaaaaaa

SEQ ID NO: 48765 - DNA, 622 bp, Homo sapiens
caatttacctattctttttttaaccttttcttacattttattagcttacagattctgtcagtatgtctcatgtatatattatataatatttatatatcagtacaatgcctctctctaggggactcgcataggcttaagaatggagtcctggtgaattttccattctggcttagagtccttaaatggtggtcaggtgttttcccaactgtccagtggaccttaggccctttggcccaagtgcaagccttctgccctctgctgcatgggcagcgtggctcagctagggaaaccaaggcagaaagggtgacagtgaggctttggcattgtaggtaggcgatgtggtgtgcaggcagcaggcccaggagctctgctgaggtcagagggtgcctgcaaaagccagaccctaaaacacttacagaggggaggataaggactccaggtttctggccggagcctcactgagcagaaagtaggttccccagggagaattccaacacagggaccctgcagaatagaacagggctgggcagagcagcaagactcaatccccagcccccaaaaaggcatcatgcaggtaagcaggtctgagataaggctggtcccagcggtactgtgccgaaat

SEQ ID NO: 48766 - DNA, 876 bp, Homo sapiens
  misc_feature (1)...(876): n = a,t,c or g
tttaaaacttccacatattcccnggaatccaaacggccacatgtacatgcagggtgagcaaatagagaagacttgagaaagccttaaactctcacctctggctaaccatcaggcttgctcaaataggaagtgaaaactaaggtgaatttgttgcttagctgaatgttgaaggtgtgccccaacacttacacagagcctactggtaaagacagagtgttttctttttgtcttggtttcaggcatttaaggaaatctgtttctcttttggatcactagctgcaaattaagctaacagaacaggagctcagctggtcacacacagcaacgaatacagactttataaagttcagaaaagttaccaaacagtggtaaccataacaagtaccaacaatgaactatggggagggaggagaatctgatttccagagttaccacattataatactattcaaaatgtcacatttttagcaacgattacatgacaaggaaaaaccagaaaagtatggcccatacacaggtaaaaaaagaaattaatagaaactacccctgaagaagcacagacttcggatgtacaaaacaaagacttttcatcaactcttttagatatgctagaagagctaaaggaaaccatggacagagaacaaaaaaaattaggaaagcaatgtctcatccaatacagaatatcaataaagagattgaaattgtagaaaagaaccaaatagaaattctggagttgaaaagtattataactaaaactgaaaattcactagaggtattcagcagcagactggagaagtcagaagaaagaatcaacaggcttcaagataggtcaattaagattatacagtctgaggagcagaaaggaaaaagaatgaa

SEQ ID NO: 48767 - DNA, 328 bp, Homo sapiens; identical to SEQ ID NO: 8456

SEQ ID NO: 48768 - DNA, 617 bp, Homo sapiens
ctctgattgtccatcatctcattcatttaattggaggaaagcaaataaatatcagctttgtgcacaaggtgtcgaagagcctaacaatactcaaaattcacatgataaaataattgatcctgaaaaacgtgttcctactcaaggaatgtttgataaaaatgggataaagggaggtttgaaaagtgtttctttattcacatcaaagttagcaaagccatccactatgtttgtgtcatctacagaggagttaaaccaaaagtctttttctggaccatctaatttgggtaaattcaccaaaggcacattattaggaaggacttcatattcttcgatcaatactccaaaatcacagttgaatggattttatggaaaccgatcagctggtagcatgcaaaaggcctagagcgaactcctgtgccaccagaagcagttctggagaaagcttagctcaatccccagacagtagtaaatctattaattgtgaaaaaatggtaaggtcacaaagtttttcacattccattcagaattcattcttccaccttcatctataaccagtcacattcctttatagagctgtggatcttacaaggcttatcaggaccacagctatccattag

SEQ ID NO: 48769 - DNA, 899 bp, Homo sapiens
  misc_feature (1)...(899): n = a,t,c or g
ttaaaacaacacatttgctggcccacagtttttgagggtcaggagtccaggcccagcataactgggtcctctgctcagggtgtctcagaggctgcaatgtaggtgttcaccagagacataggcatcactggggtcacactcatgtggttgttttctggattcaattcctcctgggctattggccaaaggctatactcatgtaagccatgcgagcctctcccacaaggcagcttgcttcatcagagctagcagaaaagagaggttgctagcaagatgaagtcacaatcttttgtaatctgaatcaaaaaagtgatatctcatcactttggccatattctatttgttagaagtaaaccacaggtcccaccagctccatgggagtgaccacctcagtccagggaaaacagctgaagaccangatggtgagctctgattgcttcagttggtcatcaactattttcccttgacttgctgtcctggggatggcctgctatcttgatgatagattgtgaatatcagggaggcagggatcactgtggaccatcttagcagttgacctaacacatcttcttttcaataatctaagaacttttgccactgtgactaatggtcctaatattaagctgttgtttatatttatcatatatctatggctacatggttatattatgctgtggttgcgttcggttttatttacagttgcttttacaaatatttgctgtaacatttgacttctaaggtttagatgccatttaagaactgagatggatagcttttaaagcatcttttacttcttaccattttttaaaagtatgcagctaaattcgaagcttttggtctatattgttaattgccattgctgtaaatcttaaaatgaatgaataaaaatgtttcatttt

SEQ ID NO: 48770 - DNA, 790 bp, Homo sapiens
  misc_feature (1)...(790): n = a,t,c or g
tttttttttttttttcacagtggcagattttctttaatagatatatttcaaacagatacaacaaattaaaaaatctaattcacggcaggtaaacatgggtgctcaaaaagttccacatagacatttacacttgggccatcagtatttccctcacattcccttttgttaagtcccatcttcgcagtggcagtacaggagaaatctccaccgtcaccgcacaatccaccaggcgcattaccacctgaagtgaaggtctcatctcgaaggtgcgctcagccataaaaagaaaacatattacagaaaggaaaaataagtgtgctcttcccacccgcaaagcggtctcaccttcagttctagctttctttactccaaagtcttctgagtcttccaagcatctctttcgatttgttcccacactaatatgattaggaaatacattctgatgacccccatttaagatgccattgttatagaaatggttcagatgacaattctggaggttcaagagaaactgggcacactcttggaaaccctgggtttgtgcaatgtctgctgctgtcaggccactggcatttctcaggctcaacagtatgcctcgtgtgcagaaaggaagcgatactgaacattcaatgccacaactgtaaggttttcggagaagcacctgtggcagtttcagcagtttctatatggaatctcgtgccgaattcttggcctcgagggccaaattccctatagtgagtcgtattaaattcgtaatcatgtcataacgggtnttccaaagnnnangggt

SEQ ID NO: 48771 - DNA, 844 bp, Homo sapiens; identical to SEQ ID NO: 8481

SEQ ID NO: 48772 - DNA, 499 bp, Homo sapiens
  misc_feature (1)...(499): n = a,t,c or g
gggaaaacagctatgaacatgaatttacgaaatttaaanaacgactnacctaatagggaaatttggcccctcgaaggccnaaaaaattcggcaacgaagtaagccttcgcggggcaaaatggagctcgaggccatgagcagatataccagcccagtgaacccagctgtcttcccccatctgaccgtggtgcttttggccattggcatgttcttcaccgcctggttcttcgtttacgaggtcacctctaccaagtacactcgtgatatctataaagagctcctcatctccttagtggcctcactcttcatgggctttggagtcctcttcctgctgctctgggttggcatctacgtgtgagcacccaagggtaacaaccagatggcttcactgaaacctgcttttgtaaattacttttttttactgttgctggaagtgtcccacctgctgctcataataaatgcagatgtatagcaaaaaaaaaaaaaaaaaagtcgcagc

SEQ ID NO: 48773 - DNA, 856 bp, Homo sapiens
caacgggcaaagagccagttttttgaaaaggtgcatgaagaagttgtgctcaaaactcaagaggctgctaaagaaaaagagttccaaagtgtacctgctggaccagctggagcagttgagagttgtgaaatctgtcaagaacaatttgaacaatgggatgaagaagaggaggaatggcatttgaaaaatgctattagagtagatggaaagatttatcatccatcatgttatgaagattatcaaaatacatcttcatttgattgtacaccatctcccagcaagacaccagttgaaaaccccttgaatattatgttgaacattgtcaaaaacgaattgcaggaaccctgtgacagtcccaaagttaaggaagaacgaattgatacaccaccagcttgtacagaggaaagcatagcaacaccctctgaaattaaaacagaaaatgacacagtcgagtcagtttaaataaaatgagaaaggtatgtttttcttttttaaaaaagctgctgttggatctagaaggtgaagaatttttttatgtatatatagacatatctatataaattgtctggctgaggcagggccttcagctatcatttggttaataaatacattttagtatttgcatttcctactgcctgcagagtttcaggtgcttgttgtgtgaaagttctgtagatgtgtgcaaatttaacgaaatgaaattgtatgtgtaaaaatgtacgatttttcactgtgcaactgtaaattataaataaaaaatatttttgctattcatggagtgtaatatttatgcacaccatcaaatagtttctgtactttttattgggtagaaatggaattgaacagcaacctcaac

SEQ ID NO: 48774 - DNA, 1253 bp, Homo sapiens
aaaacaccagtgatttagatttatttttattgacaaggtttataagaacaaatatttaaaatcgaaggccaattattaggtctcatttagttgcttattttgttcacttgtatttacctttccctagtgtctgagtaactatcaagaaacaaacctgtgaaaatacctgttaacattcaacatatatttttatatatttctgttctatgatgcaaagatatttttcaacacttaattggtgcaacaaatgtgtcattgtgtcataaacagcatgttttaaaattcagatttaataaactgatttaagacagtaaatttgaaagacaaaattaagtctcattcaggagtggtccattatgttgatcatctagaatcaacactgattaaccaaactctgaaagccaagagccccaactccagagaaacattaaatttctttaatgtaaaagtatattatttttgagacacactttgtcagagacatccacgattgcctgcacattatattctggcattataatctggtactttagtcataatcgtgaagctggctaggtttccagtaaatatcagcattttaatatgggcaaaagcagttaataaaaatcagttcatttactgtaagccaaatgtgcttgtacttaatcccaccctttcccaaagtttttgaagctttgataggttgatttttggtctgtccttatataatataaaacgtacctacagacacttttacagagttaatactaaaattacaaattgatgacactttcgaggcaaagcagggtaactgttccttcagtgttgccatcactgaattgactttcactgttccatcatactgtttggctgaacactgacattccatagtctacaactataaagatacctacctatgtgagtttaaaaagtgatctgcacaaaagaaataaaaaaactttatatacaaccaattgttttttaaaaatacaaaaataacatctgtcacttttgtcatgctgacaatttgacatatatacacatgcaggagaaaagttccaattcagtgatctggacaactgtagcttgtatatttttaatatgatggacacactgccgctgaattttcacactgacagagatgtgtattcaaaatatttcatatactaaatactacaatctctgtatgtataaatcctggtgataatagtttttgttctacttgattaaaagtatgccttaagcaagctaatattaagtgcactaaaaaccac

SEQ ID NO: 48775 - DNA, 2351 bp, Homo sapiens
cggctccgggagctctgtcaacagtggctacagcccgagacccataccaaggagcagatcctggagctgctggtgctggagcagtttctgatcatcctgcctaaggagctccaggcccgggtgcaggagcatcacccagagagcagggaggacgtggttgttgttctggaggatttgcagctggatcttggagaaacaggacaacaggtggacccagaccagccaaagaaacaaaaaatacttgtggaggagatggcccctctgaaaggagtacaggaacagcaggttcggcatgagtgtgaagttacaaagcctgagaaagagaagggtgaggagacaaggattgagaatgggaagcttattgtagtaacagactcttgtggaagagtagagtcatctgggaaaatatctgaacccatgggaggctcataatgagggctctaacttggaaaggcatcaggccaagcccaaggagcagattgagtataaatgctcagaacgtgagcagagattcatccagcacttggacctgattgaacatgcgagttacacacacgggaaagaaactctgcgagtctgatgtgtgtcagagttccagtcttacagggacataaggaagtcctctcttaggagagaaaggtcatccagtgttcatggagttttggggaaagcctttcagaggagttcacacctcgtcagacatcagaaaatccatcttggtgagaagccttatcagtgcaatgagtgtggcaaagtctttagccagaatgcaggccttttggaacatctcagaattcatactggagagaaaccttatctatgtatccattgtggaaaaaattttaggcgcagctctcaccttaatcgacatcagagaattcacagtcaggaggagccctgtgagtgcaaggagtgtggaaaaacctttagtcaggccttactcctcacccaccatcagagaatccatagtcactccaaaagccatcaatgtaacgagtgtggaaaagctttcagtttgacctcagaccttattcgacaccacagaattcatactggagaaaaacctttcaagtgtaacatatgccagaaagccttccgactaaactcacaccttgctcagcatgtaagaatccacaatgaagaaaaaccctatcagtgtagtgaatgtggagaagccttcaggaaaaggtcaggtctttttcaacatcagagatatcaccacaaagacaaactggcttgatgaggtgttctctccttgtagaacatcagagaaggcacattgactagcaaacagcactttaggaaaagtcaccgtagcccactgtggcatcagaaaattcttgggggctgagttggaggctccctgcctctattctctctcctttgctttccttgaagtcagctttggaccacaataatttcactgtagatgatatgctaggatcaaagttaaacagcattcttcactgcaggacatctcagagcatgtaacataactgcatgattatatactctaagcaatagagagcttcatgactgagtaagagttttgaagtcagcagtgaatcaagtgcccacagatttgcaggcttaagcagaacaagggaagattgatatttttggatatgctatagcagctttctcctatgaaataaaactgatgatgtttggaagtatactactctcaaaggtgtctttaaagtacaggttaatggtgaacattttcccccagtggcttcacctcattcctcccactggccttcccccttccttcccccagtggagcttttcaaaggcaaagataattttcgctggtgaacttcagaacttgccttcagggttagcttcatgtaattttaccatttcccatccccattccccaccacattatgtcaagattcaagttataaattaacgttttacttagactttgaaagagatttcatgagtaatttgaatgaaccttgctgaattaatctgaatagcaactgtctgacttgataactccagtgccagtatagtggctgctgcatagacactattcagtaaatgtctgatgaaagaaattggactttttccctttaatactgatgatgcaattttgaaatgttgcttgttctggaatacttcggaagttaaacaataaagtcagcttggagaggagatcatgatctttatactgtgaatagcagaatgtcacagatgaagaatattaaaattaggggcgtccactccaaaacatatcaccagagtgacaacttcagccctcagcctctgcaatccatatatatcctggtcttgggagtccatagaatactgtttccttctaataaaggtttcaaacaaaaaaa

SEQ ID NO: 48776 - DNA, 2253 bp, Homo sapiens
  misc_feature (1)...(2253): n = a,t,c or g
tttcagtgtggaaaaaaatctttatttcaaagtaaaatgcacaaagtctcatacagcagataaaatcagtgttactgctctcagatgttaaggttagcaacctttctggcatatgctaattcatcatgaactcccaatagctgaactgaatggcttttaagtacagctataaggtctcatggtataattccttttgttgatgccagtgacaggattttaaaagctacattccattaaaaattaaaaatacagcagcttttccaggggaactagatcccaaaattgtacccagaactcttgtctaagatattaagttaaatatcttgcatgtatatatcattatagtaaatcagtattcttgacaaccacagtgtaagaaattaaactttggctaattgttttccccatcatgaaatcagtcttttgctgtcttcataaataaattatgaccaaacattacaaatactttatacatgtttactgatttacagagaatatttaataatcagaactcaccagtttcaatagtattgtacattaaattataagcaatataaccactgctacaaaagttatctaagttaatccaggataaaaactgtgtctagagtttaaatacattgaaatagaaaaaaaaatagaaattagaaaatagtcttcaagttctgaaaatctagaagaattctccaacatctgctctcttatctcgacatttgcttctagctttggttcgagctttgaaggctgcagagttatataaatgcctttcgaaacgagaaatcttcatcgttttaaggcgttgcagcatcaaggcatcactgggggtccaagtttcaaatacatttcgaaggaattcatttgactgcaagtgggtactgcatccctgatccaagaacctccttaaaggtgtcataggtgtgtttttttacccagcaatcaatatacatgcgttcaggaccaaatttaatggtttctgttggaaaatcccgttcctccactgccctcaggacatctctgaaaactgaccgctgctttctcttgtccactttggcccggtgtttatttccatctgttgccaaggccctaagcatctgcgtcaaggactccatgtcttcataaaaaaagtcactctctattcctctggccaattcaaagagaagtgccaaagattcaccagcagctattctcatgtttacatcatcacaagagaggaggcttggaagcttatggaaatgcatctcaagctttttcttcacttcattgattgggcatatggtcagcagtagtgtccatgcaagaagagagctgatatgaagcactgtattaggagtgctgcaaataacagtagtgtctttctctttgagataggatttagtgaagatattttccaaacattccagagttgagtatagttcagtaatgtcatctgtggcaataaaacagcaaacaccaaagcaagttgcacaagtttgcctagcctgcatactagctgacccatcacaaatgattttctttaggattggtccaagagttttcaaaatctcttcactttcaattccagggccccagctgaatacaaagaacagatgctaacgctgcagctgcacgttgctcatcactcttaccttttttcaggcagcgttcaatgctatcagttaaagtcattctcctttccagaataaattcatacagcatttttgaagccagtgcatttttaataccttcaagagctgcttgccttgtcttcgcactcttatccagggttaggtcaattaatcccttcaacttgtactctaggtcttcttgagttccttcctcatcaaggacttctggtccatcttcagcaaaactggaaggatcgctataaccactgcaatggctcattgtttcaattgatgcatcttcatcactaaaaggctgaacatttcgatgctggccacctgctgtcgccgccgtcgctgcggctgctcctgacccgccgccgccagcactgctaccgcggtggggagtgttccgcttcttgttcttcggcatcgtgggacgcccggtgccgcccagagtcggagcttagcgaggatcagccgatggagctgcactttttactcgtgcgtctgtgcggcgggcggctgagaggcgagtcttcggctaacaacagagtcgagaagcggcgggggtaagagtgggcggtggcggcagcagaaatccccgtgaagagctgtgatcggaaacgatacatgttttatnctgacgagg

SEQ ID NO: 48777 - DNA, 392 bp, Homo sapiens; identical to SEQ ID NO: 8505

SEQ ID NO: 48778 - DNA, 402 bp, Homo sapiens; identical to SEQ ID NO: 8507

SEQ ID NO: 48779 - DNA, 1797 bp, Homo sapiens
  misc_feature (1)...(1797): n = a,t,c or g
ttttttttttttttttttcaataatggtaaacatttattgagttctttgtaaagcctggtactatgttaaacattctatatacatggtctcatatagtccttacgagtcaatgtggtaggtaatcctatattcctattttagagatgaacaaaaaaaaaggctttgagaatttatcaaggacccataataatccacagaacctaaattcaaatccttttgtccaactccgaagacttatctcttaaccacttcataagattaaaacgctgaaggggcacatactgttatgaattttaatggctcctacacatgcatcctttatatatacccttcatgatttttcaaaccatgtcagattctcatttttcaattctcaagatacagcatcttcttatagcatcttcaccacctttcccgtttactgtcttaaatgtgcccaatctcggaaatatcaataacaaaacaagcttgttgacattttgtgaaacatttaaggagacttccaaggaatgtaacatatgtagactttgtgacacatatattggcatgtggtcacagctctgttctgagatgagatgttactattttggctttgagacatgaaggatatgacatttaagtctaaacatgcaccagccaatcgtgaaaagtcagcatactcataatccaaaaagcttcaatagaaatttagatagttatagaaggtgcattactcagagtcaagaaacctgggncatactggagagaacagtgactacctctaaagaaaattatgttcatatacaagctacaacaaatatcaaatgttatataaaacaaacaatgcaggggaatccacaaggatgtggaatgtttgagcaaaaaaaaggaagaggcttattcaatggcttgtactaaaagataagccccagattctaaaagaaggtaggcaaactgctcccaactcaccctggtctcaaaaggtgaagaaggtagaacatcacagaaggaataatggagtacagtgaaaggaggccaaggcaggttgataaaaattaaaaaaggattagcacatgctttcttgttttaattggggtaagaacagtggacaaagagttggagataggttgttctgaggagacaaagggctattgtttcatcttggctgggatcagccatgtttaccttccatcgaaggtggacaaataaaaacccttacagaggtattttttatcatatgttttgcaggcatgttgcttttaaacccaatgacatatgctactatttcacgtaataaagtttctttttgtttgtgaggttgtatatgagagcttcattaatcaagttgccactataattaaaaattatttctgattatagtttgctgacatctaataatatagttgtttcacaacggcagaatatatacctacaggaaaagggtggcccagatgcctgcagggaccaatgggtaaccatctcaagtatgtttttcttccactagcctattccctgctaggctctctcttctctaaagagattgcaacatggtatcactctgatatgaaaatccctaattcttacgaagcaaagtattgacaaagtctagagcgcagtttagagtttgattgcttctacagccctttctagattattccatgaagactctcaggataaggtcttggacacatagttaagactgaaccctcatttccacccttccatacaattcttctccctaagctgacctcagtatctctgcactctctcaggctgacctgacaaatcagcacctgagtttttcagaccaaaagctt

SEQ ID NO: 48780 - DNA, 821 bp, Homo sapiens
  misc_feature (1)...(821): n = a,t,c or g
gcgtccgctgcagttctggagccccatagtgcggggccgcggcagggccactaggaagagctcgaggcccgggccgcaccggctgagttgtgcgggcccgcgcggcgtcggagccgcgccgcccatcgagcccctccggcgtggtggtcggcccgccatggggtccctgttccggagcgagaccatgtgcctggcgcagctcttcctgcagtcgtgcacggcctacgagtgcctcagcgccctgggcgagaaaggcctggtccagttccgagacctcaaccagaacgtaagttctttccaaagaaaatttgttggtgaggtgaagaggtgtgaagagctagagcgaatattggtgtatttggtacaggaaattaatagagctgatattccccttcctgaaggagaggccagccctcctgcgccacccctgaaacaggttctagaaatgcaggagcagttgcagaagctcgaggttgaactgagagaagtcactaagaacaaggagaaactgaggaaaaacttgctggaactgatagagtacactcacatgctgagagtgacaaagacctttgtgaaacgcaatgttgaggtactgaacagctcgtgaggaaatacagctgtttttataaacagctttttataaaaacttcatctcccataggctgtgtattttgctattagttcatatagatatgttgcttcttttaagagattaaatttatttatttatttaattttatattttgtttttgagacggaattnnnnnnnnnnnnnnnnnnnnnnnnnnnnnnnnnnnnaccctgtatctaaaaaaaaaaaa

SEQ ID NO: 48781 - DNA, 461 bp, Homo sapiens
tgaagataagacttttagatcacagcttcaaattttatggaaaattaagcaagcaatacctagccaatagttctgcttaactttttggttaagtattttgttgggattcctataaataatttttcacacaaagttttaaatttctggtgtactttgactctcaactgagagtggatagagtttttcttttgaggattacatcttaaaatgtccatcgcctggctggttataagcatttgtcaccttttgaaggtaaaatatactctggcccttcttgactcagttacaggtcattttaggtccagtaataagagtcaggtgtttggttattgctttcagagtcagacattgtttaggtttatttaaaaactattagcaggttttcactgacaatgcttttttaaaaataaaaaatgtaaatccacttttttaaggcagattgttcattatgcatatacagc

SEQ ID NO: 48782 - DNA, 1038 bp, Homo sapiens
gagccctctagctgtgtgtgtctgaggctcggcccgcctgagccgcggacggtttgctgagcccgttagtgcgcccggccgagacacgccgccgccatgtcccgctacctgcgtccccccaacacgtctctgttcgtcaggaacgtggccgacgacaccaggtctgaagacttgcggcgtgaatttggtcgttatggtcctatagttgatgtgtatgttccacttgatttctacactcgccgtccaagaggatttgcttatgttcaatttgaggatgttcgtgatgctgaagacgctttacataatttggacagaaagtggatttgtggacggcagattgaaatacagtttgcccagggggatcgaaagacaccaaatcagatgaaagccaaggaagggaggaatgtgtacagttcttcacgctatgatgattatgacagatacagacgttctagaagccgaagttatgaaaggaggagatcaagaagtcggtcttttgattacaactatagaagatcgtatagtcctagaaacagtagaccgactggaagaccacggcgtagcagaaagccattccgacaatgatagattcaaacaccgaaatcgatctttttcaagatctaaatccaattcaagatcacggtccaagtcccagcccaagaaagaaatgaaggctaaatcacgttctaggtctgcatctcacaccaaaactagaggcacctctaaaacagattccaaaacacattataagtctggctcaagatatgaaaaggaatcaaggaaaaaagaaccacctagatccaaatctcagtcaagatcacagtctaggtctaggtcaaaatctagatcaaggtcttggactagtcctaagtccagtggccactgatagtataaaccatggtcatttttaggcatgtatcattcatttactcatagtttggtgtgaggtgcagacctagaacgtgatttagccttcatttctttcttgggctgggacttggaccgtgatcttgaattggatttagatcttgagtcgac

SEQ ID NO: 48783 - DNA, 3777 bp, Homo sapiens
tttatataaacaaaatactttattattgagagagtaaaggcccaattacaaaatttttatacttaagatctgtttattaccatgccaatggtttataaggactgtagtttccataactgttaggctgaaccccatgaaactccttctttgtagataaaagccagcctaatattggcaatttcacgtggttcaacctcacatacaatgagccactgcctaggattcttttggcagcaagatgttcccagtcacatgtctgtttatattataaacagatgtccaagtgataaatacatccctcttgagaaaaacatcctgtgcttatgtatactgggaatggtcttttgtgggtattgaggcagcgcagctctggctttgctcttcccagcttgcccggccacccgattcctcagtttcatcacaggaggattctttacagatgtcagccacccgtccaaggccacgcagctagtaaacagacaagcctgtcgaactttgaaaccaacttgaccgggtcatttataaagaaggccgggaatacacatgactcaggtgctcttttgaaacgactacaaaagtctccattttgatcaaaacgttttctccgaatgaatggctccgatgctttctctttcccatcttaagtccccgctctgtgcctcagaatagtctgtgtccaagaaaataagaatcacgtcatcttgctgtggacactgagcaaaaaggagcagcatgctattaagatggttgagacacacgagtgaaacaaagatgggacaaactgtgcttcgttcaagaggtttcatcaagacccctaccgccccccgtccttcagctctgtacagtaactttaactttacatagagctgagataaaaataaagctttccttacaaattacattttttttcccagtgaattacttttgcagtaaaaatagctgctacataaatccctcctgatctctgaaaaggagttgcatatttccaaaaataatattcttattttaatcacacagaagaacgtggagcacaggaaggaaatggctggctggtcagggagaggtgagctgtcggagaaacacagttaaactaaaaaataaaatccattttgtgtataaactgacttaaacgcatgcaaagaagtggaaaacatatgccatttgtcaagaaaaatactgctttatagcttttactttacaattaaaggagaaagcagaggccagatataagcccagataataacatttaagtttctcataaaaactcccaaatgtacaaagtccttgccagacaaccaaggcaagaaaaccccccaaaaacaaacaaacaaacaaacagaaaaagcacaaaaagcagggattaccccccacaggccttatccctgtaagtctattaaatgtgaataatacatactttacaacgtctcttagtcggcccttggcagattaaatctttgcaaaattccatatgtgctattgaaaaatgaaataaaacctcagatgtctgaattcttatttcaaatacagttatataattattttaaattacaatatacaatttctgttaaatacaactgttaagggattctgagaacaattataagattattataatatatacaaactaacttctgaaatgacatggttgtttccttcccaccctcctaccctctcaaagagtttttgcatttgctgttcctggttgcaaaaggcaaaagaaaatctaaaaatagtctgtgtgtgtccacgacatgctcgctcctttgagaatctcaaacagccagaaccatcccgtcccacggactgccaggcgccaggacggcttcctggtgcctctttctcgaccattttcacttaaaagcactgtgagtagaattagctgtgccgttgctgccacaagggaggcagcctggtcaagaggcgtggtttgggatgcaataaggccactgcttcttggccactttcctggacattttcaatcctgcctttcctgggtcctcggagcagctggtcaggatgggcttcccactcagtccacgagcctggggccggctcagggtggtcccggcgacctcagtcctccgtgtcgggctggacgcccaggatggcgtgcagttcctcgggcgtgaaccccagcaagttctggaggtcgcacacgaagcggtacacgtagcgcttccccgacgtcttgtggatgatgttcttgtcgtaatagtagcgtaagccccggctcagcttctcgtagttcatcttgggcttatttttcctctttccccaccggcgggccacctcatcggggtcggcgagcttaaactcccatccgtctccagtccagctgatgaatgactggcaggatttgtctgatagcagctccaggagaaactgccacagctgaataggtccacttcctgtgaaacccggccagcacaagctgcaggtataactggtttgccttgctccaccgggtcactcctctcttggatgtaatccttgaaagacatggttggcttattgaggcagagagactggctgcagtcatcttcgaaagctctcgaaggaaggaacccgttgcacatccagcaaggacgactggctgttccaggactggaggagggagtctgagctctcgaagctgtccgcaccgttctcaggggagtcgtggtctttgggcgtcccagaattgttggtgagcaaattcaagttgctgcctgggaagtcctgactgacagagcagtaggtgacgctgacggagctgagccgagacttggggaacatctgaaactcctgctcagagctgagtacgctgggtgtggaggccggacacatgctgtccaggaggccgcctttggggtaattctgtgtctgcattccatagggcgcctgctctgtgccaaaacctaatgtattgctgttaatccaatgaggaacggaggtgaggtgtgaattttcttcatattgatcttctgtcttttcttggttttctttgatcatttgctccagatgttcccagagaatgtcacccacaaagtcaggtgccagctccagaaagcgtaccttgccaaggttacacagcatctggccattcatgccgaacctctgcagattcacgttcaccagactgaactcattggtggcccagagaagccactggcatacctgttgctcactccacagccaggggttctttggaatgcccaggcgccgctgttcctttttgaagccactgaaggtagcttttaaggcttgactcatcacagccttgctgcacggggttaacaaaggcaattcacagttggcggagtcatgagaaatggaatccaagcctgttggcacttcttgcagtgtttgctcttcatttagagaaggaaaaacagcaaacagggacccatcaaaggtgtcaaaggctggctggcgcttgagtgtccctctgtaactgttagccacaggggctacctggtccatattcttgattccgaaatcattcatcctgccgctgcgggcagggccggcgcttggtcgggacggtggctgctcggcgcccgcggctgctcggtgcgcgccgggcgagggcgagggcgccggccagagacgatcagggaggccggacgctggccgggcggctccgggagctctgagctggagcgacaccgcactcgtcagtctctggaggaagtaaccgggccgtcccccacgcggcgcgctcttcaggagcgggaggaggagggaggagggaggaggaaggagggacggccgagtggaggggaggggaggaaacgg

SEQ ID NO: 48784 - DNA, 504 bp, Homo sapiens; identical to SEQ ID NO: 8530

SEQ ID NO: 48785 - DNA, 1270 bp, Homo sapiens
tgggctggaacgcgccggaatctgaggtgtgagtagagcctgggggagagtggatccaggtgaagggggcagaggactgggagttttcgtcctcttgaataagaactcgacaacagagtgggaactttctgtcttgtgatccattgcctggtgagtcacagctcacaccatggatttaacctgagagcttcaacttctgctttggccctgggagttcccatgccctggtgtcttctaccagttcttagtgtgtcgcactggagcacagaggacactcgatcgtgcggcgcgcagggcggggggccgccgctgcctccccgcgggagtggctggcactgtgctcggagtgcggtgcgggcgtgttcatcttagccctgctctgggtggcagtgctgctgctgtgtgtgctgctgtccagagcctccggggcggcgaggttctctgtcatttttttattcttcggtgctgtgatcatcacatcagttctgttgcttttcccgcgagctggtgaattcccagccccagaagtggaagttaagattgtggatgactttttcattggccgctaatgtcctgctggctttccttagtgccatcttccttggaggcctcttcttggttttaatccattatgttctggagccgatctatgccaaaccactgcactcctactgaccactcttcaggaatacgaaaacctgttctctccttcattgtgatgacattgatgagcaggaaggcactattcagagccttgttttgacagccctcatgccttaaggttagaggagtatctgtccatcactaagacaaatctctggagtcctggcttccagaaacaggattgccaaattgtccctgtggggctagattcttaccagcttaagaaggatattgctatcttcttagtacccgtaccttaggatttccaactgttttgaaagggaaatagtaacagtgatctgcttagagtggattttcactcaagtccttagtaagtggattttggggaaaaaagcacctgggcttctggttctttttgataatatataaaattattcattatgaggttgcagttgtttgcaaaggagaggcactcaaatttgaaaggttattttaatgtgataatttggaagacttactcagatgttggtcattgaccactctgtgcatatatttctgcagagctctgtgaaggcaatgagtgtcacttccctctgctctaataaagcaataaataatagctaaagggctgactttcacttcgaaa

SEQ ID NO: 48786 - DNA, 571 bp, Homo sapiens
gtgtaggccagggggttggcggtgccgtgtcatggaggctcagtctctgagcagccattgaaggggaaggaactgcgggtgtgtgtgtgtatgtgtgtgtgtatgtgtgtgcgcgcgtgcgtgcgtgtgtgtgcgcgcgctagtgtgtggacaaggaggtgggggcagctgagttagagtcccaactcttggactccatttgctattctcttctttctcccccacacctatctggtggtggtagtgggcgtttatatttgcgttccttttcattcatttctaaatctcttaaaaattttgggttgggggtattggggaaggcaggaaagggaaaaggagagtagtagctgaagagcaagaggaggacatggagatgaagaagaagattaacctggagttaaggaacagatccccggaggaggtgacagagttagtccttgataattgcctgtgtgtcaatggggaaattgaaggcctgaatgatactttcaaagaactagaatttctgagtatggctaatgtggaactaagttcgctggcccggcttcccagcttaaataaacttcgaaaa

SEQ ID NO: 48787 - DNA, 1610 bp, Homo sapiens
aacaacttgaatgtcagttgaagacagagaaggatgaaaaggaactttataaggtacatttgaagaatacagaaatagaaaataccaagcttatgtcagaggtccagactttaaaaaatttagatgggaacaaagaaagcgtgattactcatttcaaagaagagattggcaggctgcagttatgtttggctgaaaaggaaaatctgcaaagaactttcctgcttacaacctcaagtaaagaagatacttgttttttaaaggagcaacttcgtaaagcagaggaacaggttcaggcaactcggcaagaagttgtctttctggctaaagaactcagtgatgctgtcaacgtacgagacagaacgatggcagacctgcatactgcacgcttggaaaacgagaaagtgaaaaagcagttagctgatgcagtggcagaacttaaactaaatgctatgaaaaaagatcaggacaagactgatacactggaacacgaactaagaagagaagttgaagatctgaaactccgtcttcagatggctgcagaccattataaagaaaaatttaaggaatgccaaaggctccaaaaacaaataaacaaactttcagatcaatcagctaataataataatgtcttcacaaagaaaacggggaatcagcagaaagtgaatgatgcttcagtaaacacagacccagccacttctgcctctactgtagatgtaaagccatcaccttcttgcagcagaggcagattttgacatagtaacaaaggggcaagtctgtgaaatgaccaaagaaattgctgacaaaacagaaaagtataataaatgtaaacaactcttgcaggatgagaaagcaaaatgcaataaatatgctgatgaacttgcaaaaatggagctgaaatggaaagaacaagtgaaaattgctgaaaatgtaaaacttgaactagctgaagtacaggacaattataaagaacttaaaaggagtctagaaaatccagcagaaaggaaaatggaaggtcagaattcccagagtcctcaatgtttcaaaacatgctcagagcaaaatggttattgttctcacattgtcaaatgcacaaccagttctgcaatatggtaatccttatgcatctcaggaaacaagagatggagcagatggtgctttttacccagatgaaatacaaaggccacctgtcagaagcccctcttggggactggaagacaatgttgtctgcagccagcctgctcgaaactttagtccggcctgatggcttagaggactctgaggatagcaaagaagatgagaatgtgcctactgctcctgatcctccaagtcaacatttacgtgggcatgggacaggcttttgctttgattccagctttgatgttcacaagaagtgtcccctctgtgagttaatgtttcctcctaactatgatcagagcaaatttgaagaacatgttgaaagtcactggaaggtgtgcccgatgtgcagcgagcagttccctcctgactatgaccagcaggtgtttgaaaggcatgtgcagacccattttgatcagaatgttctaaattttgactagttactttttattatgagttaatatagtttagcagta

SEQ ID NO: 48788 - DNA, 435 bp, Homo sapiens
gctccttccttccttcccccaggaacacggaggccaccgagggggctgggcctatcaggaggacacaggctgcagcctggcacccacccctcccatctccaccccacatggaagacttgtcttcaacttggccactgtctttgcagagctgggcacatgtgcccagggggcagaaaaaatggcttctcagttgttaaaagtataccctggaccacccatctgaccatctccttaaggtttcacccaaagcccccagtgtcagagacttgggatgggaagaacagtcggctcccagtgtggtcatgagcaagttttctgtggactgttccccccactgtggtaggacaggactggcccacttagtcctcaagctcccaacctgctgtccctcaagccccgcttctaccaacctgtggagttcaggaggcgagacat

SEQ ID NO: 48789 - DNA, 387 bp, Homo sapiens
ctcatttttttcatctccttcccaaggattccattcttcactttccaaagtggactgttcttgcggcgattttgaggccttccaggagcattcccgcaaatctctggcatttgagacgacgtcttggattttaacacgtgtttgaaaggcgtgcgcgcctgtcaccccctgggatcgggagcggggacggcgtgtgagatctgggtaagaatgaggaccattctccaattccgagccaagggctggctcgagaggctgtagggggcaaagcgcttctcaggccctgcgggtaatcccggacttgagagccgggtgcggggacccggcccagccgccagcagccccagccaggaggtcgacgcggccgcgaattccagatctatgaat

SEQ ID NO: 48790 - DNA, 386 bp, Homo sapiens
ctcgggggcggcgctcagaaaacatctggagaaaatgacccattggtttcataggaacccattaaaagccacagctcctgtgtcttttaattactatggtgtagtcactggcccttctgcttcaaaaatatgcaatgacttgaggtcatccagggcacgactccttgaactgttcactgatttgagctgtaatccagaaatgatgaagaatgcagcagattcatatttctcacttttacaaggtttcataaattctttggatgaatctacccaagaaagcaagttacgatatattcaaaatttcaagtggactgatacattgcaaggacaggttccaagtgcccagcaggatgctgtttttgaattaatttccatgggatttaatg

SEQ ID NO: 48791 - DNA, 852 bp, Homo sapiens
  misc_feature (1)...(852): n = a,t,c or g
gtttttcatttatggctcatatatactttatgcacatagcctgaaggtaattttatgatatttgaaatcattttctatataaaacagtttgtgtacattgaaccataagaaagcaaatgtgtttgttaggtgtggaattttccactcatggtgtcatagcgttcaggaaggtttggattttggggcatttgggggttttaactgttcagattagggatgctcaacctgtatctgaatgggaaataaagactatattggaatgagcgccttctatttcttcttcaagtggctgaaggtatcatcctaagtctaacatattctcctgggatattgctttaaatatagaaacgcttggggcaaaagggaatttccctccataattcaactgttaagattctttctttgaacagtaagagactgagttcttgcacttgggtgaagaggccagactgagaggctctaatcctagcaacatcatgccctggtctctgatttcatattcatacagagggatgcagtaaaaaatccctttctctccattcttaaaatcagtggctttcacaatacatcaggtatttggcttaatctctgcatttcagatagaataccagtcatcttagaggctgaaatagggatcaccatgtcctactgaatgctctcaaaagacacctgcagcgtgctgagatccagcagaatctcatcaccattcaagcagactgagacccactcgcctcatatagaagatccctgacctcccggaaggttgaatggtggggcgcctgtgacagtaggagtgggctgctatgcccgtgtgtctacctgtgctctgataagaggcaggnacaggngcaa

SEQ ID NO: 48792 - DNA, 2139 bp, Homo sapiens
ccaagatggcggcggcaggacagcagcagcagcagccagtattcgggaaaggcagacagtggctttgaagcgtatgttgaatttcaatgtgcctcatattaaaaacagcacaggagaaccagtatggaaggtactcatttatgacagatttggccaagatataatctctcctctgctatctgtgagggagctaagagacatgggaatcactctgcatctgcttttacactctgatcgagatcctattccagatgttcctgcagtatactttgtaatgccaactgaagaaaatattgacagaatgtgccaggatcttcgaaatcaactatatgaatcatattatttaaattttatttctgctatttcaagaagtaaactggaagatattgcaaatgcagcgttagcagctagtgcagtaacacaagtagccaaggtttggggaccaatatctcaattttattactttggaagatgatatgtttgtattatgtaatcaaaataaggagcttgtttcatatcgtgccattaacaggccagatatcacagacacggaaatggaaactgttatggacactatagttgacagcctcttctgcttttatggtactctgggtgctgttcctataatcagatgttcaagaggaacagcagcagaaatggtagcagtgaaactagacaagaaacttcgagaaaatctaagagatgcaagaaacagtctttttacaggtgatacacttggagctggccaattcagcttccagaggcccttattagtccttgttgacagaaacatagatttggcaactcctttacatcatacttggacatatcaagcattggtgcacgatgtactggatttccatttaaacagggttaatttggaagaatcttcaggagtggaaaactctccagctggtgctagaccaaagagaaaaaacaagaagtcttatgatttaactccggttgataaattttggcaaaaacataaaggaagtccattcccagaagttgcagaatcagttcagcaagaactagaatcttacagagcacaggaagatgaggtcaaacgacttaaaagcattatgggactagaaggggaagatgaaggagccataagtatgctttctgacaataccgctaagctaacatcagctgttagttctttgccagaactccttgagaaaaaaagacttattgatctccatacaaatgttgccactgctgttttagaacatataaaggcaagaaaattggatgtatattttgaatatgaagaaaaaataatgagcaaaactactctggataaatctcttctagatataatatcagaccctgatgcaggaactccagaagataaaatgaggttgtttcttatctattatataagcacacagcaagcaccttctgaggctgatttggagcaatataaaaaagctttaactgatgcaggatgcaaccttaatcctttacaatatatcaaacagtggaaggcttttaccaagatggcctcagctccggccagctatggcagcactaccactaaaccaatgggtcttttatcacgagtcatgaatacaggatcacagtttgtgatggaaggagtgaagaacctggttttgaaacagcaaaatctacctgttactcgtattttggacaatcttatggagatgaagtcaaaccccgaaactgatgactatagatattttgatcccaaaatgctgcggggcaatgacagctcagttcccagaaataaaaatccattccaagaggccattgtttttgtggtgggaggaggcaactacattgaatatcagaatcttgttgactacataaaggggaaacaaggcaaacacattttatatggctgcagtgagctttttaatgctacacagttcataaaacagttgtcacaacttggacaaaagtaacacagaagaaccttactatgataatctacttggaatgtggataaatgtaaaaagaagaaaagttagaagagcaatatgtttccttctctgtaacagtgtcctaacagtgaaaatcagagttatttgttaatttttaaggaaattatatacttaatatgtattgattaaaagaaacatttcagaaataaaatttcaacattgttaaaaaaaa

SEQ ID NO: 48793 - DNA, 1286 bp, Homo sapiens
taaatttatacaaaaataaaattacctccaaaacattgctacctttcctaaacattcagtcttgccacagtttaataaaaggaaagaacattaaaaaggataagacactgtaatgattagatgctttttataagcctaaaggcattgtgattatttagacagaagagaagaaagtgaagtgaaaacctgatagttatgtagtctcatggtttgctgttgagaggctgaacaccagctgctttccttttctaggaagataataaagtgggctttggctacaacataaagatgttgggttagacagtttcactacagtaagaacaacgggatgagttgcccaggaaattgtgaaatactttctaatgatctttaaagatataatgaacactaattcatctggatttgtttaggtgtggtcctggttaaaggcaaagggaaggatcagataacttcatgttttttccatttaacatacccaatagattcttgattaggggaagggaaaatgagcaagatacagtccagtattctaaaaacaatcagccttaggggatcatttcaaaagcatctgttttggacttaagtctttgatacttaaccaaattgactacacagtgaaaaattctagtgcctgggttttatagggtagaagaaagacatgcagtcaagtggccaatacttcatgtgaagataagcaatgagatccttcttgctgtctttcttttgactgttctgggcaatatcaaattagtttcagtggcttgattctaggccaagattctggcaacagattgtagtcttaccttgttttcttcaatctcactggatctctctctctttttaccccccttaggctgagggtaaaaagctgggattggtaggctgggtccagaacactgaccggggcacagtgcaaggacaattgcaaggtcccatctccaaggtgcgtcatatgcaggaatggcttgaaacaagaggaagtcctaaatcacacatcgacaaagcaaacttcaacaatgaaaaagtcatcttgaagttggattactcagacttccaaattgtaaaataatggcctgaatttaagttttctaagataaactcagtggtttggtttttattattaatagagatagaactattgtgtgttaatattagcattagtcaataagttattttaatgtcagatttttgaatgttattatatattacctgtatgatggaaggattaccactgtacacaaatctaatcaataaaaacgttagaaccttctgcttagagtactttt

SEQ ID NO: 48794 - DNA, 2010 bp, Homo sapiens
tttttttttttttttggctgagatttaacattgtacattttattaaatactggactttattacaacaaattaatttacttccgatagaagtttcattttaaaaaatgtggttgtgttcaaattcttaattgacacttgttttggggtaaacatcctatttttactggtggtatcatcaatcattatgagcagaaagattaattttgtataacagaacaaaggaatttctcaagtggtacaatactcaatatatataaagggaatatactcccaaagagtgggcatgaccacagcagagtatatgatcagagaacatattgcttttatggtatatatatatatatatatatatctctacatataacatcaagtcatgcacattaagtctttactacctactgaaggcttctaccttacacatgaaaattgttcatgtcccagggtttggcatccagccaaaatttaaacaatgatgaagaatggctgtcaaactggcttttcagaccacccctgaaaagctgtcagctgtaatatccatcctggaatcgtggcggaaagttcctgggagttgccttttcctgtgttttgatcaagtctataatagctgacagtactgcacagtctctggatttagtgtcattccagtctacaggatgaggactttcaatcttctcttgcagaagaatatctagttcctttcttaattccttaacaagatgggcaattcttgccgggagactgaaatacaatccactcatctacagcaatagtttcctgatcgttatcccttctggagggaaatgtccaccctcccaaaaaacaagagacagtaatggggaaacctctgtgcagtccatacaagtatatactgcttgttcctcatctttaggtgatagataagccagttgtagtgaaagtctgtttgctccacattaacagatttaggatgaacagcaaccaggccatcggtttttgtgtaaacttttaccatttttctttttttacccaaatttagtcgaattttagcaactttgggatataaaccagcacagatgacagctttaattatcttctcattatctgaatttatattagattctggatctttaggatttctactgcttacaaatccagctccaagaagatgctcagcaaactgtcctttcatgttatgcagcatctgcagtgtgtttgaagacagaaaatattcccagcaatagtccttttcgtatctgaaaccacgtcgcctagcctcttcccagccctcaaacgcattcacaactgttaagtgatcacttctagtatcctttgccaattcctttcttcttgcatctgcaatcttttcttttcccagtggaatgacaaatggatctttgaaactgagactagcagcaatagtgagtactgggtctaagcagcagaacagtgctccaaaaagaatcatttttccaatatgtggctcaacgggtaatcgtgccaagtggactccaagaggtgtcaattcttcttgtttatccaaagcgttcaagctccatcaggtgtcttatggagagtaacactgcctcatttgatggtgggtccattaatctactcagaaaataagcaattccacctagccttaaaacctttatttgtaaacaaagttcttccaaaggagttctcaaaatttctggcagttgatagtcatctagaagacttgctctaagaccattatacagatgatagcaatgaccaggttgaactcttccagctcgaccttttctctgtttggcattagctttactaacccactcagcggacattgtactgatattgttctgagtatcaaaatgcgtctcttttatttttcctccatctatcacataaacgacatcatctatggtaatgctagtctccgcaatgttggtagcaattactattttccgaacaccaggaggggttcttttaaacacctgtgtctggttaactgtaggcatcagtgaatgtaaaggtataattaaaaatttatct

SEQ ID NO: 48795 - DNA, 3210 bp, Homo sapiens
cggcagccgcccccttctgcgcggtcacgccgagccagcgcctgggcctggaaccgggccgtagcccccccagtttcgcccaccacctccctaccatggacccccgcaaagtgaacgagcttcgggcctttgtgaaaatgtgtaagcaggatccgagcgttctgcacaccgaggaaatgcgcttcctgagggagtgggtggagagcatgggtggtaaagtaccacctgctactcagaaagctaaatcagaagaaaataccaaggaagaaaaacctgatagtaagaaggtggaggaagacttaaaggcagacgaaccatcaagtgaggaaagtgatctagaaattgataaagaaggtgtgattgaaccagacactgatgctcctcaagaaatgggagatgaaaatgcggagataacggaggagatgatggatcaggcaaatgataaaaaagtggctgctattgaagccctaaatgatggtgaactccagaaagccattgacttattcacagatgccatcaagctgaatcctcgcttggccattttgtatgccaagagggccagtgtcttcgtcaaattacagaagccaaatgctgccatccgagactgtgacagagccattgaaataaatcctgattcagctcagccttacaagtggcgggggaaagcacacagacttctaggccactgggaagaagcagcccatgatcttgcccttgcctgtaaattggattatgatgaagatgctagtgcaatgctgaaagaagttcaacctagggcacagaaaattgcagaacatcggagaaagtatgagcgaaaacgtgaagagcgagagatcaaagaaagaatagaacgagttaagaaggctcgagaagagcatgagagagcccagagggaggaagaagccagacgacagtcaggagctcagtatggctcttttccaggtggctttcctgggggaatgcctggtaattttcccggaggaatgcctggaatgggagggggcatgcctggaatggctggaatgcctggactcaatgaaattcttagtgatccagaggttcttgcagccatgcaggatccagaagttatggtggctttccaggatgtggctcagaacccagcaaatatgtcaaaataccagagcaacccaaaggttatgaatctcatcagtaaattgtcagccaaatttggaggtcaagcgtaatgtccttctgataaataaagcccttgctgaaggaaaagcaacctagatcaccttatggatgtcgcaataatacaaaccagtgtacctctgaccttctcatcaagagagctggggtgctttgaagataatccctacccctctcccccaaatgcagctgaagcattttacagtggtttgccattagggtattcattcagataatgttttcctactaggaattacaaactttaaacactttttaaatcttcaaaatatttaaaacaaatttaaagggcctgttaattcttatatttttctttactaatcattttggatttttttctttgaattattggcagggaatatacttatgtatggaagattactgctctgagtgaaataaaagttattagtgcgaggcaaacataactcatttgaggataaagtttgtgttggatatgtggttcctgatgcattttgacttgtctttttaaatgctttatctttttctttaaagatttatttcaataaaactaattgggaccacccgtatttcagtaggacctggggtagggattggaagtacttgggcagggcagccagcaatcttgctgtgtttgatataacatgcatccttggggcagggttgcccttaaatcttacactgtggtgaagggatgttttttttgtaatgctgcagtagagttggagtacttagttctcttgttgtccagtatatctaataagtgtttttcatattatttccacgtaagggaaataaggtagtacttttctttttatatttctatgcttaaaattctctttcctagtcaaaaattgcccaaatctgtgtttgctttctgccttgctacatttgtctcccttacttttcttgaggctaaagacaggctttttccaccggcatcatcactgctatcatcattaacagcgtaattataccaggcatatttaatgctgagtttaatttaatatgtaatacatatggtaattgtaggggtaatacccacaacaactgtagtttcttacttggccaagagaatgcttatttaagtgttagacttccattctggcaaaatcttgccttatcagaagacattggaaagagggattccctttggtgtttggtcttctacttagaaaaacctattgcagttagtttatcttgtagtattcatctttgtattctgaagataaggtttgaattaaattgatacacacagaggggaaccgattttttttatccaatgtgaattataaatgagataatccacagttattcattgtggagttgttgagactatgaaagactcattgtctttgtattcagctcttaaatagtgtaactatatccccacctctgcttgctttctttccctcccctccaatgataaagaaaatgataaattttctgttgtgcattcaattcttattttaaataagactaagtataggcattgtacctgacattgctacgtttctaccagtgtttcaatttaaagtgctagtgtttaaaaacattttcaagggataaggccttctgtactttgcttatttgaagaatcagtggtaggagcagtgaagtaaattctatggagtacatttctaaaataccacatttctgaaatcataaataagtttattcaggttctaaccctttgctgtacacaagcagacagaaatgcatctgttacataaatgagaaaaagctattatgctgatggagcatgctttttaaatcctttaaaaacactcaccatataaacttgcatttgagcttgtgtgttcttttgttaatgtgtagagttctcctttctcgaaattgccagtgtgtacttggcttaactcaagaacagtttcttctggattccttatttgatttatttaacctaattatattctaatattgcaaatattaccataagtgggtaaaagtaaaattcctcttctgaaaatgtgtcctgtgcttttagatttttaaattccataatatacattcttaattttc

SEQ ID NO: 48796 - DNA, 1358 bp, Homo sapiens
cttggtgaaacaatttattagccatggttcagaataatacaaaaataaaggtgtggctttatttacacacactcttgaagctcttggcattcagcggacagcaaacaccatactcagagtgatggaattaatagcatttagggtaagcaaggaccagtgtgagactgggcccaggaaatggggagggaatgtgaggagaaacagggaatgacattaaagaagaaacagacaccttggagaatttatgactcctttctctatgtcatgtccagaagaggcaagtctacagagatcaaagtagcctaggggtgcctagggatggggaggttggggtggtgactaaggggggctggatttcttttgggggtagtaaactctaagactgactgtgctgatggctgctgaactgtgacctatacctaaaccgggatccaaattttgccaggtcaattgtggattgtatggtaagtgaacttgtactccaataaagctgttaggaggacaaaggcagctgcccctggagatagtaggcaatgccccatcaggacatttactggcatgggctcaaaggcccagcagagctagaattcaaggttcctgaggaatgggagcagatgggaacatgtgctctacgcaggaagagtgcattgtggtatcctgtactctggggcggtcaaaacaagttatttattggaagctagggaaaggtcaccagaatgcatggtaggtgtccagaccccaacgaagcccttctccagggattattggagagacttgagcccaaaaggctagtggctgggaggcttctgctcctgttctcctttgcctggtcctttgctgctgttgggtggattatggccatacaccatctgggacacagagctttggtggccctgctaccactaggtaaagtctaactgcaagaaaaaactccgcaactagcaacttcttgacctacagtaagtggctcgaccttcctgctagaaactcttaccagatcaacaaatttatgcacttttattgataatctttcacgcacatgtatgtgtgcgcacacacacatgcaaactgtcctgtttgctctcctgtcacatttccgaatcttctcctcctcactggaggttggaaatatagttaaggactcaggcataggaatgaagggcaccctattccagtgtcagacggcacctcaatgtgttcttcaggaccctgaagccagaagcctctagcctacccccaggaggtacttcaggaacaaattcttcaaacactggcttcagagcctcttttcaaatgctgtctttggacctcagaccctgaagtcacagcagcaccccttccccacacaaggtctgccc

SEQ ID NO: 48797 - DNA, 1889 bp, Homo sapiens
cgtcgaccctcagcttatccagaggcccgtcatgctgaccaagttcacccccacaacccttcccacatcccagaattccatccaccccgtccgtgtcgtcaatgggcagactgcaaccatagccaaaacgttccccatggcccagctcaccagcattgtgatagctactccagggaccagactcgctggacctcaaactgtacagcttagcaagccaagtcttgaaaaacagacagttaaatctcacacagaaacagatgagaaacaaacagagagccgcaccatcaccccacctgctgcacccaaaccaaaacgggaggagaaccctcagaaacttgccttcatggtgtctctagggttggtaacacatgaccatctagaagaaatccaaagcaagaggcaagagcgaaaaagaagaacaacagcaaatccggtctacagtggagcagtctttgagccagagcgtaagaagagtgcagtgacatacctaaacagcacaatgcaccctgggacccggaagagagccaatgaggaacactggccaaagggtgatattcatgaggatttttgcagcgtttgcagaaaaagtggccagttactgatgtgcgacacatgttcccgtgtatatcatttggactgcttagacccccctctgaaaacaattcccaagggcatgtggatctgtcccagatgtcaggaccagatgctgaagaaggaagaagcaattccatggcctggaactttagcaattgttcattcctatattgcctacaaagcagcaaaagaagaagagaaacagaagttacttaaatggagttcagatttaaaacaagaacgagaacaactagagcaaaaggtgaaacagctcagcaattccataagtaaatgcatggaaatgaagaacaccatcctggcccggcagaaggagatgcacagctccctggagaaggtaaaacagctgattcgcctcatccacggcatcgacctctccaaacctgtagactctgaggccactgtgggggccatctccaatggcccggactgcaccccccctgccaatgccgccacctccacgccggccccttccccctcctcccagagctgcacagcgaactgtaaccagggggaagagactaaataacagagcccctctaggagaagccacgggatcccggcggcaaggagaacagaacactgaagactctagaaaagcaaagccggatttctggaaagtgcagaattcttttggttctttggttccagagagagagaagatgctttggccaggtggcaccagagtttgccaattgatccttcttattctgtgtgtacatgcaaagattggaccatgttacatgaaatagtgccagctggaggttctttgccagcaccatgccaagtgaaataatatatttactctctctattatacaccagtgtgtgcctgcagcagcctccacagccacgatgggtttgtttctgttttcttgggtggggagcagggacgggcggagggaggagagcaggtttcagatccttacttgccgagccgtttgtttaggtagagaagacaagtccaaagagtgtgtgggctttcctgtttctaaactttcgctactataaaaccaaaaaaaggaattgagatttcaccaaccccagtgcccagaagagggaaggggagtggctggagggagcagggggtgggacagtgtatcaaataagcagtatttaatcacctctggcgggggcctcgtgcaaggggagacttgacaccaagaacagccagtaggttcttctcccctgcactctgctccctgcgcggtaaccccaccactcctgaagcctgcccagtctccttccttccctgcttggtgagtcgcgcatctccgt

SEQ ID NO: 48798 - DNA, 2250 bp, Homo sapiens
cttccccttctctgccctgctccaggcaccaggctctttccccttcagtgtctcagaggaggggacggcagcaccatggacccccgcttgtccactgtccgccagacctgctgctgcttcaatgtccgcatcgcaaccaccgccctggccatctaccatgtgatcatgagcgtcttgttgttcatcgagcactcagtagaggtggcccatggcaaggcgtcctgcaagctctcccagatgggctacctcaggatcgctgacctgatctccagcttcctgctcatcaccatgctcttcatcatcagcctgagcctactgatcggcgtagtcaagaaccgggagaagtacctgctgcccttcctgtccctgcaaatcatggactatctcctgtgcctgctcaccctgctgggctcctacattgagctgcccgcctacctcaagttggcctcccggagccgtgctagctcctccaagttccccctgatgacgctgcagctgctggacttctgcctgagcatcctgaccctctgcagctcctacatggaagtgcccacctatctcaacttcaagtccatgaaccacatgaattacctccccagccaggaggatatgcctcataaccagttcatcaagatgatgatcatcttttccatcgccttcatcactgtccttatcttcaaggtctacatgttcaagtgcgtgtggcggtgctacagattgatcaagtgcatgaactcggtggaggagaagagaaactccaagatgctccagaaggtggtcctgccgtcctacgaggaagccctgtctttgccatcgaagaccccagaggggggcccagcaccacccccatactcagaggtgtgaccctcgccaggccccagccccagtgctgggaggggtggagctgcctcataatctgcttttttgctttggtggcccctgtggcctgggtgggccctcccgcccctccctggcaggacaatctgcttgtgtctccctcgctggcctgctcctcctgcagggcctgtgagctgctcacaactgggtcaacgctttaggctgagtcactcctcgggtctctccataattcagcccaacaatgcttggtttatttcaatcagctctgacacttgtttagacgattggccattctaaagttggtgagtttgtcaagcaactatcgacttgatcagttcagccaagcaactgacaaatcaaaaacccacttgtcagttcagtaaaataatttggtcaaacaacagtctattgcattgatttataaatagttgtcagttcacatagcaatttaatcaagtaatcattaattagttaccccctatatataaatatatgtaatcaatttcttcaaatagcttgcttacatgataatcaattagccaaccatgagtcatttagaatagtgataaatagaatacacagaatagtgatgaaattcaatttaaaaaatcacgttagcctccaaaccatttaattcaaatgaacccatcaactggatgccaactctggcgaatgtaggacctctgagtggctgtataattgttaattcaaatgaaattcatttaaacagttgacaaactgtcattcaacaattagctccaggaaataacagttatttcatcataaaacagtcccttcaaacacacaattgttctgctgaagagttgtcatcaacaatccaatgctcacctattcagttgctctgtgggtcagtgtgggcttgcatagcagtgggcttccatgaaagggagtcattttagtgatgagctgcccagtccattcccagggccagggctgtcgctggccatccattcagtcgattcagtcataggcgaatctgttctgcccgaggcttgtggtcaagcaaaaattcagccctgaaaatcaggcacatctgttcgttggactaaacccacaggttagttcagtcaaagcaggcaacccccttgtgggcactgaccctgccactggggtcatggcggttgtggcagctggggaggtttggccccaacagccctcctgtgcctgcttccctgtgtgtcggggtcctccagggagctgacccagaggtggaggccacggaggcagggtctctggggactgtcggggggtacagagggagaaggctctgcaagagctccctggcaatacccccttgtgtaattgctttgtgtgcgacagggaggaagtttcaataaagcagcaacaagcttcaaaaaaaaaaaaaaaaaa

SEQ ID NO: 48799 - DNA, 1027 bp, Homo sapiens
ggcacgagtggcggcagaggcagtgcggatccggcgttctccactgatcttttccaaggctgtacagacatggcggcggcttttcggaaggcggctaagtcccggcagcgggaacacagagagcgacgcaggcctggctttcgaaaacatctgggcctgctggagaaaaagaaagattacaaacttcgtgcagatgactaccgtaaaaaacaagaatacctcaaagctcttcggaagaaggctcttgaaaaaaatccagatgaattctactacaaaatgactcgggttaaactccaggatggagtacatattattaaggagactaaggaagaagtaaccccagaacaactaaagctgatgagaactcaggacgtcaaatatatagaaatgaagagggttgcagaagctaagaaaatcgaaagactaaaatcagagctccatctgctggatttccaggggaagcaacagaacaagcatgtgttcttttttgacaccaaaaaggaagttgaacagtttgatgtcgcaactcacctgcaaacagccccggagctagtcgacagagtctttaataggcccaggatagagaccttgcagaaagaaaaagtgaaaggagttaccaatcagactggacttaagcgaatagctaaagaaaggcaaaagcagtataactgccctgacacagcggattgaacgagagaagaaattgttcgttattgctcagaaaattcaaacacgcaaagatcttatggataaaactcagaaagtgaaggtgaagaaagaaacggtgaactccccagctatttataaatttcagagtcgtcgaaaacgttgacgtgttatagataagccttgtcattctgtatcaaaaatctgttgtcgttttctagtaacttcaaattccattactccaaatggcatggttttccggtttgtaaccataactaaattgtcagtctgacatttaatgtctttctatggacaacattaaatctccctcccttctgtaattgttaaaaaaaaaaaaaaa

SEQ ID NO: 48800 - DNA, 830 bp, Homo sapiens
tggaaatccagaggtgaatatttatttaattcatatataaattttacataatattcatggtgctataaatataggcacattttttaaaagtccagatacatccaaaaattaccccctcactgtagcctactccaatcccctcaagacggaatatctaacgtgtttggaaaacagggtccagaaaggccctgcccattaattttaaaactttctgaccatcaagaccattctttcctgcttcaaccaagcagagtcaacaaggatcatgtgttttcagggttttaattgcactagttgatgaattaagtaaatgcctctgcctgggtagtttgtaataggtttatggtttggtttctcctacttagttcaagtcagagaaagaaaaaccaatatctatattcctattggccttctttaaatccctatgagatggcttaaaaggatgtcactgcaccagaggactcacttaaccacatctactgacaaataggcaacttcccataaagtacagattaaaacatcattcatttatattggttttcatttggggacaaacattgtaaatttaataattcatgggattgagcacagagcaaattggacaaaaacaaattcctcaaagtgactcggttgattcattgactgtacccaagcatgatccagacttatgagtttgtgtcatacacaccagcacacatcagacaagattaaaatctacagtgtaaagtcattgtaacttgaattcaaaataagaaagaaatgagtattggaaattgattcattagagcctctctattatgatacattttaacttgggggaaaaatgattc

SEQ ID NO: 48801 - DNA, 691 bp, Homo sapiens; identical to SEQ ID NO: 8585

SEQ ID NO: 48802 - DNA, 1176 bp, Homo sapiens
  misc_feature (1)...(1176): n = a,t,c or g
ttttttttttttttacattttaaagacatttttattgagctaattttaacaacattgctttagctggtgacagctgccccaaaccaaaacaaagccatcatgaatgctattcaacatcctcaatgtaatccagtatgtttttgtacttggaatatagttaaacttttgacattacataatcaagcaaatagcagtgcatactatattattcaaaaagactttatctatttcatttaaaaaatcaagttgcaagtggcctcagctttatcaacaatcgtagtgacacattccacacttcatgctctcaaaataaaaagtgccctaaaactaactctaagttttttagtcactgacattaatactaaccaggttacaggaattgaagtttaacattgtacaatataagcggcaataagttactgatatctgctgacaaattccactcaaactaaatatatccttgatacattcaaaaagacattttgtaaattttaataagctagttagtgtatatgctgcagtgcaaaaaaagtgacaccctagtttcctgagctttaggaaattaacaattttctgactactactttcaacttaaaataggctctttattatatgaagccatgacaaaactatacaattaaattgggcttttggagaactgaaagactggtcagagtcagggtgatttaggacaatgaaaaagttttcaaagcaaaagtatttacaacactacaaaggatactatggatctgcatgtagtgtaaagattaaagataacctactgatttcacaattgtccctcctctttcaaaaatattncactgggccaggcgctgtggctcacacctgtaatcccagcactttgggaggccgaggtgggtggatcacctgaggtcaggagtttgagactagcctggccaacatggtgaaaccccatctctactaaaatacaaaaattagccgggcatggtggcaggtgcctgtaatcccagctactcgagaggctgaggcaggagaatcgcttgaacccaggaggtggaggctgcagtgagctgaggtaacaccacagcactccagcctgggtgacaaagcaagactctgtctcaaaaaaaaattacactgaaagactttatggtaagtatttaaaactaaatataccaacctgtggtatattac

SEQ ID NO: 48803 - DNA, 1158 bp, Homo sapiens
ctttaacttgccttcatctggggctgtttggtatttccacgtgccttgggcccgcccactgcagcctccatcttggaagcggccgccggcgcctagaactgtatttcagaaaaaagaaactacagttttagcatgcagaaaggaaaagggagaacaagccggatcagaagacgaaaactctgcggaagttctgaatcaagaggagtgaatgagagccacaagtctgaatttatagagctgaggaagtggctgaaagctaggaagtttcaagattcaaacttagcgcctgcttgttttccaggtacaggaagagggctgatgagtcaaacatccctgcaggagggacagatgattatttcgttgcctgagagttgcctgctcaccacgggacacagtgattcgaagctacttaggggcatacattactaagtggaagcctcctccatctcctctgctggcgctgtgcacctttttagtttcagaaaagcatgctgggcaccgatctcttttggaagccttacctggagattttacccaaggcgtatacctgccctgtttgtttggagccggaagtggtgaaccttcttcccaaatctttaaaagcaaaggctgaagagcagagagcccacgtgcaggagttctttgcttcctccagagactttttctcttctctgcagcctctgtttgcggaggctgttgacagcatcttcagcttacagtgccctgctgtgggcttggtgcaccgtcaacaccagagccgtgtacctgaggccccaggcagcgggaatgcctttctgcagagccggacacctgtgcaactcgctccgtaccctggacctgctgaatcatagccccacatgtcccaggtaaaagcagcgtttaatgaagaaactcattcttacgaaattagaacgacttcacgttggagaaagcatgaagaggtattcatctgttacggccctcacgataatcaacggctgttcctggaatacggatttgtttctgtccataatcctcatgcttgtgtttatgtctcaagaggttggaatcaactttgttcttaacattaacactatataatttttttccccatttggagatgtgtattttcagttttaataaaaatatcaaaaccttaaaaaaaaaaaaaaaaaaaaa

SEQ ID NO: 48804 - DNA, 2377 bp, Homo sapiens
ccgctgcccgccatcgtgcccgccgcccggaaggccaccgctgcggtgattttcctgcatggattgggagatactgggcacggatgggcagaagcctttgcaggtatcagaagttcacatatcaaatatatctgcccgcatgcgcctgttaggcctgttacattaaatatgaacgtggctatgccttcatggtttgatattattgggctttcaccagattcacaggaggatgaatctgggattaaacaggcagcagaaaatataaaagctttgattgatcaagaagtgaagaatggcattccttctaacagaattattttgggagggttttctcagggaggagctttatctttatatactgcccttaccacacagcagaaactggcaggtgtcactgcactcagttgctggcttccacttcgggcttcctttccacagggtcctatcggtggtgctaatagagatatttctattctccagtgccacggggattgtgaccctttggttcccctgatgtttggttctcttacggtggaaaaactaaaaacattggtgaatccagccaatgtgacctttaaaacctatgaaggtatgatgcacagttcgtgtcaacaggaaatgatggatgtcaagcaattcattgataaactcctacctccaattgattgacgtcactaagaggccttgtgtagaagtacaccagcatcattgtagtagagtgtaaaccttttcccatgcccagtcttcaaatttctaatgtttttggcagtgtttaaaatgttttgcaaatacatgccaataacacagatcaaataatatctcctcatgagaaatttatgatcttttaagtttctatacatgtattcttataagacgacccaggatctactatattagaatagatgaagcaggtagcttcttttttctcaaatgtaattcagcaaaataatacagtactgccaccagattttttattacatcatttgaaaattagcagtatgcttaatgaaaatttgttcaggtataaatgagcagttaagatataaacaatttatgcatgctgtgacttagtctatggatttattccaaaattgcttagtcaccatgcagtgtctgtatttttatatatgtgttcatatatacataatgattataatacataataagaatgaggtggtattacattattcctaataatagggataatgctgtttattgtcaagaaaaagtaaaatcgttctcttcaattaatggcccttttattttgggaccaggcttttattttccctgatattatttctatttaatactcttttctctcaagaaaaaaaaaaaagtttgttttttctttattgtccttcatagcaggccaagtattgcctctctgcaatagacagctactgtccaatacatgctgtaatttgacattctgggtcacagatataaggtatttaaaatctatttatgctttatagagaaaccagacattaaaacttcatgcactacttatttcgaattactgtaccttatccaaatttacacctagctattaggatcttcaacccaggtaacaggaataattctgtggtttcatttttctgtaaacaactgaaagaataattagatcatattctagtatgttctgaaatatctttaagactgatcttaaaaactaacttctaagatgatttcatcttctcatagtatagagtttactttgtacacgtttgaaaccaactactgtagaagatgaggaatctattgtaattttttgctttattttcatctgccagtggacttatttgaaattttcactttagtcaaattattttttgtattagtttttgatgcagacataaaaatagcaatcattttaaattgtcaaaatttccagattactggtaaaaattatttgaaaacaaacttatgggtaataaaggctagtcagaaccctataccataaagtgtagttaccatacagattaatatgtagcaaaaatgtatgcttgatatttctcaactgtgttaatttttctgctgtattccagctgaccaaaacaatattaagaatgcatctttataaatgggtgctaattgataatggaaataatttagtaatggactatacaggatgttaataatgaagccatatgtttatgtctggatttaaaaattttaaacaatcatttactatgtcatttttctttaccttgaagaacataaactgttatttcacttctacaaatcagcaagatattatttatggcaagaaatattccattgaaatattgtgctgtaacatgggaaagtgtaaatgtttttcatggtttctatcaatgtgaaataaaatttaattctgaaaaaaaaaaaaaaaaaa

SEQ ID NO: 48805 - DNA, 2003 bp, Homo sapiens
tttttttttttttttttttagctatggaagttttctttattgattacttaatgtgtaacaataattggcatctttttcacacattacaaaaaattatacttggctcagtatgcaaccttttaagcatagccatattatttaacaaaagaggggaaaacctattctacccaacacagcatttacaaatgcacaaaacatgccactttggcttgtatattgtctagattaaaaaaaatcttttaacataaataagttagtataatttttcagtgtttttacagagttatgtacacaggtacacttcaaatggtttttccatacacaggcaatgaaatactgtttaaagatgtagtatccatttcacttatccctacaagtgtgcttttctctacatgaaccttcctttaaaaataacactttcctgtggataaatggacagagtaagctttaaattaaaaaatatttcattttttaatgtgaagttacttacagatctttaaaaatatcgagggatttagaattattttgactgtgtttacacagcccgaagtgaaaagaaaatgagaaaattttgtcaacaaatttaataaaagcagatggtcaattcttaacattcaaaactcccaagcacctcggatttttgccccaaactacctggagtgatcaccattctgctgagtaattaactggtaaattccaactttaagagagactggggagggcagtgaggataggtttctgttgcttttttaaaaaagccacatgcagctatctaacaaactttagatagcttgggagatcaccagatctcccaaatgagaataaacttcttgtaaaaataaatagcaattatctttagccagtgttcaaatttttgtgatttttttaaatgaagtatcagctgtctctgaaagggacattacatctttaaagaaaacaattcaaacccttccccaaaattgcttctcttcatgcaagtcaaatatttatctacttgctgtaaatcaaagcaagctcttcataccccgctccacgtcagttcctcagccccaccctgccctcccttccccaaagtttatgtgctacataaaaggtaaaaactatatacacaggtagtacaatgaagcaaataaggaaaaacctaattgcataatgctacatccaacgcttttagaggcagatcatttaagagtgcctaaaattttagtgttattgtgttgttgtttttcagtgcttatacaggatgtccattccatgaagtcagcgatatgtatttttaaaattttcatgtatatcttccttgcttcatcaagcagtgatgtatctgataaacaaggaaacatattcttaattcgagctgtttacgtttgacgtccttctgaaggccagggcttcttgggcgtctgctcccacagaaccggcatttggggaaccgtctgaaacattttcttctgttctgttggctcttttgttttgagtagaagaatcgtcggttgcaggtcgcttccttattcctgcgcattgctccgctaaccccgtctggctgtccgacggatcagtctttgggtccaccaaatgcgtgtcctcagagttagccggagccccaattaaaggcgccgccgggcggctcccgctgacatcctggctctcctgcgccggcaccttgcaggcacctttggggggccgcgggggtctgtagtagaactcgggcaagctgccccttctccacctcttgccactcgtacttgccctctaggggtttgtgattctgaaaatcgaaattccacttgcgctggctcgcctcttccatgtctctgcagtgcttctccaagtcccgggttaactcttcgtggtccaccgggccgaagaggttcctgcaggccgagggcttggggtgctccgcctgcctggcgtccatccgctccaggctagggctcccgttagacactcgcacgtttgacatctttctcccggtctgcacgaccgcctctctcgcactctca

SEQ ID NO: 48806 - DNA, 1370 bp, Homo sapiens
agctgtatgaaagcggaagagttatagaccgctaacacctgtcactggccactggtttcccggagttagcggcaacgaccttgcagcctggacactagccaggcgctccctcttctcacagcggcccacgtctccttgcttgggagcccatcgtcctggctccggtggcctcgctgggtctcggggaagcagaggactgttcattcctgtggcgaaaagccggagtcggccctagacacccacgactcgcagggtccatggttccggaggccgtgagacctgccggggctgacaggtaaagaagctaagtggaagagtgtttcctcctctggccgtaaagcaggtactctctgcagcaccagctgtccccgccctaactccggaccgccccaaagactccatgggatggacctgagtcagccgaatccttagccccttccctttggggcctgctgtggtgctcgacatcagtgacagacggaagcagcagaccatcaaggctacggggaggcccggggcgcttgcgaagatgaagtttggctgcctctccttccggcagccttatgctggctttgtcttaaatggaatcaagactgtggagacgcgctggcgtcccctgctgagcagccagcggaactgtaccatcgccgttccacattgctcacagggactgggaagggcgatgcctggcgggagctgctggtggagagactcgggatgactcctgctcagattcaggccttgctcaggaaaggggaaaagtttggtcgaggagtgatagcgggactcgttgacattggggaaactttgcaatgccccgaagacttaactcccgatgaggttgtggaactagaaaatcaagctgcactgaccaacctgaagcagaagtacctgactgtgatttcaaaccccaggtggttactggagcccatacctaggaaaggaggcaaggatgtattccaggtagacatcccagagcacctgatccctttggggcatgaagtgtgacaagtgtgggctcctgaaaggaatgttccagagaaaccagctaaatcatggcaccttcaatttgccatcgtgacgcagacctgtataaattaggttaaagatgaatttccactgctttggagagtcccacccactaagcactgtgcatgtaaacaggttcctttgctcagatgaaggaagtagggggtggggctttccttgtgtgatgcctccttaggcacacaggcaatgtctcaagtactttgaccttagggttagaaggcaaagctgccagtaaatgtctcagcattgctgctaattttggtcctgctagtttctggattgtacaaataaatgtgttgtagatgactggtaaaaaaaaa

SEQ ID NO: 48807 - DNA, 668 bp, Homo sapiens
gggtggcaggttccgtttatccttggaattagcactgctccccccacaggcttctgggagttgggagcaggctggttggtgacgctttgcctggccttggataagaactcttgttttcaaattcccttgaggtctcttccaagaatcttttgcattttttctgataaatcaatcataaggaagtttctgaaattctctttcagaccctacaacccacaagttactgcaaagctgggcttctaccagaagtgagtgatttgaaattgaaaacagatttcggatctcacctgagtagctcgagtgtaagggagggactgggagagccacagagaacatttgtcaatccagaaccaaccattcatggtgttgcttgactggagggcagggaaggaaaggactagaagcaaggcgaaagcagatctttctgtagatacacacatataagtcttggatttgcattttagggtgaattgtaattagcttgagatgaccaggggcccaccaatcaagcaactctgggaaaaacacttgtctacatcttaagtttctttgtctataaaatgtcaagattgaactaacactacatgattctctcgggaactcaccagttctaaaatttccactccttcttttcacagggcagtgtaactttaactccctgtttcaac

SEQ ID NO: 48808 - DNA, 1214 bp, Homo sapiens
gcttggctttagtggaagaggtagaggaccgaggcactgtggttgcccagggaggcggcagggcgctgatcccgctggccctggaaggcacggacgtggggcagacaaaggcagcccaggcccttgccaagctcaccatcacctccaacccggagatgaccttccctggcgagcggatctatgaggtggtccggcccctcgtctccctgttgcacctcaactgctcaggcctgcagaacttcgaggcgctcatggccctaacaaacctggctgggatcagcgagaggctccggcagaagatcctgaaggagaaggctgtgcccatgatagaaggctacatgtttgaggagcatgagatgatccgccgggcagccacggagtgcatgtgtaacttggccatgagcaaggaggtgcaggacctcttcgaagcccagggcaatgaccgactgaagctgctggtgctgtacagtggagaggatgatgagctgctacagcgggcagctgccgggggcttggccatgcttacctccatgcggcccacgctctgcagccgcattccccaagtgaccacacactggctggagatcctgcaggccctgcttctgagctccaaccaggagctgcagcaccggggtgctgtggtggtgctgaacatggtggaggcctcgagggagattgccagcaccctgatggagagtgagatgatggagatcttgtcagtgctagctaagggtgaccacagccctgtcacaagggctgctgcagcctgcctggacaaagcagtggaatatgggcttatccaacccaaccaagatggagagtgagggggttgtccctgggcccaaggctcatgcacacgctacctattgtggcacggagagtaaggacggaagcagctttggctggtggtggctggcatgcccaatactcttgcccatcctcgcttgctgccctaggatgtcctctgttctgagtcagcggccacgttcagtcacacagccctgcttggccagcactgcctgcagcctcactcagaggggccctttttctgtactactgtagtcagctgggaatggggaaggtgcatcccaacacagcctgtggatcctggggcatctggaagggcgcacacatcagcagcctcaccagctgtgagcctgctatcaggcctgcccctccaataaaagtgtgtagaactccaaaaaaaaaaaaaa

SEQ ID NO: 48809 - DNA, 892 bp, Homo sapiens
tttttttttctcagaataccaaacacacctttattcaagtggaagtacaaaagcacattcctaaaccaaacgcatacatgtgatttttacatattctgctttttagggattacataatcctgtttcagtcaccatacgtgactactggtctctatacataagggtatacatgtttgacaggaaaaaacacatgcatttttcatttgcttttacatttagatcaattcatttatatatcaatttcatttagattcctaccttgccttgatgaaatcctactcttgctgatggcaaagaagtaaaatatagtggcagaactatcctagaggttagccataggaggattatagagtgagcaacatatttttatatatttgttgagggtccctactgaatattataacactgaactatgaaagcctcaattgctggactgacaacaagaattttaaataacatttgtcttactcacaaaatgttataaagcttaagatggaaaaatacaaaatgttttgacattacctaaagaatcatgaactcttgttaggtatatgatggtggccctgaacttgagccaacatctgtaatcacttttatcagtcaaaaagccatgttcttttatatagcctgtagactattaacatacaaaaatgtggtaatggataaacaactatacacaaagccctcacacttcaaatactgtcctggattgatgagagaggagcagaattcaaacatttatctgcaatcctaatggttaaaattttaccaggaacagacctgccactctcttgaaatactgtctctgagattaacatacgaacagcatcatctctgttggaaggctacattcccttatgatgctgatttgtgtgtgtgtgtgtgtgtgtat

SEQ ID NO: 48810 - DNA, 1504 bp, Homo sapiens
  misc_feature (1)...(1504): n = a,t,c or g
gaaacaaaaacagtaaatagactagaagccagactggtattttgcatcgtgtatgcttgtttgaaaatctttgcttctgaagtaaatatttggcaaccacagtgattagcagttaaagtaatttcaacaaaataagaagtcattaaaaatggactgtttgtctgaaagagcagtacctatattataaagattgaatttcgtggctcatcacaaccattttcaaaatttaactcctactatcttcttataaattaagagaatttcatttgtgttccatagtgcgatgacaaaaaaaaagtaaaaataaaacaaaaaaaccctcatgcctaaatttagaatattgtattgtgtagcaatccaaaacattcaaaacaaattaaatagtttaacttatgtgacaggcagataagcatttcaaaagcataatgaagtccaattatgtagtgcataatgtagacaggagaagaatctaacattatgcagacattttctaaataaaagctccctgtaggacagctatatataaacatgggtaaggtaagcgcagactagttctgtggaaccttttgaaatcaagagtctaaaacacaatacatttttcaggtaggcaccaagttatcctaaaaaattttcatgtcggttattctgacattgttttttcatcagatactcacatcaacaacacatgtgatttgccaggaaaaaaaaaaaattccccccaaaccaaaacaccattccagatccagtacacttaaatatatcactctcactggaagtgctattagcatagtctttgcaactagcccaaagcgtatatttaagaagtttttataaattgttttgtgatgttcatatgtttaattcttatgccaactgttttctgatgaagacagcattgtgctttatgcgagaatgaaaacctcaaaataatcaccataaagcttctaagacttatgggagaataaactaggatggtccacagatataagatgaaatccacaatgttggaattataaatgtttagagcggcccagactagaagacaagcccaaaccaccattagaagaatgaaatacgatatggtccaagatgtatccttaaagttttgtctcaaccctcagtctgaattgtgaggattgatcttcagttcagtccagccagcagaaattgactgtgcaattttctgttgtatttattgtacagactatgtacattctagaaggttcctttagtgctacactgttgtactttttgtcccagcaatttgagggcgtgcaaattccacaaagtcatcaataagaacaggccatgctccttcttcatcataattagacatgtcatctgcaatcatcgtactgaagtctaaaagaagattccaagtgtcttttggtattgatccgtttatgatgttccaacaaaaatttattcccataaggcctaaagaatttnaaatcctcccatttaaggcacntaaagttcccaagttagggcaaatggggcaatt

SEQ ID NO: 48811 - DNA, 448 bp, Homo sapiens
taaagcaaaagactattttaatcccagaagttatctcaacatgcatttgtcttttcataaaaaaattacgtaaaaatgcccccaggaaaaaatactaaataagagtgaaattatatttttgaagcctcttaaattattgctgctgagaaaacgaggtttagtgattttcaaattacatgtataaaactaatgaatgcctctgactgacagaggtttggctgtaaaaaacaaatcagttttatgtgacaccaataactattactgtttcagtgttttaaaacttgccccaaattgtttctgtagctgtgtaaactactgtattttgaaatgggcattaaataatcttttaaaaaatgaattattacagtgcactactagacttcaagtgtgaacatgactcatgcactttacaaacattgaagaagaataaataaattatgggatagtt

SEQ ID NO: 48812 - DNA, 1973 bp, Homo sapiens
  misc_feature (1)...(1973): n = a,t,c or g
tttttttaatttccagttgcttctgttttattagtacttacttacagcaatttatttgggtagcaaagttgaaaacctccagcccatccctcagtcttggtcaggaaaatattctagacaacaggctcaaacagtctgatttaattaggaagttaaataagttgaggtggggtggagtgggatcatcagaaggctgacatgggaccgctggagttggcaatcatagcagtgtgaggttggcaaggggagcaacccccttcaagacaaggcacaaactatttggcaaggagagatgaggggtgggacctcactgtcaatggacatgctcagggaggccagtgggttacatgcaacaggaggatcattcaggcaacttcagctatgaggctgggcatctgtgagggctgaaggctcaggctgttctcaaaggcttgtgattcacctgggagatgctcacgcctgtgagtctttccacactctctggcaggcgagttagaatgtccagtacttccccagtcactttggctgcccccatggtcccactgccgctggacaccagtgtgatcttattggctgaagtcaagggaccactgatctcctctgccacctggggcagcttctctagcagcatgtccagctgagcagcctcttggtacagctggaaggcttctgccttcttggccatctgctcagcctcggctcgggctcgggcccctatggcaaaggcctcagcttccccacgcatccgcacagacgcggcttctgcctccgcctgcataattagttgggacttctctgcctcggctaggcgctccagcttgtagcgctccgcttccgctggcttccgcacccgggcctccagctccttctcccgccgggcgatctcctgctcctgcactgccacctgctgggcccgctccaccacctgcacctgcacccgctgctcctcaatctgctgcttagtcttggccacctgaagctgataggccaggtcagcctgtgctcgggcgggtgttgacctcgatgtcataggcggccttcttcagttcgtaatctctctgtgccttggccatctcgatctcactcaggtactgagcagacaccttttcctgcttggctttagcttcccggatcccagcatctctcttgggcctctgcttctccaatccgtgcatctttttggacttgagctgttcgagccttccccaaagagtgcaaatagtcctggtcatcgtgaatgtccttcagagtgtagctaaccacactgatgcccatgttgaccaggtctgaggaggccactttgaaaacctgttctgagaatttctgcctgtccttatagatctcctccacagtcatgtgggccatgatggccctctggtggccctctaacgtctccagggcaatgtgggcaatctcagcctccgtcttccccaggaacatctgacaggcggccgccaacatctccttgttctgcccctggatttttacctgggcaatgccagtgactgagatggggaccccatggcgagtgtaaaccttttcactcttgacattgagggtcagtgtgttgagagagatcctctggatctgttggatgcagggcaggacaaagacacgccctccagccaccatgactggggggcttcggcagaacccggagaccaccatggcctcatttgggccacaagtgaaaaacatggttcaggctggagcttccgggacgcgggcggcagcccggctggggtctcgggaagggcgtgtctttgtcctgccctgcatccaacagatccagaggatctctctcaacacactgaccctcaatgtcaagagtgaaaaggtttacatttcgccatggggtccccatcttcagttcactgggcattgcccagggtaaaaatccaggggggcaggaacaagggagatgttgggcggccgcaagnttatttcccttttagttgagggtttanttttag

SEQ ID NO: 48813 - DNA, 787 bp, Homo sapiens
  misc_feature (1)...(787): n = a,t,c or g
ttttttttttatcaaggaaagaggtttatttagctcatggttcttggggctggatggtccaagattgggcgactgtatctggtgaagggcttgtgctacttcatagtatggtgatagttgcttctgccaatggacactggcttctgcgacagagtctcgggaatgagtatgaagctctcacatccccgcagacctccttccgccttaaagagcctccacggtgtgtggggattttcctggactatgaagcaggagtcatctctttctttcttctaaggaattgaagctcccagtgacctggagggaggattcgtgattatggaggcggttaaatcccaagatctgcaggataagtcagcaagatggagtcccatgagagctgatggtttagttccagtctgatggcagcaggcttgacgccaaggaagagatgatgtttaattcaagtccgaaggcaaggaaaaagctgatggtcctgtccaaaggctattaggcaggaagaattctcttagggcagagttagctcttttgttctattcaggccttcaactgattcagcannnnnnnnnnnnnnnnnnnnnnnnnnnnnnnnnnnnnnnnnnnnnnnnnnnnnnnnnnnnnnnnnnnnnnnnnnnnnnnnnnnnnnnnnnnnnnnntaatgtttgaccaaatagctgggcatcttgtgacccagttaagtggatacataagattaactatcacagtgactcagtggaattttttgtttgcttttgtacagttttaaaataaaagtttggtatttgtg

SEQ ID NO: 48814 - DNA, 1637 bp, Homo sapiens
agtcaaatgatttcagttcgtgaagccaaagccattccaaggcctgatggtattgaatggagaaataaatacatctgtgtagaagaaccttttgatggaacaaatacagccagagcagtgcacgaaaagcagaaatttgatatgatcaaggatcaatttttaaagtcatggcacagattgaaaaacaagagagatttgaacagtatactacctgtaagagctgctgtcctggaaaaggataactgggcctctatttcttaattaaattcttcccaggaaataaaggaacaatagtttcattcataattacattgtgtttacctccatcatagttgctttttttcatagttcttggttttccatgttttatttttaaaaagacatataaagattgcatattttattatgacatttcctaataaacccctttgatttaaaaatgtatttttaaaaatgtttacattgatgatgagtaatattgcatgtgttttcaggtgatcagataaaatatattttgggaaattaactgaacaaataaaaagtttttgatataacttcaattaattgtaccacatgctaatcctgaagagatgtgtagaattttggaaagggtctaattcatacatgcttaaagtataacctacgttagatagtttgttgtcaaagtctgttctagtaaagtgaagattcaagtcagttgttcagttacttgaagcaaaacgaaatctttcatttcagtcaaatcactgcagtcatgaaatactgaacaattgccttaagtctttgcttgactcactgggatagactgaggctttgggtgtgtctgtattagcatttcattagtacttcacatgcttttgatgtactcttgagattgctttaaattttgtattgaaacaacaatacattttgcactgtagtaatgggagcactaactcttacaacagttagtgaatcgttttaaagaatcagttcagtgtagacattttgaaaagattgtttcctgtgctttacgatagcttagtgcaatgtgcacttctgttttacttgccattttcctgctctgttttctctgtgacatgaagcaacagaaactgagatcaaagttaagattatatcctgtttgtagtatcagatatttttctgtgtacaattataggattgtaatctaaactggaatttttaggcagtaagtcaccacaaaatgttttagataagacacaataaaattattataaataaaagcttaatgtttgtaaaaaatctcttttttagtatttcttttttcacatgaaagaagtggtggctgctaaaaaaaaagctacagtgtttattaagggtctttttgatttatgtaaatatttgtaaattggtcagtgcctgtaaatttaaatataaaaagtaaccttgaaaacagttttaactttttcaaaagaactatgtccaacattttttagacctgctgtagtacagttttgtacctctaacgtatttttttttttgcagaccaaatgctaaaacttttgcttttctttgacttgtaaaaggtgcacattttcattttcttccttaagttcaaatttttgtatgatgtcaaatgcaataaaatttatatatggaaaaaaaaaaaaaaaaaa

SEQ ID NO: 48815 - DNA, 525 bp, Homo sapiens
cctcggttccgttgcgtaggttgtccctcagtgggacactgcagggtgcggggacaactacgaagatggcggttgcgcgcttggcagctgtggcggcctgggtaccttgtcggagctggggctgggcagccgtccccttcggtccccaccgtggcctcagcgtgctgcttgcacggatacctcagcgggcgccacggtggctcccagcttgtagacaaaagacgtcactctcattccttaatcgaccagaccttccaaacctggcttataagaagctaaaaggcaaaagtccaggaattatcttcatccctggctatctttcttatatgaatggtacaaaagcgttggcgattgaggagttttgcaaatctctaggtcacgcctgcataaggtttgattactcaggagttggaagttcagatggtaactcagaggaaagcacactggggaaatggagaaaagatgttctttctataatttgatgacttagctgatgggccacagattcctgttggatctaagcct

SEQ ID NO: 48816 - DNA, 744 bp, Homo sapiens
  misc_feature (1)...(744): n = a,t,c or g
gcggtggagatggcgctggaggacgtgaatagccgcagggacatcctgccggactatgagctcaagctcatccaccacgacagcaagtgtgatccaggccaagccaccaagtacctatatgagctgctctacaacgaccctatcaagatcatccttatgcctggctgcagctctgtctccacgctggtggctgaggctgctaggatgtggaacctcattgtgctttcctatggctccagctcaccagccctgtcaaaccggcagcgtttccccactttcttccgaacgcacccatcagccacactccacaaccctacccgcgtgaaactctttgaaaagtggggctggaagaagattgctaccatccagcagaccactgaggtcttcacttcgactctggacgacctggaggaacgagtgaaggaggctggaattgagattactttccgccagagtttcttctcagatccagctgtgcccgtcaaaaacctgaagcgccaggatgcccgaatcatcgtgggactttcctatgagactgaagcccggaagttttttgtgaggtgtacaaggagcgtctctttgggaagtagtacgtctggttcctcattgggtggtatgctgacaattggttcaagatctacgacccttctatcaactgcacagtggatgagatgactgaggcggtggagggccacattacaactgagattgtcatgctgaatcctgccaatacccgcancattt

SEQ ID NO: 48817 - DNA, 434 bp, Homo sapiens
cttgaacattgtataaatttctctttgcatataatacatatttgtgaatgagacatattcccaaaaaattcttatctctgtatgtgattggaaaagaaaagatcacatttgtatattcaacaatctttcacctatttcataagtcattttttcaccctgtatagtatgggaattattttttatgttaaatagaaactgaatgtactgggttgaatggtgtcctctccaaaattcatgtacttcctggagcctcagaatgtgaccttatttggaaatactgtggttgtggttgtaagtagctaagatgaggtcatactggagcagggcaggcccttaatccaatatgactggtgttccttataagagaagatagggcgggcatggtggctcacgcctgtaatcccagcactgtgggaggccaagccaggcaaatc

SEQ ID NO: 48818 - DNA, 1058 bp, Homo sapiens
  misc_feature (1)...(1058): n = a,t,c or g
tccgattaancgaccccngggaattgccccgngccagaatcgccggggccttttttttttttttaggaggactgcacgtggccagcggtccgaacccggccgaagtgatcctcgcctggcccccaaatgctgagattgtagcagagccgccagcctgcccgctgtctttttgtttacttaccagtgtttttcagagaacaaaaattttaatttgatgaagtccaattaattaaatttttaaaatagagtgtgatttttttgtcatgtctaagaaactattgtctagtcctaggtcctaattctcctttgttttcttctaaatgttttattattttacatgttaacgtttagatttatgatctattttaagttttttttaagtatgaggtttatgttttttgtttgtgtttaggagcatatggatggatgtctagttgttccagcaccatttgttggaaagactatcctttctctgctgaatttcttttatatctttgtcaggaattagccatattggtatgggtctatttctagactttttattttctcccattgatctgtacatctctccttttgccaataccacataagtcaagatgactatagctttgtaataagtattaaaatctggtaatataattcttccaattttatttttcttttaaaattattttgactattgtatcagtgttacctttccatttaaattttaggattagcttagctacaaaagtcctgctgggattttgattagaattgcattaaatctatagataagtttggggagaattaacatatttatgatcgccttttaatccgtgaacatgacgtgtctctccatttatttgcatgtttagtttctttcttcagcattttatagttttagcatacagatcttgtacatattttcttagatttgtaactattttcttggagctgttgtaaatggtattgtttttctgatttttggtttctacttgttcattgctggtgtatagaaatacagttggcttttgtgtcggctttgtatcccgtgatgcaagtaaagcagtactgag

SEQ ID NO: 48819 - DNA, 1041 bp, Homo sapiens
gcggcacgagccctgatgaaaagatccctaccctaagggaagctgttgcagagtgcctaaaccataacctcacaatcttctttgatgtcaaaggccatgcacacaaggctactgaggctctaaagaaaatgtatatggaatttcctcaactgtataataatagtgtggtctgttctttcttgccagaagttatctacaagatgagacaaacagatcgggatgtaataacagcattaactcacagaccttggagcctaagccatacaggagatgggaaaccacgctatgatactttctggaaacattttatatttgttatgatggacattttgctcgattggagcatgcataatatcttgtggtacctgtgtggaatttcagctttcctcatgcaaaaggattttgtatccccggcctacttgaagaagtggtcagctaaaggaatccaggttgttggttggactgttaatacctttgatgaaaagagttactacgaatcccatcttggttccagctatatcactgacagcatggtagaagactgcgaacctcacttctagactttcacggtgggacgaaacgggttcagaaactgccaggggcctcatacagggatatcaaaataccctttgtgctagcccaggccctggggaatcaggtgactcacacaaatgcaatagttggtcactgcatttttacctgaaccaaagctaaacccggtgttgccaccatgcaccatggcatgccagagttcaacactgttgctcttgaaaatctgggtctgaaaaaacgcacaagagcccctgccctgccctagctgaggcacacagggagacccagtgaggataagcacagattgaattgtacaatttgcagatgcagatgtaaatgcatgggacatgcatgataactcagagttgacattttaaaacttgccacacttatttcaaatatttgtactcagctatgttaacatgtactgtagacatcaaacttgtggccatactaataaaattattaaaaggagcactaaaggaaaaa

SEQ ID NO: 48820 - DNA, 672 bp, Homo sapiens
ataaatttagaattataccgcaggtcttcctggttctattgaggaattatacctagaaaataaccaaattgaagaaataactgaaatttgtttcaatcataccagaaagatcaatgtcattgtactacgttataacaaaattgaagaaaataggattgctcctttagcctggataaatcaagaaaatctagaatccattgatctctcctacaacaagctctatcacgtcccgtcctatctacccaagtccttgctgcacctagtactccttgggaaccagattgaacggatccctggctatgtgtttggccacatggaaccaggcctggaatacttgtacctgtcatttaacaaacttgctgatgatggcatggaccgtgtctccttctatggggcatatcattctctgagagaattatttctggatcacaatgacttaaaatctataccacctgggatacaagaaatgaaagcactacattttctgaggctgaacaacaacaagatacggaacattcttccagaagaaatttgcaatgctgaagaggatgatgactcaaatctggaacatcttcatcttgaaaacaatttatattaaaattaggggaaataccatcttacacattttccatgcataagatcatactcaagtatcgttcttaaaccacaaaa

SEQ ID NO: 48821 - DNA, 1476 bp, Homo sapiens
  misc_feature (1)...(1476): n = a,t,c or g
ttcctttcttaattttgtctttttgtttgggatcagcttcttgcactccttccctaactcaactgttgccgtctcatcttctctcatctgatcacttcatgttttgtttttgttactgcctggatgaggcacttctgtcaattttttcaggaccttagttccagcagcagaatggaaaaatccttgaagcccaggctgatgcttgaagtaactgtggagggagtgttcaaaatactactgacgcaggcaccttcttggcgctggagagtcaaaggcatctcccttcattagctgctctgagcatcaagaattaagaagtctttcagtggaattgtacaagagtccctttgaagataataatcttggctcagtttgtataaactgtcaaattttcaaataataggtagggggctttcactaggaaaatcatgtgctcagaagaggaaatgactcgtagtcaggttcaggagttagtggagtatttggactttggtactgctgtcttccaaggtagctctaagttttgatgtgtgggcttctgagtttatattctgaaaggaaatacacttcttttgaacatccccactaggttcttttccattgtcaataaggagcatcagccagtgaatctgtttcaggtttccattctgcagaactcctccaaagcatgtgctagtggcaagacagtggttcttatgatgttttcccttaacttttccttgtatgttcttgggtggttcctaagggaaagggaagcacatgatcatgggaatgatagcccagaacaaaaagaaatcttgtcttaccacagtgttttataggagagattgggagaaatcatcctgttttctctgtgacctgatttcagaagagactgatccaaaaattataacggcagggaacctagtgcatttggcactgagatttaaatgcaaccagaattgtcctcaaggcccagccataaaagcattgtctctctcgaccttctggtatcttgttagagagcttttcactgtgaggaagtgtggaaaaatagctnnnnnnnnnnnnnnnnnnnnnnnnnnnnnnnatctgttaggttggggataggttttctgctagccaatattaaaagagacctgcaataaaaaaattaccctgatctgatagaaagctaagtgttttcgtatgtgtgggtgaatgtgtgttcatgcccgtatatgtctacacacagatgacaaattatatttgaaatcgttggaaaataaattcagatcaaaatgcctttcaggcccattacctagaaatctatcttaaaacctgggtatgttcctaaggtcatttctttgcttatgctaaattaattacaattatgaatggaggatattctactgtacttttttaaaaagaaactatttttgtgtttgaaagtgaaaccaacatccagatctatagcagagtccttattcttctcataaatctttttactttggctac

SEQ ID NO: 48822 - DNA, 2332 bp, Homo sapiens
ttttttttttaaaggcaacagactctttatttaatgtggtttaaaatacatcaaaatcaagtccctggctgttgtgaatacccaaaggagacaaaaaagctgccagtgcagcttcaaacaagtctgagtggccgggctgggccataaggaaagcagttacagggacagaaggcagctcccttcccccaggaagggcaagaggagcaggtgcctggctgtccctggggtgaccacctctgtgctgtgcaaggcggaaaggctggggcagcagctggagaatcagctcagcaggccttggccctcccccgtggacaccaggcagctccactggcctccgggtcagccctcagggccaccgtgatggggtggaggagggttaaataaccatctttacagaaataacagtctcctacagaaagtgcctgagctcagcccatggtccgataacctcatggaaaacaaacaacaaataaaaaaaaaaaagtgctgctgacacctctcagaatctggtggacatgaagctctcagctggacaaggccctgaaaacaatttactattagcagagccatgcgctcttgagcttcacctgctgtggtcccctggaggaaaagctagcaatctaagaaaccaacacagatcttggtcctaaaactgaggtccaaaagtgtgggacccaccccaggtgaggaagacactggccttcactcatggataggcacctcccctgcatctggccccaggacctgggctactttggaaagcagaagcagagcagctgtagtgattggttgatttggtcaatgaagagaagaaaaaggtagggaacctcatctgcagactggcctgaaggtctagacatggatggagctgtgagcaaaggctgcaccttgcctggggcccacattcctgacctgggaaacccagctggggccacctgctcactgtggcctcctacaccaccacactgggatccagcagctccagtccctccacaggcattaagaggtagctgaagtgtgagtcaggcaattatgtgggcccactgtaagccctttccccctctcttcaagggggaaggtgcaatacctctgccctccttcccctgcaccctactcctcgccctagcaaaacactctgtgaggttggcagctccttgtacccagcttagccctggcacaggggctggggtagggaaaaggccctactggagcaggaagaggcaaggactactccagacagagggattcaaaggggaagaaaaaggtcatgggaaacacttcacaggacagcagtatctcagccagagatggcagagatctcaacactcacacagctgcttgagggcacctagatgtgaaggatacaccagagaatagcaggcaactctgatgcagatcagtggtaactgccctggggcaggagaaggagaaatggtgtgccattcatttgccatctctggtctcagtcacacatgattcagtacttaacattctttgtgaaccaacttatctgagagatttaaggtaagggctaaaagagtgggctaggtatggaagatgaagggacctgcaggacaatgaactagcttcaaagaaaaacagcaagaagcaaagccctaaccatcctatccatcttggtctgagtcattctgttgtcccagaaaactgcttggcacaaacactggctaataccctggcaagtttgcaacagcagaacattcagcatatagaatggctctacacagtacatagtagttatgtactggagtgggggtagaacaggacacagaaacaactgtctgcagccattttatggatttctggggcccagtcaatagttcaatttcatttcttacctgttagacaacagctatgggctcccacacaggaagaagtagaatccccaaggacaggcagggaggtgccaggaaatagaatcaggacaaatcttgaggattgcacatgtgggggtgggggcaggaagcagaaaaacccatgaagccaaagaggcagctggacatgggacccagcaactgctgcatggagacagtgctgatgggaactggtggtggcctctcaggactgaaacccacaggtaagcttgtgcaaagccatcagaagccctttcctttcttttaccacaaacaacctgatctcaccaaacaggaaacctcagcatcaagatggcaaaggagccaagtggggtggtgaaggaggtgggacactggaggccaggcacccaggcaccactgctacagcatccctcttccttggaaggtcctcaatacaaacactgtcatgtgcaaaaaaaaaagaaaaagaaaaaaaaaaa

SEQ ID NO: 48823 - DNA, 494 bp, Homo sapiens
cttcttctgctttggggttggtgagcgagaactgctagactcccgaacaaggctgtaaggtttgggaggctcaggagctggttgtttagcttctcgggcacgacgctgaggatcaaaagagctgccatctacgtaagaatcactgatgccaaagcagcacggagtctttcattcttcttctcatttaattctgccaactggtgagtctccgtgaccgctggcctctgccctggggtctcctccttgcccccagggttcacatccttctccagcaacatgagtcgaaaggtcgccactttttcctgaatttgctgttcctcgtacccctgctcttccatcatctcctccagctcgaggcatcgcagctcgacgcgccgcttgcgctcgtggtccaggatgtcaggattaggccgcttcaccagggcagcctccaggcgccgcagttcctcctctcccttgtagtcaggccgctcaccccggcggccccgcaccag

SEQ ID NO: 48824 - DNA, 407 bp, Homo sapiens
cttcgcgccatcctctagcctcggccacacgagtggcatgggactgcaggcgcaccctgcatttgtctcctgaatgttaggcttttgattttttgtttcagtcactcttgaagtcactcttgactgaagcaaaaaattaaaagctttacattcaaaattctcaaaatgaagctgggtgtggtggtgcacacctgaggttccagccacttgggtggccggaggattgcttgaggtcaagtattggaggctgcagtgtaccatgatggtgcctataggaatagctactgcactccaacctggacaacgttatcaagaccccatctcttagaaaaatgcaaaattaaatgcaaaagaaatgggctgggcatagtgattcatgcctgtaatctcagtaccctgggaggctg

SEQ ID NO: 48825 - DNA, 1160 bp, Homo sapiens
  misc_feature (1)...(1160): n = a,t,c or g
gacagatcttctggggcttaactcaaatactgttgtgtctgcaccagtcttttagtgtctcaaaatagattattaatacatccataagtctgtggttcttctcattctcatctataatccaccactaccaagagagatttctgtgtcttaaatgatttggtgcatattttgcaacattgagagaaaactgcccccatctcaagcaagaatggcgttggtttcttccatttcaaactaatcagcattctccagcaatgacaaagtgccagagtgtatatatgaaagctaaggaaagcacaaaacaatggttcagagataaattggctaatttgtttaacagttggagactgtgcaatgtacgacttggaggagtttgtttggcataatgattttgtaggtctgtcagcattttgatatattgtggattagccaggtgaatgatccttgaaacatctctttcaggtctggagaaagagacagaatgcccttaaagtgtgaaataaccttatacctgaattacagttttgtgatataaaataaagctgagtataaaataaaaccaatcaaacacagaatttgattggatttgttattcattggtatacaacaatttttattcttatgtgtgctttaagggctgtgttttgctcttagggtactcaattttatgtttccttttggcattctttgtgcaaaaagaagcatgtggtggctctcatttaaatttccaaattattagtttttatcttaaacagattactgattatacagaagatataatttattggaagaactgccaaatacattttgtccttctaaaaatatggaaatttaaatagtagtctggaaagttaccatatgataatttttaattgtgtgntcctagacatgccttaggtaactgcagaaatagcaaattaaatgattaatgagcttattagtcatagtaaacatacagattcctaattctatgacagtgtacatatatgaaaataaatgatgaaaaaagaactataatatttttaaaaatatgcttttatttatatttcacataatgtaaagttctacaaaataaagctagtaggcaagacccctcagtgtatacctttaaacccataaattaattttatatcaataaaataaaatactttctctagtaa

SEQ ID NO: 48826 - DNA, 1376 bp, Homo sapiens
cctgcgggttggacaagcttgatctaaagcttttcccaagttcctcacagtattagtttcctagggttgctgtacaaaataacagactgaatgatttaaccaagagaaatttattgcctcacagttctggagcctggaagtgcaatatcaacggtggagacagggttggtttcctctggaggccataatgaaagcatctgttccaggtctctgtccttggcttgtagatggccatcttctggtggatccacacagtcttctccatgtgtatccttccttcagtttcccttatagggacaccagtgatgtcagattagggatcgaacccaacaacctcatttgaagttactcacctgtttgaaaaccctatgtccaaatacagttatagtgtaaggaactaggacttagggcttacaaatatggagtggggcatcatccagaccataccatttaaattgcagggtttctctccaatgtgagttcacatacacacattaaggtttgtgggattcagaaaggtattcccagattctctacattcatacggtttctctccagtgagatttctgatgtgtttggtaaggcttgagaattcagcaaagtcatttccacattccctgatgcagggtcttctccactgtgaattcatatgtgttcattaagacctgagatacaaagttgcttccacatttttacattcatagggtttctccccagtgagttttcatgtcttcagagagaacagggacacctttaggttttcccacattccttatgctgacagtctctcatccgcatgccttctttcatgatttcgaaaggaactggaagaactgaaggctttcccgcactccttacattcatagggtttctctccagtgtgagttcgttcatgtaactgaaacgaattggagtaactgaaggatttcccacactgtttacatttgtagggtttttctccagtgtggatccgcatgtgaaggttaacacacgtgggaaacttaaaggctttgccacattccatacacgtgaatggttttttggcgctgtgggtccgcatgtgattattaagactggaggaatgcgtaaatgctttaccacattccaggcactcaaagggcttctctccagtgtgaattctcaaatgtccactaagatttgaagaaatagcaaaggctttcccacatttgacacattcaaaaggcttctctccagtgtgagttcttgtatgttcactaaggcgagaggatctggcaaaggcctttccacattccttacattcatagggcctctctccactgtgagttcgtgcatgcttagtaaggtctgagttctgagtgaaggctttcccacaatccttacatttatagggtttt

SEQ ID NO: 48827 - DNA, 583 bp, Homo sapiens
atttgacttctgagtgaagcaaaaactacccagatccattccctacaattcacatccccaaaggtcaaaaacaaactaggaggacctgggaatttcagctggagatactgattattgagttctgaagtagagtgttggaaataggcaattagagaaagtccattgatgtcattttgtttataatattgcagttcatactgaatgaccacttgatatgactaattcagggaatatatatttttctatgaaagctatgaatgttactatcacggcttttccttatttttacttgtatgtagcagcatttacagaaatgccaaaaatgtgcctcattaagaggcaggtcttaatcagttagataaaaataaaatgtatagcttaagatcaaaacagtcatatttttagatacagtgaaatcttttatgtttctctacagcaccttaaaaattagaacttgaatactttgagtaaacttactacaatctcatcccaacaaactttaatggtagcatgtttggcctatttcattgtggcctgtactaggattagaaaatttggtcgtggtataacaaagaagtgtatt

SEQ ID NO: 48828 - DNA, 1570 bp, Homo sapiens
gcgtgcctgagccaccaatccacccagacaataaaccatcctcttccaacccacgccacggccatgctgtgggggacctgctcctcacagagcccctcccaaggatcgggcggaagctgctgggaccctcctgggctgccaggatttagcagggaggtggctggctacagcaacagcagctgggcaagccagataggccgctcatgctctcagcctttctccctcccccgtctcattccaaggctgagggagggccttctcgcctggggacgcagccactttctccagtggagacagggcaggggttctgagtttccgtcagatgcagtgaaatcacagttccctttcatcttcagaacctctgtcgtgaatgtgttcaagaggctttggttaagtcaggaagaagtgcccagggtgtgtgtccccagtctccctaaggcctggactcgcccatgaacccaagtcggcttctagacagcatgtccctaacagcagccctgggcccccacctcttctaccatccaccccagacttaccacacacccttcctgctgctcctcttcctgcccttatcaacctgggtccctcacacttcgccagttgcgtccccgtggacagtcatgagtctagaggaaaggggcatctggtctcaggcccgtgctctcgggtggcctccacctgctccctctctcctcactggcctttctttccgtctagcttcctcttcaggaaatgtcctgactcccctcagctcccccttcacccctccttgcccgcctaccctccctccagaatagcccctcacccttcttccccttctagttgatccttttcacctccctgatccccttcatttcttcaccgcggttcctcgtcataggggttctcactctgaactttccctctctactacccatggcaggaacctagtacaggtctcccacccagggccttccaccctcggctcctgtgctgggagaaacttccaggcgtggacagcccagcctgaggcattccagtgctggggcaccgtcgcctaacctggtttctagctttgccctcactccccggaaaaactgacactgacacaggggccctttccttgcccctttagctggtacctcagtggggaggcttccttaccaagaatgagttcctgaaacccagggccagagacaaggacaacttaggggaagacggggttttcggtggagccaggggcaaatcttaatgggaccagtgggggataccccagagcccatggcctgactgcacagcctgcctggaggatgggtgcgcagctctgccctccctgaggcccaggactatgcccagaagcgatggggtacccgtgtaggggagccaaggccagtagtttgggggtaggagtcccctagagtctcagaagactgggctctttggagtacagggtccccggcctctcctttaagattctctccccagctggaaggccgatgactgggtggtcgggagggagacccagctctcctttctgtcccgtttgcagcactggttttgtttccttaataaatttttagttatgaaacat

SEQ ID NO: 48829 - DNA, 1750 bp, Homo sapiens
  misc_feature (1)...(1750): n = a,t,c or g
aaaaatggttttttttttttttctgggaaagcctctctgccagctgaagctgccgcagcagagctcatgagaagccctttcctaaggtggctccaggagccctaaccgggctgctgggcagtgcagcattttacttttttgctttttgtttaaaaaagggagatgagtaagcccccgaggacccagcggctgcaacttaaccagcctccagttcaccccagccccagccaggaagagaagcccctctcctgtgcagacaggcaggactactgggtgggcgtgggtgagcaggagctagagggggatccaggcacagcccaggggctgtttgccagatgacccctgaaggccatcatccccagaacatgtgacctcgggacgcccaggtgtgtctgcatgtgtgagcatgtacatgagtgggtgtgtctaggtgcgtgcgcgtgtgcgtctgacagtcctaccagagcagacgctgcccagctcggcgtgggctgggctggcctgcctggccccgagagcccagccctaggttctgacacctgcgaagtgggaaggaccttaaccacccacctgccccaggtgctcacccagttcccgcccttcacagaccccttgtccacgccaggagcctatgtggactgacaggtaggtggacagacggacggatggacagacagccttgccttccttccttcctcggtccactcctttctcctgggatccagggttggggtctgagctccctgtggtggtcattaagcccctcacacggcacctgccgaggtttgcagcaatgacgtttaatacttctggaatgattaggaatctgagaacagaccgtgggcggctatgctgaccagggctccggatgtggaagctgggccctgcctccttgcaggggactctgcccagctggaaggggcaggcagctcggcaggccctgaccggcaagcgggcagtgccaggcagcccagcagcagctggagcttccagaatggcacagcagtgggcctgtggagaggctggcgtcaactgaaggagaactggagggctgacacgcgtggctggcgggcaggcaggccaaggagcagagggcacgggcctacgagagggcggggcggcccagcgcgtcagatgtgggcccgaagccactgtcgccgccggtgccactctgcaggctgtagtggtcgtccgcgtcactgctgctgccaacactgtccagctcaccagggccaaactccatgccctctatgtccacttcttgctctgagtcgtccgtggagacagcagagcccgtgctatcctgtgcnacngctccacgctctgcaccgacagctgctccaggcgccgcttcaggaaacgatgctcctgctgcagctgctccttgatgctcagtgcccggcggtcctgctcctccagtttcttgatgtgcaccttggcccgcttcaggaggctcagcgtggtgtggcgggtgctgtcggggcccaggggcaaccagttgcttgagctgctcaaggtacagcctgagtttggctcgtctgtgcttttctagctcgttgtgtgaagacctgttgttcggggccttgcgcaccnaggccggccgcctttgttttctccctggagaagtcgccgtcgaagggcagcacctgaggcgtnancgtgctcggcctctcgatccctgcgctccaggtacacngncgcctcngagcaggatcagcagggagttcagctccatcctcnccgcccgcgt

SEQ ID NO: 48830 - DNA, 599 bp, Homo sapiens
ggctgtgattctcactatactggtcctgaggaaagggcttctgtgaactgcggtttttagtttttattgtggttcttagttctcatgagacccctcttgaggatatgtgcctatctggtgcctctgctctccactagttgagtgaaaggaaggaggtaatttaccaccatgtttggttcctgtttataagatgttttaagaaagatttgaaacagattttctgaagaaagcagaagctctcttcccattatgacttcggaaatcacttatgctgaagtgaggttcaaaaatgaattcaagtcctcaggcatcaacacagcctcttctgcagcttccaaggagaggactgcccctctcaaaagtaataccggattccccaagctgctttgtgcctcactgttgatatttttcctgctattggcaatctcattctttattgcttttgtcattttctttcaaaaatattctcagcttcttgaaaaaaagactacaaaagagctggttcatacaacattggagtgtgtgaaaaaaaatatgcccgtggaagagacagcctggagctgttgcccaaagaattggaagtcatttaattccaactg

SEQ ID NO: 48831 - DNA, 1827 bp, Homo sapiens
tacattttaacttgacatttgctttatcctatataatacaaacataacaaaatacatttaaaatgttgttgaaatatacaaaaatttaatgtaatttttgcgtctgagatgtttaaataagaaacttctttaatcaggtatccctttggactgcaagagcagtttatatcatagctttgcagcataatctttttactctcaggctcttcaagcatttttatcttctttgaaacttttatctaaacaaaaatagtattaaaaaagataacagaaggggttagattctgccaatgaactgtggacatcagtatctcattcttctatttgcctccttattctagtttgaaaaagctttggaacacattattacctatcattattacatatttcttgtagctttagtgttaactcccccgactggaaatagaagttgctctttaataagggcccgggtgcttagggagcaatgtgagatttttcttacatctcttgggccaaccctatacaactaattctgggaaagggattgttataatacactgtccttgaaaagtttctttcagtccatttggagaaatgttggataaagataacttagtgcttacaagtgctctattattagtagtataataacaataattattattaaactaaaagttatctattactttatcaccctttctcaatttatgttttctcactctttaaaacatttaccccaacagggtgaaaataatggtttaaaaattgtaccttcatttacctttattatactacctaattgcccataggacatctagctctcacagttttgtcattagaagcaaaggacctgccaaatttctgaaccttttaaaaagagaaaataaatgccacaagcattttctattttagttttggaaatgttcttttttttttgtataaagggggaaaaattaaaaaaaaaaacctctcccctgaaaatatttgatgttttctatctgaatataaatcctgcagaagtcatctaagcctccaagtatctgtttccttcttggttaatagcacaacctggatgtcagacaggctgaccatgactcacagtgggactctaggcaactagtgtcaataggcttggggaccacaatgagtgaaaacaaaaacccttcctcttccattgtgtgttctaagagtgagcagacctaagagtggtggtttaagcactttctatcagaatggtgattgcttcagtgttctcaaggagatggcaacatcatggaagggcagcaacgtgagtcagcaacgtggtatatgggtcccaatcagcatctgcttctgatttgtttttgaaagaaaatccttagtcggttttcatttgaagcctgctgcagatcacagcgtcagggaaacattccaccttgctcctgggccagagcattccttggcaagaaagatctatttaaagatgaacgaccgagatcggatcgtgccttccccttggttgagctgttttcttatttgtgacaatttccagcgtaatatcttgatccactcatcagcttctactccggtctttgcacagagataaaatgtcctgaatggaaataccaaacaaaaacagtttaccctttcttgtgaataatcgaattgtacagctgaacattctgttaggtctaggatccgaattggttctggtgacatctggtctttgaagtatttcagttcattcctgtgcagagtaaaccatcttgttttccaggtcttgaccaggcctccctgtttggtgaggtaaccttctttggtgcccagagaaggtgctgtgggcacaaggtcatcttctgttcttcc

SEQ ID NO: 48832 - DNA, 1050 bp, Homo sapiens
tttttttttggtacacaaattcagaagtctttattttgaaaaaaattcttccaacagtatttcacaatgaacaagaacttaaccaaatttatctatcatactaaagtatttcagaaatgaatattgaaaacagcctgtaagttttcatccaatatttaaaaccacctcctggaactaaaattggtcttcaaaaatcatggcgtattaacattttcccaaacatgccctgctgactagaaggtcctgttattctttcttttgaacttcccagtaagtttccttgttccctattcctaggatttaaagtgcaaaggtactttttatgagctattaggacaagtattcttcattgaaaataaacttttgcagaaaacaaatcctgtgcttgactaacagcaaagacatgttaagaaatttctgagctccaaaccatgaggaatcagaatcacaactttcagagtaataactcacattttttctaaagcataggaagctaattttgtataatgaacaaatgtggttgtgccaaaataggttttgccacagttaatttccactttctcttcttaaaaataaggtatagtctaagctaatgtagataaggaaaggcacgataccaacaaactgcaaaacaaagtatagccccaagccatgcactttttagagtcatgagtagggacaatgaaaaaattaaggtgcaaaatagatgtgaacttccacaatctttcaatggactgtcttaacagtttaatttaaaagcataggctttttcatatatcttcagatagtcaattagagagattttttttcttctttaaatggaagaatttcttaaatggaagcacaagatcatacctacacagctggtgagcctcaaaatagaataatgtctactttattaataaagtttccagtcaggcagaatcaagagtaatcttcatatatgcataaggatattatcattataacaatatttttagtagaaaagtctataaacaaatgttctccaaagggacatccatataatggaatcctggagacattaatgtt

SEQ ID NO: 48833 - DNA, 796 bp, Homo sapiens
ttttttttttgtcaagaaatttattaacctttataaacactattttcactcaatcattcataaaaaatgatttgtgattaaatctgtaataaaaccatataacgttcatcaatgcattcaataagaccagtttcttccatggaacataataaaccactttaaaacagcagttttcattcatgtcatataaggctgtcaaactaaaagtattccttataatgagttgttacccaagaaatccatctcacttcccgtgatgtggagcctggtgatgtgccctctaagagttgggtctgaaagaagactctgcccctttatggccacctccccagtctctctcaaacaagtttcacaacaggaaaatatttatgagcagagaaatcaaattcaggaggaactttagattcctttttgtgtcctcctgccaataacttcataaccacaaagttgggtttggcaacctttaaaattctattaacctcatggtccgggttaggaatattttccaatatcatttttgcctgttgaaagtgcttactagctgccacatacagttcaggagactgaggaggagggctatatttattgaggtcagacatttccttgaactgtaagtagtgcactggcggcggggtcatcacactgttgaatggagcaaacctgtgttcataccgaacttgttcactatcaagctcaaacttcggtttacgtactttgccgtccatgtcaaatgctaccatggttttaaacattccagcacacatgttctgatatgcttggctcattgtgatctctc

SEQ ID NO: 48834 - DNA, 1194 bp, Homo sapiens
tttttttttttttttggttagaagtgaatacttttattgagtgattttagaagttgttttcggatattccaagtatttaggatgtggctgtggtggaaacaagtaatggaaccaaagccctgtgtgtaagtagtcactgaagctaaccaggtagctgaaatttatttcccccaaatttactgaaagaatgtgacctttgtgctctcaaactgtggttcaggcactccagaatttttttctgtaccttcaattctctcagatttaaaaaattatactagagaagaggacttttgcctatgaatacaaacaacattgcaatctgcatctgcaaacattcttttcaatagacggttaggtcatggatacaagtaaacacttggatataaggcaaacatttaaaagtgcatttcaggtattaagtcatgaatgatatggaaaagttgccactaaactttccactgaatagtgtttcacagcacaaaaataatctattttcctgatacttttttagtatggataccaagacagcatgacatcagttgtctaatttttttccaatttgatttaaaaaacccacatgttcaggcttaaaagatagcattatgtttaatgggtgctaggaaaccaggccacatggaccaacagacctaaatttactctaaccctgaattttgttagcacccaataaatgaattaattgaaatctggatttctctatacggagatgaagaaagtcttttagtgtagttattttaaaacaagttgctcctatttccttatcagaaacaagaccatatcaacaacccaacatttaaataatgaactggaaatacttttaaaaaccataaaactcatctctatcccattcttaagtaaaaatcaatcttcactttctacttagttataagcaatcccacagacatttgaaaatcagtgggcaaactaaaattgttgaataaagccaaactttttcaaaccaagtatttgttaaatgtcatatgtattgtctactataaagtgattcaatattttactatagaggatagcatctatttttcaaaaatgtgagaaattaaaaaaataacaaggcaacaactttggggtctgatacatgaaataaatatactgcaagatagagtctatcaaccagaaatcacctgttctacttgttaaatttctctaacacattctaaa

SEQ ID NO: 48835 - DNA, 731 bp, Homo sapiens
  misc_feature (1)...(731): n = a,t,c or g
gtaatctatgaaatttcggttttaaaaaatgtgttaagtctttgtttttggcctatcaggtggtttataaagaagaatgttgaatgagctattgagaaggctgtgtatcccgatgttgttgaggagtgttctctataccttcattagaaattattgtttttgactgccttttagtcctctgttcccttactaatatactgtcttgttttattattattacagaaagtggggtattgaaatatcctactataattatattgctctctctgtgtttattcagttttgttagtatttactttatatatctgaaagcctaatttgagacacacacacgcacaaatacacacatggataaacaaatttgtcataggttcccagttaataaatctattattgtttaatgtctttctttgtctctttgcagttttgacttaaagtacattttataaaatatgacagcttttgacttaagatgtagcttgtgtaatattattttgacctcttctgctctcatttgggttaatatttacatgcaatgtctaaatctatcttgccaccttcagtcttttcttaatcattaggatgtcagctgacccttgtaggaaagggcaaattgggatcttgggtttttaatnaattttaaaatnaaatttctttattggaaagtatgtcctcttggattgggaaagttttctggaaaccaagggggacttaccaatttttttttgttg

SEQ ID NO: 48836 - DNA, 1030 bp, Homo sapiens
gcgtttatccaaatggatttgatgactttttaggatcacagctctttgaggcactcagctcctttgaaagcaaaactatttctttagccaaaagaaaaaaattggatcttccagtgagcctttctgtgtggctgcaggactagcccggaacgagagttctgtggagcgtcacagggcgggtgctttttaacttgggcattgcacgtgaatgtccccgcctgctgtccctaccccccagggtactcgcagtcccctgccctagcctcgggcatttgtgttgtgggcatcttttcctgcgggtgggcatgttaagatctctgttctgggatgataggagttttactaggaatcttttgaaaccattattggcaacttggttaagtataaatatttataattttgtaactaccaacctggctcggtgcctgacccctggtaggtgcataataccctccccttaggtaatggcattagactttaaaatatgtgtttggcccagctctgttaataattagccatttgactttgtgcctgagagtttggattgtgggaattttcaggttgcacttcttgtctgttttcccttaattaaaagcaaataatgaccatttgaactgaaaaagaatcaatatgttaaactatttggaaagttctacaagagataatggtatgtatattgaaaattatacctcagacattgcttatttgcatatttgtgtgtatttagtctgaataatgaaattaagactttaaaaatgaacattcgcattgtttcatagtggcgtaagtttcatgtgagccttgggttaatattaattttccacttcctttttttttttttttttaaaggattctatgcttttatcctgacatctgcacgtcatcggaacatctctcttccagggcgtagacgtttcatttaccgtgtacagtcattttcttcagtttgcacttgcggccactgttttttgtgtggtcttgagtgtgtatctctacatgcgctctttgaaaagcgccccggaatgaccga

SEQ ID NO: 48837 - DNA, 515 bp, Homo sapiens
caggcaaatcccaagtggcagaagacccccgtccctctcagagccaggagccaagtgaccaacgcaggtgagctggtcattgtctcgtggccagagggcccagcagccactgtggacctggggcgttctggggctgcagaagactgactgtggatgtgccatttgccaggaaggtatctaacttggctttgtgcctgaagaactgtttcttgtctttcgctgtagcagtgggaaactccttaagctgtggttcagcctgggccctccctctctcctattaaacaaaactaggagagtccatatgtctccattgtgagttatttagaatggaggagtcgtgactgcttctaaccagagcctcagcccccctgaggatgtgaaaagaaaacaaacaacttgtaccttctttctgatatcaccgtcattcctctttctttgtcaccaaggaaacgagtcaaaggaacagcacatacaggagagtttgtagaaaaataaaaaaaagtgataacctccaa

SEQ ID NO: 48838 - DNA, 689 bp, Homo sapiens
tttcttttacaatttaatctttactcctgtacgataagagtgatagttctttaaaaaaattaacagcatcaatgtctggtttatggtattgataatactgaagattcatgattataaagagccaaggtttttaacacaactgtaatttcattcttcaattttagtcctttttttttcaattccattttatttcttccacgagcaggtaaacatgcctcaaaatttgcattccgtagagcagtttttctttttgaagggtatagtcagtcagtctacaaaaaagcactgccacaaagctaaatcgttactgtttgaaagggcaaatgctccattgccacacagaatgtaaaaagaaaataatcaacattagattttaaatgcaggtagttatttcagatgtttgaaccataaacaaacaaccattgctgaaaagcttcttaaaagcttgaaattcagaacttcagggtttcaaaaagtcagaagaatagcaaaatcaagtgttgacttttaacctgccaggaagctatattatattattttctcatttcaacaatgtccaagcccataaaagttaactgcaagaatttaggtatagttttaaaatcccatgtcctcttttactattaatagaataatgcttacctttgctttttattctagaaatgttttcttagtgttaaaagtgtagc

SEQ ID NO: 48839 - DNA, 1716 bp, Homo sapiens
gttaaggataagtcgaataagtatcttaaataaaaaaatttttatttaagaactgaaaaagacttttttgaagttaacattttagaaatatttaagcgtttatcataaacattcacatacatttatctctgtaaagtggcccaagaacagttatttcccttatttagaaaaaaattcaaagaaaatggctaattaaactttgattttattatgtacatggatactattaaaaaggtgaattcgtgaaattttaagattgtgtataacacataaaagtcaaacttctaatttggtaagtaaataatcctaaacttaacacagtggttctttaaaatgtttaaatatttgtcttagatgctgaatatagacaaagagaactgtcatcttaggagtaaacacactataactctgtaaaaagaaatcatagaaaagtaaggtagtatttctcaaataagtcctcccatgctaaaaccacagtgacgcgcagacactagcctagaacctattccagtactgcaagtactgacaggctgcaaacaccagtaacaacctgcctggagccttgaccttgaaaacaaatggctgttgtgaactgatgtgaccaaaccaagagatggttccttacaaaaacaaagcaaaacacaagatgaaaatcaagcagaaaaagaaaataatataaccttattttgagaacacgacttcatctcaaaggatactttttgtatattaatcctcacagattaataagagcagttaaaataattttgtgtagatccagaatacaacaggtgactaagttaatgactaacacaatttacagacttcaaaatgataatactgaattccaaatttcacagcataacagatgactataatatactaccctaatcaactcttatttagtgtctatacagcatctacagagctcttcatccatcatatttctcctcttagactttctgtgttcatgactcattttcatccatttctgtcggagaactgctttgggaggagcagagcgaataagtgccatactccggtatgggcctgtgtggtggccagttgttttcttgcaagagtgatcttggagataaaataaattgagtctcaaaaaattccaatgactcgccatcttccttctccatcagaaactgatactctccgaatctgaccatgcacctgtatggcaggtccattttatttaggtagcccagctctctgctgtccacgatcagattggtctttttactcatattttttatttcaaaggagagaactgagctgttgaattttttaaacagctgcagagaaaactgaactcgggaaacctgtttgtcctgaaaagtataatgacagatgttggaatttcggccaaatttcaccacttcgctggaagggagtttctctctgttaaaacttattgactgaaatattccacactgcaactggccaggatggtaaaccgtcatctggagacaagttactgtctcttctgtgtcagcatcttcaaaactggtcatgatgtgcacaaggcccacctggggctggggagtcagtgaactctcttcagctgttcggctctcccggctcagagcgaggggaatcgaggagactgggcgcaggatgggggtggacacccggccgctgctcctccgcgcgggtaagtgtgagccccggggtgcggggaaccgagccagggaccagtgaccgcgagcc

SEQ ID NO: 48840 - DNA, 1357 bp, Homo sapiens
cccaggtgactttgcgaaggcatggcggggacactgtgaatgtcagcccagaaggtgatcagagcctgttaattaaaatggaaagaagacagaagggaaggtagacatcaggttctccctggagacttttcgttttcatttacgctgcggaaacttcacgtttttgcctaacaccccatgtaatgtaaacgtataggcttgagtacgtgtcaggccgcatgtgtagtgaaccctaaagctttcctaattgtagttagcatcgtccctaagcggaacgattttccgtgaacatgatttgtacttttctacgagccgtacagtatacggagaagctgcacaggtcctcggcaaagcgattgcttttgccatacatcgtgcttaacaaagcgtgcttgaagactgagcccagtttgagatgtgggcttcaatatcaaaagaaaacgctgcgacctagatgtattcttggagtcacccagaaaaccatctggacgcagggaccgagcccccgaaaagcaaaggaggatggcagcaaacaagtgtctgtgcacaggagtcagagagggggaaccgccgtcccaacatcacaaaaagtgaaagaagccggaagagattttacctatttaatagtggtgctttttggaatcagcattacaggtggcttgttttacacgagtttcaaagaacttttttcttcatccagtcctagcaagatatatgggagagccttagaaaaatgcagatcacatcctgaggtgatcggtgtctttggtgagtctgttaaaggctatggggaggtgacaaggcggggtcgccggcagcatgtcaggttcactgaatatgtaaaagatgggctgaaacacacgtgtgtgaaattctacattgagggctctgagccagggaagcaaggaacggtgtatgcgcaagtgaaagagaacccaggaagtggtgaatatgattttcgatatatatttgtagaaattgaatcttatcctagaagaactattatcattgaagataatcgatcccaagatgattaaaataatcaagcaagcaggtttctgatggatgttgaatggcgtggactcgctactccgttcttcacagctgccttccagaatgtgttcaaaagaaagacaagaaggagtgtatggcttataaagtgaatctaatacagtatttgttgcatttaaacaaactagacattttcttacggaaaaattatgaaatacagcatattttatgttctcccattgactcaatcatgacaatatttctgctttaacaccatctttcatgattagaaatgtttgttattggaaatgttacaccatgtaaataaaggaaatagattttaaaa

SEQ ID NO: 48841 - DNA, 942 bp, Homo sapiens
ccgcctcggcctcccaaagtgctgggattacaggcatgagccaccgcgcctggcctctgcttactttttatatagcaaaatgattcctcttggcaagatgtttcttatattattccaaagttatttcataccattattatgtaaatatgaagagtttttttctgtttataattgtttataaaacaatgacttttaaagatttagtgcttaacattttcccaagtgtgggaacattatttttagattgagtaggtaccttgtagcagtgtgctttgcattttctgatgtattacatgactgtttcttttgtaaagagaatcaactaggtatttaagactgataattttacaatttatatgcttcacatagcatgtcaacttttgactaagaattttgtgttacttttttaacatgtgttaaacagagaaagggtccatgaaggaaagtgtatgagttgcatttgtaaaaatgagactttttcagtggaactctaaaccttgtgatgactactaacaaatgtaaaattatgagtgattaagaaaacattgctttgtggttatcactttaagttttgacacctagattatagtcttagtaatagcatccactggaaaaggtgaaaatgttttattcggcatttaacttacatttgtactttagagtatttttgtataaaatccatagatttattttacatttagagtatttacactatgataaagttgtaaataattttctaagacagtttttatatagtctacagttgtcctgatttcttattgaatttgttagactagttctcttgtcctgtgatctgtgtacaattttagtcactaagactttcctccaagaactaagccaacttgatgtgaaaagcacagctgtatataatggtgatgtcataataaagttgttttatcttttaagtaaaagtaaaaaaaa

SEQ ID NO: 48842 - DNA, 867 bp, Homo sapiens
aacagtagacagcaacttttatagaaaaggtggttggctctgaaaagagcctttgggttttggttagcacacattcacaagacaatttacgccctctccccacgaatgcggcgagcaagctggatgtccttgggcatgatagtcactcgcttggcgtgaatggcgcataggttggtgtcctcaaacagccccaccaggtaggcctcgcaggcctcctgcagcgccatcaccgccgagctctgaaaacgcagatcagtcttgaagtcctgcgcgatctcacggactagacgctggaatggcagtttgcgaatcagcagctcggtcgacttctggtagcggcggatctcgcgcagagccaccgtgccgggccggtaacggtggggcttcttcacgccgccggtggctggagcgctctttcgagcagccttggtggccagctgcttgcgtggcgctttcccacccgtggacttgcgagcagtctgcttggtacgagccattgcgaacttctaaaccctgctaaatgacgaaaaaacgaaagtctagcctttcgtacccgtatatataaagacacccctgttctgattggacaaggcagcctttccccctgcagctcgattggtggagacgcccactccctgacagaacatctcctgcatgtagaccaaatattaaaactttcctccgtccatctttaactgctggtgttttcaaccctttcccctctgtgccatgtttctagcttttatttaaaacgtactttggttttccttggcaaaattgtgtctagctactaggatgacgtgtatcaaagtacgttttaaataaaagctagaaactggctttgatcaacgttttaaaaagacgcgc

SEQ ID NO: 48843 - DNA, 375 bp, Homo sapiens
gcaagaattatacaagaattttcttcgtttccagattgaggaaaagaaacaaagagaggaagcagagcgagagagactgagaattgcagaagaaaaagaagaaagacggcttgcagaacagagggcacgaattcagcaggagtatgaagaggaacaggaaaagaaaagagagaaagaggaggagcaaaggctaaaaaatgaagagcatattcggttagctgaagaaagaccaaaagaagcagaaagaaagaagaaagaagaagaagaaaaatataacctgcaacttcagcactactgtgaaagagacaatttgattggggaagaaacaaagcacatgagacagccttctcctatagttcctgctcttcagaacaa

SEQ ID NO: 48844 - DNA, 498 bp, Homo sapiens
ggactcaagtggaacttcaggccaggttcagcacagagctggaaagagagaagcttatcagacagcagatggaagaacaggttgctcaaaagtcctctgaactggaacagtatttacagcgagtacgggagctggaagacatgtacctaaagctgcaggaggctcttgaagatgagagacaggcccggcaagatgaagagacagtgcggaagcttcaggccaggttgttggaggaagagtcttccaagagggctgaactagaaaagtggcacttggagcagcagcaggccattcagacaaccgaggcggagaagcaggagttggagaatcagcgtgtcctgaaggaacaggccctgcaggaggccatggagcagctggagcagcttgagttagaacggaagcaagcacttgagcagtacgaggaagttaaaaagaagctggagatggcaactaataagaccaagagctggaaggacaaagtggcccatcatgaaggat

SEQ ID NO: 48845 - DNA, 430 bp, Homo sapiens; identical to SEQ ID NO: 8808

SEQ ID NO: 48846 - DNA, 512 bp, Homo sapiens
ctttttttttttttttttttgcattgatgactaagtatttattgagacaaataatacaaattggtggcatacaaattattaaaaatagaatgctgaattttatttataggtgggccatcagatactgtttacaggttaagccttactataatgaactgcaaagaagtatgtatactgtttgaaatgaggaactttatccaggcaaacatgggatgtcaagagtggcctgtggtactggagacaaggaatatcaagtaattgacatgttacttgtctgtcagattttaagaatactgttatttaggcatattcaaagaaacaactgcctgttttaatagggataagtatataacgaaaacatttaatatccatacccccctcaaaaagccctttattcccaagtagcaactagtgtaaattaattttcaattcctttctacccttcctttgcctagaaatacttatgcataactaaaacactcaagtcactgaagggggacaatcccctttac

SEQ ID NO: 48847 - DNA, 776 bp, Homo sapiens
tttttttttttttttacatttcctgttttcattttattgggaacttcaaagaaaagaaagagagacggattggttcccaagacaagccgtgacgtagactcccaacaagctggggaattctggacagcgaaggggtggacagtgagactcagcacagcccaaagtcaaaggcattagggttgttctgaaaatagagattcaagaagccctggaaaatgctcttatccatgagaagagcacagactgtggggtcccacttcatggctgatatccagagccgcagggctcggcgtgtggctcacacagtccagtatcccatacacatccagccgctcaaaccagggccagaggaggtaatcaatcatggatatacaggttccaccaaagaaggtggtgttctgatactcaagaatctcttccaggttgctgaattcctgacgcagggctgccttcagattagtgcattctctcccacatctcaacgctaccaggcactccttggtcaaatgtgggaccttacaaaatagctccaataacatcttttggcgagctcgttcataagggtcatatggaaacagcttccttcctgggataagcatcatccaggtactcacaagcaataacagattcatagatcagttgacatggctggtctccaggacaggaatgtggccaaaagggtgctttgtatagtaccattcaggcttgtttctcaggttaatgttgaccacttcatgtctgatgtctttggccttgaggacgaggcgggtcctgtg

SEQ ID NO: 48848 - DNA, 1560 bp, Homo sapiens
ttttttttttttcactctgcaaccattttactttattactttatgggaaaatttagatatgcaaagcaatgcagataccaaaatatgctttccaagtgtttttggctgagtttgtctctttcagcagttctgaccctaagatacatacttatatggaaaaagctatggataaaaataaataaaatacatcttaatcatcaatatatagacaaaattgaatagaaaaaagtaagaacattataaagcatgaaaatttacataaaattattcctgaatgtgagggttgaaagactctagaggcctgaaatctatttgaaagagaaactttcaagaaaaggaaaaaagcattcctctacttagaatagatatgctatgatctgattctgaagcaatgggattgaactgaatgatatatgaggtttcttccatggcccactgatttagatgatagcagtaaaaaatatattagtgaaaatcatttaatactgtaaaagaataaacagatctggacaggaattccgtaaaaatacatgtagacgttagtctaaatacatttttaagatacaatatattttgactaaactgacaggatatcaacagctcattcacttgacagtcatctgttataaagccattattatataactttaaaatatatttacagacttaaaaattaagataatgcttttatgtacatcagataaaagtttaattagagtgtagagtgccacttcacaggaattaagataatcatgttttaaacaaaatattttgccatgaagatatagataaaatgtacaaacatgtcacatgatacagaaaaacaagaatcatgatcttcacatttacaggaatttaaaaaatcttctctgatggaaatgtgttacaactcaaacttctcttcttgaaagtaatccgcaaaattgagatattcttcaagttgaccatatttctccttaatccagccattttcttttgaccgcctgaaaattctttccactgtttctttaacttgttcatcttcaacttcttctgtcattgcaatggtgcaacattcctggtatagtttgaatttaaaatgtttcagtttatgataaattctggtacggctggcacaaattctgccaacagtgaacacctgtttatcatgtgacatgaaattatctatttgcatggtcctggtgttatacaactctcctgataaatgcactgaatatttacagtagcgatgcagtccacaagcctggcaggaacagttttcaggattcttcaaatgaatacttacattagaataattttctactcgctccttatattgctctttccaacgacttctagataccaagctctctagacgaggctgaacaaagcggttatccaaataatgaagagatgttagcatatcttttgcatatgatttttgccttgtgccatcatataatgttcccagaaaagattcatctaaagcgttgatcagaagagccttcacaactctttcaaaatgagtatagtggtcactaaaagaataaagagaattctgttttactaatttcagttgtg

SEQ ID NO: 48849 - DNA, 1561 bp, Homo sapiens
agaatactcctttggtagatcaaagatattcatccgaaacccaagaacattattcaaattagaagacctgaggaagcaacgcctggaggacttggccactctcattcagaagatatatcgggggtggaaatgccgcacacacttcctgctaatgaaaaaaagccaaattgtgattgccgcctggtacaggagatatgcgcaacaaaagaggtaccagcagacaaagagttccgccttagtaattcagtcttatatccggggttggaaggctcgaaaaattctgcgggaactgaagcatcaaaagcgctgtaaggaagcagtcacgaccattgctgcatattggcatgggacccaggcacgaagggaactgagacggctgaaggaggaggctaggaataaacatgctattgcagttatttgggcttactggcttggatctaaggtacgtagagaatacaggaaattcttcagagccaatgctggaaagaaaatctatgagtttacgcttcagagaattgtgcaaaaatacttcttggaaatgaaaaataagatgccttccttatctccaatagacaagaattggccctcaagaccttacttattcttggattctactcacaaggagctaaaaaggattttccacttgtggaggtgtaaaaaatacagggaccaattcacagaccagcagaaacttatttatgaagagaaactagaagccagtgaactcttcaaagacaagaaggctttatacccatctagtgttgggcaaccattccaaggggcttacctggaaatcaacaagaaccccaagtataagaaactcaaagatgccattgaagaaaaagatcatcattgctgaaatcgtgaacaaaattaaccgtgctaatgggaagggtacatctcggattttcctcttaacaaacaataatctccttcgttgctgaccaaaagtctggacaaatcaagtcagaggttccactggtggatgtgaccaaggtatcaatgagctcacaaaatgatggcttcttcgccgtccacctcaaagagggctcagaagcagctagtaaaggagactttctcttcagcagtgatcacctgattgaaatggccaccaagctctatcgcacaactctcagccaaaccaaacagaagctcaatattgagatttccgatgagttcctggtacagttcagacaggacaaagtatgtgtgaagtttattcagggaaaccagaaaaatgggagtgtcccaacatgtaaacgaaaaaacaaccgtctccttgaagttgctgtcccttaactggcgcctcctctctactttcatggacttgttcctttgtaatagtgcaatttggttttgttttatttggggttcattgtatgtttgggaatcaccaaaggcttttagagttctttggcaaaataaaaatatttgactaatcaatttttattattggaatagttttaacctttcaaatacatgttctgtcctggagcaggattgtagaaactaacagtgtctattttcatgtctgatgtgttcttcctttagtcatcatgtt

SEQ ID NO: 48850 - DNA, 1295 bp, Homo sapiens; identical to SEQ ID NO: 8818

SEQ ID NO: 48851 - DNA, 834 bp, Homo sapiens
ttctgaaagtttttggaaacttagaaaagagggaaaaaaatccagtgttactagtaatttccatggtaatacagataaaatacattcttttaattctgggaaattagaaaaagtggggtgatctttccaggaaaaacatgtgtaacatctgcttatcactccagctccctcctcctcctcctctccacgttcccttgagtaaatgtctgggaaagcatgaagcttgatgcaagaaccctgttgtactggcgttttcctcccctgtgaaaacgtaactactgttgggagtgaattgaggatgtagaaaggtggtggaaccaaattgtggtcaatggaaataggagaatatggttctcactcttgagaaaaaaacctaagattagcccaggtagttgcctgtaacttcagtttttctgcctgggtttgatatagtttagggttggggttagattaagatctaaattacatcaggacaaagagacagactattaactccacagttaattaaggacgtatgttccatgtttatttgttaaagcagtgtgaatagccttcaagcatgtgaataatcttccatcttccccgccacacatacacacacacactttttgtttctttcaggtagacaccttttaaaatgcagaactaactgaggcatttcagtaactttgctttcaaatcaataaagtcaaatgtatggaaacattttgtgccctactctccataccccgtgtactcaaattctctactgtatgaattatgctttaagtagaattcagtgccaaggagaacttggtgaaataaattattttaattttttttttatcctttaaa

SEQ ID NO: 48852 - DNA, 934 bp, Homo sapiens
  misc_feature (1)...(934): n = a,t,c or g
ttttttttagtagaataggtaactttattttaaataactttcttaaccctgcccattaagatcacagtaaacatacaataatttttattatggaaattaatctttacatacaaaatcagctacgtaattttacttacaaaacaataaaaactgttctttactgtggcaacaaaagaagcattttgacaaatgaaaaaaattaatgcaaacaaattaaaacaatgcttttctttttacttgcttcactgtctcttctatttattttctatgatcatttgacacaaacatggattactttgatatctactgaaacataaatgataaggttcttaaaggttgaattaaaagtctgggtgttcaatattttagaagctgaataaacaaaacgaaattggggtttgtgattacagaggatttatcattttttccctttgcccatatgaaaatatataatagaaaattacccacgggaaaacatttttaaatttaatgttgcgttcctatcaagtttaataataatgccaagttggcaatttaattaattactttcactaaggattaatactttgtctagaatggagtagaggtagactgatcttttcgtattcaaatattttaaaatataaagtttaaaatgtcataaggaattatataaaatagtatttttaaatatttgaaatttaatttataattatattcaaaataattaaatccctttttgataaatagtaagtaagttgttgcttgaaattaatttggttgaaatgattactctaaggaactcttttagttatttttaactaataatctttagaaaaaaatgtctattttttaataagggtttctaggttttgggaaaanaggcttctaatgatttaaatgcacttacagatgctccctaccactgggaaaagggcatccccatccggtnttt

SEQ ID NO: 48853 - DNA, 2774 bp, Homo sapiens
gccctctcccacagcggagtccaaaacaggcctaccagtcagttcttatttctattgggtgtttccatgctccaccatgttaagagctaagaatcagctttttttactttcacctcattacctgaggcaggtaaaagaatcatcaggctccaggctcatacagcaacgacttctacaccagcaacagccccttcacccagaatgggctgccctggctaaaaagcagctgaaaggcaaaaacccagaagacctaatatggcacaccccggaagggatctctataaaacccttgtattccaagagagatactatggacttacctgaagaacttccaggagtgaagccattcacacgtggaccatatcctaccatgtatacctttaggccctggaccatccgccagtatgctggttttagtactgtggaagaaagcaataagttctataaggacaacattaaggctggtcagcagggattatcagttgcctttgatctggcgacacatcgtggctatgattcagacaaccctcgagttcgtggtgatgttggaatggctggagttgctattgacactgtggaagataccaaaattctttttgatggaattcctttagaaaaaatgtcagtttccatgactatgaatggagcagttattccagttcttgcaaattttatagtaactggagaagaacaaggtgtacctaaagagaaacttactggtaccatccaaaatgatatactaaaggaatttatggttcgaaatacatacatttttcctccagaaccatccatgaaaattattgctgacatatttgaatatacagcaaagcacatgccaaaatttaattcaatttcaattagtggataccatatgcaggaagcaggggctgatgccattctggagctggcctatactttagcagatggattggagtactctagaactggactccaggctggcctgacaattgatgaatttgcaccaaggttgtctttcttctggggaattggaatgaatttctatatggaaatagcaaagatgagagctggtagaagactctgggctcacttaatagagaaaatgtttcagcctaaaaactcaaaatctcttcttctaagagcacactgtcagacatctggatggtcacttactgagcaggatccctacaataatattgtccgtactgcaatagaagcaatggcagcagtatttggagggactcagtctttgcacacaaattcttttgatgaagctttgggtttgccaactgtgaaaagtgctcgaattgccaggaacacacaaatcatcattcaagaagaatctgggattcccaaagtggctgatccttggggaggttcttacatgatggaatgtctcacaaatgatgtttatgatgctgctttaaagctcattaatgaaattgaagaaatgggtggaatggccaaagctgtagctgagggaatacctaaacttcgaattgaagaatgtgctgcccgaagacaagctagaatagattctggttctgaagtaattgttgggagtaaataagtaccagttggaaaaagaagacgctgtagaagttctggcaattgataatacttcagtgcgaaacaggcagattgaaaaacttaagaagatcaaatccagcagggatcaagctttggcttgaacattgtcttgctgcactaaccgaatgtgctgctagcggagatggaaatatcctggctcttgcagtggatgcatctcgggcaagatgtacagtgggagaaatcacagatgccctgaaaaaggtatttggtgaacataaagcgaatgatcgaatggtgagtggagcatatcgccaggaatttggagaaagtaaagagataacatctgctatcaagagggttcataaattcatggaacgtgaaggtcgcagacctcgtcttcttgtagcaaaaatgggacaagatggccatgacagaggagcaaaagttattgctacaggatttgctgatcttggttttgatgtggacataggccctcttttccagactcctcgtgaagtggcccagcaggctgtggatgcggatgtgcatgctgtgggcataagcaccctcgctgctggtcataaaaccctagttcctgaactcatcaaagaacttaactcccttggacggccagatattcttgtcatgtgtggaggggtgataccacctcaggattatgaatttctgtttgaagttggtgtttccaatgtatttggtcctgggactcgaattccaaaggctgccgttcaggtgcttgatgatattgagaagtgtttggaaaagaagcagcaatctgtataatatcctctttttgttttagcttttgtctaaaatattattttagttatgatcaaagaagagagtaaagctatgtcttcaatttaatttcaatacctgatttgtactttccttgaaagctttactttaaaataccttacttataggcctggtgtcatgctataagtatgtacatacagtttcacttcaaaaataaaaaaaaaatccctaaaaactctctatactctctataacaatactttatcaagaactctggacaatggtattatttttaaaaatcatggtgatgtatttattagaatgtttcttataaatctgtttactttttatattaagaattaaactgtacctaaaaaaactctgactattcccatttctcagtttagcattacattgtcttgagcaccagaaaataaaatccatatattaattaaaacctatcttga

SEQ ID NO: 48854 - DNA, 1331 bp, Homo sapiens
taccctaccctactcccagctccttttccccgcggatggagagatggactctgctgcttacccacccactccccctgcagggggtggaggactgattcagctactgtatccccactgctgtgactggaaatgggggtggggagtgactggtcttttcaaccctggggagttgaggaaaatgtctgctttcacttcagctttcatttgaatactgtgatctggtttttattttgaaatgtataaaaagcaaacccagctacaaaggccttttcacccttccactttgtaactaatcccagtctcttctcatcactcctcctcttacagtactctgctattcatgctcatttcatgttcttaatcttctttcctgtttaaaaatttttttttggaaaaaatttgaaatcatggtccttttttctgctgaatatattctatatattatatatatataaattatatatatatatatatacatatatatgtctggctacctcgttttagtttactttttttctgaagccctggaattctacaagagagatattttgagactgaaacatgtttgtgcctagactggaaagatgcccttgggtttgtccgtctttttgtgttggcttcttcccagcctccatccgtccagtgtgccccacttccacattctggctataatttcctttttctccttgttcattgggatttgaggacctatttctaaatcttaatttatagcacaaatatgtgggagcaatgagagttgaaccgttgtttttgttggagatgcagattgtgtcttgaaaatgatgattatatatgcaaattctgccctaccctcaccctcttccaagtttccccccaaaaaggtcacacagtgcggcttcctgtgggaaacaggagcagagctggcctgcagagcccctggggctgtgatgaagctcatatcttatctctgttctattaacaaaatgggagtttgtgggttttaaaaaattccgtttctaaatggaggaatagatgactttctttcttttggtgggggttgggacttgtggctttaaagaaatcacttctgagtaggatgtatattttcgttggatttttgttgttatttctttagaaccctccacagcaacatgcaagaccatggagttaaagaaacccagagacctttatcaattaattgtactgtttgtgaatttgtataaataataacaaagatcctcttaaaacgtttatattcttacagtaaaaggttaaactgatatttatataataaaagaggaaatatgaagtatgtttttgaaaaaaaaaaaaaacaaaaaaaaaaaaaa

SEQ ID NO: 48855 - DNA, 1294 bp, Homo sapiens
  misc_feature (1)...(1294): n = a,t,c or g
gggaagctgacatccacaccaagtcgagacttccagggatgtggccggggagcagtcacatgctgtagctttcatgagcacaggcatcagtcaggcagatgtttgtcgactggaatggcgccaaatcttaaaggcagaccacgcaaaaagaaaccatgcccacaaagaagagattcattcagtggtgttaaggattccaacaacaattccgatggcaaagccgttgccaaggtgaaatgtgaggccaggtcagccttgaccaagccgaagaataaccataactgtaaaaaagtctcaaatgaagaaaaaccaaaggttgccattggtgaagagtgcagggcagatgaacaagccttcttggtggcactttataaatacatgaaagaaaggaaaacgccgatagaacgaataccctatttaggttttaaacagattaacctttggactatgtttcaagctgctcaaaaactgggaggatatgaaacaataacagcccgccgtcagtggaaacatatttatgatgaattaggcggtaatcctgggagcaccagcgctgccacttgtacccgcagacattatgaaagactcctctcacatccttgtgatcagatgcaaccgctaactaccaaaatttgaagatcattgattttatttacaacagtgcctctctcaatgttcaatcaatcattctccaagaggaatcacccataatcctatgtgttgtggtggggagaaaaagctaggattaccgttctagatgtcttccttttaattggttctaccaaagaagggcagaggacatgcacatatatccaagaagagactgaagctctgggctaaaacttcatgattatggtggatttcattcattcttgctagtcacaggttgcatgaacagataaaacagagatgactggattggtgaaggaacactgttttcaagaagggtcaatgagttgagaatggtcaggactttgtgggcaaatatctagtctggaaatgcccttggaattttgtaaagccttccaaaccaaatcaggatgatgagagctcttcctactaggctgcgggttcttctgttctcattcttttcactccgataaagagaactgctctttttcctatttccctgccaccagctttgctttcctagaagatgaagaagtgagtgatctctatgcattatccactgatttatttttcatgcactgtggttcatgtttccagtaaacgttttcattttacaacaagaaaaatgtngcccagttcctcagtcaaaatgttacttgtaaac

SEQ ID NO: 48856 - DNA, 1847 bp, Homo sapiens
  misc_feature (1)...(1847): n = a,t,c or g
gcgtccgcggcgacggtagtcaatagcagcagccgtggcgccacgtggcgggngcgcggcggttcggtgacggccgtgggctgcaggcggcggacggctggaagaagttggattccatgggttccaagagaagaagagctacctccccttccagcagtgtcagcggggactttgatgatgggcaccattctgtgtcaacaccaggcccaagcaggaaaaggaggagactttccaatcttccaactgtagatcctattgccgtgtgccatgaactctataataccatccgagactataaggatgaacagggcagacttctctgtgagctcttcattagggcaccaaagcgaagaaatcaaccagactattatgaagtggtttctcagcccattgacttgatgaaaatccaacagaaactaaaaatggaagagtatgatgatgttaatttgctgactgctgacttccagcttctttttaacaatgcaaagtcctattattaagccagattctcctgaatataaagccgcttgcaaactctggggatttgtaccttcgacaagaaatgagtttgttcagaaggggaagcagatgacgaagatgatgatgagattggcaagacaatcagggcacagtgactgaaggatcttctccagcttacttgaaggagatcctggagcagcttcttgaagccatagttgtagctacaaatccatcaggacgtctcattagcgaactttttcagaaactgccttctaaagtgcaatatccagattattatgcaataattaaggagcctatagatctcaagaccattgcccagaggatacagaatggaagctacaaaagtattcatgcaatggccaaagatatagatctcctcgcaaaaaatgccaaaacttataatgagcctggctctcaagtattcaaggatgcaaattcaattaaaaaaatattttatatgaaaaaggctgaaattgaacatcatgaaatggctaagtcaagtcttcgaatgaggactccatccaaccttgctgcagccagactgacaggtccttcacacagtaaaggcagccttggtgaagagagaaatcccactagcaagtattaccgtaataaaagagcagtacaaggaggtcgtttatcagcaattacaatggcacttcaatatggctcagaaagtgaagaagatgctgctttagctgctgcacgctatgaagagggagagtcagaagcagaaagcatcacttcctttatggatgtttcaaatcctttttatcagctttatgacacagttaggagttgtcggaataaccaagggcagctaatagctgaacctttttaccatttgccttcaaagaaaaaataccctgattattaccagcaaattaaaatgcccatatcactacaacagatccgaacaaaactgaagaatcaagaatatgaaactttagatcatttggagtgtgatctgaatttaatgtttgaaaatgccaaacgctataatgtgcccaattcagccatctacaagcgagttctaaaattgcagcaagttatgcaggcaaagaagaaagagcttgccaggagagacgatatcgaggacggagacagcatgatctcttcagccacctctgatactggtagtgccaaaagaaaaagtaaaaagaacataagaaagcagcgaatgaaaatcttattcaatgttgttcttgaagctcgagagccaggttcaggcagaagactttgtgacctatttatggttaaaccatccaaaaaggactatcctgattattataaaatcatcttggagccaatggacttgaaaataattgagcataacatccgcaatg

SEQ ID NO: 48857 - DNA, 2104 bp, Homo sapiens
ttttttttttttagtatacaaaatatttcattttttattttcatgaataattgtcattaatacagcagaaaccgatatgattataaaagataccaaaaaatcagaagaatgttagcattcaatagaaattaaaacctgagctgagggctcattagagtctgacacttggcaccattctcatggaagtgaagaaacatgtttgccggactccttaaaacaattcatgtaacacagaaagagttaaatttcaaaggagctacaatgtactgacacattacgactcttgttgttgacaaacatttaagcagggctatccaaagctcacagtcttgaaggcagggaggtgtgtaaattgtaggtttttaattaagcagtaagcaagctgagatttttcttggtaaaatagtttgtttattcatgtagatctaaaaggctggctcagtttgtccagagcacaggagaatgccagaagaggtcaagggcatggggatgtatcgacatgaatccatcccaacttgtggaaaacaaacgacacagcagttaccatcacaaagaactctattagtaggaatagaagacttgaggtccaattcagttctcatttggattctatagtatctctaagaatttggttaaaaaaaacaaaacaaacaaaacaaaaaaagggaaatccttactcctttcattaacaactgtccacaaggagaagaaataaaagacaactaatatagataggccttactgattaaaaatctgtgagcttgaatacattttaatatgttgaatctagagtgataaaccaatggttaatatactacaaaactttacaaacaaaatctcatctgttgcagaacttcaaaagtagtggaattgatttcttctcccttttaattttttcttccacagaaagtcctaaaactgagtagtcattggcatgcctgcactttcacaaatgtatcctcaaaacatgatggtttttctcaaaatgtatctgcaaaacatgatggtttttgaaaatggaagtaatttcaaatgaggtcaaggatgtcatgctccctcaaaacatattttcagttctttgtgctccatgtcacataaaaaagaaatgagggtagctggactcatgtaatttctttcagctcaataatgtcattaaattcccaatgttttcacactagcaaaagatccagtatttaagtgatctactataaagcatctctatttctaaaaaagattcctttcattttttactttttattttttcttaagaggtctcaaaaagctgtcaaaaagccctatacttaacggagaccagccacagacttccttcctgtaccagctttccaagagggtaagtgagtcttcaccctgatatttttgccccgggttttacgaggcttctcttctttatgcaccttcatgtgctgcctcagatgagagctctgactgaaacatttgccacattcactgcactggtagggtttctccccagtgtgggttctctgatgttgaataaggtgggagctctggctgaaacaccggccacactcatcacactgatagggtttttctccagtatgaattctctggtgctgaatgagatttgagctctgtttgaagctttctccacactcatcacatttgtagggcttttcccccgtatggatccgtcgatgctgaatgagattagaactctgaaagaaacttttcccacaatcagcacatttatgggatttctttccagtatggatcttctggtgttgaaaaagagttgaactctgactgaaactcttttcacattcagtacatttaatagggtttgtcatccaagcttcttctgagtctactgaagcttgagtcaaatcgaatagtcatgccccacttctgccgctgccggcctgttttgcgcttgttctcataggcctttccttggcttgagctccgagaaatacccgctttaggctttgctaacctcatggtgaataaccaaatgtatttgtaagagagtttacaggcttcttctgaactagtgtttcatttcctagaggtgtacagctcagaattttcgcgcgggaccagccaccactctggctcgctgggcgcc

SEQ ID NO: 48858 - DNA, 1007 bp, Homo sapiens
ctttggtggggttgagttgggggtattttctaattttttttgtacatttggaacagtgactataaatgagacccctttaaactgtcttattttccaccagattgagaaccagatgttctctacacactatcactgttcaatagagctttcttcagtgatggaaatgctctgtaatctacactgttcagtacaggtagctacagagcatctgaaatatggctagaaactacatttttgttttgattaatttaaatagccatacagttgctaccatactggtcacggcagctgtagactgactgggtccatagttcatcacctcaaaattctttcaaaatttattatctctttctctccttacatgtttatttcccaggcctaccctggtgattagaacagctgaagggcctttcttgttaggctgtccatgccctaaggatgggttcctgtttatccttgccacgcagctgagcttactgcatgtttatatctcccaaggactgttctctgctcagaaatgccctgtcaagggtgtggcatcacgcagtttcatccaagttgtttcaggaattgctgacactgctgggtgcagttctatcccctaaagcctagggtgtggccctttaacttccccttcagtagaactgggaaaggcagtaccattcctagttatgagtgaagcatccactttcttttgtaacaatgaggaacagaaaggataagactgaagagtgatcttttgtccaactaaaccatttatctccttttgtaggtaaattcaaatcctgcccagttatagttttcagtcactggagaattccaggtaggagccctactttaggtgatcctaggaactcctatgttcagaaaagaattttcttcctactatataattacagtatttagctgtcaattttaagatgaatttggtagagccttatagtaaagtatgtatcttggtcacacacaaagcttggaaaaagtaaaagatgtctaaaccataaaaa

SEQ ID NO: 48859 - DNA, 348 bp, Homo sapiens
aacaacaacaaaaaagccgggcgaggtagcaggcgcctgtaatcccagctactcaggaggctgaggcagaattacttgaacctgggaggcggaggttgcagtaagccaagaccatgccactggactccagcctgggcaacagagcaagactcaaaaaaaaatggacacacccaactttttggataatgcccctctctcatccttggcatgagattactgattacgaattactgagggatttgttggagactgacactaggagaggaatgtgaactattacagtgaaagctggacctagtaaaacttaccccataagaatgcacccatttgagacaggcacaagacatt

SEQ ID NO: 48860 - DNA, 1698 bp, Homo sapiens
cgggtttagcggcagctcttcgggattgtttccattgccaccctaaccgtgctggcctatgaacgttacattcgcgtggtccatgccagagtgatcaatttttcctgggcctggagggccattacctacatctggctctactcactggcgtgggcaggagcacctctcctgggatggaacaggtacatcctggacgtacacggactaggctgcactgtggactggaaatccaaggatgccaacgattcctcctttgtgcttttcttatttcttggctgcctggtggtgcccctgggtgtcatagcccattgctatggccatattctatatttccattcgaatgcttcgttggtgtggaagatcttcagacaattcaagtgatcaagattttaaaatatgaaaagaaactggccaaaatgtgctttttaatgatattcaccttcctggactgttggatgccttatatcgagatctgcttcttggtggttaatggtcatggtcacctggtcactccaacaatatctattgtttcgtacctctttgctaaatcgaacactggattgtatacaatccagtgatttatgtcttcatgatcagaaagtttcgaagatcccttttgcagcttctgtgcctccgactgctgaggtgccagaggctgctaaagacctaccagcagctggaagtgaaatgcagatcagacccattgtgatgtcacagaaagatggggacaggccaaagaaaaaagtgactttcaactcttcttccatcatttttatcatcaccagtgatgaatcactgtcagttgacgacagcgacaaaaccaatgggtccaaagttgatgtaatccaagttcgtcctttgtaggaatgaagaatggcaacgaaagatggggccttaaattggatgccacttttggactttcatcataagaagtgtctggaatacccgttctatgtaatatcaacagaaccttgtggtccagcaggaaatccgaattgcccatatgctcttgggcctcaggaagaggttgaacaaaaacaaattcttttaattcaacgggtgctttacataatgaaaaaaccacttgtggcacacgatgggcatctaacatcatcatcttctaatgtgttggagattttcatttcaaatatattttttaaattactctattttccaaaacacgtaatgcatttttctcgaaaataccttactgtaaaaataactgtcgcgtacacatgtgtgaagtagctagaacatactgaattttttttgtactgttggactctattcagtgtcatgtcctatatctgatcaagttatcaaggagataattctagaatgaaaaagaaaatcctcttgttggaaacaaaagacgttttatatgtgcagtatgacaaagaggagtttcagagacaactttgaatccttgtcagcctggagaccagcaccagaggaatctacaaggcaaactcccatatatttgcttcccccaaattgctgcccctacagactcaaagctctttttctttgttttgttgtttctctaaaaatttactgttctttgtcgatgctatataagccagggagttctaagacgccagctctttgagatttgctcattcccctgtatttcccacatatatattacatatacccgctaataaatttatgtttgttttaaaaaaaaaaaaaaaaaaa

SEQ ID NO: 48861 - DNA, 1552 bp, Homo sapiens
  misc_feature (1)...(1552): n = a,t,c or g
tttagctcaagaagggaaaaggatttattagaccatttccaggacagggacccaggggcagtggctgggttcagtgttctcacgctcagaggaagaaaaggcagtggtgaacacccgcctgactgccttaccctgatctaaacgacaccatctcctcccccaaggaagacacagccctggatgtgaacctaggagggtgggaatggcttatgtcactcggtctttgaggcagagcttgggctggggttgcaggggcatcagccaatctgctctcaaggagcaaaacttgggcgtaaaaggaacgggcagtggggctagccggctgtctggaggtctgggtgacctgggcagcacggctgcttctcccccgccaccccgccccactccttgacacttccaggtgattttatctttataaataagatgaaaatccaagcagcattaatttaggggaacaaaagatggaaaaaaaagggggggaggcagaaggagctgatgagcatccaggagaggaggaagtaggaagagcagtgtccactgtggtgcccccagggcagtggagtgtctctgtggctgcaaggccccttccttctggctccctggcagacggccagacagcagagggaactctgtattgactgggacaagccctggagccctgtctggctgttgacatggggagtgcctggatttgccccaatcaacctcccaccttcaccattgcccaagtgaagcagcttttaactctcttgcccaaagtcctctgagaatttcttcactttcaggaggtcgtctgcattcaccgtgggccgggtggtggccagagaccgcagcatgtccgacatgcaaaccacaggctctaagagtttgtccccagggacatccatccaagtcatctccatggctcctgggtcccctggtgagcatggagtcaggaggtcatcaatcatcatgctggggttggtgcgagaggggccacagacctgaaaccaaatggatctgactggggcagctgccctcagtgtcagaggggctcgaccctccggtctctaaggaagtcccaaagagaatgctctgtgggtccctagcatctgaggaggacgggctccttcagaactcgggctgggtggtccgagcgactcatgatttgcatgggactctggcaatctgtagccccaatgccttgatgtcttcctcattaacactgtcacgtctcaccaggaatacagtgacattaaaagtgnnnnnnnnnnnnnnnnnnnnnnnnnnnnnnnnnnnnnnnnnnnnnnntctatnnnnnnnnnnnnnnnnnnnnnnnnnnnnnnnnnnnnnnnnnnnnnnnnnnnnnnnnnnnnnnnnnnnnnnnnnnnnnnnnnnnnnnnnnnnnnngtctcacgagatctgatgggtttatcaggggtttccacttttgtttcttcattttctcttgccaccagcatgtaagaagtgcctttggtctcctaccatgattctggggcctccctagccatgtgggactgtaaggccaaaaaaacctctttttcttcccaaa

SEQ ID NO: 48862 - DNA, 1710 bp, Homo sapiens
attgtttgttgctgttttacttagtaggtaaaagcaaaacaacccaatcataaaatgcacacagctgtatctaaaagaaaaatgcaaacacaacttaaccatactttatttgactgcatcttatttagacagcttgcacatttcaaatcccattaaatctctctccaaaaggatatgggacaatagaagaaaattatgcagcaatatccagtcaaacagcagtccaatattttgagatacacgtgatattttatagatactcaactcatatctgacgtcaatataatttatggttatgtttttacaaacctgaaagccctgtaacattacagcactcattttagtgatgtcatggtgcactgaaaagtaactctgatgtactaccaatttgattttatctatactcctgaaaagtgatgaacttcatgatttttagacaccataataaatatacacatccagtcttagacatgtcagccagtaccataacacagggcaaggtaaagttaaaacatgaaaaaacaaactgctttacatagatttgtcgagcaagtgggaagggtaatttgggaaagaggcagaaaatattaaaatcgattttttattttttcttattttgctggtttcaacttcaaaaactaccgtctggtttctgatctgtggactttgctaaagtagtttcatcccaatgtacaggaaatacaggaaattataatcagcccacacatcaaaaatgatagtatacccgttagcttcttcaatactaacatatatagcttcatggtagcatgtataaaaatgttcagcagtaccaactgccaaaccagtgtcagtggatagtacagtcagtcctaaagaggcagcaccccattaaaagaaagttgcatctattttgctcagttgtagccaagtgaacccatgctaccaatttcagatagaattgttttaaggcttatttaagaaaaacaacagcctattattcaaaaagtaaattactgtttgaggctacttcaacctgaatggagtctttcagtgttggtgctgggttttcatgctagaggttaaaattttaatctacttaagtaaaaatttttttgcatacccaattaaagacataaggcatacactgacattcaacatattccaaacaatatggcaaccatctgactttttagtcacacagttaacgtcatctttacaaacacccaaccagttcagtcaatttggcaattttggaggaaaaggtcagtatgatggtttcattgacaatctggcaaaaacactaaaatggttgaaccaatgatctatctactttacaaccatccctattagtgatttaagcaaatatatgttcatcaaccattatgtatcaaccagcaagtcaaatataaagaagtgaaataaaatttgatgacataaatgttttagttccatttccttcatattaaataacaaaagcatcactgtgattggtattcttctaaatgctagtgcctaaatgaagtttgaccaaaaacatattgaaaggctgagtactgtgtggttaccatatttttattataaccagtattgtattctgctcattaaactttcaagagcaatataaaaaggaaaacattttctttaaaaataaagaactataaataatcccaccagcagaaagtttttattttcaaatataaattgtgtatctttatttttaaagtattt

SEQ ID NO: 48863 - DNA, 1515 bp, Homo sapiens
ttttttttttttttttcaatgttagtaaaacaaaatttatttgtaaaacaggacctgttatataaaatggcacacaatcaagttatacaaaaatacaaaatttctttctgattacagttctagttgcaaatgataattagaaagcattcctggtagcttccaaatagctgagattgcgagcatatggaacagggagcagcaacagtccatgatgcagggatgtccaagtgagtagaacctaatttccaagttcaggacttccatcaggtcactttggagggacacctcttaaaattgctagctcctggaatgtcttctgttttgatacccatcttctagacttttgccaattctaaatttagttcccaatgtttgtgaaagtccaaaatctgtgcggctatgaaacagatggtattctgaattttctcacatgatttgctctctcatctatttggacaattgttagttatataattatattcatttcaaatgaataaaagagaacagcgatactgtttggtgatactagatattagatgttaacttctggagaattattctttcaaaatagctactctcgcaatgttggtttcccagatcttgctaagacatgagctcttaattgtgtgtatgcatgtgttttttaaaatccagactcttattgcaaatattctgaaaaatcagaaatattacatgaacttttaaaagaaaccaaggcatttagcaaattttagcctagctagagtaaagaacaccaatacttaaaaaaaaatacaatttaccttttgcagcaatttaaaggtccaaccctttgaaaggaagcacattagcaaacggctgcttattaagccctagtgacattacttgtatgcatttccataataccgatctaattcactgtctagttctggtaggaggcaatgctttctttcaaaagattctccttccatggaatgataaaatgctgaggcttttttttttttttttttttttgtacagagcctgtatttagtgcaataagtttaaaaaatttgctctgaaatatttactttacattaacaaaaatagctttttttaaaaaaattgtaacaaaaaggagttatcgcataaacagatcatgaattattcttagcaaattacacttttttttcttaaagcattcaccattacaacaagcagaacaatggagtattagccattcatatctggtaagcttcaggaataaaaaagcaaaaaaccccaaacccacccccaaacaaaaacaacagtcacactggaggatcaaaacattagccaattcttcagttaaacatcgtagaactctggatactcaatgaattgccaaggagaggagcacctgccagtgtgttttcagattgtatagcaagcatttgaataaaatggccgtttaaccctaagccactgacgttactctgaagccgaagcccaagcaccggaattttcaatgctttatgttccatgtttctgtcccttctttattcctctcagcattac

SEQ ID NO: 48864 - DNA, 791 bp, Homo sapiens
cttgctattgacaagcgattccgagtgtttactaagcctgttgaccctgatgaggttcctgattatgtcactgtaataaagcaaccaatggacctttcatctgtaatcagtaaaattgatctacacaagtatctgactgtgaaagactatttgagagatattgatctaatctgtagtaatgccttagaatacaatccagatagagatcctggagatcgtcttattaggcatagagcctgtgctttaagagatactgcctatgccataattaaagaagaacttgatgaagactttgagcagctctgtgaagaaattcaggaatctagaaagaaaagaggttgtagctcctccaaatatgccccgtcttactaccatgtgatgccaaagcaaaattccactcttgttggtgataaaagatcagacccagagcagaatgaaaagctaaagacaccgagtactcctgtggcttgcagcactcctgctcagttgaagaggaaaattcgcaaaaagtcaaactggtacttaggcaccataaaaaagcgaaggaagatttcacaggcaaaggatgatagccagaatgccatagatcacaaaattgagagtgatacagaggaaactcaagacacaagtgtagatcataatgagaccggaaacacaggagagtcttcggtggaagaaaatgaaaaacagcaaaatgcctctgaaagcaaactggaattgagaaataattcaaatacttgtaatatagagaatgagcttgaagactctaggaagactacagcatgtacaga

SEQ ID NO: 48865 - DNA, 2849 bp, Homo sapiens
  misc_feature (1)...(2849): n = a,t,c or g
agtctttccatctacagcccactggcactccaggcacctacctacttcaaacaagctcaagccaaggccttcccctaactctgactgctagtcccacagtaaccctgacagctgctgctcctgcttctcctgaacagattattgttcatgctttatccccagaacatttgttgaacacaagtgataatgttacagtgcagtgtcacacaccaagagtcatcattcagactgttgccacagaggacatcacttcttccatatcccaagcagaactgacagtcgatagtgatattcagtcatctgattttcctgagcctccagacgccctagaagcagacactttcccagatgaaattcatcaccctaagatgactgtggagccatcatttaatgatgctcatgtatccaaattcagtgaccaaaatagcacagaactgatgaatagtgttatggtcagaacagaagaagaaatctctgacaccgaccttaaacaagaggaatcaccctctgatttagccagtgcttatgttactgagggtttagagtctcccactatagaagaacaagttgatcaaacaattgatgatgaaacaatacttatcgttccttcaccacatggctttatccaggcatctgatgttatagatactgaatctgtcttgcctttgacaacactaacagatcccatactccaacatcatcaggaagaatcaaatatcattggatcatccttgggcagtcctgtttcagaagattcaaaggatgtcgaagatttggtaaactgtcattagaataattcttagaaataggcagttcaagcaaagaaggcacactgttaattacaacctcttcaaagaaataggagcaacccccaagaggcttaatttaccaatttaaatagccacagtccttaagccacacacattgttgctgctatgactttttacctcctttaaacacatcatctgaggttgagttttatgacagtatgtagttgagtggaggctgggagttttaagcataaatccctgtttagtgttacatgggaataaggaatttcattcacttcagccactaagaaaagtttagaatcacgaaagcttaactgctgtggtttaaagtacagtttctctaaagatcagacatggcactgtctcctctcaagcctggttgtagttcagatgagtcttttcaacatggtcttcaacatggtctagagcttaccagtgatcttctgatcttcaagaagactaagtttgagacttgaccagcatacaagtatagagacctaggaggtggtcttgtggtggtacatttggttaacccattgcctggcagtgggagctgatttaggcagggtaaacaggaaagcattaaaagttaaaattcactacaggttttttgttacttttaaagggaatatggataagcatagtaacaaaacccaccagaatctaagcagttttcaccccctcagaaaccactgtcattagtttacaaagttagcactttgaagtaaaactaaatgaggaaggaagtaatgttacctatccttgataccatgaccatttattagatgttttgctatataaattaccgagagaatagtttgtcatccacttagtgtgttagctggtggggtacaatataacctctcatctcaggctattttaaaaaaccaatatttgcttcctataacaaaaggaaacaaatcctaagaatcattcctgtactaccagaagggttaaggcaaaggtagccttttgggctttttaatgaatatgacccctatagaaaagtcaagaaaaaaaaaacccttgtataaattattttatttattattgtaattagatcttcacaaagttgtcttttcactgtgttttgtcaacgtgaaattaaattgtagttataagcaaaagttggttgcctagggaacaattgtatattcagtttaacagaaataaaagaatatttgtcttaagatgcaagatttgtttttacatagccttttgccatacaattataaaaatttcatttcaaaagtgaaatttttttgtgctgttttagctttaaagggttggaatgtttaggtgcaacatcagctccttaaagaaaaagcaaagtgatctaggatatgtctcccttgcaagagggaattaacatttacaattaacatgaaaatcatgtatcagacttctgcaggagattcttcagcataccttatccaaaaattactcactgtcctaatgtatcattttgaagagtcctggtaagtacttctccttggcagcctcaccttcccacatcatggaagtacaggtttgcacatatacacaacatgatgatagaaaatatgatatagtaaattagctttctaaatttcggttctaagtctccttgtcgataccagtagataagtatgcaggcagtaatactactcaaagagatgcagacagcaaagaatatattcaacggttttggaggtagttgagggaaaacaaaagcacttatcagcgttactagaatcaataaggatgttaagctgccaacaactaaattgatgattcgatccttggcggacgtctccccaaacagaggtctgttgtccaggccactggtgccgtaggtcctggtagcaaagtcctccattttggggtttcttcactttccccaagccacttaaaagcaagacagcatgacctcccgaggtctcaggtccacgactgcaagcctcctcctcacggctcccgcatagccgaacccgagtggtcggggaagcgtggcgccagggatgggtgggggctcacgacgcggggaacgctgacgtgtccgccccggcccngngcacc

SEQ ID NO: 48866 - DNA, 1307 bp, Homo sapiens
tgcggccgctccaacatgtggtaccagcggccatgtgccctcaaggggagggaggaagagcacaggagggtgggaggaggacaaacagccccttttatagggtcatgggggggctccactcagagtctggcaggaatctgccaggaaaacctcgttctagatagggagaagcagaactgtgtgtggggcaggccgccgtggtcctgagagacagggcccgggccttccactgctcgtttgcacacctcttcggcctatcccaaggaccttcctagcatataaaaacaggggctctcctgatttgtaaacagaacaacaaataaaaataaaaacaaaaccaaaaattcctccatggcagcccacccaatgaataccccagatttttagggccattgcgggtctgtagctgggtgtagagagagttaagctttcatctcccatgtttacaacactttgtgataaaatagttgagtggagcaatcacatcccccactgcgtgcgctcccccgggatgcctcacagctgctctgtgatcacacgtgcaaatgttattattattattttttgcctttggcatcaaagggcaagccctgttcattaaaaaatcttctatattcaacactccatagtgaaaagaatggatacttcaaaattcctaaagcaatcatgtgaaaattatttttatttttaaaatttttgaaagtgttttgatttttatgggtccttgataattggccagccctgttttgcaaagagatggactatttctgagactagaatgttttctttgaaaatattgaagagtataagagatttaagacaataaaggctgtaatcttaccataaaggaagaaaaacatctatgtgtgtcaatattgttttgagataaagtcacaatgattgatatcaatgctttcaccattttatttcaacttaaaccagtgtcactcacatgaagcttattttataatacatattatccagtgatttcatcttttctgcacagtttaagtacattttttttttctgtaccttgaagtaagcagaatagttcaagctttcaaaactggtgatgctgtatgcgtgagggatgcttacataatagcaacgctttattgggcaacccgaatccatacatgtctggtgtggtttgatagctgggcttgaaaaagtgcttccagttgaaattagcattagaaatcggttagaacaccaacatttcagggtgagggaggactgctacaaaggaaaagaacatgtctacaaatgcactgaaagaactagccagaatatgaattccattagta

SEQ ID NO: 48867 - DNA, 575 bp, Homo sapiens
gaaactgcgcgcggacctcagtgtggcaggcactcccggggtgcagacggggtgaaggcagccttctctgtggtcacgtgcatgtaacggcaccttctctctcagggcctcctccctccctgcgtggtttgggggctgttcctgatagcacagatgccctgatcacaaacacctgcctgcattgctgaccacaggcctggcctggagaaacccacagcctcttcagggaagcgagcaaggggcttggaagtgcctgaagccagtgggctggggactcacggccgggacactcagggcaggccatgcgccgtttctcctggaataactggaggtgatttcatggaacctggaggctgggcttcaggctggggggagaggcttccagacttgggtcttctccgtggctctgccccccgctctccttgcttgagtggtgggggccctgcatcctctcatgcccacccccacctttctcgccaaattgtcggaggcttttgtcacctggagacactgttcctgccagctccggtcttggaaaacatggcctctcctctcctgccctggccccggcccct

SEQ ID NO: 48868 - DNA, 1017 bp, Homo sapiens
gtcaaagacaatacctagagctggaatgccgtcgcttcaagagaagaatgttacttgggcgtcataacttagagcaggaccttgtcagggaggagttaaacaaaagacagactcagaaggacttagagcatgccatgctactccgacagcatgaatctatgcaagaactggagttccgccacctcaacacaattcagaagatgcgctgtgagttgatcagattacagcatcaaactgagctcactaaccagctggaatataataagcgaagagaacgagaactaagacgaaagcatgtcatggaagttcgacaacagcctaagagtttgaagtctaaagaactccaaataaaaaagcagtttcaggatacctgcaaaatccaaaccagacagtacaaagcattaagaaatcacctgctggagactacaccaaagagtgagcacaaagctgttctgaaacggctcaaggaggaacagacccggaaattagctatcttggctgagcagtatgatcacagcattaatgaaatgctctccacacaagccctgcgtttggatgaagcacaggaagcagagtgccaggttttgaagatgcagctgcagcaggaactggagctgttgaatgcgtatcagagcaaaatcaagatgcaagctgaggcacaacatgatcgagagcttcgcgagcttgaacagagggtctccctccggaggcagctcttagaacaaaagattgaagaagagatgttggctttgcagaatgagcgcacagaacgaatacgaagcctgttggaacgtcaagccagagagattgaagcttttgactctgaaagcatgagactaggttttagtaatatggtcctttctaatctctccccatgaggcattcagccacagctacccgggagcttctggttggtcacacaaccctactgggggtccaggacctcactggggtcatcccatgggtggcccaccacaagcttggggccatccaatgcaaggtggaccccagccatgg

SEQ ID NO: 48869 - DNA, 1732 bp, Homo sapiens
gtctggtcgccaagatggcgtcctccgcctccgcccggactccggcagggaagcgagtgataaatcaggaagaattgcggcggttaatgaaggagaagcagcgtctgagcaccagtcggaaacggatagaatctccattcgcgaagtacaaccgtttggggcagctgagttgtgccctgtgtaacactccggttaagagcgagctcctgtggcagactcacgtcctgggaaagcagcaccgagagaaagtggccgagctgaaaggcgcgaaggaagccagccagggttcgtccgccagttcagcgcctcagtccgtcaagaggaaagcgccggacgcagacgaccaagatgtcaagagagcgaaggccaccttggtgcctcaggtacagccctccacatctgcgtggaccaccaactttgacaaaataggaaaggagttcattagagcgactcccagtaagccttcaggactcagtttactccccgattatgaagatgaggaggaggaggaagaggaggaggaaggagatggagaaagaaaaaggggggacgccagcaagccgctctccgacgcacagggcaaggagcactcagtttcctcttcacgggaggtaacaagtagtgtgctgccaaacgatttctttagtactaatcctcccaaggcccccataattcctcattcagggtcaattgagaaagcagaaatacatgaaaaagtggtggaaaggagagaaaacaccgcggaagcgttaccggaaggtttttttgacgaccctgaggtagatgcaagagtacgaaaggttgatgctccaaaagatcagatggacaaagagtgggacgaattccaaaaagccatgaggcaggtcaacactatttccgaagccatagttgccgaagaggatgaggagggacggttggaccgccagattggggagatcgatgagcagatagagtgttaccgacgggtggaaaagctacggaatcgccaggatgaaataaaaaataaacttaaagaaatcctgaccataaaagaactgcagaaaaaggaagaagagaatgctgacagcgatgatgagggggaactacaggatttgttgtctcaggattggagggtgaaaggggcattgttatagggttttaaagacccaaggtttctaacagcctctgctgttgtataaaaagtgctgtctctcagtagtatagcggttacttcatgcctcaagatttgggtacctggattgctaaactggattgttgagataaaatgagccagtgagctacagcactttggaaaatttgtgtaacatgtttttgaggtaaagttgtttttgaaatttctgaagtgttatataccaaaatgccaacatttccacgacagacttaactgtataatttcgttgtaaaatctgtaagttgtaaatattgtacatagttaaatctgtattctgttttgaatttttttaattaatagaaagaccaaccggcaaactttcagatgaatgcttactgtggtatttggaatgtatgtatcttctgaaccctacatcaagttgaaaaggtttgttttcttgtttctttggtttttgtatggttttttagaacacttcataaacacataagtcattgtaggttaatcagttctcttagtgtgctttattttaaaaacataagaaaactatatgccaaacatgaccaaaccaatgatggtcagatgtggttgcacatgagagtc

SEQ ID NO: 48870 - DNA, 573 bp, Homo sapiens
gtaattcttctgtttttgttttgttctgtcttttcttcattttggctttgggtggagggaggggcaggtgacacaaaggattttttttttttttttttaatttttggaatcttttccaataaccagctaaagatttgcactgaaatacaacttgtatgccttttgcatttttaaagcctgcttcctggatttaagcagagtgatagtgttcaaagagccagttcagcctgtaacatatttgaaaaagatatgtctgcactttgaggtcccttttgaatgccattcactagacctctcaagcattttgtttcattgctacatccaagcgcctcacaagtccacaatgcgggacagcatcaaaagctcaagactttggaaaaagcttgtgggcttgcactgggggagggaagggaacaaaatttgtgtacttctttgtttaatttagaaataaggcatccaagagatgccattattttctgtgtttcaattgttgtgcctttgagttaaactgcatttttgtcttttggttgaaatctgaaatgtactgtcccaatataaaacagtaattatttg

SEQ ID NO: 48871 - DNA, 955 bp, Homo sapiens
ccaaccacagcctccagcacccgagagaacggccgcccacagcacacgttctccggacaggagggcgaaggcccaagacctggagaggtgggctcgagggaaagatctgggtcccaccactacttcctggagacgccggggaaagcaggccatccttcgagccacccatctcttctccgattggttaactgccttcttattgcgctccgctggctggtgattggttgggatgcaccgtctatcacctgcttccttatgggcagctctcaaaaaaggcacaaacaattgaaggatggataccatggcatatgttaaaagcgtgttgaaaggaaaataagaaagccaggaatctcaggatgaatcagtctagatcgagatcagatggtggcagtgaagaaaccttacctcaagaccataatcatcatgaaaatgagagaagatggcagcaagagcgtctccacagagaagaggcctattatcagtttattaatgaactcaatgatgaagattatcggcttatgagagaccataatcttttaggcacccctggagaaataacatcagaagaactgcaacagcggttagatggcgtcaaggaacaactagcatctcagcctgacttgagagatggaacgaattacagagactcagaagtccctagagaaagttcacatgaagattctcttctagaatggttgaacacctttcggcgcacaggaaatgcaactcgaagtggacaaaatgggaaccaaacttggagagctgtgagtcgaacaaacccgaacaatggagagtttcggtttagtttggaaatccacgtaaatcatgaaaatagaggatttgaaattcatggagaagattatacagacattccactttcagatagtaacagagatcatactgcaaataggcaacaaaggtcaacttagtcctgtggcttaggcggaccaaggag

SEQ ID NO: 48872 - DNA, 652 bp, Homo sapiens
tccattttgaatagtattatttacttggtcatctgggaaccttaatgttggtttattttggcaattactgtggcacatgtttaattctgtagctcctggtgactcactgtgcttattactcttcagttccaaattatcacaatcaaaatcgtaagtggtggtggctctttgagcagtatctgtttggttttctcgtgcatcatttttcattgatttccttatgtcacggacagatcttccagttttctgtttttgtttggtcttttccctgttcttttcaccagcccttaattgttccagaaaattatcaatgtgctctttccaattttctggaaatccaaacataaatttccttatgagataatttggatatcctgcttctttcatggaaatttggtctatcatgccttttaatatataaacgttgcctgatatagtcctaagtttgttgtgctcaatccgctctataattacattactgtgccaatatatgttagtgacgtctatcaattttccttctacacatatagcagtattattattgatgcttttaatcatccattcctgtagctgaactacctgattttttttaagtccatttgtaacagtttgaaatattcttggaggagaaagctttgaaatatttcttttt

SEQ ID NO: 48873 - DNA, 1742 bp, Homo sapiens
tccatggcggctccaacagcaatcacagaagcaggaacacagcctcagaagggtgtttctcaagtcaaagaaggccctgtcctagcaactagttcaggagctggtgtttttaagatgggacgatttcaggtttctgttgcagcagacggtgcccagaaagagggtaaaaataagtcagaagacgcaaagtctgttcattttgaatccagcacctcagagtcctcagtgctatcaagtagtagtccagagagtaccttggtgaaaccagagccgaatcgataaccatccctggtatctcttcagatgtgccagagagtgcccacaaaactactgcctcagaggcaaagtcagacactgggcagcctaccaaggttggacgttttcaggtgacaactacagcaaacaaagtgggtcgtttctctgtatcaaaaactgaggacaagatcactgacacaaagaaagaaggaccagtggcatctcctccttttatggatttggaacaagctgttcttcctgctgtgataccaaagaaagagaagcctgaactgtcagagccttcacatctaaatgggccgtcttctgacccggagccgcttttttaagtagggatgtggatgatggttccggtagtccacactcgccccatcagctgagctcaaagagccttcctagccagaatctaagtcaaagccttagtaattcatttaactcctcttacatgagtagcgacaatgagtcagatatcgaagatgaagacttaaagttagagctgcgacgactacgagataaacatctcaaagagattcaggacctgcagagtcgccagaagcatgaaattgaatctttgtataccaaactgggcaaggtgccccctgctgttattattcccccagctgctcccctttcagggagaagacgacgacccactaaaagcaaaggcagcaaatctagtcgaagcagttccttggggaataaaagcccccagctttcaggtaacctgtctggtcagagtgcagcttcagtcttgcacccccagcagaccctccaccctcctggcaacatcccagagtccgggcagaatcagctgttacagccccttaagccatctccctccagtgacaacctctattcagccttcaccagtgatggtgccatttcagtaccaagcctttctgctccaggtcaaggaaccagcagcacaaacactgttggggcaacagtgaacagccaagccgcccaagctcagcctcctgccatgacgtccagcaggaagggcacattcacagatgacttgcacaagttggtagacaattgggcccgagatgccatgaatctctcaggcaggagaggaagcaaagggcacatgaattatgagggccctggaatggcaaggaagttctctgcacctgggcaactgtgcatctccatgacctcgaacctgggtggctctgcccccatctctgcagcatcagctacctctctaggtcacttcaccaagtctatgtgccccccacagcagtatggctttccagctaccccatttggcgctcaatggagtgggacgggtggcccagcaccacagccacttggccagttccaacctgtgggaactgcctccttgcagaatttcaacatcagcaatttgcagaaatccatcagcaaccccccaggctccaacctgcggaccacttagacctagagacattaactgaatagatctgggggcaggagatggaatgctg

SEQ ID NO: 48874 - DNA, 428 bp, Homo sapiens
  misc_feature (1)...(428): n = a,t,c or g
anacctgctatgacatgattacgaatttaataccgactcactatagggaatttggccctcgaggccaagaattcggcacgaggagatctgtaaaacctgcccaggaacttacagaatttactttgcagaagcgttatcatactccatttacatctgtgttacacgtgatctgcttaccaagcatattaggaaatacctcttaggaagcattagcggtctcaggccaattactgtggagcagctttcattcctacccacttgcaaaccttggcgctgttgtctgagattgctgcagccattcttgttaccatggtacttctcaaactttgtgaaaacctgcacttttccttgcatgacaggttcctgtcttgtctgtcatgggagccattctgccaatttaaatgcgactgtggtataaacagtaaaat

SEQ ID NO: 48875 - DNA, 786 bp, Homo sapiens
tggccttgagcaatccttccacctcagcctcgggaagggctgagattacaggtgggagccactgcgcccagccagcagtttcagttacattatagagagagtttaatggcatttccacagttcaggaccagggaaagaaacacagaggctgcctggccctatgtgaaacttttgggggccgactccaggcctgagcctgctctgaggggatcagtcatgtccccgccttagtcccaggacctgagggagctctggattggtggcttggcccagagccaggtggatggcagtgttgaggggctggtgcttgagactggttggcagagtgggccctgtgctgaggatgggacatcttggtcacaggtcacatgaggttcctgctgagaagggctaggggatgatcatccatcttcatgggtgtgttccggttgaggaaactccagtcccagaagtgagcttggaaagggcggctcagcccaatgctccggagctgaagtggtgctgggacgtggctcaagacccgagcttgctgcaggagcccattccccttctgtcagagggggtggtccgccaggagacagtcttgcatctggtccaggaagcagacagttcagtctgctcgggtgtccagggccacacagcctgggggtgtcagaggaactgggctccggtacttcaagtaggacaggtacgtgtcccagcccagcgtcaggccgttgatgtaggtgactcgaaattgggggggcacgaagaggaagttcacgaactgcgcagcaggccacacgc

SEQ ID NO: 48876 - DNA, 846 bp, Homo sapiens
gatttatgtgagaagtagaactgtagtcattggacccttaggcaaaggaaaatccgtgtctttatatcagaagatcggcaaacgaatgtatattacacagtttaggttatgattccctactttaacctacttactttattaaatgaccaactactgatactgatcacaatagttattagagattctaatttagttggaaggttctaatcactttcattacaggcatttgaaaaatagggattcatttcgaatatattagccaggagcatagttagatgttacccaggccatttatcatcctgttaatgatgattttcccgacccttgtgagatcagcgtgacaggagtgtgtgtgtgtgtgtgtgtttctgtgggtgtgtggttttggttgggtgctgccaggtggcaaaggcatatgtaaatacatctgatctgcatctttatttcacagttaactaaaagtaaaaatgtctattctgattccatattgattttgtctaagatgtaaaaatttgagttcatctttggccaaaacctacctgaattaacatacaaaatatttgatttttaaaatttaattcaaatctcaaaatcaattaagtattctcagatcctatatcttggttaatatgctcccagatactttaaacatggcaaccttttggcctaagagaatgtttgttcatggaaaaaagcttttgagatgagagggtgtcttactttcttgtggcaattgattttctgttttaacaccctttgggtaaaatcttgcaaagagcttttataatttgttttactgaattgtatggagattgtataccaagtaaagctcttttaaattacaat

SEQ ID NO: 48877 - DNA, 547 bp, Homo sapiens
tgaaaatccaaaatagggaaatgtacagatataaagtagattaatggttgctttgcactggtaggggaagagggactagaggagcagtgcagtgataaccataatggttgtgcagctctgtgaatatactgaagactactgaactttaaatgggccaactatatgggatgtgaaattccacttaataaagtcatttcttaaaaaaagaactttaaagatacttgcaaatttacatcaatggttaatccactgggcaaatggtttaattaaaaaatcatgtaatgcaccaggaacagaaactagcccagaatgatattcttttcctgggctcctcatttccatgagttaatgacttgactgtgaagtgaataaatcctgctttgaaagacttccagaacaacattaccttagccatgagcaacaacttaagactttgagctctcccttgtttgaaatattcatgtgatggagagtacccatctccacaccaatgcagaagaaactcatgtcactccactgtacactttaagaccaaattgacaagctg

SEQ ID NO: 48878 - DNA, 736 bp, Homo sapiens
cgcggccgcgtcgaccggtgctagcgacacgggagtggcaaacgcatcctcttgccgttcccggtgtttgggccttgcctgtgacggtgggaaaagaaaatggccttgctgtgctacaaccggggctgcggtcagcgcttcgatcctgagaccaattccgacgatgcttgcacataccacccaggtgttccggtctttcacgatgcattaaaagggtttggtcttgctgtaagagaaggaacaaacttgatttttctgatttcttaagcattgtaggctgtacaaaaggtagacataatagtgagaagccacctgagccagtcaaacctgaagtcaagactactgagaagaaggagctatgtgaattaaaacccaaatttcaggaacacatcattcaagcccctaagccagtagaagcaataaaaagaccaagcccagatgaaccaatgacaaatttggaattaaaaatatctgcctccctaaaacaagcacttgataaacttaaactgtcatcagggaatgaagaaaataagaaagaagaagacaatgatgaaattaagattgggacctcatgtaagaatggagggtgttcaaagacataccagggtctagagagtctagaagaagtctgtgtatatcattctggagtacctattttccatgaggggatgaaatactggagctgttgtagaagaaaaacttctgattttaatacattcttagcccaagaggctga

SEQ ID NO: 48879 - DNA, 477 bp, Homo sapiens
ctctttgtattttcagctctatgtatcactttctagaataactttctagaatagtgcaagctttattattcacaaagtaccttcttttattattaaatccattgtcattaagaaaatttcacgggaaatgtatcaatgtaccaaaaatatctatggttttaagttaactattaaacatgaacattccccttctggtggtatattataaattggtacaagttctaaaatacctttctctaaatgagataatcagaatatcttagaatactccatgctaccatagcatattactgtattaaaataccaattcatgaggcacattacagcatttttcactaaatatatatatatatacttgtatttagtaatgttgacaatatcttaaagatgattactgaatactattttacacagctttgctcttaagaaaaaagagtataatttgatggcatcattttgtaactatcttagaagggg

SEQ ID NO: 48880 - DNA, 1009 bp, Homo sapiens
aatgtccttccagattaaaaaaatggtattttattataacttttaaaattgcggaacatcagactgaatatcatcagacacatacacaaaaccactcatctctaaagtcattttctataccctctcaaaatttggccagtgagttttgcctcagggaattttccagttcaaccccatacaccaacatggaataaatggaaacactagccttttggttttgcccacagttccaaagtgctattacaggtggaatatctgctgcaggaggtcattccttgctgctgtgggtgtgagtaaaatgcttagttccttctaaaatcataattgcaatatggacttctgcttcacgctgcatcctaaggcacaaatcaggtaacctacatctcccaaatgatcaacagagcactccatcctattttaccctcaatgctgagaaattactcctgggcccagaagttgtcacataggtggcttgggttacttggtgctcaggcaacaactgccacaggccccagcttgatgaacaccatcaatttctttaaatatgttgatactaagatggaggcctctgctcagaggaagcaaggacataaacgctgggacagactgcactgagggtcactacactaacagacccagatgacacgatggaacgtgaatactgaagctgacaatcttctgaaaaatctctttttcaaaacccatacgcctaatcgagaaatcagggacagggaaacattcgcataattacccaccaacatgttcttcttaacagaagtgaagattattttaagaatatgaaaagtgtttcaagacatctgttttcagggatagaccagagcagcagaagtacttttcagagctggttcattttaaagtctatctcaagaacaagggcagcctgctttcacaaggtaccaagacatgttctggcaaaaacattttcactttaagttatatgctgtcaagttcaactattttatacatatctgatccttttctgtcagca

SEQ ID NO: 48881 - DNA, 759 bp, Homo sapiens
agtggttctccgcccctgccactgggccatggagactgtggcacagtagactgtagtgtgaggctcgcgggggcagtggccatggaggccgtgctgaacgagctggtgtctgtggaggacctgctgaagtttgaaaagaaatttcagtctgagaaggcagcaggctcggtgtccaagagcacgcagtttgagtacgcctggtgcctggtgcggagcaagtacaatgatgacatccgtaaaggcatcgtgctgctcgaggagctgctgcccaaagggagcaaggaggaacagcgggattacgtcttctacctggccgtggggaactaccggctcaaggaatacgagaaggccttaaagtacgtccgcgggttgctgcagacagagccccagaacaaccaggccaaggaactggagcggctcattgacaaggcccatgaagaaagatggactccgtgggcatggccatcgtgggaggcatggccctgggtgtggcgggactggccggactcatcggacttgctgtgtccaagtccaaatcctgaaggagacgcgggagcccacggagaacgctccaggagggcctgtccatcctcgctgtcctttccctgtcctttccctgttctccccctgccccccgtctctatcctctgtggccttcagctaatttctgctcccctgagattcgtccttcagccccatcatgtgctttgggatgagtgtaaataaaacggggctgtggcttgggaaaaaaaaaaaaaa

SEQ ID NO: 48882 - DNA, 348 bp, Homo sapiens
cggacgcgtggggttccattaaacaacagaaggtaatggttcagcacatgaagaaacttttaggagacaagctctatacaacatcacccaatgttgaggaatcttatctaccatccccagatgtcctgaaagggaaaatactaattaaagcaaagaagctgtcctcaaattgctctggggtagaatgagatgttactgacgaatatgaaggagctgaaatgtctcataggatgggaaaagagaacatggagcatcccaataatgtgcctgtgaagcgatttcagctttgtaaagaactgtctgaactggtcagcatctgcaaatcagttcagttcaaagaatttcagg

SEQ ID NO: 48883 - DNA, 784 bp, Homo sapiens
atttattaagcacctactttgtgccagacattgtgctaggcaccctcactgtgtgctgttcccacagcacaatcatctgctcagaaattaaaaccaagaaaaggaacactgttgcaaccgtacaaactgggggggcggggggcagggggcagtagcgtggatgcaggcaactccgggccagaaaatgcacccaccagaagcttgttttccatctctcagaaagtttccactaaacagttgttttaaagcctctcgatgttgacagagaggaatgttgttctctctgtgccccccggggctggtgtctggtggacattcaaatactctgaatgctatttgataaaaggagcctgatggcttggtgtaaagaatatcaatatttggattacaaaatgcgtgttttttcagttcatatggttgcaacagcccttatgaaagatataaacatccctgccctgactgcataaatgttgaaggtagacctagttctggattcctgagtcagaatcttccagttgtccacaacctcacaaggccagagaagcgagaggagatttctattctgaaaaggagtgagtggacggcacaactggtttggaaacacgacaaactgcgcctgcatttacagaagcaatgcacacagaagaacgtcctagagctatctggtctcgcacacacgcttgggactcacgggcggggcctgggcctcggccagccctagttatcggtgcccagcttggagagccctcggcggaagtcatgcaggtcgtcaatcttcccgtcc

SEQ ID NO: 48884 - DNA, 1399 bp, Homo sapiens
catcactgaaagtgtcatttgtttctatatccatccttggcctttttctaacattgacatcttcctcctgtttttgaactttcacatcaatttctaactctggttttgtgtccttgaataactgttccaatacttcatcttctatggccacatcatccatttccctttttttatttgatcttagcttttctgcagcatgagatttactggcagaatttttcacaatagattttaaatctgtatctgtaaataagttattgtctgagtttgtgtccacaggctcattctcagatagatgctgctccttatttttccacaatgagggtgtagcaggttgtgtttgttctaaaagagaacaagacgtttctattcttgctgatttgcatgaagacatttcttgattttcttcatccctttccctttttttggtagacggctgaaagtagtttctgatggagttggtctgctgctgctgagaagccctatctttacttttatttatacttggcaatttagttggtgaaagctgatagtttgggattctcatcttagccaaagtatttgataccatactattattattagagcttgttttgcaggactcctttacagtgggtgcgtcttgtgaaagcattctgaatttttgttccattttggagactttgatttcttttggcctttcactcaaatcccatgtatctgcttgctctgattctgtgtcagctacgtatgttgtagtgttcactggggcgcttggcattagtttttcatcaactgacacgccttgtgaaaggcttggtcctggagttgttgtctttaatcctgtactgggatggccctgaggaacacagtaattctttgtagtcatgaaaatcaccgccaatccaatttctgcttcaggaataggtctaagaccttgcctttggagcatatccattattgactgaatccatttcttctgacagtcaggaattaaggtctgtgagtttgttattcctgtatcaacaacacacgttcccggagccaaaaagaaattatgttcttcttcattctcttctgttatcaacctagcttccccacctccaaagacaactgcggaactcaatttcttatgctgtttggcattcaaaaatataaatgttttccctttgaagatttgttttctttcctgccgtcctgacagatcaacatttttacttccaatagatggttcatcaagaggtgggtaaaaactttcaatttgtggaggctgcttcttggactgaactgctttcaggaattcagtaaaatattctggctttacaattggacgtccacaaatgagtgcacatattgttttaatggtaactttcactgataccatgacaaggtgagtgcattcttctgtccaattgtttgc

SEQ ID NO: 48885 - DNA, 570 bp, Homo sapiens
gcagcttctcctccaggacccttccagcccacctggctggctgtggggataatgggcacttgggagcattggagggggaggaagcatagagaaagcagcaggagacgcacctggaagcccaggggagggaagtccacctccctgcaagtgtagggcagtgagaggagccctggcaccagcagagcaagaaagaaatgcatgcaccgttcagaataagctgtcaggtcgtctggctgtttaagatttatttattaatggtatgtgacatttagcatttctcaatgcctaagattaaactaatgctttgaatcctgatcatgcttttgagctgctcctcttgggtacttgtggcatcgtgttggcagaccctgagtgacatcttcagcggcgggaaaacgaaatgtatttcactgggatgtcaaatcaacagtgccttgacatctttccacactgctttggaacttgcagtagaccagagagaaattcaacatgtctgtctgtatgaaattggttggtgcagcatgatagagctcaatttcaaggatgcatttgattcctttgagaggctaa

SEQ ID NO: 48886 - DNA, 449 bp, Homo sapiens
tccgtctcctagtgtccggaatcggctgtcagcctccctggctgttagtaccttctttcccggagtcctggtccacgagttggatttactgctgtcgcgggtgggcctcacgccattccctgtccctcggccccctgagtgagtccggtctcccggcgaaagtgagcgaggtttgcccggagcgcgcacgaggggaaaatgcctaaaaaaaagactggtgcgaggaagaaggctgagaaccgccgagaacgtgaaaaacaactaagagcatcaagaagcactatagatttagctaaacatccatgtaatgcctcaatggtatcagctttttttgatatcagttggtagttggaaaaactatatactattttatctgacgtatacctgaataaaattttagtgaagacagtgttttttggcattatagtttgttggtgaatttagtatct

SEQ ID NO: 48887 - DNA, 804 bp, Homo sapiens
attagagattatcacaagagaggaagtatgtgcaacacccttttttcagatgccattctggaatataaactttatgaagctttaaagttcatcatgctgtatcaagtcactgaagtttatgaacaaatgaagactaaaaaggtcattcccagtctttttagactcctgttttccagggagacatcctctgatcctttgagcttcatgatgaatcacctgaattctgtaggcgacacatgtggactagagcagattgatatgtttatacttggatactcccttgaagtaaagataaaagtgttcagactgttcaagtttaactccagagactttgaagtctgctacccagaggagcctctcagggactggccggagatctccctgctgaccgagaacgaccgccactaccacattccagtcttttaagtccgctgggggccgaacagcagtgctcaccagtgacggtggtcacagttgcaataaagtctctctctgaaaccaaagctagcatttcagcatggaaggaattaggaccttttcttcaggattacaggtacactggatgcagccatgcatggatggtttttctttatttttcagtgatttcctctgaagcagctgcactgatacatttgggagttggtggcttgactttgtccataaggggcgtgccacttcacatgatggcgggcctttaagagcacaaagaagtttaatatggacaacaacaggaaaaagcaagaagaaaacaagtagggaaaaacagctaacctggagagaaagaatttctttaacctttatgtt

SEQ ID NO: 48888 - DNA, 2157 bp, Homo sapiens
tttcttttctttgaattgtccacaaatgtttatcaaatgtcagtaatttttacaaagcaaatattaatagcaagaggcaaatgttttgcaaaatatgtacaaaagtaaaaagctgtaatgaactagcaactcattttataaaatcaaaccattctttccacttttagacctcctttagaaataatttattgcccatcctgaactaaagcactgacaaaaaaatttacaacaattatcagataatgtgcttagttcctggaaagttataaaaagatatatgtaaaaaaaaaatcctaagccacaaatattttatagagctaatacgagtcatgttttgttaggtacagtatctacggggttattacaaaatatacttttttataaggcttcttgtggtaaatgagctctcaccagagtagagtagtttagaaaagccatttcaaacgttttgcgattctgccttcaagtaagaggtaaaaggtaaatggcatagtttgttgcactgttgcttatactgtgcaagaattaatctctacccctttctttcctagtaccatcaaacaggcatgattaaggacaatttctcacttactatggcaaaaaatattatatacaagctttcttaacacaaaccaaagtcacataccaagtagtatatgacgttcagtgatattcactgactgaaattttatgcacactgagttccagcatactctgatccacctgtaaactttcatcatcaacagcagatttgtatatgtcacaaaactctccttatcaagacataaaatattgccatatcattcatgctttcaaaacaatgttcatataagctctcgcatttgaaaccagatggtaagacctgaatgctacaagagtgaacataacttaaatgctaactacacgttcaagtacagacataagaatgctagtggtacaaacactgtactccaaatgatgttgttaatcacctaccagcctaagactagtatctacttgatggaacttgaaaaagccataaagtccaacttgtttaaaatgttcagacttagacttacacttcaagatctagtatacatttattaataagccctaacctcgtacccataaaaaaaatggggcatgtgctgtatttggggacatgcggacacacccacacccacccacaatctctcccctcctcatgtttactagactgaaaagccaccctgtatccctatcattaaaaaacaaaacaaaacaaaacaaaacagtgcttttagtcaagcagcacaacacaaggacagatcatctgtgattaacagaagcgaacgccttaaaatgatgggagagagacaaattaactaggtactaagtcagatttccaagtgaaaaagacatgagcaaaacttctggtcttaatttctcaaataaaactaaaataaatgaaatggtaacagagtgactttctctaaatttattagggagtttgttacaaatgtttgggctttacaggcatgatttcaccggattcaaacaagaaattaacactgatatttagccttctcatgacatacacagaaataacattgctacaaactgcaatggagagaatcttgtttcaaatggcttagtttggggttttgtctaaatgtatcattatataatgaaagcaccaatttgagggtttctcaaatagtgatttgaattttaggacataacagtataacatggtaactttattcttcatatataaataaggcataatcggatgtgtattaatgctgaaaatacattttatcaaaagcataaatacaagtatttgggtacacattgaaagttaggacttaaccaatttcttcttacaaaaaatgataaggacatatggtatttgttgaatctaaatcagcacttctaatcatttctggtattaaggcgatcttatttccttctactttaaaccaaccactgccaccaactgaataaggatttccctaaacagcctcaatttgagagactaaccagaggaccttctctatgcaaattacatgccaatacaccttaaaagaaaataagacaaaagtgaatgagttttttcattccatattgctttctttggttgcagagcaatccagtgccctttccagataataaaattgaaatgaagatttcaattta

SEQ ID NO: 48889 - DNA, 1494 bp, Homo sapiens
tcagattctactttaatgtcagtgcagatttgcattgaatcatgccattgtgttttttctcatttttatgctgttgggtcttagtttttaaattgatataaagaactcagcaatggttttattttctactcatacttagggtttaggaaacactaccactagttatcatttaatcaacttcaatggtctactgaaacaaaaatggtaacttttcattagtggattatttagagttatagtagttgtttccagaaaacacttcctcacaattgtacttcccaatcaaatcatgtgatcatacagttattcccatgaaaggcagaatgtttgtttcaaaattaatctagttttctgtacatttaaatttgagaaggtgacaactggctcttttccagtcttccttcatgtcagttttctgatagaccactattggcaaacagtatctgtcaactaccaaatgtgtaaaattttctgtatttcactttgtcttatttgtaaatagtgaactaaaacttttggcagatcagcaacatttgctgagcctgttttttaagctaatgtgtattcttactaatgttcctatcaagaatggatttgtaatatatgctgtctatttctaatgttcacattcatattttgaggttctatcttattttaatagagaacagacttctcaaaaaatcttcagaagcagcttattattgaaatatcgaaatattgaaataaacccggtggggttagattactcatctgtccaccaagtgggacatttgcatggactgggggcttaaaggacttagaagagacctgtaagtaaatcctgaaaatgagccaatccccacttgaatggttactggagtaaacccacctttaccaccccaattacagcacccgaggccgataaaccaacttggctctgggttcatttttctcttcttcatttgtgatgctcagattcaaaatgtgtgttctacactgttacaggcttctcttttgtttgattaaagattttagtcctacttttgtatggacacattagaatattcagagaccaaaatagaagaatttgctgttagatatttttcagaagtcagcagatttgtggcaaatcatttatttgcctttttaaaaattcatttaagcagttcagagagtagactactcagaaaattatttcacgtaattgtctaagaggtcaatattttttaatgcatattgaatcaaataaagtgctctaaagaaattattatacaaattcctttgggttgtttttcttttcttaacaaggggtgggggtaaacaggaatatgattcaggctttctggttgtgtatttaaagagtattgattttattattactattgatttactttattcctggcttccttttcacttttctttcaatttttaaaaaataatttaagccgttgaaaatataccaaactgttgaaacattttactcaaattttaaattcctaaaaatgttttttaata

SEQ ID NO: 48890 - DNA, 841 bp, Homo sapiens; identical to SEQ ID NO: 9010

SEQ ID NO: 48891 - DNA, 1854 bp, Homo sapiens
aactagctatttcctggggctgtatttttcagaatatgctgagctacatttgctgcaatctgttgctattcagagtttaagtttcaggagaaaacaggaacaatagaacactctgcctgttgtttttaataaacatcaattaaaatacagttaaaagttcaaaaattttctatgactagccaataaattgctgcaacttttacagctaacgctggtgttcctgaaatttgaaacatagtacttttcaagaactgtggaaaagcttgattacaacaaaaataacaggcagagtgttctattgttcctgttttctcctgaaacttaaactctgaatagcaacagattgcagcaaatgtagctcagcatattctgaaaaatacagccccaggaaatagctagttaaaatgtggaccacatttcaattccacctttccagtggagattatcagtagactcaaagagatccaagggttggatgaataaccatagttgaaaatgctgacacaaattattatttggcaataataaactgaggtgaaatgatgccaagtaactgatgtagtggaagtatgttctggtctgactagaatacagcaataaaagttgagaggttaataagggcaaaagaaccttcagataaatggagaatgagaaagaattgatgattcaaaaaacatacttcattgtgatgacaagcaaattaaggatgaaaaaaagcaaggtgaaaagaaataggaaaaatagttcaggatgtagaaaaattctttcacaacagccaggaaattctcttgacagaggatctcttggtaaaataaacgtggagatgaactagaacaggtatgaggttctagcagaagaaacatttgcataaatgtgactttcttatccagccacactaactctatttcttaaaagcaacacaatttccaaaactttcttgctcaaagctcagatttacacaatgccacctctaagaggcaggacactagcctaaactaaaatgtcccttatgtctgttcttactgtcttctcctttggcttgagagatgttttgatttgtaaaagtactggccaatacaacaaaatggagacataaattatgtcataacagaattttacatatgtttccttatattatgttcattaatgtattacatgccttaataatttcactcagttaaaaaatgatggtatgatgctttaaagctgattcaatcatgattttataagcttatcaagagtgaaaatagaagactattaaaaatagctaaaaaggtaatgtgtcatagtgtttaatgtttctgtaattgttggtaaggcttgtatctaagtctgatgcagaattcttaatggcactcaaacagttcttttctcagccacatggtatccactgatgctatgagtctggaagagactggctatgggtaccacttcttgtcttcagctgtgactgtgcaatatcagcaagtgcgctttgtatcttctccagaagcatgtctcctcgataaacaacatcctccagacatgtagcagcttcatggttttcttcttctagcttatacaagctagcagcctgtaaagcagctgtagattcttcactgggtaaggaatctatcaaaacatcaatgtcttttgctgttcgtgcaatcagtgctgcaaaaagctgggcatactcttctgtagggttagctggctggtctttgttaattgctgtctgaatattattgaaagaggcaggaggaccacattgctgcaatactccaatggcattacaaaactgatctgcaagcgaattcacagcgtcctgaagctgcgtgagccgatccgccatgttcctaccgcagcaaacggacg

SEQ ID NO: 48892 - DNA, 555 bp, Homo sapiens; identical to SEQ ID NO: 9020

SEQ ID NO: 48893 - DNA, 1349 bp, Homo sapiens
aagcgacctctcgaagcaactgtagacctggcctttccccctggtgctcttcatcctttaccaaagagacaagcacttgaaaaaagcaatggtaccagcgcggtctttaaccccagcgtcttgcactaccagcaggctctcaccagcgcacagttgcagcaacacgccgcgttcattccaacagataattctgaaataatcagcagaaacggaatggaatgccaagaatctgcattgagaataactaaacattgttactgtacatactatcctgtttcctcctcaatagaattgccacaaactgcatgctaaataaagatgtagttcttctggacagaccacaactctaagaagctagtgctgctatctcatatatgagtattaaatatggtatgcttagtatattccaacctaagatagttaactacctgagaccagctgtgatgtttaaagacataaaggataaagtttacttttaaagggtttctaaacatagtttctgtcctaggaatattgtcttatctccataactatagctgatgcagaaagtccagccagtttactcatttcgattcagaatatttcaaatttagcaataaacaattagcattagttaaaaaagaaacatattccaagggcaggttcgattctagctctaattactgtcatgtcatttacccactggatcaaagggtatgtttcacttcttgacaatataaatgctgcagcaaagatgagaggtgaagtaaaaccgatacctgtcctgcaggtctaaaatttgaatggaaattcaagcacaagtactggggacacatcaaagtgtggtgtttggtttgcctggagatgccacgttgaatcatgtgattctagattaacattaaatagattgaaaaagaaactttgcacggtatgagcttcataccccaccaaacaaagtcttgaaggtattattttacaagtatatttttaaagttgttttataagagagactttgtagaagtgcctagattttgccagacttcatccagcttgacaagattgagaggcccatgccaacagtctaatctaagagattagtctttcaaactcaccatccagttgcctgttacagaataactcttcttaactaaaaacctagtcaaacaaggaagctgtaggtgaggagatctgtataatattctaatttaagtaagtttgagtttagtcactgcaaatttgactgtgactttaatctaaattactatgtaaacaaaaagtagatagtttcactttttaaaaaatccattactgttttgcatttcaaaagttggattaaagggttgtaactgactacagcatggaaaaaaaaa

SEQ ID NO: 48894 - DNA, 1170 bp, Homo sapiens
tttgtgattctttttttcattgaaaatgtcaatttagaaaacacaaaagatttcacactttattcagacaacactgagagaagaaaagggaagagtgagtaggggagatggggagatccggctcccaaggatttcaggaaacacagtggggcacctgatctagcacacattcagagggtagggaggggaagggatctagctatactctgggcatggagcagggaaggtcgtccttgctatggaggaaaggagagaggaaggacagaggaagagtggtcccccatctcatctcgacaatctcacaagacaggagtatatcgggacctagctaccagggagggatggatgcaagaagggattccaggatctaacagatccttgacactctggatctactctcaagaaacaacctccctcagagaatctggatctgggggaaatggtggtgtcagccaatctcctttagagaccccaaagcaacaccagtttggggttccttgacacctacacaaaatgtggaaatgaaagagtttggccaatggtgagtagatccctttgggaagctggtaagtccctgttctacctaactagactgctctgaagcagagcttgctcactagcggccattcgcaggctcaaagggcaagtgtggcaggcagcacaaagcagtattagagccaccagtagacactagagggaatatggggtttatcccatagataaaattccttaaaaagtttccctggcacaggatgcccttagaccttccatggtgttctaaagtttgacagcaagcaagagtgtgcttctctagataaatgtatgagccatctaaccaagaagtctggcaacagatcagacttcctgttgggaaagtattcagagcccaagttaggagagaaggggtgcttttgtgttaagaaaagctacaaagtgttaggcagtttgagaccctgacatccctgctgtctaagaaagtagaagagggaatcctatgggctctgtcaggttccgctgggtcctacaggatgcaatggaagagtgggtctgaggttctcagggaggggttccctgcccaccccaggtctcccagggcagggagagggtagctgttagtatcgactctcctcagagcggggaagggagctggtgcgacgacgttgagctggg

SEQ ID NO: 48895 - DNA, 1069 bp, Homo sapiens
ttttttttttgcatgactgtgtttatttgaaccaccagatctgttccaataaagagctctccagaccctgcctcaccttacagggaagggcttagagtcagggaagaggggcctgttgctcctgtccctgaaaaaggaggtcaagatggagcccgggcttcctggtgaccattcagactcctcccactgcttgtccctgtggaggacacaggacgggctaccccatctcaggtttggggtgggatcgctcacagtcacccccggaacagccccaactgagggtggggggcctggccatggcacacctcatgtctctgggccgggaagccacgatccctcatccatcaggcctgctgccgctctccaccccagcgggggatggacatctgtgctccctcgcagtacactgcggacccaggaggtcccctgcatgacattcctctccttggcctcaggccagcaggcggctgtactctgccagagcagaggactttctcaccccatcccagatccgggcagcgtagtggaaccagttcttctcggtgaggatcgtgtgtgacagctgtggccgggccatggacatcacttggctcccgaaaccttgctcaccaaggaactggaaaactggggtggcccacgaataccccaggcagcagggagaagagtgggctggaacccaggtcctgctcttggtgggttttcactctctgcttcactgtccatgaagggtacccaggaataagttgacctcagagtcccaggaagtcaggtggaagccccgggaagacattgcattgtaacatggacagagttcccttgtaacgcaggtgggagtgggccatgagctggtcaatcatcaggtgcatctgccgcagcttcccgaggacagaagtcctctcggcgagctttgttctgcaagaagactaggtgggggtagtactcggtgccttcatcggagcccgatgagctgctggactcgtggctgggggatggggtggagggcttcaccatctctgctgtctgcaggaacctgtaaagactgaggtctgtgaaccagtcctggacaacc

SEQ ID NO: 48896 - DNA, 1204 bp, Homo sapiens
  misc_feature (1)...(1204): n = a,t,c or g
ttttttttttttttcatttcagcttaattttatttcctcttataaatgggcacagcacaggaagtgttaaaaaacaaacaaacaaacaaaaaaaaacaaaaacaaaaacaaaaacaaaaccagttccttcacaaggctggaacaggagagtacccgcagtggggcaggcgccttggtctcttttttccactgtctttttcttttgtttttcttatttaaggttttggccatgaactcaggacaggtatggttaataaacaggttacaggggagagaaggggcagggaagtcctgggggagggaatggcagacccccacccaccccaggcaggttctgtacaggagaaaggactcacaggagggagggacactgtcttcagggggctctctggagccacgctgcctacgaaaaatatttacatgcatttgccacgctgaggccagggtcactgtggtgccaggcaggcacctgggggatgctggggccatcggctctcagatggcaactcccagggcccagtctcgatgcctctgtaaatctgtacagtttgcgggcttctatttacaggcaagaggcctggggaggcaagtccagggttgtagttgttgggagaagaaatccagagaacacaggaggcagccactcctaccccatgaggcagagggtctgctccctgtgtccaagggggcccccaccaggaaggccttacaagcggctttgccaacccccaagggggtttttggcccacaaaaccctaagccctgcccagccctagttgccacccacatgcctccagcgatcaaggggaccagtctttcaggcaaggcccccatctggcctcctggcctcctggagacagggtctgggctctccaggtcctggcctgcctcgtgctctggcagccaaggccccagaggctctcaagccacagaagctccctctcatttggaactccctgtgcttccagcaaatgccaaagcccctcagaacactccattacaggcaggggtagggggacatgagggccctgcacccacattgcacctgggagagcctagctggtcctcactgaactctcttggactgccttgccccggtcaggccggccagggcagatttgggctggtcagactcctcatcctcaggaggataaagcctggacatctgccttgggtccaggganccatgaacaagcccctggcc

SEQ ID NO: 48897 - DNA, 866 bp, Homo sapiens
gtgatcctcctgcctcagcctcccaagtagctgggactacaggcgttcactactacacccagctaatttttaagttttttatagagatgagggctccctatgttgcccaggttggtctcgaactcctggactcaaagtatcctcccgcctcggcctcccaaagtgttgggattataggagtgagccaccacaccggccaagatgcttttcaaactgatacagatgacaatgggagcctcataaagatggcttttgtttcttcccttcaaggtcatttacttgtacgagacagaaaaagatagcattggggacatgggatgggggagggagggcaatagtggaacgaactttccatgggaaactttcccttttgtaagttgagggccaggggtagggatattttttagtttgtgattttacatttatctgtacatactttttcaagattgatcatttttataaccatggttttcctgaaatcctcaattcatcaatatgaaggaaatgaaccacatagactttatgcaataaataacagtgcaagtgagtataactctaactgatgttccacaaaacatttttgatttcaggtttgtatgatgtagtttttaatcgtacattttcatatgcttcaaactaacacatttttaaagctttcccccacttttctctctatttgtattgttagccatcttgaagtgatgttgtttaacataaattgtactgttgaatttggctttacgggtgtaaacactgatggtatatcagtatctgagaccccaaactctccaaatactgatggtgcattttattcttgaagtgaaatctgtgcaataaaataacagactgtctgcaaaaaaaaaaat

SEQ ID NO: 48898 - DNA, 2450 bp, Homo sapiens
cattatttttctatttgggtcaaattaattttattatgctccatgatgaattgccaccagtgcaacatcctattcactatacatttcaaaaaaagaattcacatactaaacaaaatttcagttgtctgaaaatgaaatgattgaaagtctttatgaatctcatacatacaatatgtggctagctgaaattgtctatcacgtagcatttagatataaaaagcctcatgctagtttgttaaatgcaaaggctaccagacgaccatttagctggagaatatacggaaggctttcagacaacgcacaggtatagtgctgctcacagtgcaggatggtagaggactgaaacatgcaaccttacaccttacttgggtaaagcagatttagtcttcatgcctggactgaactccacagctgctgtgtttcaaccaacagtaatttagactttttgtaacaacaaccaatgtctttttcttctttaagaaaaaaagaataaattaattacctttggcaaattatatatccattttacatgtttaaaattgtgctttgaactcgaagaatgggtactctctgctgagagaagttcctgataaatatatattataccaaagtcagctggaaaatctagaatttcttggccacaagttaagagagatcttaaattggcattaccctgaagacatttctaggaaatttaaaatgttttttatattgtcaaaaagaaaaaaatttttcaattaacattacttaaaataattataatgttccatttaacttttgtacaaactcctgattttattggttagtagttgtccagcctcatctgcaccagattgactgagctcaagccacaataaaaatgatagtaagtagaaaaaggtttctagcagcagagggcactgttgttgcaagaaacaaaaagtctagaatctttcccatgtgcttaaattactcttgcaagaaagataacattctttgaataacttaagtattttactgcaccacttactgctttcagcaacaaaaccttttaaattatttcttatgataactagatgcatgatcactagagattatgtaataaatggttaaaattcaagccacatcttgcaggtccagcctgtcaagatctgccaatacgagattttggttggtacaattctagatagcgtaatttttagttggatattgtgactatagtaatgaaatacatttggaactacattatgcatattactcaatgtgagaaaaatatgtttgtatttaaatcagataattttctacctaaaatttaaagtaggtaggtatgataattagcattataaatatgaaacaaccacctttaggcagattagtgtagtgtagagaggcaaagaaaccctaattttaacacaccatttagtatgcataacaaatgtgcaggttgtaaagttttatctttaaaaaaaaaaaatctatcattcagttatctgttccaagaactctgacattgggaccaccaatcttttaagaaaaatgtaactcttcacatgctatttgacaaaaaccctcaaaagttatccaaatcaatgcatgttcggttccgtgttttagcgcacacctttgccaactagattacatttttatggttggtatttctgaacacctcaatccacaccaaagtgcaaaataaaaatgctaaaattctacagtattttagtactattctgatttgtatagtttttttaaccaaatattggagttaccataatattacctcagttcatgtagaatgaaaactactccctaaatccctgaaactccaacttaaattttgtttcagagtaataccaaaaaaattttcaaaaattttgctaaaaagagcctgtcacatttgctacagcataaaaataaccccagtcaataacaagtatttaagggctccttatgatcccagtctgcaaataccactgctataccaataacaggcagtattactgtaaagaggtgtgttaatcgtccttccccccactagtatcctctgtagtgattttatgtagagcatattgcctaaaatttgagaaactacatcggtgtagtgatgtctacagaactgtgcaatgtatcagcttcaacattcatatgtagcattgtattcaaaataaaggggctaaagaaactaaggtctgcatcacttaaaaaagaatgtagtgctatactagatttttttttaagaaaatttaggtacagaaaaagtagggtatgaaaatagtgttttccttctggcattataagtaaattacattaaggtttttgtcagtctcacatatagtatttaaactcccttgttgatggaatgaaaaatattcacaaatcaagtgagcatcctggtgtaaacttgcacacaataacagggagtagctaagtagaggaatacggcaaacctttacagattaaatgaggtattgcac

SEQ ID NO: 48899 - DNA, 2162 bp, Homo sapiens
gcggccgcggtaacctggctgctcggggagccggtgctgtggctgggctgccgcgccgacgagctgctgagctggaagaggccgctgcggacgctgctcggcttcgtcgctgccaacctgctgttctggttccttgcattgactccatggagagtatatcacctgatttccgtcatgatacttgggcgtgttattatgcaaataataaaggatatggttttgtctagaacaagaggtgcacagttgtggagaagcctcagtgaaagctgggaagttatcaattccaaaccagatgaaagacccagggctcagccactgtattgcagaatcatggatgaatttcagcatatttcttcaagaaatgtctctttttaaacagcagagccctgggcaagttttgtctcctgggtctgtagtgtgtgcacattttttacgatcttggggaagttacattcctggggttatactcagctatctactgtttactgtgttgcatttttgtgtccattgtttaaatgtaatgatattggacaaaaaatttacagcaaaattaagtcagttctgctgaaactggattttggaattggagaatatattaatcagaagaaacgtgagagatctgaagcagacaaagaaaaaagtcacaaagatgacagtgaattagacttttcagctctttgtcctaagattagcctcacggttgctgccaaagagttatctgtgtctgacacagacgtctcagaggtatcctggactgataatgggaccttcaacctttcagaaggatacactccacagacagacacttctgatgatcttgaccgacccagtgaggaagttttctctagagatctttcagattttccatctctagaaaatggcatgggaacaaatgatgaagatgaattaagccttggtttgcccactgagctcaagagaaagaaggaacagttggacagtggtcacagaccaagcaaagagacgcaatcagcagctggtctcacccttcctctgaacagtgaccaaacctttcacctgatgagcaacctggctggggatgttatcacagctgcagtgactgcagctatcaaagaccagttagagggtgtgcagcaagcactttctcaggctgcccccatcccagaagaggacacagacactgaagaaggtgatgactttgaactacttgaccagtcagagctggatcaaattgagagtgaattgggacttacacaagaccaggaagcagaaggcacagcaaaataagaagtcttcaggtttcctttcaaatctgctgggaggccattaatctaggaatcagcttgcaacagagcacaaaaaacaccaaaaaaatttcaaacaagaaaaaaaaaaaaaaaaggaaaagaaaaaaattgaactgtaagctttaatgattactttagatttgttttattttccctcctgcagtgaattaattggatatatatcagctgacactgatagattgatatttctgatcgttatttttgtgtcataagcatggaaatgaactttatacacaccactgtgttgtcagagataaatattaggggttgtttttaaagcaaaaagaaaaaaacaaaaaccaaactattaaaatcctcctataaatattctttttctttacagtttttcaagcatgcaaaacagtttattgtaacttactgaaaaatattaacaattaattgtgaatacatgctgttaccagcttccttattcctaatacctggaaaattttttttttcaacggatagattttgatgtaaaaaagaccgaaattatcaaggtatcttagttgaaggacttgggaaatactatcaaaattaatttcttaggaaaaaatttaaaagtatatttaagtactctggatagactgaaacgtttccatgttatttctgcagttgtagacttaggcttatttgtaaagaagcatgctccattgactgccatctctagtcttgcagtgggtggtattaacccatagaaagcaagcagttgtgtatcacatagacaatggttatgatgtaaacagattcagttgttttgttgttcattcgtcatatgtttgtgatagggatgttgggagcacagctctattctgcctgctcagacttaagttagacccttatcttttatattat

SEQ ID NO: 48900 - DNA, 938 bp, Homo sapiens
gtatgattataccatgagagacaggattaatatagaagatggcaaggcaaatttctaattagagggaatattaattttctacaaaataaagtttgttcatcaatacaaacctgctttcaaatcaaatcagaaagacatccttcggaatgtgttcagaacccaaacatcatgtcaatggcaacagaacagtcgaacctttcccagagggaacacagatggctgtatttggaatgggatgtttctggggagctgaaaggaaattctgggtcttgaaaggagtgtattcaactcaagttggttttgcaggaggctatacttcaaatcctacttataaagaagtctgctcagaaaaaactggccatgcagaagtcgtccgagtggtgtaccagccagaacacatgagttttgaggaactgctcaaggtcttctgggagaatcacgacccgacccaaggtatgcgccaggggaacgaccatggcactcagtaccgctcggccatctacccgacctctgccaagcaaatggaggcagccctgagctccaaagagaactaccaaaaggttctttcagagcacggcttcggccccatcactaccgacatccgggagggacagactttctactatgcggaagactaccaccagcagtacctgagcaagaaccccaatggctactgcggccttgggggcaccggcgtgtcctgcccagtgggtattaaaaaataattgctccccacatggtgggcctttgaggttccagtaaaaatgctttcaacaaattgggcaatgcttgtgtgattcacaatcgtggcatttaaagtgcacaaagtacaaaggaatttatacagattggtttaccgaagtataatctataggaggcgcgatggcaagttgataaaatgtgacttatctcctaataagtatggggggtggagctgt

SEQ ID NO: 48901 - DNA, 3898 bp, Homo sapiens
  misc_feature (1)...(3898): n = a,t,c or g
ccgactctgaggctccctctttgctctaacagacagcagcgactttaggctggataatagtcaaattcttacctcgctctttcactgctagtaagatcagattgcgtttctttcagttactcttcaatcgccagtttcttgatctgcttctaaaagaagaagtagagaagataaatcctgtcttcaatacctggaaggaaaaacaaaataacctcaactccgttttgaaaaaaacattccaagaactttcatcagagattttacttagatgatttacacaatgaagaaagtacatgcactttgggcttctgtatgcctgctgcttaatcttgcccctgcccctcttaatgctgattctgaggaagatgaagaacacacaattatcacagatacggagttgccaccactggaaacttatgcattcattttgtgcattcaaggcggatgatggcccatgtaaagcaatcatgaaaagatttttcttcaatattttcactcgacagtgcgaagaatttatatatgggggatgtgaagggaagcagaatcgatttgaaagtctggaagagtgcaaaaaaatgtgtacaagagataatgcaaacaggattataaagacaacattgcaacaagaaaagccagatttctgctttttggaagaagatcctggaatatgtcgaggttatattaccaggtatttttataacaatcagacaaaacagtgtgaacgtttcaagtatggtggatgcctgggcaatatgaacaattttgagacactggaagaatgcaagaacatttgtgaagatggtccgaatggtttccaggtggataattatggaacccagctcaatgctgtgaataactccctgactccgcaatcaaccaaggttcccagcctttttgaatttcacggtccctcatggtgtctcactccagcagacagaggattgtgtcgtgccaatgagaacagattctactacaattcagtcattgggaaatgccgcccatttaagtacagtggatgtgggggaaatgaaaacaattttacttccaaacaagaatgtctgagggcatgtaaaaaaggtttcatccaaagaatatcaaaaggaggcctaattaaaaccaaaagaaaaagaaagaagcagagagtgaaaatagcatatgaagaaatttttgttaaaaatatgtgaatttgttatagcaatgtaacattaattctactaaatattttatatgaaatgtttcactatgattttctatttttcttctaaaatgcttttaattaatatgttcattaaattttctatgcttattgtacttgttatcaacacgtttgtatcagagttgcttttctaatcttgttaaattgcttattctaggtctgtaatttattaactggctactgggaaattacttattttctggatctatctgtattttcatttaactacaaattatcatactaccggctacatcaaatcagtcctttgattccatttggtgaccatctgtttgagaatatgatcatgtaaatgattatctcctttatagcctgtaaccagattaaggaatacagctcttaaaaaatcaagaacttcctgagtttcacatataaaatggtgacaaacacctgcttctgataaagtttatccaattttgtatttatagaattctattatgtgcttccctccttagacatagtttttctccttttgtactaaccagtacttccatctatattgagctaaactgtctttgaacagtcaactctgcatcatgtgcctgcctgatttggattggtttcacttttttttttgtttgaccatagcccattctatcagtcaagatgactgaataattgtgtgttaaatacaactcatgataaggagaacctttatggaaacaagaagttttatggcaatcgagagggaattatttatatgtacttcttaatactatgcttcccaatattttttcttactaaaaataacaaaaatatttaaaccttctgaaatctattcagttatcattaggatttgcacacaatgcaactaataattcatgctttaaaaagtaggttatttctgttgaagagaaaattatcagcagggaagagtctactagaaaattcatgtgctagtcattcttggggatttaatattttgctggagttaattcactatatccagacctgtatctttcatttattgctgagccatgtgcagtctggcatctcaacaacctcaacaacctcaacaacctccaagacatgtcagtttctgtagtgttcacctcaaatctgacactggaattggaactgatttagaaacaaccatttcattcatttggtatgactagcttcatgactagcttcatgaatagcttcatgaatagcttcatgacttctcgctaacaatgatagtataattctgcctgttcttcaggattgaaattttgaactcaatttagatttcctgttttccctcatataccacatctaaacagtctccaaatctttatgctttttttttttttttcaaaaaagttcacccaatccctaggnnnnnnnnnnnnnnnnnnnnnnnnnnnnnnnnnnnnnnnnnnnnnnnnnnnnnnnnnnnnnnnnnnnnnnnnnnnnnnnnnnnnnnnnnnnnnnnnnnnnnnnnnnnnnnnnnnnnnnnnnnnnnnnnnnnnnnnnnnnnnnnnncacctagctgggactagaggtgcaggccaccacaccagctaatttatgtaannnnnnnnnnnnnnnnnnnnnnnnnnnnnnnnnnnnnnnnnnnnnnnnnnnnnnnnnnnnnnnnnnnnnnnnnnnnnnnnnnnnnnnnnnnnnnnnnnnnnnnnnnnnnnnnnnnnnnnccgtttttactctttactgcatccttcccatcagtattaattcctcagaaatttagtacattcctccaccatttcaaaatgctcccagaactcacactagttggtacttaactacaaccttcaacctcaccatttaattttgatgtatgtttttggatttaccaacagtactttctttcatgactactttgatttagttaagaatgctcactgtacactgaatgttaattactcagctaattcacactgatttcctgtttaaaaatatgatcccctccagggccattcatgtgaagtcagggtacagctgatgccagctacagaatcactatgtttcaatatgggaatatgaaaagtcctaacacataattgcaaatgcattttctactatggtatacaaattttatcattacaaaatagtatcagcttttttcacttaaggaaaataatacatcttcattcaaatattcagtgcataaataattgccttaaattgagtctttgctgtggaatttgagagttttggaaatcaaaggcccttgtgaaacatttcctgttgccatttatttatagatagcaatagcttcaaatgagtgggaaagtctacttaggtgaagtggtaaatagtcactaagattgtataaatagcgcattgatgagttgcctaattgttttctccaacaataaccactggtccattggttcactacttactcaagaaagacatatactgagatggcttgaaatgtttaatgcatgtgaacgttatttttaccgtgttttggaaaaagatcttgatgttattgtcttcctttattttccacaattaagtgcatctaactgtgaattgtatatggaattacattattcagcatatacatatatttacctgctttgttcattctctgtattcaaaattaacagatcatgctgaaaaccactcaaacgattatattttttacattataagaagtaaaatatattattctgaataatgaaaccaggcagttgtactcgtaaagatttt

SEQ ID NO: 48902 - DNA, 899 bp, Homo sapiens; identical to SEQ ID NO: 9060

SEQ ID NO: 48903 - DNA, 1390 bp, Homo sapiens
agcataggagccatgaccatggcgaaagccggggataagagcggcagcagcgggaagaaaagtctaaaacggaaagccgctgccgaagaacttcaggaggctgcaggcgctggggatggggcgacggaaaacggggtccaacccccgaaagcggctgcctttccgccaggctttagcatttcggagattaaaaacaaacagcggcgacacttaatgttcacgcggtggaaacagcagcagcggaaggaaaagttggcagctaagaaaaaacttaaaaaagaaagagaggctcttggcgataaggctccaccaaagcctgtacccaagaccattgacaaccagcgagttgtatgatgaaaccacagtagaccctaatgatgaagaggtcgcttatgatgaagctacagatgaatttgcttcttacttcaacaaacagacttctcccaagattctcatcacaacatcagatagacctcatgggagaacagtacgactctgtgaacagctctccacagttataccaaactcacatgtttattacagaagaggactggctctgaaaaaaattattccacagtgcatcgcaagagatttcacagacctgattgttattaatgaagatcgtaaaaccccaaatggacttattttgagtcacttgccaaatggcccaactgctcattttaaaatgagcagtgttcgtcttcgtaaagaaattaagagaagaggcaaggaccccacagaacacatacctgaaataattctgaataattttacaacacggctgggtcattcaattggacgtatgtttgcatctctctttcctcataatcctcaatttatcggaaggcaggttgccacattccacaatcaacgggattacatattcttcagatttcacagatacatattcaggagtgaaaagaaagtgggaattcaggaacttggaccacgttttaccttaaaattaaggtctcttcagaaaggaacctttgattctaaatatggagagtatgaatgggtccataagccccgggaaatggatacaagtagaagaaaattccatttataaagtactgagagaatgatattggattttgctgaacaggcctatcttgaactttggtaaattatttttgacagaatactcttttcaaaatggcatttgctgatttcataaacctttcacgtctggacgaattaccaaatgccatgaattgccactgtgtgtttatgtagaaaatacaaataaaagttattttgatggcttaggtttccttaaacttagttctcttgtttttgggtaactgtgaataattaagttggaatcaagattcagattaactttcctatttgcatagaacacatgagaggaataaaatggttggtaaat

SEQ ID NO: 48904 - DNA, 1241 bp, Homo sapiens
  misc_feature (1)...(1241): n = a,t,c or g
taacctaagacgccactatcaaaccaatcacagcaagcattatgaccagtatacggaaagaatgcgtgacgagaagcttcacgagctgaaaaaagggctcaggaagtatctcttaggctcgtcagacaccgagtgtcccgagcaaaaacaagtgtttgcaaacccaagtccaacccagaaatcccccgtgcagcctgtagaggacctagctgggaacttatgggagaagttacgtgaaaaaatcaggtcttttgtggcatattctatcgcaatcgatgagatcacgggtattaaataataccacccagttggccatattcatccgtggtgtcgatgagaatttcgatgtgtccgaagaacttctggacacggtgcccatgacgggtacaaaatctggcaacgagatctttttgcgtgttgagaagagcctgaaaaagttctgtatcaactggtcgagattagtaagcgtggcctccactggcaccccagcgatggtggatgccaataacgggcttgtcacaaaactgaagtccagggtggcgacgttctgcaagggtgcggaactgaagtccatctgttgtataattcatccgggaatcacctctgtgctcaagaagttgaagatggaccacgtcatggacgtggtagtgaagtccgtgaactggatatgctcccggggactgaaccacagcgagttcacaaccttgctctatgagctggacagccagtatggtagcctcctgtactacacggagattaagtggctcagtcgcgggctcgtgctaaagagatttttcgaatccttggaagaaatcgactccttcatgtcatccagagggaaacccctgcctcaactgagctccatagattggatccgagacctggccttcttggttgacatgacgatgcatctgaacgctttgaacatctctctccaaggacactcccaaatcgtcacgcagatgtatgacctgatccgggcgttcctagcaaaattgtgcctctgggagactcatttgacgaggaataatctggcccacttccctacactgaaattagtttctgaaaatgaaagcgatggcctgaacaacattcccaaaatcgcggaactcaagaccgaattccagaaaaggctgtctgatttcaaactctacgaaagcgaactgactctgttcagctccccgttctccacgaagatcgacagtgtgcacgaggagctccagatggaggttnacngctgc

SEQ ID NO: 48905 - DNA, 568 bp, Homo sapiens
tttttttttttttttgatttctcaaagctattatttattctgtacaaggttccactgtacattagacattcttctactcttgcttacacagtaaacaagtgtacacttgcccttgggtcaaggttcacaggtcttctctggagaagggtgtcaggccagtaaaactcagggtgtctttctctgatgcctcctcctaggagcctggaatgtgccaggctccacggggcacaagccgggcccagctgtgtgggtgaacagctttactctccaggacagcacagagttttatccaactatgtagggcaaaattgagcccacaggaaagaaccatacaactgaggcaagatgtccccaaatacccaggctccagctcccagggcaggactggagaccagcgctaagaagagctgaggggtggcctgggcatccctgagaaactcggtccaaagggcctattgtctaggaggctctgagaagggggcgggggcaggaaggccagggggaaagggatgttaagagaataaataaaagggagagaagctctagggacgaggggcttgtgctatcc

SEQ ID NO: 48906 - DNA, 1612 bp, Homo sapiens
atggcttttttttttttttttttgctgtgaaacatcattttattaactaattttattttattttttacaaaaataaacaatttaaccaacaagaagtacaaaagattctggatattcaaactcgaggaaaggggaaaacctggttttggctgctttgaaggctttcattgaaagcaaatgaggcagaaaggccccggccccacccccgccccaggtcctggctcaaaccacacctgctccctgaccccagtcttggctcatgctgaggtgtgcacctctgcccctgacccctgggctggcctgggagtgtcccctgtcgggaggtcagagatagcctccccaggtacagaatcacccacatcctggagcatctcccgccaagtctcctgtccagacctaagctgagagaacactccacgatggattgtccccacgcagcccccaccgcctgctgtggcatgtgcagcagcagcagcaggggctttagctacattctcacactattgaacacagtgatggggctgcccacggaaccgtcccagggagggggcacagcccccagtggggagactagcctgagcttgcttacagcccacagggttggagaggcagtcatacccccatgattcctggactaggagccagcagtcccatagctaggctggtaaactcacattttaacatttggcattattgcacgtttgtcctggtcacatctgtctgtctgggatgttagctttgtctgcaggggttcccaggtgacatgcagtgctgccagtgcaagtcactccctccgcaggcaagcccagctgctgaggatagtcagctggtcagccgagccctcagataggtcagccagaggccttcacatatgtggtcttgttgggatcagggaccacttggctccatccagtcttgaaaaagaccagctgccgacctgtccaggtggtctggttggtgaccacaaaggcccgacactgggcatggctctcacagacatccacagcctcagccaggttgaacactgaaaggaggcagctcccgtggtggtaggatggccagcagcggtagtcttcctgggggatggtgctgtctgggatacactggtactcggtactgctgcttgccgtggagttctgcagatactgcccgctccggtacaggtgcagcaccttctccagctgggccagggtctcgtccaccccccaggcgagctctcctgtggcgttgacgatgctgtccagcagaggacgcagtgaaggcggggcactgtgaggcaggaggtatgtgaagaaaaacctgtaggcattatagaggttccgcttctcgttcatgccctcgcaccagccctgggctgagcagggcagggtgaagttcctggccggaaactcgagtatgcagtcggtgctgcctgcacacggcgtctcctccacacgtgcgtcatccaggtccgtcactttgagctccccatccaccagcacaaactgccgagggcggaagtccagcagagtgacggagcccagtggggagtgggccaggtggtggaggaggcgcccaggctcaggcagatctggggcacaagaaaagactgctcactggtttctcctgggtt

SEQ ID NO: 48907 - DNA, 1177 bp, Homo sapiens
gaatggagtgaagaaaggcagtatggcaggcaccagcaaagagttgagggctgttgctcttaaaaattattttttttattattattttgaaagtatggaagttttccattcactggggaaaggagggaaaagtgcatttatttttatacagagttacttaattacctccaaaacacatatgttggaaatcgcttttgctggtgcaaagtatattaatgagcaggaatacatacattgaggttatgaatagagagctcaatttgtacctttgctgtcttgctcaagcttggtatggcatgaaaactcgactttattccaaaagtaacttcaaaatttaaaatactagaacgtttgctgcgataaatcttttggatttttgtgtttttctaatgagaatactgtttttcattacctaaagaacaatttgctaaacatgagaaatcactcactttgattatgtatagattacataggaagaacaatcacatcagtaagttatagtttatattaaaggtaattttctgttggctcataacaaatataccagcattcatgatagcatttcagcattttccaaggtaccaagtgtacttattttgttgttgttgttgttgttgtattttagaaggaattcagctctgatgtttttaaagaaaaccagcatctctgatgttgcaacatacgtgtaaaatgggtgttacatctatcctgccatttaaccccacagttaataaagtggctgaaaataatagtagctctggcttggtgcttgacctggttaaatactgtcttaaagctcatacaaaacaaataggcttttccataagtggcctttaagaaaacatggaagacaattcatgtttgacaaatgctgacagggtgaaggaaagcccagtgtaaaaatgaatcgcgttttaagtgattcggttaaagagtttggggctcccgtaggcaaactaatactagataataaggaaatggggggtgaaatatttttttattgttgaatcattttgtgaatgtccccctcaaaaaaagctaatggaatatttggcataaagggcatttggtggttttatttttgtttgagggggattgtcagaaaatcccttttctctcttacgcctaactgactaggggaacaattgttgatatgcatagcattggaatcttgtca

SEQ ID NO: 48908 - DNA, 550 bp, Homo sapiens
caaggtcggcgcgtctgaagagcgttttgcggtcatcagacttcctcatctgaaaacacagaacatactgaccctttcaagtacttagtcattttcctgaaagtgtggtctgtttcagaatgctgtggcaaccaggtaggtgtggcactggccatgtgccacgtctttgccctttgtagtctgtcagatattaaagtttctaaccctgtttttttaatctccaagaatggggaaagtggaatgtagagatggaagcagaacgtgatgtttggatacaacagctatttaatccttttttattttttaagcaaaacactcagttttctaccttattttctaatgttgatttcatggtaatactgacagttggaagtgtttaacataaaaactcattgctaaagagcactgaggaaatgggagctagcgcacttgtaataaaaataaagacaaaatattttcttgaatgcatatatgtgattgggtattttaaaaaccagtatcatctgtcatctccaaaagattacaggagtcagcttgttaatacagtagt

SEQ ID NO: 48909 - DNA, 467 bp, Homo sapiens
acttcctgccgctgccaggcgcgtcctcccgcgcgctatgacggccagcgcacagccgcgcgggcggcggccaggagtcggagtcggagtcgtggtgaccagctgcaagcatccgcgttgcgtcctcctggggaagaggaaaggctcggttggagctggcagtttccaactccctggaggtcatctggagttcggtgaaacctgggaagaatgtgctcaaagggaaacctgggaagaagcagctcttcacctgaaaaatgttcactttgcctcagttgtgaattctttcattgagaaggagaattaccattatgttactatattaatgaaaggagaagtggatgtgactcatgattcagaaccaaagaatgtagagcctgaaaaaaatgaaagtaagagaattatatataatcatgcatttttctttcaggagagcaagtggtctggaggaatattacagtaatgtt

SEQ ID NO: 48910 - DNA, 974 bp, Homo sapiens
tttttttttttttttttttccagaaatgcttttacttttatttcagaagaaaggacataaaggccagacacttaccccctgcccgctccccacccctcccagctcctgcctcacccagaactggagtgaaaggccagggccaggaccagggtcccataaagcttgcccttcccccaacccttccttccctcaaagtggcaaggttagaaaaaaattaactatgttgttcctccctggcactggataaaggccccactgcagccaaggagaaagaggggggtccaggctcccctcccaggcagagaagctgcctggctggctagggggagggtggaggtggaggtaggttatgggacagagaggacaagaagtgccctgaacaccttttccctttaacctggacatatttatatatttacagttattagggagggaaggacatctggggtgacatcagttctgcaaaggcagggaataaaagccaaatagcacccccatctgggtcacattttcctgcctcctagcttctaaaaccttcagtgggaaaaggggaaagtggaggtagggggtggagggagggaatgtttgaagggcctgagcccacagctcactccgaaaggtgaggcagcagaggaggggcagccgagtcccaccaagaacagggccctgggcagaggagaagcagccgttcccgccacgctgccaggaccccatcgccacaccccggcccagcaggggctatgccaaacccatctcctccagcacactccgtggcgactcatcctcctcttgcagtaggtcagcctgctcgatggtttcagcacactcttcttggaggtgtcctggacatccccccccatcaaaaactcatccaggatgaagtaggccttctcaaagttgaagatgatgtccagctcgcacacactgccaaagtatttgtctaagagctccacgtaatcggtggatcagctcca

SEQ ID NO: 48911 - DNA, 591 bp, Homo sapiens
  misc_feature (1)...(591): n = a,t,c or g
ggcggctgcggcaacagcggggccgatgtgtagttggtgactgcctctccagatgctgaggtgcctgtatcattggcacaggccagtgctgaaccgtaggtggagtaggctgtgccttccgaagcagtatctattcacaatgaagttgcagtctcccgaattccagtcacttttcacagaaggactgaagagtctgacagaattatttgtcaaagagaatcacgaattaagaatagcaggaggagcagtgagggatttattaaatggagtaaagcctcaggatatagattttgccaccactgctacccctactcaaatgaaggagatgtttcagtcggctgggattcggatgataaacaacagaggagaaaagcacggaacaattactgccaggcttcatgaagaaaattttgagattactacactacggattgatgtcaccactgatggaagacatgctgaggtagaatttacaactgactggcagaaagatgcggaacgcagaggatctcactataaatnctatgttttnaggttttgatggcactttatttgactactttaatgggttatgaaggtttaaaaaataag

SEQ ID NO: 48912 - DNA, 1829 bp, Homo sapiens
ggcccagaaaggtggggcaggaacgatcccagccttcagctaattctgtcacctctaacgtctggggcaagaacgtttcaggaaaccaagggggaccgaggctcagcgccgaagagaaagacgccaactgcgggacctgtcgcgcctcccgcgccggggtggagctgaccccgccgagtcccgcccctgcctgagttcgccagtggtccaggagccgctcctttccactcgggaaaccttcagaggagtctcagaaaggacacggctggctgcttttctcagcgccgaagccgcgccatgctcgtcctcagaagcgccctgactcgggcgctggcctcacggacgctggcgcctcagatgtgctcatcttttgctacgggacccagacaatacgatggaatattctatgaatttcgttcttattaccttaagccctcaaagatgaatgagttcctggaaaattttgagaaaaacgctcatcttcggacagctcactctgaattggttggatactgggagtgtagaatttggaggcagaatgaatacagtgtttcatatttggaagtatgataattttgctcatcgaactgaagttcgggaaagccttggccaaagataaggaatggcaagaacaattcctcattccaaatttggctctcattgataaacaagagagtgagattacttatctggtaccatggtgcaaattagaaaaacctccaaaagaaggagtctatgaactggccacttttcagatgaaaacctggtgggccagctctgtggggtgatgcatttaaaaagggcagttcatgctcatgtcaatctaggctacacaaaactagttggagtgttccacacagagtacggagcactcaacagagttcatgttctttggtggaatgagagtgcagatagtcgtgcagctgggagacataagtcccatgaggatcccagagttgtggcagctgttcgggaaagtgtcaactacctagtatctcagcagaatatgcttctgattcctacatcgttttcaccactgaaatagttttctactgaaatacaaaacatttcattaactgctataggatctgtctgctaatggtgcttaaattctcccaagaggttctcacttttatttgaaggaggtgttaagttaatttgctatgtttcttgcattatgaaggctacatctgtgctttgtaagtaccacttcaaaaaatagttctgtttactttctgcatggtatttcagtgtctgtcatacattaaaaatacttgtcactgttttaagatcttgactcttcatttgtttcagaatagctcttctactgtattctgacaactctttgctttatagcattttgttgtattcaaatgataatggtagcatttccatgcttgtgacagcatttttaagttattaatatattttatcaacctttccatcatgtctgttttcctggttttttttggttgttttttgaccagtaaaatttattttgtaataccaaataggatttaagaaaattaacgtatttctttactatggaaaaccacattgtcatttgtgacatcatctatattaaatatggttttcacattagttatttgtcacttacttggaaaatgatgctgttaggtcctggtattaaaaatctagaaaagacttgttggtttatgtgctgaaatgtctttatttataattaattttaactactatttacttcatttcggatcctgtttaacaaagatacttgagacatccatttgttttaatgaaatctgtatggatatggaaatgcttgccctaataaaagcctacatataaaa

SEQ ID NO: 48913 - DNA, 1761 bp, Homo sapiens
ggtcaaaactaagatgctgaaaaacagctcaccttcatttaccctcctacattaaaataaaacttctgtctttcacatttcaccttgacaagggtgaaactgtattctttttctagttttccttagtcatctaatagcctgaactgggcagccttaaaggactgtactcagtcaattcactaggctggtttttgttcaaagcagtgtctgcccatgtccagttatgtcttcaaagaaatttgtatgtaagtgttgggacatttaggaaaaagtaattaaagttctaggctcagaagttgcttaatttgaacttcaattccaataacatgaactttccaaaatatatataattgctttcaagaaaataaaaattcttgctagtgagctagtgagcattctaactgaggaacaaaactttttttttttttcttcaaggggtccattcctttaagacaattttggatttctttaaaaaatctattttatttgctatattagatggctaacccaaaattgtttcttgggttattgagtaataagtatggtttaaatggcctaaatactacatattttaaaagccttgatcgctcggcagagctgcactgaggatctgtgtttttaagaagtgcctggggtcgggtaaggtgaaattctaaactggaggacacattagtcagtttatctctctaaacttgttcatccaaaataggctttttaataaacaatttagcttatacttcaaattaataatccccccacacacattcttccctttgcctcccaactatttaccataaattataggataggaaccccctaaaaatgagagctatgaagtagtttctactaaatgttagaaatctgcttgataaactcttctttgtttttggcaactttgattctatcaagacatctttccccctcttcttggttacaccaaatgagtgccgatgcatttccctccacccctccagctctctctgtcctcagaacacagggccaccactaggcaccatccttagatttagggcaaaacactagtgcaagccagaaactcacttttgaacacttaatgcaaattcaggctgagtgagacaaaccagctgctcatttgatgagcttatttgtatctctgcgtggctggtgttctttcttctccctgccctcagtgtcatgaatcccaagatctttcgtgtagccaagagtagtgctcctttgtattcttattcttatttttattcttaagagcacttggtagtttatatcttagttttctttagaaaaatataaaaggacaaaaaggaaattgtcttaaggaaaccaggtgttcccgcacaggtgatggccgtggacgcagcatccatttcgggcggactttggaacgctgcactccagcgtgtgctcacactgcctccaaatggaaagcgctcctctcctcgccagcgcacagataccacgtggcgctgctgccatcggcacagcctactcacaggaacacaaaggagaagcaaaaccaccggctgaaccaagttgtttctcaacagccggctcaacagtacacaagtggggtactgcctctattccatttttacaaaatgaagtccactgggcaatgcgcacatactgggcaacatttgtgtaccaggttatcccatctttcttatatgattttttcttttttaagcatataaaaattacactcaaggtactttacaaattaatgtgttgaaaatctgatgtgaaataaaagttcttcaagag

SEQ ID NO: 48914 - DNA, 635 bp, Homo sapiens
atgagacaccatacccagcctatgctgtgactttagacaagttaggaaagtacctagcagagtacctgggacataagtaggttttctgtaaatgtttgtgacctttggctccgttgtgaggagagactgagcatacattactccacgctacaaataattaactatctatttgatttgactttcagtgtggagtgcagagctttttttctaaaagtgctaataaagccagtcctcattaaaaatatagtcagatgagtcagcaaagcaagttatttcaaaatttgaagaaatgagacaaaacaactttttgagtaatactataacctatgaaaatttggcagttagcaattgaaaaccttgtactttatcatctgtcccttaaccatggcctaccattgaggagaaaagattagagagcttgacataggccacaatgaagaggttctgaagagtcaaactattattgctttcatttcataaaccacactgttaaattcatttgtgtgtttggcatgggtgtgcacacatgtgtttcctaggttaagcatttaggaaaaacattatgaaatatgacatagacacaaaaaagtttattaaaaatttatgtgagaaaaaaaaaaaaaaaaagtcgacgc

SEQ ID NO: 48915 - DNA, 546 bp, Homo sapiens
  misc_feature (1)...(546): n = a,t,c or g
ttttttttttttttgcattttaaaaataagactttatttattttgatgtagttaccccactaatacaaccgagaaccactgacttcaaatattatgagagaaaattactccaggaatttttgcagagaagataatactttatcttgaaaatattttaaatattttaaaagatggaaactacacaaaagaacaaatactcaaataaagctgcaagatctttatgtcataatttcaacaagtagagttttcactggattatgtaacaagtagtgaattaaatagatcagactgaaagactggaaattctcgattaaaattatttagtctttcaaaattaaaaggtatcaccttagagaacactgaataaaactgatacaattttatgaagattttcccccaaactgggtgtaataaaagtaacatacaataaaagaattaaaaattattaaactctaattcttcctgtgtaaggttataggttgagagagattaccaagtttttccataattgcttcttctaaatccnagggnaatggaggtcgggta

SEQ ID NO: 48916 - DNA, 2238 bp, Homo sapiens
tttttttttgccagttgaagtatttggatttaacttcccccaactaagacattcacacaacatatgcatgtcagtctcctgttcagtcctagagcctgcagtattgtaatttattgtaaaaccatgtaaccaaatacttaaatatatccacaacatctataccacagaaatgcatagtacataatatactaacatctcaaaataaacttctattacagttttatgcaaattatggtaaaagattatcacctgccacattttgaaatggcaccaacttcaacatcaatgcactagtcaaaatccttactagaagtgatgtcttctgcattatcatctgaacattcaaaatcaagctgttaatctaataaccacagtatgttatcatttaaaatcactgtatatttggatgttaaagcaggtagtaatacagcaggaaaagtgtttctaattcacagtttcaaaactaaagggtgcagttttcaaatatctgattgcttaaattggtcactcaatttaacaactgcctccttcaatacatgtaaactatgtttgcacagcattaggagatgtcttttatttcagaattagttcttactgttacaggagcaccacaaattttaaggaagaggctacagtgtgaaatgagctcactgaaggatatgttaaataaaattttaactacaatataaggtactgcaaaagctttgttccccagcacagatcccttaatcaggaaaagtagtgaacacttacccaatacaatatgtaaattcgctctacaggagatggggaaaaacctaactcaactaaaagaaaatactattattagctaacaaacctgtgatagctggcttcagaattttcctaaaaataaaattcaaaagcatacacagtatttatatcctttgataaggaatgtagacatccaaacggaatgaaagaaaaatctggttttaagaatttctaagtggaatcacacacacacaaatgggtaactgagaaaaactaaatattcaaaatttaagtaagaagatttataacagaaaaaagtggcaaattgttactgtgacttgattttctgaaaacatctgcaaattcacactggcattaagaaaacccaagtctcaaaaattctcctttctttctctccagataatgtgttttctgtgcaaaaataaatatctgaaaattgcactaatacttattttaacttctatattatgaataatctgcacatgctgctttacagacgatacatatttgtaaacttactcatgcaaaattagtgtgcgcaacagggatattgttaattttcatacttaaaaatgataccttattatcttttaaaaattgccaaactctgaaatggttaacaaatcttatatggatattcttgtctgccagctaaaaatcaatttatgttgctggaaaacaaaaagttatacaagaaaaagaaacatggtttttgttttgcaagatttttgatttttaaatgagaaaatttataaaagaaagaaattcatggtcacaaaattttaacattttaatcctaaacattacagggtaaatagatactggaccctatctccatactccataaaatcctaacttttagtttccatttcaaatgttgctgtaaccactaaaacactagtggttttacaacctctggattatggaaatacacatttctgaaataaatgctacaaaaacaacaatggaagaaagccaaacaaacagtctccatgaaggaaaaaaaagtggaacattttgaagcttttagacacttctctttccatgtcttatgattaacctgtcaattcagtgcattgtatggtcatatgtaatggtccccatggtgaacaaacatctaactagtgtccattgattccaagttagtagatgatgaatctttctggatactttcaaagatagccgccagctcagggttagaactgatctgtgactggaattcactcatcagtggactcttctctgcttctggaatggttagtagtgctgctactgctctcatggcagatcgctttaattcatcttgtttttcaaactcctgctttactgagtttgcctttaccttagttgtacatgttgcacgtaatggctcaacaagtcggtccaacctctgcagtactgcacttggacaaagggtagacagtctcaccaacattaaaaatgtcagcatcttaatatcataatggtccttcaaaccatcttcaa

SEQ ID NO: 48917 - DNA, 702 bp, Homo sapiens
tgtggattgaagggtaaaggatggagtatttaaaaagtactgtgacagaacaaagtactgtaagtactagagttgagtgtggatggaaacacagaacctgtaaatcaagtgtttcatttacgtgctcaactcctactgaattttagcaattaaaacatgaaaactgaaatattggttaacaaatgaaaatagaatttaaagacctgaacttcttttatgatctttaatgattatttgttctaatctttgacttggaaacccaaattattttcagtctaacgtacttgaaatttaactattaaaaaagttggaggaactcaaactttgaagttagggctccctttctccagataaagcacattgcctggtttattgtaaggcacttagaacatgtaaccaaaaacactcaatttaggaataggaatgattgttttacagctaagtgcgctctcagagtcttttgttttacacccctctcaagtttacctttagatatttttcttgttgtttaatattttgtgacagatttggcaacttttaaaaagttgtttgaattgaatagtgcataaaattaatagatgtttttcagaaaatccattattaagagtagaggaatgaggagaaatattcgttctaaagagaatcaaaaccacaatgagagattgtcttacccccgttagaatgacagttaccaaaagacag

SEQ ID NO: 48918 - DNA, 906 bp, Homo sapiens
aaagtattttggtttgttttctttcatttaattgcctcatatttaaaaaccatgggtccactgttaaaaccacatgtgtatgtgcagctttacattttattttacgtgaagcatgtgattaggaaaactcattttcttttcaagcctcaggacctacctgaagagaagttttcttgtagctcaagttgtgcatgaattactgaatattttactgtgcttttcttcatgaagggtacatgctttgtactcttcactgaaagctgaaaacatttcttgttaccctcttttgtgcctttttattttgccaaccgtgtttatagaaaggacattactaatgacattttgcagattaaaaacattcatttgaacacagtagtcccctagaaaaacaactctacaaaaattttgcagccttattcattataattttgataaaattaacacaaaatcagtcaagaaggaaacatgtatattagtgaagtgtttttggagactgtttgaatgtgaccaaatgtggttctagttgacttcttttcactttggcttatatcaattcttgagagttaatgtgatcatgatattgcaaacaactataaatggtctctaggccttactttgtgattatacgttatctctggctagaaaaaaataatggtagtaaagaaactgacaaactgaaaataagaaaacaaaaatcaaatgcctataataccataatgccagtttggtatagagtccaactttaaaacatgaattgctcgacagagttctattcagtagggtgtttctttgtattgtcttttgtgaatttattatgaaaatgctgcgttgtgttgaatgaaaaagacccaaattactgcttatggagggaaataaggccagcattgatcacttaacaaaaaaaaa

SEQ ID NO: 48919 - DNA, 701 bp, Homo sapiens
accaacagatggtgttcagcaccgcgatggacatgtagtcgtgtggcggccgcctcggctccagtaggaccacccctggcccctggggcggcggggggagagtggaaggtcactcctgttccccccggggtcccgcctgcatatggcgtgcccaccgggtagaccggcacgtaagcagtgcaaggctgcagctgcagggggtatccgggcgctacgtagccccccagcggcagcgtgcccacagtccccgcgtgcgtgggcaccacgaagccaggggcctgggcagtctgggctactggcatcattgccatcttcaaggccgtgcaggtgcgcacggccttggcccgcggagacatggtgtcggccgagatcgcttcacgcgaggcccggaacttctccttcatctccctggccgtgggcatcgcggccatggtgctctgtaccatcctcaccgtagtcatcatcatcgccgcgcagcaccacgagaactactgggatccctaaaaacgcccctggtccggccccactctgcgcccctcgatctcccaggctctttctgcagtcataccgcggacccaatgggcgccctgcacacccgtttctggggccgcagacttggatacatcgtaaactccgctccacggaacgtctcgccttgcgagcaagctcggaatccaagttcctcaggaacccctccaaac

SEQ ID NO: 48920 - DNA, 2049 bp, Homo sapiens
ttttttttttttaacgtcaaggaaacaaaatgtttatttaaaaaaatgagatcaatatcattttaatgtagaagatgccatctttatttacaggctaataaaaaaatattaaactcaactagatataatacattatcataaatgcaatagatttgaggccaaccataagtgtaagactggatagatggaatagggattacataatcaggatgtcaaatactgtgcatcttacacatgaatcacatgaaacctttttgtttctaaacatgaaaacagcataagtccactgcagtggggaaaaaaacagcaccacagacaagctgtgctaactttcgatagctgttgacttgtaattatcaagactcacaaaattttcgtctttctcaaatttattttaacaatagtctcaccaccaaaatgttgcttttccatcatattcataacagagatactgtagaagagaattttagaggttaagtgtaaatatatacacgcacacatacaaccctcacattttattaaaacgttttctcaaccattctgtttgtgtatacatgtgtgtatttctccttctgtccccttctcgatgaaatgggctttgcaacagttccctccttacttgtttggttttgtcctagaagtttcagggacatatgaatttctttcctataaatgtgaaaatattaaaattggttctcagtcctttggaactaataactaattcttagttcatccccaaaaaccatacattctaaaatgaacttttaactagttactttctaacaccggacaggaagctcacagtagcatctgagcaacggtgctctcccgtaggcttataaaccacagtgaagcaggaatgaaaaggaaactgacctgtggagttttaaactacctggaaacttttcattctatttatcagtccttaaaaggaatttatatcatgacaatctcacacaattcttcaaattacacagtgacctcataaaaattccaacttgaagttttaaaaaaccacctcttcatacacttattcggtagttcttgaaaatcaaagggttatagcttacatttcctaaggattcagtcatagcagataaaggatgttctctgaaaaaaatgccatggccattccatcccaggctgtgttttaagaagataagaataacatggtttcatgtcacagcaaaaaggttttcgggtctgctacaatggacaatttttttgactaaataaatacggtggctaaaatccagtttgcagatctcatgtcatgcatggaaggtatgtgtttggcataggggattcataaagaaaaaacaagttgttttttttcttttaagaggcctaccctgtcaagagcaaacaataacatgtaacttgcttattcatttgtacaattaaatactagcttttgctcagagacaatgctataaagtattttaatgtcagtaacaatatacactacgaagtgcacttccattacaaattaacatggtgatatacagatgaacaccaccacccaaaacaaaccataaatgagcaacagttaaaacattaaatttataaatagcaaaaccacaaaataaagtatatacattttatagatttacccttgaacaaatatatagtgtatctgggaaagccaaaaaaaatgtgttttatcacataacatctgaataccagaaatgaagatactgataatattctaaaagccttgtaggctttctcccacttaatattcctttaactgtacgtcctttaaaacagtgatattagcaaagctatcacctctttaatgcaatgttgtgactttgcctagcaggttacaatgacctgcagaatattaaatcagagaggaggcactgcatggtttaatcatgggacaacagacctaacaaatttataaacctgcatatgaagagagctttagtcaaacataaactgacatgaaaacccaaccaaaacaattactgtatcaaaatgtctttatctcatcttgcccaccttttagatgactggaaatcatttacttagaaagaaaactgc

SEQ ID NO: 48921 - DNA, 2211 bp, Homo sapiens
tttttttttttttttttcaaagtttaattcaattttattttccacttttagtatttttcaaattatacaacatgcagtctgccagagtacccatacatcttcattttagaacctagaagattaccaaaattttccgtgggccagaggagggtgacttccagatcttttgttacatggactatagtacagcatcgttattgatataaaccaccattctcccctcaaaccccccggacaagtttgtccacaatttttttaatgtgaaagctactgtacagatacataaagcccagagaacacacatctgcagtacacaggacacactttacaaactagacatgtataattctacagaatgccctattccccttatatctgcacacaatgaacagtatttaaaactgatacacaatttttaaataagtaagcagacttcatggagcggcgcttacttcggcagttatccagccattattcaatgcttggtttaaaaagtctaaattgttagtgttaaatgaagcaattttagattatgatggtttctttagcttgctcaagattctgggctagacaatgaagtgaaatcttccctccaccctctgcctttcccagtatgtcatatagctagagtccaaatgtctcctgccctgctttaaaaaaatgcacttcgaaagaggggattgttaagaacttttatttgctttgttatttctataagaactagagcttctttatgtaaacgttagggctttaaaaagtcactagatgctacattctagacaaacatttttatttcttcatttatcccaatatatctataaattctgatttcttaatcacgattctatttcctttaaaagtcttaacgcgaaactgttattgttctgtctactacctgctgtttaacaaaagcaaagtgtgcagcatttgaagagatgatatgtttgcacagaattctctagtaattgacaaaaacacatttggcattatatattttagttcccagacataaatcttgatatctcaaacaacattctcctaatttaccaatccaccatcctgcagataaagattattcatataaaccatctggctgttctcttagagcatcaaagagtaaactttcaagaagtagcatgaaatataaaattattcatagaggagaaaaagacacaatacatgctagtcaaaagctgcatataaccaaaatcatattcatgagcttagttgttcagaagtgtggtttttacatttaaagtacagggagcaatagtctaaaaacctgaaaattgccacatatgtggcttttttagaaagtggcctacagagaacatggtcctgatataataactggcttattatacatagcaatatttaaggatccatttgaataatccgttccaataatttgcctcccttttagtcacactataggaaaattagattagaagtcctataaagattgaagctaggtgaactgactggctgatcagcaactagcagaattatctttaagagacatcaaagccaactttctctgtgaataaaagtaaagcaaatgttgtcagtcccttgtagagatcaagtaaaatggaactacaagcgaatgtttccctttgaaacatgaaagtgccaagcaattctttagaagtagaaacggggtacccagggaaaaatcaccctggaaagaatctaaaacaatctattttatgatggatattaacaagagccaaaaaccattactgacctttgttcaatttccaaacaaaaagtaatggagagtagtggtaatgacaattaataattggcaatcctctcaaacaccaatgtttagcttcccaaatcagaagcaaacatatcaacaaggttatgtggcatatgttattacctgataagctttgcaaaacctgccccacaaggacccttttatcagaccgcaaataatggtagagcaggtatattgggctggcactgataacaaaattaaagaatgaaaaaaatttaaacaaatgcaaaattgccatcttcacaaaataaatacttcaatagaatttgtcgtcctctctctccttattccccaccaaaaacaaaacatacataaacaaagtgcaacatttaacaaataaattaagtcaaagcaggtttgctttgctacgggaaattttgtacaagaaagtgtttggatgtcaatgcacagttcttagcacttta

SEQ ID NO: 48922 - DNA, 718 bp, Homo sapiens
cgtttccatggctgtcagtcttgtgataatttaccagtgtgttgtcaggaacatgccagatccccacaaccttccaatagtggctggttggaagaaatacccactcttttttggtactgctgtatttgcttttgaaggcataggagtggtccttccactggaaaaccaaatgaaagaatcaaagcgtttccctcaagcgttgaatattggcatggggattgttacaactttgtatgtaacattagctactttaggatatatgtgtttccatgatgaaatcaaaggcagcataactttaaatcttccccaagatgtatgggttatatcaatcagtgaaaattctatattcctttggcatttttgtgacatattcaattcagttctatgttccagcagagatcattatccctgggatcacatcccaaatttcatactaaatggaagcaaatctgtgaatttgggataagatccttcttggttagtattacttgtgccggagcaattcttattcctcgtttagacattgtgatttccttcgttggagctgtgagcagcagcacattggccctaatcctgccacctttggttgaaattcttacattttcgaaggaacattataatatatggatggtcctgaaaaatatttctatagcattcactggagttgttggcttcttattaggtacatatataactgttgaagaaattatttatccta

SEQ ID NO: 48923 - DNA, 2278 bp, Homo sapiens
ttttttttttttttaacagagatacaggtttttatttttccatcatgcatgcaaacttacaactatttatactgtttaagaacacagaaataattgcgttattaacagggtgtcaaattaccaagtagaacaaccagttactaattattttggggaggttattttcacagaacacagcaacaatttccaaattattcttccaaaaccagagttatgaggaccagtacaagctgataacaatgctaatgggtcacacaagtttccatgttacacaggaaaaaaaggattgacattctgggtgaaggggtctcaaggtaccttaccatatcagaattttttgaaagagttttacaacagaacagtctctctcttgttttgtagatgcaagggaaaggaagcatccctctcatttctttttgagactccttgttaattcttaaaacacatttctaaggcccatctctggaacttcattagttaacattaaaagcaaaaagcagacctgatgtgattatgatagtgcaccccatcactatcaccatcaaaagagactaccaatctcccaaagtagtcacggttgcattggcatagtgtcttggattttcaataaacaatacaggtgaaaagagagagatacagatgaaaccaggttgaccatagctgataagtgatgcagctaggtgatggacacattggggtccaaggaccatcctctccacttctgtgcatgtctgaaaatgtccataacacagagcaaaaaaaaaaaaaataataacaaaaaacaaaaaagcagacttgcacatctgtatcttcccattagactaaaatggggaaagtcgtaagactttaaaggcaaaatgtgccagccatatagcattcttctgcatgtacaaagccacacctagaacaaaaaaataaagcatcccaaagtaacattattccgtttctggtttgtctctgtggcttataaaatctactaatgaataagattggacaaaactttgggaacatcctcaactaggcatcctatttgttcataaccccttcaattctcattttccaagctagggaggtccctcccatactctatcactgagagacaggcatgctccccctgcggcttctcaagcccatttctgtctgattttgcaggcccactccataccagtatcatgcctactcgacggttttgctccaaatcccccacctagcacacccttgctacagctttaagccaaggactctcttgaggaacttagaatgaggcctccctaacaaaagagaaggtagggaagaacaggtgtagatacagtccttcttacccaccctcagggataagagagggaaaggcccagctctgcttttacacccactggaaataacccggagatccaaaacagattctgcccatcccaatccccatcccccaggagaagcttgagatgcctccatattggagactaaagcccactcccggggcctatttgaggtagaagcaaagaagagccaaaggactgctgaaaagtgggaaagctggggattgaggtcccagaatggccagaggctacccacaaaggaggaaacagcaggaggcacttgggtcttaggaagcattaaaacaaagtcaaaacaagagtaaacactagtctatgacatggctgccttggggtttataactcaagcagatgctaggcatgaaaaggattttcaacttcagaactgtagagcaagcgcaggagacaggttcagggtttgccagcagatccacttggccttctggtttcctcaactctctttcaacctagtatgtgtgcgcagtgccaagttctcagctacctccccagctggagccacagcataatgacagtgaacacatgtccacacataccagcccgcccatcagtctggcagccagtagggttcctggaaagctggggagggtaggtgtgtgtctcatgcactggtagggggcctcggtccacaggcagttcttgaggtccttgttgaccaggaagccaactggggctgacagcaacccagacaaaacttaatggcttgatagtgacacggcatggcgcagatcttgatgaaagttcaccagtagaagggcccagaagcaagaagagacacatgatggtaccgaacacatggcatactgtttcttgcccttaacttcatgcatgcccagcagtcaagtgccattctgcagaacatcaagcaggatgggtatcacagaccacagccaaagccagaaataaagcaggtgacatctcagctg

SEQ ID NO: 48924 - DNA, 985 bp, Homo sapiens
tgataaccaaattttaacacatcagcattcaccaccaggtttacttttattttcaggttggctcattttgtgcagaccttagagcaaagtttcctttatggtatctgtgtacgtatccaaacttcttttaattgttcacagattttaaaagcggtagcaccacatggttgtgtagatcagacctgtgtatttagatcagacctgtgtatcacgtaagtgtgtgagtgcagtgcagatgagcaccatttagttatatgtgcctaggcaaatctccaacacagttgatgtgtagtcttgtggtagatttgtgcatactgtaagcaaattgcttagcttctctagacatcagtttccacatctgaaaaataagaagatgagagtacacggttgttatgaacaaatgacttaatgctttttaagcacgttgcatgacatctggaacacagaaagccctcaatacattgaagctcttaggattttcacgatgttcctgtctgctcaatgcatgctttctttattgttctgacagttgtgtggtaacaagctaatatgcttccagttgacttccagtctaccctggtgttagaaaccgtttcatctcttattgtaaatttgagtgcttgttgttttttatatttgtgatgactcttccagcagttgttgacaattgttagaggtttgacttttaaataattacttattttttctgattgtggttcagtttaactgaagaatatcctgagattgtaagaaaagcattttttaaaaggtatcacttgtgatcatttatctttctaaattctatttttaatactgttccaccaaagtgatgcagtggttaccatgacaccctaatttcatgtgtttttgtatttatgaaaatagtttcattgtcatttattggcggtatacaaagtaaaatgttataaatgtgaagttataaaataaatatatgctaataaaatcctgagtttttctgattcct

SEQ ID NO: 48925 - DNA, 529 bp, Homo sapiens
tttttaatatgtcacactgtttttatcaattctttatttaggtaacaagttggttatgttcactgcattgtatgaaacatcacaatatcatactgggaagtactatcagtacagggttggatcagagtggacagtttgaacgataaaccattttgcattcttcattccctatcttttaacaaccccccaaacccagtaaagggacaaacagcttttcacatcatcatgtaaagcactttaacttacaaggctaaaatctaaagaataaataaaatatattgtggcaataattccttttagaccaaaaatcaggtgcacaataaatcaaatgatcaggaaagctgtctgtatttaaatgtgtggctctccagaaacagcttcaggaaaacgttacagaaaataccatgaattccatttcacaaaggaccagatgatgactcattttaactacacacaagggcaattacatcctgctgaaacacaatttaaacatacagggaaatgtttacaaagcatccacaacatggta

SEQ ID NO: 48926 - DNA, 491 bp, Homo sapiens
  misc_feature (1)...(491): n = a,t,c or g
gagnttggaaccgtntgacatgnttacgaatttaatacgactcactatagggaatttggccctcgaggccaagaattcggcacgaggtcgttagtgaggatgacgcggcatggcaagaactgcaccgcaggggccgtctacacctaccacgagaagaagaaggacacagcggcctcgggctatgggacccagaacattcgactgagccgggatgccgtgaaggacttcgactgctgttgtctctccctgcagccttgccacgatcctgttgtcaccccagatggctacctgtatgagcgtgaggccatcctggagtacattctgcaccagaagaaggagattgcccggcagatgaaggcctacgagaagcagcggggcacccggcgcgaggagcagaaggagcttcagcgggcggcctccaggaccatgtgcggggcttcctggagaaggagtcggctatcgtgagccggccctcaacctttacagccaag

SEQ ID NO: 48927 - DNA, 1475 bp, Homo sapiens
cgcggccgcgtcgactaaatatccaatgtgaaagtcacatgataatttgttttgcattgcgtgcactgtacaacacttacaacttgtcatttaaaatgttttctcgggaaatgaatgctagtcagaaagtaatagattgtattattcatagttttaaaattatgacaatgtcataattactacaaagctaaataatcgtgtttatttttgtgcagttgccctttgatagttcctggttttaaaacctattaagtgtataatcttacaaatagtcatctacaaaatttatggagaaagtgcccagcccattcacatcacatggaccaggaattcttttgtaaatgacttaaggtaacatcatgcagttcagtgcctaataaatgctttttaatgatgaacatttctataatgactcgtaagataccatagtctgatttttctcacattaaaataactgaagtcacttgtgtaacgtagttatactttgctgcattttaattaaccttcaacagctattaaagtggaatgtaagttaaattttgaaggaaaggaaataaatgttttccatatttcgtcttgatttactttctgtatgagaacagctgtgtttttgataggtttatggtttgcatgagttcatatttaaagtgatccaggccaatgcatggctattgctgtaaatcttgatgtttatttctgccttgtaaagttctatcacggcctacctggaatttaaaattcagtagacaaattaattggtcctctgcacaacttttttaataagtagattattttacaaagaaatttgaacaaatttaattgaatcttttgtttagcttgcctctaagaacttttcttaataaagctcccaaaacttctcagcaaataaatctcccttaagtaggaaaactagatttcatatttgcttactttgaattaacagcaactttccacaggtaaatctgttcttgcaaagatgtgagcagaatagttaaaaataatatttttatgtttcatggttctaaatggaagccataaatgcagtaaatactatctgttgtttaactactttaatcgtcattttttacattttcaagtttattaggttaagaaaaacagggcagccttggaaggcagctactacagaaaactgcagttttgcgttaaagataaagtagtattttcagctccctgaaaaaccattcctgctgaaactgctgtagaaattgtgaagctgcatgagtggagagtattgaatctgtggttatagtagttttctcaggtttgtttatcttgatgtttgatgcactgtgttttatagttattaaaattgagtaatattatttctatgcagtgttatgtgtcattggccttttgtgaatgtgcatgttttaaactgcaaattttaaacattttgtcctctaattgttattaaaaatgaaataaactttaccattacttaaaaaaaaaaaaaa

SEQ ID NO: 48928 - DNA, 752 bp, Homo sapiens
aggaaagcaataaacagctaactatgagagtgacttaatgtaattatattacctgtcaatcgctacttttcctttcttaccaaaattcacacaggtatgaaagcaatatgacattcaggctccattatgtgtatttgtgcacatcacttcccacgataagggagaagaaaagaaaccactgcacattcggataaaacatgctgggaatacagcagtaaacagaatagaaaaagtctacattttaattagcagataagtaaaaataagtgactaaatgtatattattcagggggccatatgtgcaattgctgttaagtaaagcagaacatggagtggagtagggatgacaggtttcatcagttaatacttgagcagagagctgaatacagtaagatagttgtaggatatcttgaggcagagtattctcagaacagaacatggtaagtacaaaggccccaaggcaggaacaagcttggtgaatgtgagaaatatgcaagctggttaatgtggctgaagcacagtgaccaagggaaagttttacagagatcacggaggtgcttgagggctggattatgtaggccattaaggagcatcacaggccactgcagagattttgtcttttaaatgagatagagtgctcttggagaatgtgactggagaggccgatggtagcagtggagatgcagagtagtagccgagatattttaaatgaaattgatttagtataggctgactgaaagagaaatcaagga

SEQ ID NO: 48929 - DNA, 704 bp, Homo sapiens; identical to SEQ ID NO: 9173

SEQ ID NO: 48930 - DNA, 1310 bp, Homo sapiens
aaagtaaacagaattgacaagagaaatttattactaaaaataaagcagctgaaggttttcccagggaaaaccatcaccacaggaccttccatgatgaaatacgttagtatcttctttacttctgaattgctgccttctttcatatacccaaaattttagtttaagttaaattaatcacgacaaaaacgatgtggcatctgatcccttcttgttcaatctgaagactgaattgggctaccctgtgatggagacttcaagtgctgcaggtgagtatctaccaagggttcatgtgtcaggtacatgggctggtaagaagacacaaaggctgcaggctgaagctctgggaggtccaaggatcctggcagaaggggatcattctgatcttcatcaaagatctgtctctgaaaggcttcaaagctcatagctgcatcattctccggcagcccctcaggtagctgcccatctccaggtttgcacacatcaaatttcacccactggtaattgatgcattttcgagctcctggacagctctggatcaggttgtggatggctggatgagaaaatccaaaaaagtcagctccagctggaagcaggttaggcattagtttccccatagtagtgcttatagtcctgagcagttctgcatgacaagcatctgccagaagagctgacaatggcattctgggggtcatcttcaggaacaatttcaaactgaggctgcacaccaccatccttgatctgacaggtatatagacacttctggtctgggcacttcatgctggcatatattcgagtactgcaatagcccacggggtagatggcactctcatcatgaaagccaggtcggtcggtgatgatcttccagtttgttgttctctttgcctttttcttttttctccttcttagttttcttcccaaatggttcctcagccccagtgctgggccctgaaataggcccagctccctgtatagttcccacagagctggccacaccataagtcaggggcaaactggaactgtgggaaggagctgcagcctgtacttccccttcagttagagcctgaagctggaggagcttctttagcaagtacctgagatcaggaaggaaaggagcagagaaatgaacttccgtattgtctcaattcagtattttactcaagtactggggaaaagccagaattatatacaaagattactatactcataaaagaaaggttcttattaggccctatgaatcataaagccctggaggataatcaatacttcaagaggccaaggataagaactgtagcttatctcttgcatctgga

SEQ ID NO: 48931 - DNA, 1798 bp, Homo sapiens
attaatcacccataaaataacttttattttaataaataacagtgggctcaccaaagggcagggattttaacgtgtcaggttttatgcttattggtagtaagtcttaaacaggtgaaatgaactattcaataaaacccaaaaggccctaaaaataaaatactttaataataaaaattaaaaagaaatttccaaaagaaaatagttcactccttgaccatgcttatttattcagagtaccagcgatttcagtaagtgcttcatttttcctgcaaatctgatgttgcacagggaatgtacacattttcataccatcacaatatcatcaatatctcaggccaataatattgtgaatgcaactgttttataacaaacacaaaataaaaaaaaacaatgttactatttacggcaaacagaaacaaaagtaaatattgcaaagatgttttcttatgtttctactactgattttagttggactttaaatgaaggtcatcaactctcctggaataacctctacctctcgctgtgaatccacagtataaatatggtgaataaagctaaactgtaagagctaactatatactgaataaccaaaataattataactaatactgttcttgaagaccaatctaatgaaaaaagtatcattagatatggtgagaaatacagacaaatctgtacaatctaacatctataaacagtaaaatcaaaacatccaacttccttatagaaagtgttttatcctatgtaattataaatgttaaggactcttgtattttataaacacaagatgggctcactttgatgatatcaattttaagatttataaaaatgtttaaaaaaatctttccacaaaactttatacagtttaaagctatacaccaatctataaatctcagaaaatggaaaacaaaacaaaacaaaaaatctttataagatcacatgtataaaacaagaaatgaaatgtgattttatttaaggcaatactgggctacttcacaaatcaccacctcaaatatttacactgctccacactactagttttctatcacattcacaaaggatttttttttaataccaaatgtttaaaatcttcaatgtagtaaattctttattcacatttccattgtatttcatggactcatagtaactatatccaattagaagcaatgaaaaaaaaaaactgtagctataggaaactgctagagaatctgctttaatttcacatgaataccaccccaaaatcctggatggcaaatttacaaagcagagcaaagtgttgatataatgtgcctattttgtgaaaagtaatcttgatatcatcttgtaaataaatgtttcatgtaaaaatcaatgaactatggcagagtttctggttttagttcaaaaagttcttaatttaaaacaataaaagaacaatttaaaaaacttgatcgcttagttaaaaattaaaattccaaatataaatgtgtcatttaatagtttagacttacagactgctggtggcagcacatgatttacaataataaatatatacaaaaaaggtatctacaaataaagagtactgttatacatgagcagtgacctggtgaaacataccaatcacacagataattgtttagttcatgaaaagggcaactgggtgatagaaatttgaggtttagctcactatttacaataactgaagtactgattctgttcctcaagtcccataggataaaaaaaagttttacatgacaaatgtcatgtttttttttttcttttttgtttttggccaggttaattcatgtcaacaacaaaa

SEQ ID NO: 48932 - DNA, 2036 bp, Homo sapiens
  misc_feature (1)...(2036): n = a,t,c or g
tactcatcatttctcaaacaacctgcagtcganccttggcctggaancantaccaattccagttgagagccaccaaaaatgagaacatcattccaatactacttactactacctgacataacataggaagtttcgttacctgtcatcagtgaagctccgtgatgtcagagtgtctgctgggttaagtctggcaacacatttcaaatataaatcatttagctataaatattcagaggacattcaggagacaagcgtatgtctaaagtacaatatcagcatataatatatgtatgctatcttgattcatgaacttgatcctattaatttatatgctgatattgtactttagacatacgcttgtctcctgaatgtcctctgaatatttatagttaaatgatttatatttgaaatgtgttgccagacttaacccagcagacactctgacatcacgggggctttcacttgatgacaggtaacgaaacttcctatgttatgtcaggtagtagtaagtagtattggaatgatgttttcatttttggtggctctcaactggaattggtagtgtttccaggccaagggtcgactgcaggttgtttgagaaatgatgagtaggtcagtctaggaagaaagagaaagtagcaggaaaggaagtgggaagggccagccaaggacagactgtagaggatccacatcaggtggccacgaggacttgcaggctatagttatggtggtgacatgcatgaggtgggctggtagagcaggaagctctgtgatgtcagagcatctactgggactacaggtgcactgtagtccccactactgggggtggcaatgaagacactctgtctgttgggccctagaatttaatgtggatttcctccttccttccaagttctgagattcttaaatgagagctggctgtcttctagaggtaagacctggaatggagtccagttggtactttttcactccctcttagaatctcttatgaaaaaatgatcagagagaaaagtggggttttgtttccccacctaataatatatcctacaaccagccaaatgcacttttgtgaaaatggggtgtgaggagtggttctgcagcttgagtcctctggttttaagtagtttgtttctacttgtttaaagaatcttctggtctgaccacttaaagtaaaaactacatgatttattttcgggcaattatgtttagctttcatcattatactccaacagacccgtctgaaggggtatttttttttaacaataatgtttgtaacattttgttgtgtcaattagagggtcacttgtttgtattgcaataaacactgggaccagttccggggttaagaattaatttttgtttttaatatttcacatgaaaagaatcaaagtaattgtaatggctagaagagacctgccagaagattaaaaaaaagaatgagagaaaagcccagttagtggtgtgcaaacttacttcctttaaatgtcccatgggatgtaggacagtgccatgtttcaagatgcctgtgagctaggtcttcaagatttatagaatgttacttatgaacaaaatataattatttatggtacaattcttgtactttagcaaatctggagttagttcatagtcaaagtcagttaatatttcttagaggaaagttttgctttttgtggcaacatttttatagcttgtgtgagttcttttttatttaatgatttgaaagcagtatttttgcacagtcgtgaccgtgtgtggtggcgtcactgtaaccaaagtatatgcaccagcccttgtgcatttattgtttctcctgattttgtggatttaaatgtccaaatgcaaacctttgtgacttcctttggaggacttggcagcacagcatgcccccgtgacctgcctgctgtggtatgagctatgactcaagaggaggcttcctgctccatggagtcctgagttgctctggggcaggggattacgttatgaaaactaaccatgtgtaacaataaatctaccttaggcagaaaaaaaaaaaaaaa

SEQ ID NO: 48933 - DNA, 415 bp, Homo sapiens; identical to SEQ ID NO: 9184

SEQ ID NO: 48934 - DNA, 632 bp, Homo sapiens
cggacgcgtgggcgcgagcggccgccctttctattttgtttttttgggttttattttattttaatagtagtaaaatacttggaataatttttcatattcttgtcattaatattattttgtatttttatgtggaaatatataattttatgacactaattgctaaagtttattttatgttgaattatttttggagctgaaatctttgtaatattaaagcaactagtttctaattcccagtttctgtatagaatcgcacaagtggtttatggagtgtttggattgtaattataaatggttctttgatatgcaaattaatattttcagttgattttattttatattcctaatggggtgttaaagccgttttttatttttttctaaataaaaagagaacccatgcttttatggacactaggtaaacaccttcagcttaaatttttcgttaaatattttagtttattttattgttatcttccaggtgtctaaatctccagtctgtctgttgtactggtaatttaactctgtaatggaatagtttgctgccaactatttatattaagtaatttttaaatatttgtaatattgttgactgactaataaactattaagttattggaaaaaaaaaaaaaaaa

SEQ ID NO: 48935 - DNA, 1479 bp, Homo sapiens
  misc_feature (1)...(1479): n = a,t,c or g
tgacctctcttccctctccacttggctgggaatattccaactgcctctgcctacagataccaccagaaagcgggttctgcaccttgtcatccccctccctaacgtcatctactccatccctcatgttcctccaacttgcttctcccatccctcctnnnnnnnnnnnnnnnnnnnnnnnnnnnnccttaggtttctcctttttgaaatgtggccttaacattatttttgggaagctgaccatccatcctttccctcccatctccaccaacatcagagaagacagcatcgtgaagcttctgtggcagccttcctaaggaaggggctgccaatctgtagttgggcagatgctataggaattgcttacaaatgtcgtctttaagaaaaatgttcttatatttttcctatgggcaaaatgaaggcttgggtgctcatctaaagctcagccaactcctgaagcactctctcagagcatactgctgctgtaatgggctggcttaattatcggcagagtgcttgaaaaggctttgcagacctcccctgcccccaagactggggtgactttatatgtacttcattcaaggggtaaatcagggagacgttctccatttatctcttcgtccttcctgcctggaaagtgataggcactaaatatttcccagcagatgggtagtgttctcaaaggaatcaccctttccctaccttcagactctattctttacccttccattgctccagtgctgatggaggccaaagacaaccccagggttttcataggaaattcactggaattgtgcgcaattgtctttgtagtccttttgcctttttttttttaaatattatgttgtcaatagcatttgtttgggtatttgttttagaggcctcactctaagttattaccgtccccttcattgttttcaaagacatgtggtgatatagtttttaaaaataactattttgttatagatcataatatgcataaaactgtacagaaatattttgtaatgtgttgattttaaaaaaagaatctgtaaataaagttttaaaaaaagaattcaaatggcacacgctgaaatatgtagatattttgctatttatttaaaggagtattttaagagatattgaactatctgaaattgaccagtaatcaaagttccaatcatctgaatgcttttccttgaggtagaatgtgagtctcagaaatgactgcattacctgcccttttttgcaccttttctgtctttttattttgcagaacaacaacaacaacaaaattgtgccttagctgtatttttttgtctaggggagtttgtttctgtctgacaaagcaacattttttgcagaaaacagtggatgtattaaatactgtatcataccaaaaacactgcaggtgtatatagatgctttctgtcatactgtgttttcagatgcagaattttaaaattaaaaaaacactgcctttatggaaaaaaaaaaaaaaaa

SEQ ID NO: 48936 - DNA, 1158 bp, Homo sapiens
ttgttttgaactgaagacatcattgggaaaggtaggaaatattagtttaggatagagcatacatgtcatatccagtagcataaaaaaagtattatctccctgtctccattaataaatttagctgtgcaatataggtgcgtttttgcagaagtttctagtaagagattataactccattttacaggttctgaatgctcagagtctatattaaggcttataaagtttttcctgtgatcagtaagtgacacatttaagcagacattcttttcaagttcatgacttagattcctttacaaatttagttctcaatctttaaaaaccacatttcattatgttggttaattattataaattttaagcactcatttctgcaatcaggtttctcagaattttttttttttaaacagaagagacattcctttttccttggtacatccaaggggggcacaggggtgggtggaaaggaatgtctaaaaatgaaatcccttgatatagagggacctagacggacaggatatgctaaaataatttcaaattctagcacaattttagagtagaataagtcatttttttagactaataaaattaatggctgtcatgttcactctgaaaaaaatctaaatgactgaaatgtacagaaataaaaattagcaaacaattattctagggatattttcagattttacttcatttcttgaaatgcgtgtgccatatgcaattgcatttcttgtgccaagaaactaatagaacttatttcactttacctttttttaaaatgtgaatttagttattatagttcaattttatggccttacagatggcttttattttgtttgcagctgacactgcagttcctttcatgcaaaataccataaactgtttgatgaaaatcatgcccctaatggaaactctctagtttttccatataactatccctactgtacatgtttaaacatattttatttttgctccaatggcttaatgtgaaaagctcctgcagataagtggacctgtcatgtggttaatcttgtttaagccaattcattaactgtgtactgatactgatgctatgttttttttaaatggattttattccaggtgaactttttttttataataatgttcgtctaaaataaaaactacataatgaaaatgaaa

SEQ ID NO: 48937 - DNA, 428 bp, Homo sapiens
gaaaaggttaagaccctcgtgttctgctccggcaaacatttctactccctggtgaaacaaagagaatctctgggggccaagaagcatgactttgccatcatccgagtagaggaactctgccccttcccgttggattctttacagcaagagatgagcaaatacaaacatgttaaagatcatatttggagtcaggaggaacctcagaacatgggtccgtggtcgtttgtttctccaaggtttgaaaagcagctggcctgcaagctccgtctggtgggccggccccctttgccagtacccgctgtaggaattggcacagttcacttgcaccagcatgaagatatcctcgccaagaccttcgcttgatgatgacttttgaagaaacactatttctctttaagaaaatggccattaaggccgggtggggtggc

SEQ ID NO: 48938 - DNA, 1437 bp, Homo sapiens
tttgacagtaaagatacttggcagaattcttcctgaccccaaccgttaccacccgactccttctcagagatgcaaagacagaggccacccaggcccagcccagcgcgacacggcctctgtacggtagtggcagccagggcccactcgaggctccacacgcagcaggctcggcctcacccactcaccctcccacagggaacacccccgagatggcaaacaggggcccgtcttcccggaggcccaggagccttgtggggaagggagccgggttttcagatcacaaatttctgtgaccactttgttatttttcacaaagcacgactggcacgtttcacaatgaagaccagcagatgccggacactcatgaaagaaaaaaatatcaagtttcggtcatggctctaaggcagacgttacatgttttcacagggacaaacacggagacaccaacgcgctgcgtgtcacgggcaagcggcggggccctcacagcaccgtggcctggacgacgatctctgggtcctcgatgtcccttttgctctgcaccatccgcagctccagctgcatggggctgggcctcactccttccccggcctgggcttttgcacactggatggtcctctgcagaacgtggtgcaaggtagacacggtcttctcacaggccaccttgaggttattggggtgcttgtgtgtccacgccaggagcatggcagcaaacaggtccccagtgcccacaaagacggcgtccactttgcgaatgtccatccggatgcgttccatcaccacggagccagcgggattcctcctcctctgactccccagcacaatcaggtagttgctgccctgcggggagggcaggtcggagctggtgatgaccacggtgtcggggcccatagagtgcagcatgtccatcacccgcaaggcttcctcctggctgtggatcttccggccactcagtaactcggcctcaaactggttgggcgtgataatgtctgcaagcggcaccactttttctttgtagacgggaaggaggtcctccgggacgtacatcgagccttcgccgtcccacttgtcacccaagactggatcacacacgtacaccagcctggggttctgctgcttcagctcctgcacaatgtccaccaccatggccaggaacgacttgtccctcgtataacctgtgagcacgtagtcatatttattcatgttgttcagcctcaggccttcgtacaactcctggagctcatctgaattcagcacttggcccttccagtgggcatagcctgtgtggtttgaaaactggacagagttcaccgcgtcaatctcaaatcccaaaacctgcagcgggaacgtggccgcccggttgcccacgtagccgcggatgacgtggctctgtatggagagcacccggcactcctcctccatgccgggcctggccgcggc

SEQ ID NO: 48939 - DNA, 2628 bp, Homo sapiens
tttttttttttaacattaattttttttttattaagaagacagatattttatagtacttcttttttttctttttttttttgtaaaaatggtatacatgaaccaatacaaaatgcgaatgggaacatatggatatggagtttcttacactgtaacattgtccatgtacaccttaaaaacagaactggcctaaagggaaaaataagacgtcggtgtgactaaagaacaagcttatttggcatcaattatacatccttcattattttatattcctttaaaaaacacaaaaaacaagtttgttctttcttcactctaaaaaaagtgatcaacctgtacaaagtaatactcaacaatacatttcaaacagtgcactgtatacttaagaaaaaatacataaaccaatatacaactaaaatccataatttcctgtttttgctttgttttattattattttttccaatgtgtggggcctacactttgcaatctacctgagacggaaaacaccaatcgaaacacatgaacctgagacatgtcaacattgtaagccataaagttacatcaggaacactgcactactgtacacttttcaaaacagaaagatgggaggtcccaaaaatgagatgccaattctgtgagcaatggtgtgatttttgtttttgtttttgtttttctttttttctaaaaagaacaactgaaaaaaaacctttcaacaacatgctaaatgattctcaccctttgatatgattatactatggtcggaatgggtgctaagggctcggaatagagctgcagattataaaattcattgaaaaagggatgttcattgtggctttttgtcttggttaagtgcctagggataggggaggggtaaataaaatgctgctcgataacggattttcttttacataccagtccgttcccaaaaggcccccatattgcaatggttctatcaaaggttaaaataaagacaagaaaaataaacatgttttcaaataacaaagagttgacactttttcccccttaaataaatcagcataagttttccacataatgtaacaatagtaaaaatgcaccttgcaaaatccaaaattactcactgaaaatgtaatagaatatatatttatatatatatatagatctatcttttttgatgccatctttccatagggactgttagctggagtctggagtcttaccaaacatatggtaagagtttagtttctgtccttcaggactacttctagatttcctagacgtttcagtgaaaatccccacacttctttctttaaaacatgtaaatggtaacgtgactcctctaccttttcccgaggctccccatctaagatatgttcaaggtcactgattttagtagctatgcactatggctgcccatcatgcgaggatcagtaatttttggcagatggttcttaaggctgaggaaagaggccaaggctagtgtatgaaaggtaaaaagataaaaacactcacatttgagttttgattaagtaactgaaaatccgtacatgctgtttttccacctctgctctgacctatcgagaactgagagcgacagcagaccagtgtgagaacaataccagcccttcttttgtacctcctgcctttgtcaagccaaatctgaaggaatgaaagtttcacacagattcgagttggaaatcccagcatgacaaatatctgtaatatacagtacatgcaggccacatcctactgccttcctaactaagcacaaaggaaaaaaaaaaaaaatcaactctgtccccattccagtcattcgcacaacagacgaacttgctttttcctacaaattagtgagaagtaaggccgattgggaaaggtggatggaatcatttggaacagaaacaaccagagcagaactgtatttcccccctccctacttcccctcctgtggcaactcaaaatttgtccacttatataaaaggaacagacctcacctgtcaggtctgtttagggcatggaaaaaggaggagtcctttctgccccaaacctttctggacagcgtagggtatctatactgagccgtctacagatacagaattaaagacagtgaaattcaatctcattgtgacacacctcacttgcagataaccctgtacagtaatgtagttccacagcaaacagaacattttctgaatcacagtctaattttctagtcttcactgctctaagtatttgaaacatgggcagcagccaaagagttttcattgtttgttcacccaaatctttacgacaacagagaagaatgcattatggatacactaaattctgaactatgaaatcctaagctgtgctggttctccttttatgaaactgaatttggaacagaaagcagttacccataaaaataaacaaaagtaaaaaactagaacagaaaagggaaggaaaagagtctaaggaatcccagcaggcaaattccaaaatgggagattttggaaaaaatccgaaattggggtagagggaggaaataaatgtgcacaaagggggaaaagaaaggaacgcaacaaacaaacaaaaaagaaggcacagaattttctgcaatctactgaaactaaatccaagtatccaagtttgacttggtaggaagaaataaaaat

SEQ ID NO: 48940 - DNA, 2248 bp, Homo sapiens
  misc_feature (1)...(2248): n = a,t,c or g
aagaattgaagcaggactaaatgtctagttgtaacaccatgattaaccacttcagctgacttttctgtccgagctttgaaaattcagtggtgttagtggttacccagttagctctcaagttatcagggtattccagagtggggatatgatttaaatcagccgtgtaaccatggacccaaaatttaccagaccacaaaacttttctaatactctaccctcttagaaaaaccaccaccatcaccagacaggtgcgaaaggatgaaagtgaccatgttttgtttacggttttccaggtttaagctgttactgtcttcagtaagccgtgattttcattgctgggcttgtctgtagattttagaccctattgctgcttgaggcaactcatcttaggttggcaaaaaggcaggnnnnnnnnnnnnnnnnnnnnnnnnnnnnnnnnnnnnnnnnnnnnnnnnnnnnnnnnnnnnnnnnnnnnnnnnnnnnnnnnnnnnnnnnnnnnnnnnnnnnnnnnnnnnnnnnnnnnnnnnnnntgaacaataacagttaagaaaaaaaaaggcaggcaggcggttatggtggttccctcccatcccaccacataaagtttctgagacttgagaacagcaaaatgctgttaaagggaaatattaagaatgagaatctgcagtaagggtgattctgtgcccacagttcttcaattctttataccgttttacccacatgtggtgttaccaaagccgggcagaaccatgctagcggaagatgtgaaatccagatagctcattattgccaagagctaggcagctttgatctccaaattgttattgctttcatttttattgtaatggaattgctttgttttgtttttttgtttttgtattgaagagggttgttttccctttatttttcataagctaatgtaaatgaagaaaaaatgtcttctctgggctgtaggcctggctcagcgtacacaggtatacatcctaagctctctatgttctctaatctgtggtgactgaacatgtgtctcaatgcacggggcatttctacctgtgtttctgcagcacccccactgccttgagtccccagcagtgctgttatttgcctaacacctgtagccatctgccacgcagccagacgtgaaacgctgagacagagaccatttaggttaaatacgacagcttatcctgctgggtggggaaagtaaaaaatatgctggttcaaggcctaaagtaaaatgatcaataatgtttgtagcattaatgaaatattttcaagaaatgtgtccaggggtagcacttggctatgttgacgaggcctttggtaactcagagagctcttggccctgatggggacttgcccttacgctttctttatcaggctctgagttcacacggagcctctggcacttccctgctgtcttgggagaaaggaaactggttgccgcggcaggttgtggaatctgttgctggaaccaggctggaagcccacctggtagtgaacaggggcccagtggggcaggctgggcatgttgtggtctatgggtttgtttcctggagaatgttcaggaatgtcttcccagctgctttggtgctgagctctattatctcacagcacgtccagaaggctaacccaggtggggaggatgctgacaccagctccaggtggagttggtggtcttaatttggagatgcaggggcaacctgtgaccctttgaggcaagagccctgcacccagctgtcccgtgcagccgtgggcaggggctgcacacggaggggcaggcgggccagttcagggtccgtgccaggccctcctcagtgccctgtgaaggcctcctgtcctccgtgcggctgggccacccagccaccagggagtttctatggcaaccttagtgattattaaggaacactgtcagttttatgaacatatgctcaaatgaaattctactttaggaggaaaggattggaacagcatgtcacaaggctgttaattaacagagagaccttattggatggagatcacatctgttaaatagaatacctcaactctacgttgttttcttggagataaataatagtttcaagtttttgtttgtttgttttacctaattacctgaaagcaaataccaaaggctgatgtctgtatatggggcaaagggtcagtatatttttcagtgttttttttctaccagctattttgcatttaaagtgaacattgtgtttggaataaatactcttaaaacataaaa

SEQ ID NO: 48941 - DNA, 1744 bp, Homo sapiens
aaaataaaaccaagccaatggggaaaaattttatttaattttatgcttcacattcatatcatgtacattaagtactacataaacttgtctttaggctatcaatatttaacttgggcagtacttcatcttgatttatttggagaaatacagcttaggcatctgcttacctgcttaggcatcaagaggtgccaaattagaaaatagggcattaacaatcaaaatttttaagctgacccacatacttgctactggtttcgcttatgtttaagcatttaaagttggcaaaacatgttatcaatgtattatgcaagagtttacatcttttgcataagtggtccattgggttgcacctaccccttgaccaaacaaaaacaaaacatcactggcaccatactcgaaactacctgtatcctaggttataagattgtgaaagccaacaatctataaggttggagggactctagttaatctttgggcttagaggaggaaaaaaagatagtcccatactgcatttcacatctcttaaaaatagttttagcagcttaaacctttttagttataaaacttattacactagggtttactttgaaatatagtttacaaccaaatcaagtataacatacatacactggcactttagcacaagggcaaactttaaaaacaagttattttggacctttaaaattaggccatattataaaaaacagtccacggtcttacattcagcaaattcatactaaaatactccatttttgtaagataaaggccaagaaaactttacatatgctacaagtttattacagatatttacatggctctttctcccctaggtacttaaaattttcacattatccaactccccaaagcaagctttgcaggaatgatgaggccagagcactattagaatagcttgtgcagtgctgtaatacaaaaatgtattttgaaagctattgagtgaccattaaatactgtttctataaaaaatggttttggtgtatttgttgacagacacttaatccactacatttaataaacagggccattggggtgtactatgtctcattctaatgagctccaaatgccctttccacccactgtacaattcactaaaatgcaattattacgaaaaattcacattttctttcagcagtgcatcaggttagcatattactggtttgggtgtttctaatatactaaaccttcagatgtttacctaattctgaatccttgtgttagctagaagcttataatccgattcaccaactttcaacaatctactggtccatgaatgataaattactgtcttcccctaacaatagaacaagctgattcctttaccactccccaaatctaaacttggtttccacttaaaagttactcagttgagaacacttaatatcaagtacaatcattaaagttgcactgatactaccattatatcacagtgcacacaacacgagatggtctgttttttttacattaattagttctacacaaatagattccctagcgaatttgtttcagaccaattgacaactatccgtgaacataactaaatttaaacatttgtcttattttatacctgtactttaagtaaggttttaagttgaaatgtcattatttccttatctgaaggattaaaggaaacagggacccagtggcttggtggtttgggaagaacacttggtgatggcggctcactaaatttggcaccagcatagttctgattagcttgagatttaaa

SEQ ID NO: 48942 - DNA, 658 bp, Homo sapiens
gaccggcagtccaggaaaactgcaaaagatgggaagtaaggtcctggcaggcagacccggcatgtagccgctggccatcttgaatcctagggcatgaagttgccccaaagttcagcacttggttaagcctgatccctctggtttatcacaaagaataggatgggataaagaaagtggacacttaaataagctataaattatatggtccttgtctagcaggagacaactgcacaggtatactaccagcgtttggatattgatatatacatggcaaatctgaatattgttttatgagaggcctggcaatgggtaaaacaccaaacttgaaatcagaacataggtgcaaatggccactcctgtagtttcttttctgtaaaatgggatctggacgaatgataccaaacgtttctttctaacattgtattttataactctggcctatgattgtgttgtgtcttgcattaaaaaaaaaaatttgagagtggtagaattacttctgttatctgaaatacctgagatgcactttaaactgttgaaatgtaagctctgagggcagggaccgtatcttatttactgttagtatccgttgcatctagtgtggtgcacctggcacacagtaggcactcaataaatatgtattgattaaaaaaaaaaaaaa

SEQ ID NO: 48943 - DNA, 1355 bp, Homo sapiens
  misc_feature (1)...(1355): n = a,t,c or g
ctcgcgttttttttttttttttttttaattttaaattttattaaagtacagagttaacaagttttgagttttttatataggaaaagcctagtcaattcagatgctttctagaaaaattaacattaaaaaacaaatagaaatccatgactaaagggggaaaataactttcaaaagttaccaaaattcgaatcatatcagagaccattataaatttcaaacagtaggatttaccacacatattgcattttcaaattctaatgtagcaaaacgtaaccacataatttggctacagctaatcgtttcagaaaagtttaaaaaattagcaaagttatatctataaaacttttgtagttttctttttgcaaagtaaaaaggcttaaatctttaataaaggaaaacaaaacaatcctcttaaatttcttataaatagctctccagacatatattacaaatctgctgtaagcctttctttacctgagagaacttcccaggatcctttatcccaaaggattaccttaaagagttcttccatcattttactcatgtgaatatgattaaactcctatagaagtggattgggacatatgcattcttaatctgcccttccccatttgtttctttctgaaaggattttgcttaaggaaaaaaaaagctctttggtaaaggccaaatatttcaacctttcaaaatgactgcctctgtgaaagagttgttgagaaagaagaaaagagagagagagagagagaaaggtctaaacatctgtgtgaacagctctccagtactgtgaagtcaaaggcccaacattacagagcgcacctctgcctgaaatacaaaactaagttaactagcaagttacaggaaatagccttcagtaaattccacaagccaagtggctactgcattgtccctgaagaaggagggcccagtgttctttctgggtgtgtaaggtcttacttagttcaaggtttgtcccttcttagttgtaggttgggccctctttcgtttccaagaggtataggacactagagtacaccaaatgagatactatttggaaaggcaataaagggagtgtaaaagcctaggtagcttaaatacaggctctggaatttccttcgcaggaaggtgaagcacccaatgatggcaaaaattaaataaatacatcatcttaaaaaggcagagggtannnnnnnnnnnnnnnnnnnnnnnnnnnnnnnnnnnnnnnntatggcgtcttctattttaaaccattccctcttccttccaatgttaactgaatcttcccagtcttccagcacttcagtgacaatgagcacatagacatacgtcctgtgcttcctctcctggttctcaaaaat

SEQ ID NO: 48944 - DNA, 415 bp, Homo sapiens
gcctgtgtcgggtagaaagggtccttcctggaccgggaccctctgccacgaccatggaccgtaggaaaaagcctttggacgtcacggcctcctcgttggtagatcttaaggctgaactcttccgaaagcaagaagaattcaaacaagaaaaacttctaaaagattctggagtttttggaaaaccaaaaacaactaacaagaaaccaagtatctggagcaaacagaatgtaggcgtttcaaatcgagctgagaaggatgctgaacagaagattgaagaacagaagactttagacaaagcaagggaaaaattggaagaaaaagccaaattatatgaaaaaatgactaaaggagactttatagatgaagaagtagaggatatgtaccttgtggatttcacacagaagatcatagacaa

SEQ ID NO: 48945 - DNA, 993 bp, Homo sapiens
ccataagcaagatctttaacagatggatgtctccatgagaaaacccaaggcgagaagcccagagccatggcggggttgcttgacgtcctcatggagtcactctgccccacatgctcaaatcttccctctggccccacatccctaggagggcctgacccctgtaaagatacaggaggcagctccctggcctccaaatggcccatggagatggcagtcgggagacagggttctgtgtttgctgcggtgaagggaggagaaggcaggaggaaaaaggatggcttctagccctgaagaggactccagcatcccaggcaccgggtgcttctggctgcagttttccctatggaggcccctcagcctccagccctaacataaatgtcggttaaattcagttttcaagcctctctcccttttcagtgtcagagcagtagatggtccagggcattggaggcctcgaccactctgcattgcagattacagtgacttcctcggggttgccccatcttggtctcctatggtttcttcatcagctttttttttaccagcatctctcaaataacaatgaagatagatatgcccattagtgtctgattaaggagcaaaggctgggatttctgggccacagcgagctgcactctccctcctgcctcagccggggtccgtcttagcagtttggaaaggggaaaaagatgccggtcctcactgcttaagttttgtgtccaggtgccactagacttgcatgcacactaactccttacaatcaccacacagcatcatcgccccagtgcacagatgaggaaccagaggctcagaggagtgaagttgccttcctgaggtcacacagcatgaaagtgatgagctaggatttgaatctgggaagttgggctctagagccagactgtactgccttctgccacactgtactgccttctgtgactgggtggcacctccagggcacatttacacaaggccctgaatctgcagaggctgttt

SEQ ID NO: 48946 - DNA, 970 bp, Homo sapiens
ttttaacgttaaatcgattttatttaaagccataaataaataagccaattaacgctcaagtctgagagggctgcagtctttttaacaataccatagtccaaaaagactaatacttattgctgattcagctcacaatattacccctttccagacaacagcacattcaaatgttcaagaaaacattttatgggcaccttttatgggcatttgagattcacagagcaatgggccatggccctgccctcaaggaacttacagtgtagctggagagacacaaaacatccagaacagacatgaggggctggctctacctccacacctctatctgaacaaaaacgattactggcttaagtcctcgtgttgtaacgcatgagccacaggaatatcttagcaagtacgcactttatcaagtttcaatttgacatgtcaaaacaaaagtttttatgttgttcatttatatttgtactcactcagatttccactcaatcaaattaaaagagaaagacataattccaagccaactgtaccataatgtttgctgtcctcgatgaaaggatagcttgttcatgtcctagaatttctccacagttccacatcttgagaccaagttcagcagtttttactgccaaaccgatgtgtaaattcggatagtgtgtagacggcgccccatcctaccttgggatccatactgatgaaatcgttcaggttcattttggaatctccagtctcaatgcagggatatggcggcggaggctctctccaattcccactggagtctttcatgtgagatcggtcagaagcaaagttcttcaaatatgaatctgcacggatcactctaaatttcctcctaaactgtgggtgaatgtcatcatcagacttaaaggcatcttctacataagtgtcaaagaggcagggaaatggcaagacagtatcgagatcataaatgaagttctgtcctccacttgaaacg

SEQ ID NO: 48947 - DNA, 726 bp, Homo sapiens
gcaaatattgttggagaagaagatgctaggagaagactcagatgaagaagaggaaatggatacctctgaaaggaagataaatgctggtagccaagatgatgagatgggttgcacctggggaatgggagaagatgcagtagaggatgatgctgaagagaaccctattgtcttagagtttcagcaggaaagggaggccttttatataaaggatcccaaaaaggctctccaaggcttttttgaccgagaaggagaagaattagaatatgaatttgatgaacagggacatagcacttggctctgcagggtgagattacctgtggacgattcaactggaaaacaactggtggctgaggccattcactcaggaaagaaaaaagaagcaatgatccagtgctcattggaagcttgtcggattcttgacactttgggattgcttcggcaggaagcagtatctcggaaaaggaaagccaagaactgggaagatgaagacttttatgatagtgatgatgacacatttcttgataggactggcctgattgagaagaagcgtctgaacagaatgaagaaggctggcaagattgatgagaagccagagacctttgaatcattggttgcaaaattaaatgatgctgaaagggaactttctgaaatttctgagagattgaaagcctcaagccaagttctatcagagtctccatctcaggattctttagatgccgttcatgt

SEQ ID NO: 48948 - DNA, 2000 bp, Homo sapiens
ttatttgcaaaatcaaaggtgttaaagaatttaacttgcttcaggaaataaattcaagaacataatggattcattttcattggtggcagacacgaaatttggttcatgataagacttcctttccccacctcctgatcagcattatttaaatctgtatttttctgttagttaaagaaaggaaatgggcttcatgatattgtatttaatagcaaaagtttggctgtcttcttcattactgttaatagctactatattttaacaaggagatttctttttttgttgttgttgttctagagtttggaatatactgattatctcagacttgacatttatactgaaggatgaagtaagacctccagctttttttaaaaaaggtgttgatttggaacacctgtatgggttatggtttattaaggttatggtttagaaagtttttttccctcagagccttaacttgttaagaaggttcatttatcctgcactgaaaacaaaaactctatatactttgtttgtgtgcctcctgcactctcccattccctatgtgaatatgctctagttgatatttttaatatattgatttcttttttctcacagcaacaagtgcttactctagaggttagtggggccctgatatgtcatcagtcaggatgcctgcctaggccaaagctggactaagattattctgtacatttgttgatcttgatatagacttatatccctgtagggactgctaatggctccggcttctggagtaaggtactggagaccactcatccctgtgtctgcttgattggttcagctgttgaattgcccttttatttggaagcagtgttgaagttgtctagggttcaaatggctgctttgtacacctgtcattagtataaggcagatgtttattttatcaagctattttatctctacatttaactaaaaacaaaagttcccaaagatctgccttcacttcagaaattttttttggattaaaaaaattaagcctgaaccttaaataaagtgagttggttattcattccaaggattaagtcccaatctacctctcagcacaatgcagaagctcaccactgtattgctgccattaactcatgccagaaccctttgccaataactggaattacaaatttttgttaaagaaaatttatcaagatctttctttactgccttctctatatgtacatctcaaaaacatgtacatctcaaaaactggagtagaaagttagattgctcaactacaactcctctagaactctatagctctgacatacagattcacactctcctctatttgctaagtatgtaaagaatgttttcttttaaaatgttctcttttgagaacaactgcttatttgttataaaagcatttggttaaaatgatgtcatcataaagaacagtggctttgtttcaatacatatttttgagatgattatctagaagccagattaataaaatcagcttgtgaccttgctaagcatataaactggaaattcagatacattcaaaattatgggttcatttaaaagtgttctaccttttgggtatgagactaatatcactaattcctcaatagttatcatggctctatcttaattaattagaaaatatgtgtgtttaattctttgagaattaaaatagagaatattaacagagggttaaaaactgcttcaactccaataagataaaggaagctcaaaatctatgagctgagtgttcaattagctttgcctactgagttcaattttatgtcaatacaacagtggatcagacagtacgactttgaactggtgaatgtaaacaattgtttttcacctaagctgctttggaagaactgatgcttgctgctaactgaagttttggatgtatcgatttagagaaccaattaatacctgcaaaataaagcatactgtggtacttctgtttgatctagtatgtgtgattttagattgatggattaaaaattaataaagatcatacattccataccaaa

SEQ ID NO: 48949 - DNA, 1241 bp, Homo sapiens
  misc_feature (1)...(1241): n = a,t,c or g
agtaaacagcttattttggaaggtcaacatcatgttattcttcgcactataggaaaagaagccttttcatatcctcagaaacaggagccaccagaaatggaactattgaaatttttcaggccagaaaacattacagtttcctcaaggccatcagtagagcagctttctagtctcattaaaacgagtcttcactacccagaatcatttaatcatccatttcatcaaaaaagcctttgtttagtaccagtcactcttttactttccaattgttctaaggctgatgtagatgtcatagttgatcttcggcataaaacaacaagtccagaagcactggaaatccatggatcattcacatggcttggacaaacacagtataaacttcaacttaaaagccaggagattcacagtctgcagctgaaagcatgctttgttcatacaggtgtttataaccttggaactcctagggtatttgccaagttatcggaccaagttacagtgtttgaaacaagtcagcagaattccatgcctgccctgatcatcatcagtaatgtgtgacaacttggaaatttgtactgaaatccacaataatcagtttttgctggatgggttttacagcagtatttgatatacctaacttgttatggaggttgattgatatctgatccctgcaaaatactttgacttgtcattttgttgatgatgcaaagcacgttggactgagaatacttaacattctttttctgtatttctttaaaccctgagaataatttacatgctcataatacaggatatcagcatatttgtgcaccttattaagccccatcttaagaaaacacaaagtctaagtctgctgttacaacttgtcaatggtatacgaatattaggagatgattctgagaaaggaaaggccttgttggcagtactcctgttaagccattagtctctaaattccagctttactgtgaagttctatagagtgttaaatacaaattttcctgtcttgcttcacacagttccttaaaatcagttttgaactttggtcatagagtcttcatatttcagtatttggtggtccctatgacttatacataactttgtaaaaaaaaaaaaaaaaaacttgagactagctcgtgccgatatttttnagcagttctaatggtgcccatttatcctgacctaaccagttatttaaataattttttaaaccaccanggggttaataaatggcatgtgaactgatc

SEQ ID NO: 48950 - DNA, 1604 bp, Homo sapiens
tgatgttacaaattacttgttgttttaatatgttctttgttgaatagcttattttacatttcagtcaaaatagttatttcacaggtgaaaccactaagtagcttacttcctaccttttaaattaataaagttacagtcagccacattgcttgagtcttgccaaaatctttagagaaacaacacaaactcagacatctaagtcagatcaaattagagcccaatatttttgatacttttattgtatatgactagttttctagaaaactattccagaagatacagtcttccttccagaaaatacagctttactgtccttaagtgcctaatcattttcaagaggaggagcaaacagtttgccctcaagtatctggtctatcaacaggggtctggctaaggaaaaaacggccttagagcgtgatgaacctacttaacactacctggtacctcaactcatgctaaacattctaatttgagcaaagctaaatcatgggtcttagtctgtttagcaaaatctccacaagatgaaatttagcttactaccccaaactgttcaatgttttgggtccaatttagacacaaaaaaatgttttataatcctagacattagattaatgaactttttaaaaacaaagtcatgtttgggcttagaagtttgcataatgttacacagaatgattatgatatcttccgaaacagcttggggttggggggaagttacacataggtgcatttgcataactatccaaactattttactgttttcacaagtacaacataaataacaaaggtgctaatttcaaagacaggtttcaaacaatgagaataagaatatattatttcatatcaggcaataataaccttagcccaaatacttttaacatctaaagtgcattaattgacttccttaggaattttcctaaggaccaaaggtagacacaaatggcctattttaaatagtaatattactccatgttcacagacacttaaaggcaatcactattcaacatacaattgtggaaattactgatttttagttctcagaattagagttccctttgtttttcctcccaggcaaaggaaagcttgatttgctctggggttgagaaagtttactggctaataaagtgaatggttcaatcagagttttccgatctgtaacagtcacctcccacagtcttactttctcactttttgcccactgctgtgccacttcagcgtccacttgtctctgctcagaaaggtcgattttgtttcctaataccacaattgctacctcttttttgtctttgaacttatcgatttctttcttcagaagctccactctttgaaaggattcaaggttattcacactgtacacaagaacgaagccatcagcaaatgaaaaataatgctttggcagctccacgccttcctgtagacctctggtgtcataaagatgtaactgttcttttactcctcggtctgtttctactgaagccatgtatacatcttccattgtttcgcaatcttccattccaatagtatgatttccataaaggagctgctccaaaattgcagttttccccacagataacaatccacaaaccacaaccttgcagcccttt

SEQ ID NO: 48951 - DNA, 2143 bp, Homo sapiens
ttttttaagggaacaatgttgctttcaaaacaagacatgctaggctgaaactgatttatggaaaagactgcttgttagcaagtatatttggtcttgagggggatacagattatagaatatgctgacatttgggcttcagaggaagaattttcaaatctaatggaaatagttgaggtgttcaggaatgctgtttcttggagttggaagcttaggttttgaaatgttgaaaccaaaaagacaaaaattaaaacataggaccttaggtcgtcattcacacccggttctcaagaatcaagtggagcacttcaaagaccttggcttgtctgtcccatcctgccactttctcatcttttcatgcttttgaagacaccatttacagctctgactcagccctattttgtgtaaagtaatatattgattattcagaaatagacaatacattttttaattacccaaggactgactgttttgtgcattttactgttggttgtcttcagtagagaatagtaatagggcagagaaaagtatatattttgcctcagtcagtcccaccaccacaatggactattgggatattttctaaaaaaccaatcaatttgcccatgattacctcacaaataattagtgctacctggggtactctcaaatatacagcttttgaaactgtagatgaaaaaagctctactcagagtttttgtcaagactgtgcctgggttgaatatcagtcaattgcctacacttctaaacaataagtgccaatgtctcaattttctcaccctgaatgatagaagctagctttatcaaatgccaaggttagaaagcctggaaataaaacttaagcacagacattcaagtttttgaaaagcataagcctaaattcagataaatcacactgatatattgtactatgcataggaaagttgtaggtgggcgttcaggggaagactttgattttaataaagcaatatttagtattgaagacaaacactttttattttcagatttctgccaagtaaaacagaaattgccaataaaataatcagtattttgtaaatggcaggcaagcttctggctgtcgaaaacatctgagtcatttattcagtagacaatatgtccttgatccaggttctttgccagctataagggaatccctgtccttgagaggctcatagtctataagtaacattacagaatttgttagcatacccattcattattagttttacctaaacgtgttaggatcactactggtggaaattgtaaccagcctttgggcatcttaaagggtgaccatgtggcatgccctttttttttttttaagaatttaatgtttttcaagattgtagtgttgatcagcgcaacaattcaagtgtgcaaagtaacaggatagtttgcctcttcactttacccctggataaaggcactttcactgcctgtcactgatcagcagatactgacttgttgccattaagtgaacttgacttcttatgtgtgctctatgagtttgttgtaattttcttcttgaaattgtgatttttcactgacagtaatgacaaatttaatgtatgtaattgtctatgcattttaagttaaactgcctaaaatgtgatttgagacatatacatatgtttgtattataaattgtaagcaatcagtttgagatactaggttttatcacctgctgctgtatttgtaaacaaagacaaatgttgctttaagaagtaattataattaggaataggctatggatgtgatacttggtattttttaagataaacttgtttgcttttgtgtattatacctggaaactttttttaaaaaatggccctgagataccctctttgcatgtgacctgcattcacctaaggatatctggaaaccacccttccctccgcaaaccctctcagcaacatggtgtcccattgtggtgattttctcttcttttaaggctaggctactcttggtaaccagattatccgtatatatgataatatgaagtcagggaactttctctgtctgtccctactcccctcactcccccactttctgttatgaaagatagttctacttttatcattatacctacgcatttagtgagggtcacattattaaacttggagtttaccattttcccaaaaaaaaa

SEQ ID NO: 48952 - DNA, 925 bp, Homo sapiens
atttaaaaatacatttcaggatatgacttttctgaaaaaaaaaatagaggctctacattattttcagaaattgtaatttgtggatacaaatacagtcttaattctgaaattattttatttatgcttgcttattcaaacacatagtaattgaatgcttaccacgtgctaagcacttagattttggagatacaaagaggagtgatacaaacctagctctttccccaggaagctgccttgataactagttttctattggtttctgattgaaagttttcagtttcattgattttagaatttaacttcagaatatgacatctgaccttccatatcttagaaacctgttattccttttttttagtctctgcattgtctttgatgccttggtagcatgcactgaaaattaactcttctgtttgaagctgtaattgtcaagattaaagattaactttttatctttgagttcactttaggcattgatctcttaggtgacagtgcccttgatggaaaaacaggataagggggggcacaagcttataaacgtcaagtgaaagtaaatgctgcagaactcatgttgtttttttaaccaacattctttgcttttggatgtttaattcactggagagcataaatcagatctaaattaagaataacttatttagcaatgctgttgctcaccttggggttgagcagtgcattgtggtgtttcagcagttattaatctagttaaatgtagttttgaaatgttagatggtagctttgcatgaaaggaattctagcaatctatcaagtatatattctgaaaacacaagttgtttaaaatgtaggattatttgtggttgtgaaagatgaaggaagttatagcaagataatgtcagatagcatttagggaaagcacagttttaataactgattaagaaacagctac

SEQ ID NO: 48953 - DNA, 1782 bp, Homo sapiens
tttagttcccatcttgatatagtcaagtttattgaaaaagtacaaatagaaatgtttcagaatgtcttaagttttatctacctagcaaataccaatttataattatgtaacagtgcagatctagaatgtgtacaggtactttgggagtaaccagaagagcatttcttgtcttcaaagagattaagcatgacaaatttgaatactgacttagataataggttttaattatatctaaaagtctatgttgatattgatcctctggcagttcctctactagactccagccaggggctcagaactgctgtctcactcttaatacattaccctatccattcatctggcaaattactttccaatagtttggcatgtgtatttatgacaaaggttgattacaaattctacactgagggagggttactaaaaccagacagaaaaccaacctggaattaaatcatttaattcagaatagaaattacgattttaaatccggtagattataactttcattttgtaattggtacatatacttgcagactgctcttagctatggaagctgcttgggaaatagctgatcttccagttactcctgttttaatgcctcagtactatatttctttggggagaaaaaagttctaaaaagactgacccagttaatgaaccagagattttatattttggagggtaaagaaatgagttaagttttccaggtattaagaacatgggagggtggggaaaggcacttaatgcggttttgccgggaatgggggttactggattggagagatagggttgcttgttagtaaacagatgttccttgtcagaaaggctgcaaaaaggactctaaaatcccagctttgagaaagacccacttttaagggacaagcaaagagtactgggaagtgtttgtgtagtaggagaaattctaaccataagaatgggactctaaaggagggaagggggaagcattccattcactagtcctgcaactgctcaacagcctacttgaaggtcacctgaaacttcatgtccagtaggagaggggacaacaaagataagggtaatatcagctgtatgatttagaagatgcaacattttccagagtatcactttgtagaggatcatttttctacttaaatagtattcatctgtcatttgctaacaactttgattacggaaagaataccacagagctttaaaatacatgcaaattaaaatatcagtaaatattaaaaattcaactcctttataaaatttttttctttacattggatatatcttttatacatcaaataggactgcttccaaactagaaataattattttgaaaattctattaattgctttttagatattaagtcaaatatttactgtgactttaggtaaaaactgacaactttctacatacgaattttatataaataaataattgctacttaagtcaaacagaaataattcttctgataaaaatgcaccagacttcctgaaacgttaccagaagaaaggttaaatgtcacagattctaaccaatgtctatacaaagtaacttttatggttttgactcaaaatgaactcattctacctttgtcaaactactgaggtggagcctaaatacaaagtaagagaaaaaaattcatgatgatgatgtcatatactaaaaatcaaagctgttctatttaaaaagcaaaaatgaaaagcgagaatgaataaaacaaatccccacgtactaaacttgttgtcttgtgattaacttgtatccttcaaaaggtatataccgttatatag

SEQ ID NO: 48954 - DNA, 1508 bp, Homo sapiens
ttttttagaagaatcagaatttatttcactatgtgaacattaagaatttacctacatagttgaaaatattcacaaaggacttgatcattcacactcatacacagagaaagtctgctgaataaaaaaatgctcctttacccattcgacctcctctcaggggctgcagtgggtttgccaattccactgtggggcttcagtcttcatgaatgttgaatagtttggctacttcattgagatcttcatgctgctcaccgtccttaatgatcttccttgctattggcattcggttaaagatgttccatagcacaatccccacgaccactttgtccctgaggtagaagatgacacctttgccgtagtcctccccctggacgggagcctgtggaactgccggggtgctgggaggaatagtaatttctgaggcctcggactctgtctcactctctgatcggataccagttcctgactgctctgtggcagatttggggttgtcttgtgcagttgcttttgcaaaaacaccaactgtgggcaaactactgtccacaagaccaatagcttcatagccaacatcggggcccaaatcactccagaacattgactgatgccagtacggcttagcagctccagtcatattttctccagccaatcttccactcacaacagcgtgatcatggtgctctacccgcctccttcccaactttatatcgtagaagcatgcagcatctcctgccacccagatgttagagcgtgcttgtagctctgcatttacccggaagccaccaaaatctgagtctatttccaggccaccagtcttggccaactcaacattgggctccaggcccacagctgccactatgtggtcagtttctaccttcctgccgtctttcagcttgataagtaacttgccactgctgactccaacggattgcacaatagcattgggcatcaccttaaccccctctcgtctgactttttccatggtccagttgctgaggtattcggggaggatctttcccatatttcctttctcggggaagagttgaatcacttctgtgcccaaggctcgagcctttctgccaagagcacaggccagttcgctaccaaggaagcccccaccgataatcgtaattgatttgacttcccgtgaaatcttctccaagcttctaaagtctccaatctttctgaaaagcgttgttctactcttcacctctgctccagccctatcaatggcagacagacttcttggagtacctcctgttgcaatcaagcacttttcataggttatttgagagccatcattaagtttcaccatgttgtctctcacatccagctgtactaccttcttcccagtgaggacagccacaccaccattctcaatatgaggcaggtcctgagcagagacatagaaagaaggtggctggaaatatatgcttctctcttttccattccactgtttgaatcgcagtgtctttgtgacatttgggtcatctgaaaaccacagttctttc

SEQ ID NO: 48955 - DNA, 601 bp, Homo sapiens
ttcggcacaggtttttttttttttttaaagtgaacccagccccagtttattagaaaaggtgtgaacagagttgcaccgacaggagtagccccagccctctgcccaccctcacccacacccatgccactcgcccccaaagggctgtagtgcctctcagggcgcagcctccagtggcctggacagcagggtcccggagtgccggctgctcccgccccagctccctgatagatttattgcacttgagaaaaagaaagctctgatcctctgctcccatccccccaccctgcccggcctgcgctgtctggggctgttctgcgcatctcaaccaccaccagcacgcaccgcctctccggcaccaggctgcctgcccggccctgtgcccggggccacaggggaccatcccaccaccacccaggacgcctgccctccgcagggcaagcctggcccctccagaacaggcgcctgatgtccttggagacctcctcctcctcctgctccccctcctcccattcacccccagagtcttccagtgctgggctcataaatagaagtgcttgagtcacgcgcggagggccactccctgtagctcctgcaccccttg

SEQ ID NO: 48956 - DNA, 1335 bp, Homo sapiens
  misc_feature (1)...(1335): n = a,t,c or g
cacctcagcctcaagcgatcctcccacctcagccaccaccacatgccaccatgcccggctaattatatggtgaatttaaatgaccagtgatatcccaggacagtcaatacctacaacaagaaccaaagagcacaaaaacacttgaaatatcattactttactttagtgttccaggcattttaaatattcatacaatcgccttatttcagcagtcatttcctctccagtacagattttgtgtccagaaccagagccatgtacgtcactgaattttctctacagcaccccgcatgctacacgggacctactccggtgcccatgtctttgctagtagagcctctcaccacacttgcaagagggctggacctccccttgcttgatgtagcctccactgtgaatgaaaacacactttgtcacttcgatcccagtacatttccagcactcccaggtgttccatgtatgtggcaatcatcccacagagctagtgacacatcatgtcagctggtacctatgtcagcacctgctccactatatcatacagatgctgaggcacttaaatgttcttggtaaaatggagttcataattgccataggagttgagttttggggaaagggactttcaataattaataccccttaatacatatttagcagatttataatttcgtgtctgtttacatttgttgtcaaagcttcataaactatttatgtaaatgaaagcatgtttgagtttccaaatgctgctatgacaagcaaacagagaaactgcttagacaacacctgcttgtgccataaatacatacggcaacatccggtcatccttaaagaaatgcttgtgtttccaaaaagaatttttttttttaagtcataagccttatgcaattcttccaagataataatgtgtttgtccttccttctcaagcatggttcaaggcatctcaaggcatattgctgtctgaggttctgatttaactgtccgggggtacaggggaagagtgggcactaacattttttaaaagcttcacagtcattccagcatgtagtcagtgttgagaaccttggtactaaaggctcttgcatcttcctactgtcacttgtcctcatcaaaagcccttgaggtagtccctgggtcaggcaatgatctctttcatggggctaaggaaactaagggcacagagagggttaacagggctccctctggatactgtgcagtcaaatgacagaaccatgattgcaactggacatttcccaaataaaccatgactccttccccccagcaacnggtagcanttacatggncccaaagtattgnagcctgacttnggagcccggcat

SEQ ID NO: 48957 - DNA, 1673 bp, Homo sapiens
ttttttttttttttggctgtggttgtaggaaccaccctacagcctagaagactttattaagatcttattgcttatgcagttaaagagacactgattgagctacaggtttcctgtacctggtctcaggtcactctgtgcagagcttccccaggctgttgggagctgggagactgctaggcaggggcaggccccagagtgggaagcatggtacctcctaggagcctcagagtgggtagcgggcttcaagacagccctcagggtgaacagagaggtcaggagtgtcggcttaagccagggcccaggggctacattccctgagatgagtcaagcccagccctctctggggtttccagaacaaaggctaggtgtggggagcagcactgtggagagggcagggagcatgtctctaggcattgctggaactggaggagactgtcagagtggtttgggtaatggttgtataatctgtggcaactgggccttcttgcatgaaagtggaagggtgaggatcccttatggaagagtcatgccacccatgggttgggctggactagccagctcccagtggctctgctgggtgactaaagtaggcaaggaaagccacttgttgcccacaccccactttcatcaactctgttcatgcaggacaaagcagggagctgcccgaacaaggatggggttatttctcaggcctaggtattgatgttaccttaattctttagtctggaagaacttggttgggggtgggggatggtaagcatttccttaaccaaacccacacttcacatctcctaggggtaccccttcatccaccaacctccagagaataacctggctgccctcacttctccagcttttctcacaaggcacttgttacagggctgctgatgggagagggaggaaggcctgggagggggatctggtggtggcgcccaatctacagggtccggaatcagggtggaagttgtcagggactagcggctgccatagtacaggcgcatggccaggccaatgagcaatgtggccaggaagaaggcggctgtgagctgcagccgtagcaggactgctgagagcacggcgttgaccaccagcgagcaggacaccacaaagaggcgtgtgatgctgctgccatgcttcatgacagcagacatgagcagtccatttagtgccctggctcagcaccacgagtgctgccccatccttgagaaaaccttccaggaggcctgggcccagagccgccgcccagcatgcaagacctagatttcagaagcaacaccaaaagtgttagaggaaagaggttctgaaagtcccaggggcagccgctgtcgcttcatgagcagctctgtgtacactgacgacaagcctgagatgaggcagtacagaatgaggagcagcaggcctagcggagtgatatgcaggggcatggggctggcagcagctgctggagggggactgggaagggtgttcccgggaacttgaaggccccctgctgcatagcaggctcccgcagccatcagcagcagcagcgctaacccctgacgcacagagaggcggtgccggaggcagaggcagtagagcacagctgtgcttccaatcttgagattactcagcacctggtaggtgctggggtccatgtaacgctgaagatagatcaccaggttgttgttagcgcc

SEQ ID NO: 48958 - DNA, 1793 bp, Homo sapiens
ttttcatggtcacttctttatttttgatacaaatgtacatgacacgtcttgacagcccacccaccaccacacaggtagggcctggcccccagggaagaagcgggatggggagagagctggtgggtcccaccgtctgcctctccagccttcccaggctgcagccaggttcccaggcctccagagggtgggaccacagcaggtgcaggtagtgatggtgggtgctggccttgcagaggttacggggaggggactcagctccacagccaccagctgagtcggggaccccggggagccagccccaggctcaggtgctcagtcctccaccctagccagcacacattccccctccacgcaggagcaggaggagatggagggaagtggtttttgatttaagttcatagagaaggggcgagagtggggagggatcagggaggcagctggcaggaccaaaactggctacccggacagtccctggctccaggtggggaagggaagctgattccccatgcttggttccactgctctggtcccctcacccctcaaaactccagatggaccaggcctccggaaacgcactgccgcccacacactcaacacgcaggcacgcgggggcactcagttaccacaaagttaaaattaaggggtggggaagaagaaagaaaaaaaaaaaacagactttccagtgtttgctgctggggaccccagcacacaggttggggcctgtgccctaggcaggggccatatggcattaaagggagagcagcaaggggctggtggcctaacagggcagggacatccatggagactatgtaacaaaggaaggggatgcccccgcctcagcccccagtagggctgaactggctcatgggggtggggcgcatgtacggagagctgccccacttggagtgtccccacctgcccctttgctgaaggtgcccctaaaaagccaaggggctgggagtgatgccttgcaggcccctgctcaactaaggaggggggaagatgctaatatacagaggggaggtgcatggaatgtgggggacagaagctcctgcccccccaacctccccatccttaggggctcgacaggggtgggcaccagggcacctggctgcccagggagtgtggcagcactaagggcacttgtgccagtggctctgttggggtggggattaatgtctggagtggcccagctcctatggccagtgaggtcctagggtgcaggtgagggtgtggggagagaggtcactgcttcttctctcgggtggtgatggtgaccagctgcttggcagccttggcgatgtcataggcgcactggatcacctgctgagtcagcagctggaagtccactggggcgccgggctctgggggcactgtcttccggcactcactctgcagccggtaggcgctggcgttgagcagccgcagtgagctccgcactggctccagggctggcctctttgggaagagggaggccatctcggtcacagccaaatggatcttctctgagcagggcacgaagctgtcatgcttgaactcctgggctgcccgcaacagttcctgaatgttcttggtgacctgctctgtcttcaagatgacatcctctgtgctgcccgcaacagttcctgaatgttcttggtgacctgctctgtcttcaagatgacatcctctgtgctgggaagcccaggatctaggtctccatccaggctttccagctctgggtggaagtcttcctctttgcccagctctagaaacctcttcccttccagccccagcagtgggtccccactttg

SEQ ID NO: 48959 - DNA, 1866 bp, Homo sapiens
tttttttttttttttataatcaaattgagtattaatctttaatgcatttttttttctcatttgtaaaaagacatgaatgaagttttgaggttccgtgagatttcatcttttcttgaatggtcacttaaagttccaacttgacaatgaactgctctgaaaacataatatgatatataattgcagaagcaggtagagtataaagatgatgactagatggtttctgaagaaatcaagagaatggtaagaaagtgagagtgacagctttaaggagatatatactacatgtgactaaaataagcttaaatgatactctctactcacagagtgccttttgaatttttaccagaattcattcattaattttaacttaataagacacagcaagagcagtattaggtctaaattacctttaaaaatttggctgcagacattaaatgattacaaaacactatgatcatcttctgaaggtattctacacatcttaatatggctactgacatcctaagcaaaatgtcaaagtggcagattaacaagcttacttaaaaactaactctagaacagagattacacaccttaagtagaattatgcagattatttattagtcaataggatagttctgattaagaagaacagcttactatttaaacacttttcctttgtctctgttggctgttttttgaagagatgtagttgtctctaacatggtctctggtattctgtaacaacaccttatactaggagcttagtacttagatttggaagagaaaatagtttttatcttgcacattatctacaacccactgggagtggctgcctgaatctctgaactaaaaaggagcctgaccctttatccaaggctcagtacagaaaagggctgtaattgattagcaatgtctgccacagaaacactaggaaacaagtgtggcagggtgacccaggaccagtctaaaatgagcccaagtgaatcattacttttctatgttctgaattatactggcataaaatcgaaggttaacaaaattggagacattagcttttaaaatgtcctttcaagctctatcagactacaaacaccacataagactacttttacaattaaatcattcagtgatttttcactcacaggttatatgcatccacattaaaaatataagattatgattttctttaaactgttatcattatataatccccatttaaacatgagactattacaataataatgatcccatatgttactggagcaggggctttagaattccagatgtaataatcagaagaaattagtttccggtgtgcacttatttttggttttcctgatgcaaaaacttgaactgaatgctgatctgcataacatccagtaagtgtgtaatctaagatcctaaaatgaagctttaaatatgctgtttctccagtacaaattgggtcaaatggctgcttctcatggctcttggctccaaaagttacagttccagaaagactaatttccattgattttgggaacttctggccaataatccagatcaataagcttttctctcgaaatacttcaagctggccaaaactagttttgtattccaaatgtgtaattggacctctattgtaaaaaggtatatgggcttccacagaattcaaaattatttttcacactttcatgaagttttaaattaatggttattccttagttgtacttcttcctccttcatttgataaaaacccaaaattggtgggacagggacctgggaagtgaagaagcataagttgaatgactctaaaggtggagtgaatggaaatttgtaaggcccactaaatgcagagtcatccattgcatcaatactactagaagtcagaattgcagagtcaag

SEQ ID NO: 48960 - DNA, 1100 bp, Homo sapiens
  misc_feature (1)...(1100): n = a,t,c or g
ttttttttttttttcttgtcagggtttatttcatcagctaacattcattctcgacctagacaaaaacaattagatgattatgacttgcttttccatcatcaactcatttttttgtatgaataaccaaaaaatttcttcaacacttttttttaagaagaagctataaataaataaagctttaaacaatcctgggttcaagttaaacagttccagttcccgaaaagttcacagccttgttttgtgggcagttctgctgttcctggcttccccttccaggaggggacgtttgcaggtctgggggtcctggtgactaagctgttagctccactccctgcctgtttccgtcctcacagccctgggagggccccggtggacagagtccttacaatttaggagatgctgctggcaaaggaactgttgacccaaagcaggtggcctgaatgggaagtgccaggctggacacttgggggctgagggcactgccagctgccgccgcctctggacacctcagcccggcgctggcccgagaggagactgctttccaaatgcagcgaagagactgagacaagacccgtgcttccgtgtgagttgggatgcgggcataagttaaacatattccatatgtcaaaacaacctgcgctcaggcccgcgcacccaggaagcccatggtgaaggtgaggtcaccttgagccagnctctggctgggtgtccacctctgccgggaagccaaggtgccccacgtggcttgtgcaagacctcacaatcccctgaacgtgttcctcctcctccaaggagtgcacccacccccatgttgagtggccgagcagattcccattgaccctgacctccctttgaaagaaccacaccactaaatccccttggcactcacttccttagtgtgatgcatccacccagggaggtggccctgcgcggcgctggcacgctgtccaccctgccctgttgaccatcctgtccttggaccccaaagtaaaatggggccagtgtaggagacctgagggtggggcccttatgccagacctccaggggtagcgacctcacctgaccccagcttcggcttcctgtgctgcagaaggcgcttg

SEQ ID NO: 48961 - DNA, 1456 bp, Homo sapiens
agggaacgtatggtttatcagttgagaagacacacgagcttccacaaattgatatatttacttcattgccagcggagtacactcgcatacatagatatctctgagtcactttaagtcacataactgcaaggatacaaacaaacactagttcatccctgtggctgagtgcccttggggaatactcagatcccagtggggcattctctctgcatcttctggccactctggccgttctccctgagcccacccaccttctccccctcccttccattcttccacgatggtagcaaagcagggaagtgccagtggaaagagactggaaggtgcacagaggcttggacaggccagagtccatgggcagctgctttggcgtctctccttgggttcatgtgggtggggcacttcaccacttcaaggacactgtcaactccctgaaggcaaggcccagggctttgacttccctaggcatggagagacagtagtcaggaaaagcagctccttggcagactgcctgggtgtgtgaacaactgtgagggctcaggggctacaagcagggacagggcaagctcgcaaacaaaaaactgagacccgatgcggtgcatgcggggagcagagctgtgcagggcgctgcaggagcagaggagggggcggggcaggacggcttccttgaagggagcccttcaggcactgtcatgtgccacatcctgtgtgaggcacttcaccttcatcttattgcatctgggattcaaatcccagatctgtctggttctaaaacccacgtgctttcttctgtacaggttgctacctgaggggacatctgctctgggactcagagaatgataaagagatctccagaataaatgaatcactttcagagaaaagtaaaagaacaaaaacacaaaaataaaaaacacacaaaagaagcaaaaaaatactacattctccccaaatttcacatcgtaagtggctggaagtgcaaacataaaggatgctagcaacatggccgcggcaagaggagcctctggagcaaggtcagcttctcccctgatttctggctttcagccaacaaggccaatggatcttccaaaccagctgctgctgctgagctccagaagaggggcctctcaacttccagaggccaggaaggctcaccctcggagctctcagttttgttttttatatttgttcatgatccagtcagcatcttcaatggctcttttaataatctgctggattctctcagggttgtcttcatctgaatgaacccgaaaactctgcctgacagcatgcttgtaatgctgctggatgcccttggtcggcagctgctggcaacagcgcagcaagtatcggtagagctgcagtggcctccgaaccagttctgctcctggcagcggggccatccgtgagaccctctgtcccaagcctccagggtaacgccagctcccggacgccgccg

SEQ ID NO: 48962 - DNA, 3530 bp, Homo sapiens
cagtagtgctagcggcttcgcggttcggtcctcgcacccggcagccgccactggtgctgagctgctaggaagcccctatcgccgagctcgttggagcttgaacccattgtcacccctccgactcaccggcccaaaaaaaaaaaaacatggttgaagcagatcgcccaggaaagctcttcattggtgggcttaatacggaaacaaatgagaaagctcttgaagcagtatttggcaaatatggacgaatagtggaagtactcttgatgaaagaccgtgaaaccaacaaatcaagaggatttgcttttgtcacctttgaaagcccagcagacggctaaggatgcagccagagacatgaatggaaagtcattagatggaaaaagccatcaaggtggaacaagccaccaaaccatcatttgaaagtggtagacgtggaccgcctccacctccaagaagtagaggccctccaagaggtcttagaggtggaagaggaggaagtggaggaaccaggggacctccctcacggggaggacacatggatgacggtggatattccatgaattttaacatgagttcttccaggggaccactcccagtaaaaagaggaccaccaccaagaagtgggggtcctcctcctaagagatctgcaccttcaggaccagttcgcagtagcagtggaatgggaggaagagctcctgtatcacgtggaagagatagttatggaggtccacctcgaagggaaccgctgccctctcgtagagatgtttatttgtccccaagagatgatgggtattctactaaagacagctattcaagcagagattacccaagttctcgtgatactagagattatgcaccaccaccacgagattatacttacccgtgattatggtcattccagttcacgtgatgactatccatcaagaggatatagcgatagagatggatatggtcgtgatcgtgactattcagatcatccaagtggaggttcctacagagattcatatgagagttatggtaactcacgtagtgctccacctacacgagggcccccgccatcttatggtggaagcagtcgctatgatgattacagcagctcacgtgacggatatggtggaagtcgagacagttactcaagcagccgaagtgatctctactcaagtggtcgtgatcgggttggcagacaagaaagagggcttcccccttctatggaaagggggtaccctcctccacgtgattcctacagcagttcaagccgcggagcaccaagaggtggtggccgtggaggaagccgatctgatagagggggaggcagaagcagatactagaaacaaacaaaactttggaccaaaatcccagttcaaagaaacaaaaagtggaaactattctatcataactacccaaggactactaaaaggaaaaattgtgttactttttttaaattccctgttaagttcccctccataatttttatgttcttgtgaggaaaaaagtaaaacatgtttaattttatttgactttcgcattgcttttcaacaagcaaatgttaaatgtgttaagacttgtactagtgttgtaactttccaagtaaaagtatcccctaaaggccacttcctatctgatttttcccagcaaatgaggcaggcaattctaagatcttccacaaaacatctagccatctaaaatggagagatgaatcattctacctatacaaacaagctagctattagagggtggttggggtatgctactcataagatttcagggtgtcttccaactgaaatctcaatgttctcagtacgaaaaacctgaaatcacatgcctatgtaaggaaagtgctattcacccagtaaacccaaaaaaagcaaatggataatgctggccattttgcctttctgacatttccttgggaatctgcaagaacctcccctttcccttcccccaataagaccatttaagagtgtgttaaacaactacagaatactaaataaaaagtttggccaaaaccaaccatgaagctgcaaaggtgcttgctcttactctttcaaatttttgcaactctaatgtctcacttttaaaggaacagcttgattgcaaaggagaaaatagataagcaatgaagttatctccaacttcctaaaggcttatgacttctaaaaagtgaatctatcagcattccacatcagatttaaagcatcaaatgcctgtgaaacagcaaagatggttgaagattttgctcattatggtcgtggagtgctgattgattcacagtagataaagctggcagtaagaaatgctaagagttgttgaagcagaaggcggctgattgtcaataagtcactacagttgcataagcagtgctgtcagaattggtttggtgcaggcaatagattttgccttcaggggttcctgtggatctgaggaaggcatcagtgttgattaacactcataactagggagtgactggtagttacttaaagcaagtaattgaccaaatggaaaaggggaagtaattaaggaaattggtaagtggaggtagtcaggaagttcttgtggttcttcacatagattttacagctttggctttgcattttgtttagctaaagtcatggggacaactcttcaatttagaacttaagatgaattataaaaatgatggatataagtggtagctctatctggtgaagtgtcttgtcagtaagtgaaacatttttttgtggtggcttatccacaaacagtttagttgtagaataaaacttatgagtgacatctggaaagtaacaaccatgctaagatagcaaacacactggaaacaattgggccacttggctttcttttgctgtattgttttataagcctgctttacctcccagtcttggaaacaagttttagttttttattggtttggagactagagccaatagtataatgttctcaaaggaaacagacttgagttgttggattagaggaactaacccaacttatatgattttttttttgtttttgtcgtgtagttatggcactgtcttatttggaacatttgcaactagggataatacaacatttttaactctcatttgacaacctactactaatcacagaccacaagggtaatgaccaaatttatgtggtttttgcactccatagttgtcttagcccaatctttctatactcttacgattacttgggttaacgcttctgtgaggaccttctggctcttgagataccctaaatatttaagatatttagatatcttgaagatagtataggatatagagattgtaccaaataggaatataaggagtatgttaaaatgaccagatacctgtttgatagtttactgacctagcagatgtgtggaaaaggaatcagatcttgattcttctgggtttatactggttgtaaaacagaatgatattagaaaatgttttccttgtttaagtggtagttgaacatagaacttgggtattatagatcacttttcactttttggaatgttttgtattgaaacttaatacaactttaacatggca

SEQ ID NO: 48963 - DNA, 1085 bp, Homo sapiens
tacttttgtgtaaacactgaaaaatctctggtcatctccgagaattaacttgcaactgttttctatagtgctgtcgtcttgggcaatgggcaattacatgactttgtgtttgcttcctttgcagtcttttttttttccccccatttcttcctaataggaaaaaaaaaacaaaaaaaggtcacccatgtctggtctcattcctgttgcagtgaaacttcgagttccacagactttgcatgctggcttctctaaccctgtgtgctgcgtgtgcctgtttctcatctcttattctttttaaaattcatgcttaactactgtgggagaataactgtaaacagctttaattaaatcatacttataaaaaactattttcttatattccactctatgcttttggtattgttgatctttacaaattaaatggtctttgataatggatctattttgtattgccttattaagaccaaatacttcttgtcatccattctttatcctcttctttcatggaattgttatcgttaattaaaacttttttaaacattggcttgtttcaatcatactgtaaattttggttgtagtcagctttgagtgcaatgagatgtataattctgttatcattacctgttgagtttgaaactcagttgggaatatttaatataatagaatgtaagtgacatttctgaaaatgctttctttcagggtgaaagctcttatgtttagcatcaatgtgtatggctctgttaaatgcagccatttctgagacgagattcttttatatatatatacatataaagtactattggcttttaggagtttcttttatatacatttatgcaatacttgaagaccaatcagaccattaatggacacttagtgtaactttttataaagaaaataatgctaaagtaagaccaaaactgatgtcatcactgaaattaacaattttcaatatgttcatattttaattcacaatggaaaaatgtgttccaaaactggaaactcatagtactcgtgtaaactgtggaagatttcaaatgtgatgttattttgacaatgttttaaattttagagtcacattttattct

SEQ ID NO: 48964 - DNA, 2298 bp, Homo sapiens
  misc_feature (1)...(2298): n = a,t,c or g
ccccaaantttggcctaaaacaatccngaaacccccaagagttacccaaaaaagttgcctatagaaanccactgaacatcaatccatagtggaatttttggtaataacaataaaacaaaaatatattggaaaccccgggttgtcactgttaaaacaattcccaccagaaaaccataatgtagggcactattacagaattcattgcccaagaagcttttcatacagcagggacaataccctggcacaagtgcatttctggcaacaacaagataaaactatttaatgttgagaataaatggaaatggaggagcaggtcatggttactgagtaacctggtgttagctcaaacacaataagctcagacataaacactaccttttatttatttgtcaactcataattagttttaaattcaatagtcattaattcagcaaatcccattcaagtaaaagttaccaaagataaagcaatcaatcacactgggccaaatatacaatatgtttcctttctggaagatgacaaagtcccaaagcaaatcccttcaatgagcattgcaagcattcctcaactggataggatcccactcactacccaagtgttcagcaaaatgcatcaaaactgaagggtctttctttctgaaatgacttgggcacatcttactgaactacataatcaatacaagtacatgtacacaggcagacactttgaacattacctactcaatcactttgcttttattaaggagctgggaaggaagaaggcttacaaactgatcaccaggacaaagcccatgccttgtgagtaaagaaaggcacaactcagatttaggcaaatttcttaatactatgatacttacttgccgccataactccaaggaaatggaaagtctctcggagaaacactgaagaaatgcattccccatcccatatggcttcaatgccttaagcggttaatatattctaatattagattagacccgcaaataaaagacagggcagggctgagaatatagtcttagtagtcaggtatcctatacattcacgcttctaggtaacacaagctgggaaagtcttgttttccagctaaatgcattatttaaaagttcattgaagatcaagacttatagcagaatttggtttttctttcaggaaatattactaaaataactatgtgtatgttcatttctttaaaaattttacacatgcttaaaaggcatggcctccagccactgagatgtacagttaaagacatatttgatccaagagagaagtacatgtaaaaggtatcctctagtgaagaccaattgataacaaagcaaagcttgtcacattaactttggtttcacttgctgtaatgtcccaagcaggggcagccactcttaggccccttgttggtttcctgactgtactcttaaaaataaagctgaaaaagagcaatacaccaccatccttaaagaaaacataaagattattaagaaattaaaatccatgtataccttccacctaactattaagcatccccacaagctctgttcccatgtatgaggtggcagaatttacagttgctaataccagaataccagaatggcttaaccttgaaccacggatttatcacagatacttattaacaaatgacatgacctcattattcttgctaaagaaaatcttcttttataaagccactttgaatgcattcctcacaaaacctggttgaacgacctaggaaggtggtaaacccctccacctgaaggctttgggataactgatacattaatggatatagaatacaatttgagaagataagagcaagttttttggtcccctgatttagtataagttcagcagcaacttggttattaaaacattcaaaggtattaaaccattacatcattggtaagatgcatacttacaaaaagcatcatttccattgcatgataagacagacataataaaatgcaaatctttccggtctttgcctgattggcagtgaagatgacactttcacaccacagtgttttatcactcagcagtcatagtttacattttttttcaagggaggaagctatacttaaaagctttcgactgaacttttagaaaaattggttgatcaaaaagagaccgtcaaatgaaacattagggcaaagaaccaaatcactcccagaggcctatgtgaacaagaccggtcaagcgatttcaataatagtatgctattacagggtataggcttgggctggagcatgaagtatagatattttgtgttcaaatacaggttaagaatgtgcaagtaggtctcttccac

SEQ ID NO: 48965 - DNA, 951 bp, Homo sapiens; identical to SEQ ID NO: 9290

SEQ ID NO: 48966 - DNA, 6725 bp, Homo sapiens
agatattttttttttttttttttttttaacacttcaaatcagctttattatgggtgacagatttagggttcttaaatagcgatagcagtggctagaagaagcgcttcatccccacagtggagttctttgttgtgaggggagggaatgcaaggagtcatcagcgggggtggcccttggccacttttcagcacctacacagtgcctggccatagtaggtcccaataaatatttgtcagccatttgtgggcagtggggacaatggatcataggggcaccctttggaaaccatatataggaaagaacatcttacatcccatatgcctgcaattcttggttccaacttaggggtatttccactccactctgccctcctgtggcctgtcttattttctggaggaggactgggcctgcctcatcctagcatcttaaaccctctttccagagctgcagcttctccacgtggaagatgtctgctctggtggggcatacattcattttaggagagaaactaaactcacaacccttcattttgggggatccatcttaaaaccaggaaggccttccagcctgccttttaatgggtaatcatttttggaattcctccctaccatgtattcttctattttttaccctctcctccttggtttatgggcatttcttggagggctgggggaccacagtcaagttgaggtgatccccgctccggggacggagtaaggcaaggaggcgggatcggaatgttggaggcagaaccgcaagctcccagggccacccaatcacagggccagtcatccgttgagaccctgcctccgcgcccggcagccactccgtatcttcctcgcattatcgcagggttgggccgaggcccgcgcatgcctgcagaaaacctacggccgcgaggggtcgggcctcctcctgctcctactcccgagaggctccggcaatgcgaataggccccgcccccccgcgcagccaagtctacggaccaagtccgagcctgcagacaagctccgcccccacgagggcctgctccggctgacagcgtccggcagcgcggcagagccccgcccccatgcgggggcacgcttactgacaccgtccgtgcgcgcgggaagggcccagcctcgcggcccggcgtggctttgtgacgggcctctggtggcccagccccttccagcagcgtcagcagatcccagtggttacgttggtgagcgacgtccgccggcgctagcccagcctggtcccgcagctctcgggctgcccccagccccagcagtagctgggctacttccaccgctccttcccgcgccgccaggaatagcggcgtctgctccctgttgtcctgggcatctttatcggctccggcctggagaagcgagcgggcggctcgggcgttgttcacggcagcagcccagtgcagcgcagttttcccccatttatctctggcccccacgtctgcttgggctgcaatcagttcttcaaccaggtcttccaccgccagcctggcagccagcatcaagggtgtggtcccgtcctctgtgcgagcgtccactgcagtttgtctgctacggagcagaagctggcagacctcccgagcatcagcagccacagcagcatgaaggggtgtgcgccctgcccggtctggctggttggggttggctccagcctcaaggaggcggcgggcagcggttggccgggagaatcgggcagccaggtgcaggggggtctccccagtgcccacggtgtgagcctggggacaggcccctccatccagcagaggttcccagggctcaggacatcccaaccatgccccttggaaggtcccggactgtacttccccacagcaaactgctgacatcaggggtgtcaccccatcaggtccacgggtgtccaggtcaggggcttccatctcagattcctggggaggagttagcatggctgcctgagggagcgccccacagccaccactcagagaccagagctggcacgtggagggtgggcctgtttcttcagcctggcccacctcctctccctcctcagggcctgagcacatcacaactccatcctcatcaacttctgcctttggcttcagtgccttgagaccaatgctgtcctcgcctagtgggggccggcgtcggtggggagctgactgagtccgaggccgtcgagtgaaaccagggggcagccagagagctccatgctctcggcgtcgacgccggatgagctggaggacgagaagagcccctagggccaggagaatcaccccggccactggggagcacagcacaggccagggaagctggttggcagggggttcggtccccttcatgagggtggacaaccagcagtggtccaggcagcaggggctccagggctcccactgcagccatcgcagcaaggaagcggagtagaagcccagggtcccagggacagcgggatgccgggtggtcagggccacagcgggacaaatccacacccatgaccaccacaaacccagcactgagggagtcggtctccttgcccaggggctgcgtttgaggggctgctctctcctgataggtggggtcccgagttcctcctagcttttcttcagcccgggccccaggataggggtacaccatgtccctgccatcacgatccttccttacccagagtcctaccctcagagtcagggacagcacccgggccagggcaaacagctgctggtctagggctggggggctcagtaccaccagcagggccagggagggcccccactctgggtccccatcttcaggcctgcagtcacctccatcccagccacactctgcagtgttgcagcctttctcacagtgcccgttgtggaagtgatcatggcagtactggtcataggctggagtgcaggctggaggggtctcacagtcgtagccatcaaacagacactcttcagagtcacactgtgggtggcactgcccgtcccggaagagaagccagcaccgagagtgggaggggcagcccttccaggggtctgggactcccagagagcagtcccctccatcccagtttcctcccgggccactgcagccagcatcgcaggccccatctccacttctgccctcacaccccttggctccgggtttctgacaccggggccctggagagctgtgagggcaggagcatcgaaagcctgggccccccaagcccgtggtctctgagcagctgccattgtataggcatggggagggagggccacagcctttaggagctggtggggtcaggcagtcaggacccccatagccactgaggcaggcacagcgtggtgggaagcctggcttaggggagggcagacacaggcctccgtggtggcagtgatggaagccgcaggaaggggccctgtggctgcaggtggggccttcaaaacccttggggcagtggcagatgaaacccaggggtgatcctgctgtggcctcacaggtccctccatgaaagcagggttggctgtggcaggggtctatctccacctcacaccactggcctgtgtgtccaggcagacactggcagtagaaggcattggccagagagtggcaggctgcagtgcctgtggggtggcagggctggtccagacactcgtccacgtctccctcacagcgtagccccacaaagcctggagggcaggcacagtggaagcctccaggtttgggagtacaggttccatggttgtgacagggttgggactgacaagcatcgagttcctttgagcagttctgtccatcgtagcctggggcacactggcagagatacccactgggctgggccatgcaggtggccccgttctggcaaggcctggactcacatgggttcacgtgatcctggcacaggctgccttggaatccaggggggcagtggcagaaataggaggggccgctgtcgacacagaggcctccattgtggcaaagggaagagacgtctatgccttggctcagtgcagccttctggcaggaggacagtggaaggttgcagagaggcccggtccatccctggaggcacaagcagtggaaggagggcccagtctggaggcagtgggaattgcgtgggcagggcttctgggcacataagtccatcagagtctggcagctgcctccggtgtagccagtggggcagaggcagcggggaccctgagggctgtcctggcaggttgccctattcctacaggggctgtctgcacagctggggcggagctttccctcacagcgcgggccctggaagcccatggcacagaggcaggagaaggtgccaggcctgttcacacaggtacccccattgaagcacggggcagacacacagtagtcagtgctggtttggcactggggccctgtgtggcttggagggcaggtgcagtagtagcctccagggctagggttgcaggagccgccattgagacatggccctgagtgacaagctgtcatctcctcactacaggtgggtcctgtgtagcctgtagggcaggtgcagttgtagccagagggctgggggtagcaggtccccccatgggcacagggtgcagagatgcagccccctagctctgcctcacactctggccccgtccaacccacgtcacacacacatgaggatctctggcagtgcccgtggtggcaggtgcagttgtcctcaggtggggcacagccagggcttccatcaggacagaggcagttggccttgtctttctggtccttacatatctgcttgggctggcacaggttgggagcacacaggggaacctcacagagctggcctgtgaaaccagaggggcagaggcaaaagaaggctcctggaagatcaaggcagctggctccaacgggacatgggtcactcaggcactcatccacctctgtttgacagcgtggcccttcaaagcctgggagacacttgcagtggaaggctccaggctggtcctggcactgcccaccattggcacagggagagcttctgcactcatcgatatcctcctcacatcgggtgccggagaatccaggcaggcagatgcactggaagccgttgagcaggtcatggcaatccgcgtggttcaggcagggagctgaggcacactcgttggtctccacctcacagagctgcccttctaagcctggcgggcagaggcagtggaaggtggcaagtaggtccagacaggtgcttcctgggtggcagggctgggagaggcactcattgtgatcagcctcacaacgggagcctgtgtagccaggtggacagaggcagttgaaggagccaggagtgttgaggcaggaaccgccatgttcacagggacttgggccttgctgggcccatcagacactcgtcccaggtccctggtggcaggtgggccccgaatagccaggctgacacaggcagagtgtggagcctgtgagggggttggtgctgcattgggcatccccatggcacggctggctcagacacatgtcttccaagtggcacaggagtcctgtgcgtccaggtgggcagaggcaggagaaagagcccacccggtcaatgcaggtggatcccggggcacaggtggcagcaatacagtcatccaggttctcctcacagcttgtgccgccccagccactcacacacacgcagtgaaagctaccagcagagttctggcaggtgcccccgtttctgcagtgagggggaccctgggtctcacactcatccacatcttcggagcagtcccagcctgtccaggtttctgggcagaggcaggtgtaggtgtccagcccatcctggcaagtgcccccattctgacactggtggctgacacagttgtctggattcacctcacagtctgggcctatgaaacctgggggacagaggcagaggtgaaaggtggagtctttctctggcatcagctggcaggtgcccccattcgaacagcccctaggagggcagggtcctgcccgcagctcacaacgtggaccctcctgccccacagggcagaggcactggaaggagcccagggtgttatggcaggaggtgcctttggggcagggtcctgggtcctggaagcactcgttgacatcacgttcacaggcatggccctcgaagcccggtgggcagtggcactggatctgggggtatgtggccagacacacccctccattaacacatgggttggctgaacagaagtcccgaagctggcactgctcacctgtccatccaggcatgcaggagcactgtgggcggcccgaggcctggatgtggcagcggccccttttggaacagaaggagggaggacaagggtcttcaagcttggcctggcatctctcaccagtgaagccagggaggcaagtgcacaagaagctgggtgtcaatggagagggagagctggggagccctaggggagcgggaagcagggcttggcagctgcctccattttggcagagctgggcgttctggcaggggtcaggaaactggcacgtctcacccaggaagccaggggcacactggcaggtcccttgtcccagagacaggctcaggcaggtgcctccattggcacagggttctgggaaactcccacacagcagccctctgggtctgaccactgagacacatagcagcagcagcagcagcagcagcagcagcagtgaagggggctgcattccacagccccttctccaagccccggtccctgtccctcttcaggcagggaccctcagagctctcactggggcagggtcgacgcggccggc

SEQ ID NO: 48967 - DNA, 1070 bp, Homo sapiens
tttaaccttgaatttattttttattgaaacacagtacagaaaacaccaaacgtcactgacagcagtgagctcatagctgtaatggagttggccccagatgccaaaccacctcgctgaggtgtgacttcctctggagggtgacatggcaaggaaagggaaggtgttctctgtcaaattcagagaccatgtgcacctccaacaaaatcacactccctacaagttcagtgtgcccccagtggcacccgtggcacatcttgacaatgggaagggttaacggaagtagtggggacatccaacccaatggcacataccaggaatgggaatgtaggctgctgagtcttcttggagaagaagagagagctatgcccacagttcagcttgtgggccctgagacaagggccacagtgtgcggagaggattccaaaggaggaggaggatggtgacatggacagtgactctggggctgacgcgcacgatgtggcaaaaatggagcagctgggtggaggcaagatgaggggctgaggagtggaaagacaccagaatggggcagggagagcaattccactcagagtggagcagggaacagccagcatattagggccaagaccccggtcagccagcttcaaccccttcacacgcaggatgagctcatggaggttgatctgccataagttgaaaggccctcgcctgaaaagagatctgggtcccttctgaaagaatgaaacaggtattccttcttcttgtgcctccatagcgctctgatgcagcaacgtgacatgttgagaaacggagctgagctggcgcgggtgcccagggcggcctcaatgccacgcagcaggtcgttggtcttcaagatgagcagcatctggcgcggcacgtggttgaggagatggctgatctgggggaggtagttggccgcgttgttgcgaatctctaagtcctcagtggcagtgacgggagcttggctgatgcctctgttgaccgagtcccacgatcgcgccgtcagcatgcaggcaaacaaggggtagagatccccggctcccagtcgctggctgtactccttcactctc

SEQ ID NO: 48968 - DNA, 474 bp, Homo sapiens
cggacgcgtggggcaggcctgagccaccgcgcccggccccttatgggttcttctacactgctgggatctctgttttaagtgctcagcttcatgattgattgctgggcttccattttcccatccagttctggagttcgtagagagtgaagatggtagacttgaacagataaataaacttaacgatcttgtaagagttgtctagctacttaaaaccctcagaagtaagagcttagtctcacgagttgtaagagtgggatttggagcttggtggtggagactgacttcagctgagagatgcacaacagtcatggttttcttaagcctcttatgaaaccatgaatgagagatgaagctaaagaatagaatccagagatcacaaactcatctagagtacttccacaaaatttacaaagatgtggggaacttttatggggttagggtatatttttgttttgttgttgtttaatatcccac

SEQ ID NO: 48969 - DNA, 485 bp, Homo sapiens
ttccttttaaatgcttcttttatttcattggttgtacattgggtgagtgaactgaatattacaaccaaaacatagtattgatacaaattagactcctgtttacactgtaaggtaatgaatgagggaattctttaagtgttacagaaagatttagtagaaatgttaccagtggtatggctgaaagaatatttcggtgaagtgctgttatatcctgaaaaccaagagtgaaatgtagttcccatacaagtggagagttagtctcttaactacagtatttgttgaactgatatcttcatgtcttggatattggtgatttttgttttttaattaaacaaagcatttaagatttattccatcatagtccagaccttcctggaataataaaccaaaccttttggcaaataatatttatacagaaaaatagttttagatcctctcaaatcccagaattattctataaaattacattataaataaataaaaag

SEQ ID NO: 48970 - DNA, 735 bp, Homo sapiens; identical to SEQ ID NO: 9303

SEQ ID NO: 48971 - DNA, 3272 bp, Homo sapiens
gcggacgcgtgggttcttgcccgtgttgtgtgtgtgtgtgagtgagagagcgagtgagtgagtgagtgagtgtgtgtgtgggggggactcggcttgttgttgtcggtgacttccccctccccttcaccccttcccctccccgccgccgctgcagtggccgctccctgggccgtaggaaatgagcgataacgatgacatcgaggtggagagcgacgaaggagcaaccgaggtttcaatctgcggctgacaaacgggctcatcataatgcactggaacgaaaacgtagggaccacatcaaagacagctttcacagtttgcgggactcagtcccatcactccaaggagagaaggcatcccgggcccaaatcctagacaaagccacagaatatatccagtatatgcgaaggaaaaaccacacacaccagcaagatattgacgacctcaagcggcagaatgctcttctggagcagcaaggtgagcacccgagctcgtggggcagctggccctgctgtgctccagccaggtcaggctttggcacctgggcctgcagagtcagagccagtcatggagtatgtgctcagtagcaggcttggtcctgcttcttggggcctgagtaactgagtgttagagccgtcctgaggaaggacctgaggcgccagtgaggagacagtggaagctaggaagttggacatctggagacttgtatcttttctggcctgacctctccccttcttggggctcaggtgctctgcctgcagtagggatcacacctggcatcaggtgtctgaaaagagctttgaggtccttggagtggaatgtgctgtgtaagtaccagagactccaggtgttcagggacagtgagccctccccattgtcaatggtagtccaatcagggcagcctatggctaggcccatgctgttctcaatgctcacacccgccttttcctacaaccacaggggaaagcgagagctgatcaagttctttgttcctggggaattcacttctcttccttcctcatggaagatgcaagtaaaaggaaatgcaagtaaccacctgggttagaaaacctcaaataaaataaaataaaataaattaaatgggttgaccttccaggctcaagctgagctgaaccaagggatgggcagtgggtggtgtcagtgggttggttactgggccaggcagcctgcatgtaggggctatttgaaaagcccaggtattttatgtgtattggtgacttgcttccaagtgtccagcttgtcattccaagtggatcttgtacacgagagctaagccaaaactgttctttggctgatacgtcttatgtcatcctttcctgctgttgtgtggcctcacaccttgtggagcctcatgctcctgggccagcttctcctctgttattgcactgctgaatccacaggagctcacgctccagtctctccacggggcttccacggcaggacggtgacatcacaagccttctcttcagagttgggtgggattgcagagtgtctgctggctcccaggtccagctgggaaaggcgggagggaaatgaagtgtgtgagtgaacagccacccgaagggagctacttctgagcatcttgagcctcgggggccaacaagcaagcccttaggaagaacaggctggaccctgagtctgagactcggttactccccaagtctccagaaggcagtaacacactcccttggttgccttttagtccgtgcactggagaaggcgaggtcaagtgcccaactgcagaccaactacccctcctcagacaacagcctctacaccaacgccaagggcagcaccatttctgccttcgatgggggctcggactccagctcggagtctgagcctgaagagccccaaagcaggaagaagctccggatggaggccagctaagccactcggggcaggccagcaataaaaactgtctgtctccatcgtctcatcctcctttcagttcgttggtagagccctcagaaccatttaagagactctttatttttctctttctcccttttttttttaaatttttatttttacgtagaagctcttggacaacagctctcgttctccttccccatttccactgtatattttttaatgtattcccttcagggattccctgtccccaacaggaatttttaaaccaaaacaccccaacttggcagctttttctgtggaggacagacggccggccggacctctgagcacatagtgtcctgcccaccctaccagctcctccagccctgccgggcacatgcccgggggacgcctgccctgcccaggtggcctcctggcccgccctcacctctgatagactttgtgaatctgaactgctctactttgagaagatgaccggtttggagtaatcagaatgaaccctcctcctttttaagggttttttttttttcctttttctaaaaagcctatgtatcgctcctattgaaagaccagatccttagagaagtttgtggtataaaaaggaagtggggacagattcgcagcacagagtcgctggcatgtttcactctgcttctctcagccagctgtttaagcctgcggcgccacgtcacggagggccgtgtgacactctcgtggtatgtatgggagatggcagcagtgaagcagcagccaccagggagtggccatttggggttgggaccagggagggtgttttgggtggcatagaggttttgtattgagggccagtgatgatgttttgatatttatttcctgctacttaaatttgaatctgagtgaattgtacctatttctgatgatgtcggtcttgcaaagcgacagattcataaagtaatgatgaaatctttctttcttcccgtgtgtatttctaagaaatagagccaactgattttgtatgtaaataccaagagcaatttacctggtactaaaccacccgcaccccagtgcggacccttcccagccctcatcccacttcctttcctactgtcctggaacctgtctccattgtgtgatccagccctggttctggctgtggtcagcagatgccagtgaagggttttgtgtgtttaggcctcatttctttgtctttttcctactccgttcctggcatttgctgatttctagtgtatactctgtagtctcagttcgtgtttgattccattccatggaaataaaaagtatgttgtacatactgccgaagaattgtcttgcaagttaaggcttccccctttactataagactataaataaaaacttattttatccttaaaaaagaattc

SEQ ID NO: 48972 - DNA, 408 bp, Homo sapiens
ggcatagcctctgggaatttctttttcaggctgatgaaatctttgtacccctaggtatggctctgtgggggcagcatggaggtccttccttgctcacgggtggcccacattgagcggaagaagaagccatataatagcaacattggcttctacaccaagaggaatgctcttcgcgttgctgaggtctggatggacgattacaagtctcatgtgtacatagcgtggaacctgccgctggagaatccgggaattgacatcggtgatgtctccgaaagaagagcattaaggaaaagtttaaagtgtaagaatttccagtggtacctggaccatgtttacccagaaatgagaagatacaataataccgttgcttacggggagcttcgcaacaacaaggcaaaagacgtctgg

SEQ ID NO: 48973 - DNA, 1334 bp, Homo sapiens
cgcagctgtgaggcgaggtcgggtcccgtagcggcgcgcagcctccttgggggactcggggtcctgcagaagaatagaaggaaggtgataggatgtgatgatagaatttgtgatagccaagcaacaacttttcctaattcggcatgttaaaaaataagggtcactcatctaagaaagataacttggcagtcaatgcagttgctttacaagatcacattttacatgatcttcaacttcgaaatctttcagttgcagatcattctaagacacaagtacaaaagaaagagaacaaatctctaaaaagagatacaaaggcaataatagatactggacttaaaaaaactacacagtgccccaaactagaagactcagaaaaagaatatgttcttgatcccaaaccgccgccgttgactttggcacagaagttgggcctcattgggcctccaccacctccactgtcatcagatgaatgggagaaggtgaaacagcgctctctcctgcaaggggactccgtgcaaccatgccccatctgtaaagaagaattcgagcttcgtcctcaggtgctgctttcatgctcccatgtgttccacaaagcatgtcttcaggcttttgaaaagttcacaaataagaaaacctgtcctctctgtagaaagaaccagtatcaaacccgagtgatacacgatggggcccgcctgttcagaatcaagtgtgtgaccaggtgaggacgccaggcccgtttggcgctaagcagacacagatcaggctatgacaactaacttgttttttgaatagtgggattttatctctcttcttggccaccataatttccccagggccttgtacagcacagggcttataacaactactgaagtattggttgacatagagtcatcataaattaagtcattttcaaatatctgtgttttagaatccaagcctactggagaggatgtgttgttagaaagtggtacagaaaacctgaggaaaacagtacctcccacagatgccaagttaagaaaaaaattctttgaaaaaaaggtaggtaaagatcattatgttctccagatatggtctccgtgcgggtggttcacttggggtcaggaaggctaacagaggtggtaaaactttgagacttacttcactttgagggctttttaaaaatgggtgagatgctgctaaaaatcctgtttaactttagttggctttccaacctagatgttcaaatacttctagactttcttttctagttaaatcataaaattaggttaaatcaaagcaacttctgtttggccattttgtgctaattgtttaaataaacttatctcttcagacac

SEQ ID NO: 48974 - DNA, 1146 bp, Homo sapiens
atgattgattttttccaaagatgacaagctgtgttgaaatacattttttcttttgaccaattgacagaatctaataagctttaataatcttccccttttatgtgaaaagttttgagaactgtgaaatgtttaggaacaaactgttgaaatccattggaagggaaaaaagaaagtggtaccagtgttaccagctcaactaaaacctgcaattctgcatttcaactcttcacttcctcagcctacaaatagctcattagatgacattcacgcatgctgggtataggcaaggaaagtaattttcaaagtacatttgcagttctctttttcagagatgattctatgatagtgcctctgaaagttgatgcagcatttttgcctttccaaaaagtatttatcctcactgctttttgcagtacttgtattttcacagatggattatctggggtaattttcttcaaagggagtttgttatacacagtgaaaatgtattatagagtagaatagtaaagctctaggggtttcagaaagctttgatgaacagatgacaaacatctgaaaccccctccgcactgttacccagtgtgtatataatgacttgttatagctcagtgtgcccttgaatccatacagtttcttaaaagacaataaaatcttattaataaagttaatgtaacttctaagttctaggaaaatgctgattctgtctgccccattcaattgggggctactaattgatttgttgcttggatttcctgagaatttctctatttgtaggaggggttttttctttttacggtctgttgatgacaattactttatgggtgtgatgcaccgatggtagccaaggaatctgttggggaagttcggaaagaaaccttttctttcttttattcagtttaaagtaaactttatcctggatgtttagaatcaacattaagagttatattatggtgttcagagattaagctgacttggatacaatattttcttttgaaaatgaattttctttttcatttgtgatttttaaaaaatgttgcaccagttatgcttcatgcatcgttacatcttcatcaggttaatgtaatgtctagttcctttgcaataaatatattgctgcagctttaaaaaaaaaaaaaaaaaaaaaaa

SEQ ID NO: 48975 - DNA, 2038 bp, Homo sapiens
  misc_feature (1)...(2038): n = a,t,c or g
accgttatgacatgattacgaatttaatacgactcactatagggaatttggccctcgaggccaagaattcggcacgagttttcctcctcaatttgaagttcaagatgtttttctcttccagggagattttttcgactgacatctttaacttaccttccaatcatattactaacgtagccttcttcctagattttttaattgtttgatcatgagcgaacacttctactctctgtgatagatttgcaaacagaggaaataacgcatcctcgtgtccctcttcttggtgttccacaggccatgtgtgccctagccctcgttcatgcaaggtctgtgtagggaaggtggacttcagctcagcaacagcatcccttcccacagggatcaggtgggtggcttgagataccccttccatggggcaccacccattcagtgagacggggaagccctgggtgggagggagaacacctccacatgtcttctactctctccataggatggaatgagtgtcccagtcccaggagtatccatttcccactgtgtagcccagtactctggtctcactgtctctgctgaatcctgtctcactgtgcatattattgtggtttgtatcagtcagtaaaccaatgtgagtcttcatctcttgcattcttaggttcatagttttgtgtgtctcctgtaatgacccttctctttccctttccaactcctgaaagattgccactatttcctctggaactttgtttcgttaccagcaaaatcctcgacatccatacccgtttcctggctttccctctcctttcctctgaatggtagtcttttatattcagctgtccacttgacatcaaaatagacattttgaactcaatttgcctaaaacttacccacaaatttctccccaagtctctccctaactgcaacaacaaaaaccacaggcttctccctgtcactggatggcaactccattcttttgattgcttaagccaggcatccgattgagtactttcttgatttctccagcccacatccagtccatcggcaagccctgttggtcctaccttcagaatatgtccggggttcagttgtcctggccaccctgctgctgtaaccatggtcagaactccatcctgcccctctggattatgactttcgtttcctcacagtggtcctgcttgggctctaggcccttccactcccattctctctacagcagctgggctgattcctttagcacccaaggatatgttggcatcacagtgacttagataccatcacaaagacctcccattcaacttagagtgaaagtcagaatcctcacagtgaatccccaggccctagaggatgtgaacccccaggccctagaggatctgaacccccatccctcctctgattatctctcccacccccacttccctttgcattctgctccagctgccctggncttcatggctgggtttccaccaaagnaggcacttcccatcacagggccatttccccgcctgtggcttctgcttgacattcccttttccctgatatccccttgactcattattccctttcttccttaactcttctgagatccagcttctcagtgataccacacagccctactccccccagagcccatctagagctcacctttccagtcgcccttgccaggctcagtggaggctctttgttccccatacagtacgtgtcgtcgtactatattgttaggcttatttaatttatgtatgttttgcctttttgtgctaaatgtaaacaccacaaggggaggtatctttgtctgttgacaatgatacattcaatgtttctcaagcacccccaatgctggtttgtatgtggttatcattcaatctgtatttgttgaatgaataaatgattgactatgtgggagaggcaaaattgatgggacctggaaaatgttttggcaaaatgtaatataggtctactggatacaatatttattattattggggccaataatgtttaatggccaggtggctaaattagtaaaattttggggatatagagaaaaatt

SEQ ID NO: 48976 - DNA, 614 bp, Homo sapiens
tttaagtaagaaccaaagttatgtgacatgaaaggactctagaaaggtaaaaggtaacaattctcctctcattggtcctggtgctttctggtccagagaaggaaatacttggaagccatgaggattgccttttaagcaaataaaaagatcaggacttaagcacctgcaataacaacactataaacaaaaaataaaatgttggaggtaagaaaggacacctcacataaaggcatgtcaaaacaagggatgggagacattgccaatcatagactctactatgcctcatcatttccttctacctaactcccaatgaaaatgactgctggagtaaggcactgttaataataggaatatgttatatccttcaggtgcgtgaaaaaccactttcatagacactgtaaggaagcaacttagaaatttaatagcaagagaaatatttcaacacttctctgactgtggaaggagttattttgaaggtattgagctccctctgtcagatcctttgtgaattgcttgcaagcagatgtgttaccttctttgctaaaggttcccttcagattactacatcattaacagaaacctgtggaagctctaaaattacactgttataacaa

SEQ ID NO: 48977 - DNA, 1493 bp, Homo sapiens
  misc_feature (1)...(1493): n = a,t,c or g
tttttttttttttttttacattaaaattgagaaatttatttttttccatgaaatagtaagcagaattaaagaaatatacagcttaaaacagttgaaatgaccttagaattttaatgacaattacacatttatggccaaaggaaaaaaatgaatagtttttaataatgaattcactttaaaatgtttgcttaataattcatctgaaattacatggatacaaggataactgggatctgggcaccttgtaaaataaaataatgccactttatccttctcaaaaaaattgttatcccagtataacagtggtgcggttctgctccccactcacagtagccaccgttctaccatttacaaacgtgtcaagtcagtcttcctgatttgtaaggatgcctattttgggttccacttaaaaatatttccagtaggcggtcagagaaaataacttatttagccccactcagagtagaggatcagtatgtcaacatattggtcggtcatggctttcttctcgtgatcactgaggtcaaatttcctcatataattataaatgttaaaagataaaattacatcttcacagcagccaaaaatttgtatattttttatgtatttacaatattgtacatatttacacgaccacatcaaatactgaattgtagaaacaagtgactatctataaaggcattcatttaatgcccaagcgttattttcttgtgcaaacggaaacttttcttaaacttctattagaaagctaaagacagtcaacgttgcgaaggccaccatccatggttaaagagccaaacctttctaaaatgtggttattttcagcaagttctttaaccaccccttccatctcttcctttaatttcttcataccaagagtcatttctactaatgtgttagaacttggataaaattggggtccatggtaatgtttggattcccactggaagctgtaaacatttttcctgaggcagagtttcttgtaactcattagtatattcttgatattttgatacttcttcttcaatatcaaaacactgattagtcagcgataataactgtttcctaagatgaagcatctttcttatccattcttctgacttattcaaaaatgcctcatactttttaacacattcatctgtaaagtgcgtcatagcttttgtggcatggtaatacagtttttgcttatcaaatttgtggatttgttcttcattataagctaatctacgttctgctttgtcttttttgaactgatagtaaatctctgtcatgcaatttaacaggacttgtagtttttctacatttctgtctttcggatgagtgccttcttgatgtgcccatgcgtctgccagtgatccacctggagataatctgctgtcgatatcctgaagactggtttctattgttccctgagaactggaaagtctcaacaatttggtgtgtatgtctgaaatttcacctaactctgccgcttccaggtanatcttcatcaa

SEQ ID NO: 48978 - DNA, 1858 bp, Homo sapiens
ggttggatctaactgcttaataaacacaagtattagatatttcttttggaccaggtatgctgtgaaaaaagtactgaggcactaaatagtgtcatgagctgagaaagtttgagaatatctgtgctataggcaagaaaaatacaaaacatcatttagtttttcacctagaaattttctaaataaatagtcatacaaaaaagggaaaatatatacaaacgtacatacaaagtttggatttttattgaaatcttgttaggtatcaaacaaattctgctttcttcagataaaaatattctctcagatgtctccagataactgctaagtctaaattggtccttcaatgtcttatttttattgtcctcgtgaaatgttcatatacagttaagatgttcccaaaaggatttttatcgtgtaaaggagcgtacatgacgacctctaccactgcctccactaacaaactttcctcttgagcctccactgccgctatttgcactagcccaggaaggtccaagtcccccacgacctctagaagcacggtcccgaggacttgggcggtaacctgtagaactaaggggtcgtaatggtggaagagggcctctgttaaaattgctctggcctccacgactttcattgtaatttcctcgaggagtattctgagcactccaactggagcctcttgttccttcccgacgactgtagtttccttttgaagcaggtggtgtgaaaaacctattctgactgtggaaagcaccccgtcctcctctattgcctgaaaacccaccacgggaagaaatcttctgtgatactttgagtggccgttttggtggaggtattccatcttgaggaaccacttctttactttcagcagcaacaaagtcatccacatgcatagatggtggtctacttgtgttctgttttctctgacgaaaaatatcatgaggtcgtataccctgtccaaatcctcccctgccccttcctcttggtggtggcacaacatgagctcttttggcaggttcaatgtattcagattttccacttgacgttataaaggtctcatgcttgtgcttcccaagtttgaatcctttagtagtcttggttcttcctggagatgatggttctgacaaaaatgagcgctctaattctgagtgcaaatcaaagtcactacagcatttttcagagagttcaattaagtcaacctttaccaaatccagatctgtatctatctcttcagcctgaaatggagtgaaccacatagatttcaactgatcatccatgacatcagcaagcacataggcagtcctattgttaaacagattctgaagagattctggagctgaaagtactggttctacatcctggtcactgagaggtaaagggtcacctgatgactccagcatctgcttaagtccaactacactgtccaacaaagaatccagattgtcatcatcttttgaatgttccaaaacaagcttctctagttcaaggaacaaattttctggactttcttctttgctttgtagaagctgttttaactctgcagcattaatactcatcgtccgtgatgtatgagctccctctacttccatgagaccattatcatctccacagcatccaattgtgtcagagttaagaatttgtctcataaattctaaaaatgaagatgcaagctctcctgtgtccttactaaatgtgctgaccactcgtttcagtaaactatgcagagcactactgtttttccttaaagaactttttaaatgaaataatccataatcatgctctgcaagaaacatcattgttctgacacatgtcagtaaacagttgtaactgctctcagagttagctagcgtagccaacagac

SEQ ID NO: 48979 - DNA, 1037 bp, Homo sapiens
tttttttttttttctgttacatactggtctttattaaagatgagaagccaggtctttattaaagatgaggagggggcaggaaaggggggcagtgcctcctctacccactgcctttgcctgcccggggtgagggagcccctctgctccacccatgccccccatgatggcacatctgtatgaggctgaggcatggggggcagtgtgaagaacaggggcaggttccaagaaaaagaagaaaaacccttcccacagccctaataaataacagaagggtttgggatgacctgggcacaggcaaggggagacacagcaccctgaaccccaaaacctctgaagtgggggcaagccctacttaagtaggggattaggagagagtgggtgagaggtggagaggccgcacacagggaggggctgagaggaaaaggggtacccccaaggaccctgccatgggggagcctgccccccaccctacagctgggctcgctgattctgagagaagactcaatgacaaacaatgacctcatctccctcctctcctttgcacatgcttagacacgggcggtcccccattgactggaatcatgcccacccactctagaaattctggaaaccaagggctcctattggctgttcagtcgctgaacactggctggagttgccctcttgcaggaggattctaagaagtgaggggaaggctcccattggttggagccaactccttttggttaaaattctgagaaccaggggttctcattagccaggcaatggccaatggggtcaagctttggcccttaaaagggcaatagtaggggcaagtgcgcaccttccatttgtgcccatcgggatatctcagagggccagagaggcagatgtctcctaaatgtccttctagccatcttctaatgtctgggtctggctggcttggggggcaggggactttggcactcacgtggcacacgcacacacacgcgtggcagggaagaagtggggactgggcagattctgggtgggtggtcgggcctcacagcaggtggtca

SEQ ID NO: 48980 - DNA, 450 bp, Homo sapiens
  misc_feature (1)...(450): n = a,t,c or g
gnnnnngnnnntttgnnanccctnnnnntttgaaacanctatgacatgattacgaatttaatacgactcactatagggaatttggccctcgaggccaagaattcggcacgagggtgaacttgggtctgtcccgggttaacgacgccgtggctgccaagcacccgggactcggggagtatgccgcatgccagtcacacgccttcatgaagggcgttttcaccttcgtcacagttgcaggctctgtggtcagctacggggtgacgagagtggagtcggagaaatgcaacaacctctggctcttcctggagaccgggcagctccccaaagacaggagcacagatcagagaagctaggagagctccagcaggggcacagaggattgggggcaggaggagtctggaacacagccttcatgccccctgaccccaggccgaccctncccacacccta

SEQ ID NO: 48981 - DNA, 1401 bp, Homo sapiens
cccgctccgggtccacatctccggctcagttgacggactggacaaagcttctatagcaaactcagatggccccacagcaggttcccaaacacctcccttcaaaagaaaggggaaactatccaccattggtaaaatctttaagccttgggaaatgggagggaaaaaggaagaccaggcggacaaatttaggaggaaacctcggcagtattagaaaggaagatatccacacgacaaagtagagaggagctgataagaaggggagtgcttaaggaattgcctgatcaagatggagatgtaacagttaactttgaaaattcaaacgggcacatgatacccatcggagaggaatctacccgagaggaaaatgtagtaaagtctgaagaaggtaatggctctgtatctgaaaaaacaccacctctggaggaacaggcagaagataagaaagctggctcctctcattcaaaaaaaacaactggctctaaagcatcagcttcgccatccacttcatccacctcatctcgtcccaaagcttcaaaggagacagtttctagcaaagcagggacagtggggaccaccaagggcaagagaaaaactgacaagcagccaataacttctcacctgtcctcagacacaacaacttctggcacatccgacctgaaaggagagcctgcagagaccagagtggagagtttcaaactcgaacagactgtccctggagctgaggagcagaacacaggcaaattcaagtccatggtccctccaccccctgtggctccagcaccttctcctctggccccccctctccctcttgaggatcagtgcattactgcctcagacactccagttgtcctcgtcagcgttggagctgacctgcccgtctctgccttagacccaagtcagcttctttgggctgaagagccgacgaacagaaccactctctactcaggcactggcttaagtgttaacagagaaaatgcaaaatgtttcacaaccaaagaggagctggggaagacagtgcctcagctactgactcctgggctgatgggcgaatcttcagaatcctttagtgcctcagaagatgaaggccacagggaataccaagccaatgactctgactcggacgggcctatcttgtacaccgatgatgaggacgaagacgaagatgaggatggcagtggagaaagtgctttggcaagtaaaatacgccggagggatactcttgctatcaaacttggcaacagaccatctaagaaagaactagaggacaaaaacatcttgcagcgtacatctgaagaagagaggcaggaaatccgacaacaaattggaaccaagttagtcaggaggctgagccagaggcccacaactgaagaattagagcaaagaaacatcctaaatacatta

SEQ ID NO: 48982 - DNA, 2072 bp, Homo sapiens
agcattagtaactttttattctcaaagtgataaaagcatttaacatatactttacagtataaacaaattaagtactatgcattttgcttataaagtgacaaagtattttaagcattatataattcaatttgtacaaaaagtaaatttccaaatacaagctttggttagtagaactgattatgtactgtcaaatccatttttccaaagttgttcaaggaaaaacaacaacttgactagcacaggtaattcttgtacaatcagagctttttactatttagaaggaggggatatattactataattgctgttaattttcgaatctagataagccttttttcttctcatatgttgctgtaggagagcatatcatcacttttggaaagcaaaaattatgtagaaaatcaccttttgctttattcttaagaaggccatccgttttaaaagtagatctaagactgttagcttccttaactactgagacactttctaaaagtcacactactgaaaagagccgctttaagaattaatgtattccactggggttaaatcatttctgatttccctcaggagggtagtaatatcctactagcactagtgccccagaatcaaagtttatatcatctaaaaaaactcaacattttatagactctacaatgcatggattacttttattcatatgaaagtaatataaaatgttacctaacttaaataatataaaatatcggtttaaccaaattaacaatcacaaaactgcagacatttttctattaaagttttccagttcactgagcaatatttactgaaaaatatgattatgaacttaaatatgtcctctttaaaatttgctgtttatgctagactgtacaatggtgctccctttatgatttttaaaaattttacttacataactatgtaattccaaaatagaaaagtgagtgagccatcactaaaatttactggaaactaatattctttcatggaaacaactgataaacattttaaagttctatatttatttaaatttggctttttaaaataggtaagcttttcatttcaattattgtttaatactttaaagctagtttaaacaaagataaaaccaaggagaactagtaaagcattccttactttacatacagtgcctcaagtgccacatacataataacatatcacaaaagaatgtatatggtttagcagattacagagcaaacctaaaagtttatacaaagctaaacactgcctcccttctgttccatttattgtcttttaatttgatcttggctctgtattatccttctataataccactgtgtgacatctatcagtcttctaagtgttctgattacttatatatacctttttctttaaacagctttgtaacatttgagaacattcatccaatcttttccattagatatgatatattcatttttctcacaaaatgctcactttcctgagctatattaaacaccttataacaggtgtatgtgtaactgaagaccctaaaatgtcaagtttacatttttttttaaatgcatagagaatataacatttcagaaaacctattagtacttcttggatattataacatataggttttgtttcctttagactgtaaactgtttaatacgtataactggttatttcacatccgaaccacattaaaaaaaattcggagatatgactgctattacactaaggaaacaagtggaattttctgaccaaaactcattcatgggtcttccgataaacaatctttacatatactgactgaagatatcaaatttctgtgccacaaaatagtagaattatatcagaactacagcaaataaaactttaattataatacatttgcttgaaattaaggtgctattcatcatgcagtttttaccaagtgggcatcatgtcgggaaaccacaccctaccaagatgcttggacacttcccagtgaatctgctccaaactatacttttggtcaggaattagtacttcttccataatggataattgagataggcggccaccacacatcttcacaaactcaacaaaggcactacatgagacttcacatt

SEQ ID NO: 48983 - DNA, 759 bp, Homo sapiens
tggagagaaggataagccatttattaaccccacgcccctagcaccagctgtcaccttggacttgttggagatgcaggggctagaaaggaaatgacagagtgtacaggccccttcgaccccgtgtcccataggtggtggcccccagacacaccctctctgctggcagtgcagaacatgcatcccaataccctagaggagaaacaccaccccagggagagccctttctgctccaacctcctgggcaggtcccaggttggggcagcagccatctgcaggtgtttgtcaggcctggccacacatgcggacagaggatacgactggggtaccctagggtgtggggagggtcggcctggggtcagggggcatgaaggctgtgttccagactcctcctgcccccaatcctctgtgcccctgctggagctctcctagcttctctgatctgtgctcctgtctttggggagctgcccggtctccaggaagagccagaggttgttgcatttctccgactccactctcgtcaccccgtagctgaccacagagcctgcaaccacggccactaggaggctccactgcaaagggtatggaaacttcctctgaatgaacatctgcaagccaaaggccatgccggtgcctgtgacgaaggtgaaaacgcccttcatgaaggcgtgtgactggcatgcggcatactccccgagtcccgggtgcttggcagccacggcgtcgtccacccgggacagacccaagttcaccatggttggc

SEQ ID NO: 48984 - DNA, 2094 bp, Homo sapiens
acgatacagatacagggaatatgcagaaagaggttatgagcgtcacagagcaagtcgagaaaaagaagaacgacatagagaaagacgacacagggagaaagaggaaaccagacataagtcttctcgaagtaatagtagacgtcgccatgaaagtgaagaaggagatagtcacaggagacacaaacacaaaaaatctaaaagaagcaaagaaggaaaagaagccggcagtgagcctgcccctgaacaggagagcaccgaagctacacctgcagaataggcatggttttggccttttgtgtatattagtaccagaagtagatactataaatcttgttatttttctggataatgtttaagaaatttaccttaaatcttgttctgtttgttagtatgaaaagttaactttttttccaaaataaaagagtgaatttttcatgttaagttaaaaatctttgtcttgtactatttcaaaaataaaaagacagcaatgactttatatccaagaaaggaatgtgaatgagtcacttaacagggaatctaaagagctgtgttagctgtgtacatacacagattatctgagaaaaggtcaagggttccacttgggccacagtttttttgttaatcaaacaccactctcttaagaggctgcatcacaaaaggcaacaaaggggcccctctaagggcttgagattaaaactagtctttatcattactgctgtgacactcttgcttagtatattaagagactcatacatttttgatatcacaactttttgatggcttttcaatattctaaatttgggttcctggtgaaaccaaatggggtacactttcatatccaaattaataaaacctataaggcatctgggtggcctctatgaaataaattaattacccatagtgtagtttctaggaggcatgtgtacacacactcttcattgtggcacaaatttaaatcgcctcatgaccatgtctgtgagccagggtcaagctggtttggccttcttgatgcattttccaaggcccactggtggagcagcatgagtttttcatacagttactaacgattgtggaaaaaaagagctttagccatttcttactaaaaacaaaacaagtttataattaattctctgagcgagcatttttagggataagcctaggaggtattcatcggtgatggtaacaaataacatggtatttgaaagaataaattactaggatcttttaaatagtgataatacaaaagtaatcttaattagtatcacatactaaaagacaactataacttctgaaaaatatttattcttgtttgatgaaagcaacgtttctcagcaatgcattttaaaaaatattttagctgtaaattaaaaatggccataatgtacccttggcagacttcagcatataccaaattttaaatttaaatcagcttgaattcagtggggtatacaaatcaatcattttagttgttttagggctttttattgaatagaaaaaatataaacaatgttgtagagtaatgagaaatcctccacactgaaaaaaaactagtagttttaatttttttggaatcatattttctgaggtgtaactggctttcattagatgatcatacttttcctgacatttttacaatgtattctttctttaaatataaaaactgacaagataaatatagtgtttcaacttcttagcctatttgtgatttttctgttttcctctgacccatcattgattctataaaaaagtgccaggccaagaaacaatagttagagtaattcttcctttaagttctttcagcagtcttgccaagcaagcatgtatcattcctgatgtacttctaccattgacagcaagaagaatatcaccacatctaaaaaaaaaaacaaaacaagatatgattagtattttaattcgttgctgaagttaatgcaagtttatcttaggggggctagattttgctacatctgaccattttaattatgttaacttctaattgagatatttcttgcctcttatttacattctccaaactcactatccattcagcttgtgttaaaaggaatgctaaaagtatggggagttgtagtatgg

SEQ ID NO: 48985 - DNA, 2251 bp, Homo sapiens
ttttttttttttttttttctgaataaataagcatcaattttattgaatcatgaataatttaagactggtacaatcatcagctttattctctatgacatggggcatgatgtccagcagatcattggcaaatccaaaaacctcatgacaaatgaaaattaaataggtaggaagagagagagaggaggggaggaggaaggggagggaggatggaaacataccgtacacaaaatactcaattcctagttttctctttaaaaatggctagaaaaaattcatcaaaatgcagcactttaatcaattatttacaatttctatgttacaatgaaaaaatgtacatcttatagaacatatttcataaaactgctccactggaaacaactagatcaaaacagcaaaccttccatttaatatccacaaagttggattatttttcctttttgaagtagattcgccacaatcaaatttgaatacagagaattttgaagtttaagcatcaaacaacaaagtaaaagtcccccaagatacaacaaagatctaggcaagtcttgttcctgtcccactcccaccccacccctaatgaaacttaaaaggtattcccatttcaattatggcctgtatcattcttggcagtttgggaagagaacttttggcttccattggtaactcaacataaatgttgcatagaatttatatatttcaaaattggcctaactgtagaaaaggcaaaatggaagcatttccgatagagccctaaatgagtacaaagtcactttgtaaaaggtgagtgacactaaagtaaaaatatgaccaaaataagaaatgtgcatattagacaaccctgcttcccgaaactttaggaaggacacggagttgtgagtcacacaagggcctatgctacttgaagtcaatgttcaccaatcaggcagcactaggtacagaagtcttggttctgaacctggacccagtaggagggaagtctgtgggaaaggggagaagagaatgacaagagaggatgtcatattaaaaaaaggtttcaaacaatattggcaggtgtctactcacaaggtgattggaaaactgcccacgaggagaagtcaactttacctcctcccaaattcacagtacgcgagtgtagtagggtcattgctgggagataaattgtctgaggagggccacccttcaggtttaccagaaatcttagggtttggcccccctggtcacaggctaaatatatggtttaaaagttttattaaaaagaaaaacagaacaagacacactcacacccagatgactaatgaaggctaagcagaatagtctgagtttgctgagactaaagcagggatagtgttgaaaagttttcctttcactagtgggacacattccccttttcttttcaaagaggaagaacatggtgtcatccaatgtgaagtgagcagtttcgggtcaaactcttatggtaagaaactaaaaaaagatggccaagagacaaaccttcagaaatagaagaaatgcaaaagatggaataaaaaccctgatcattaaaacagagacaccttcactggtgtccaataaggattctctttacaaaacagaaacaaacaactcaaaaatttaccatactttgtaatgaaaataccagtatgttgaagacacagcagactgggtttctattagaacaagtatcagcaaggtcatgtagacttgtagaaacttttgccttctcctgcaccagacagatcattgtccagttgggttgccagctggagaccgaaaagaacctaaaaaatggatcttttttttttttctttttcccatggtcacgcatccacacaaatgagtcttttggatgagaaaagtcacagcaacttgagttctcctaatgaacagatgactttttagccctgtttgtttcaatggggaaaacaatgacaaaaaaaacaaaccccaggcaggcacgacacttatgtaaaatgaacacagttagtacaaaaccagtaaggcatcactttgggaaggtcagcaccgaagaggtcaggcaaggctcgtccagacggggcttctgggagggagtgaccctcacccttattgagctgcgtcatgttggttctgaggaaagtgcaagtcttttgcagggtgaccgcatcaccccaccggaagctggggcggggacgctggaggtgttggtgtgtgttctaaaccctcaaggacgagaagggaaggcaaggtccatggctcacccacatgtcgagga

SEQ ID NO: 48986 - DNA, 502 bp, Homo sapiens
ttttttttttttttgccgctgtcaacagacagtttattctatatacaaacacaattttgtacactgcaattaaatagaatggaatgagcgctcctccgcattcctccccgagtgactggtttggccgccgccaactccatccccgagtgggactggaccacggccctggctgctgccacttgatgttggcgcctgcaccccacgtccctatgcccgaggcgcaagtcttgctctcccggggaccccaggcctggcgcacacgcggggagggcggggccgtggagaaggcactgcagggagcaccaggcagagcgtgcctagaggcgccggcaactagggcgcgaggccccaccccaagccggcctctcctccacacctccgccttgttcagagacctgcaccatgggaccccactccatcctcaggacggttcactgcagacctaccaagacccctccagaaccttccacggaaccccaccccctctccttgctgaccagct

SEQ ID NO: 48987 - DNA, 3141 bp, Homo sapiens
cctctcatgtctacatgccaatcagttcacctactacttcacaaccaccaaccattcattcatctggtagctcacagtcttctgcccatagccaatataacattcagaatatttcaacaggacctcgaaaaaaccagattgaaatcaaacttgaacccccacaaagaaataattcttcaaaactgcgttcttctggacctcgaacctccagcactttcctcttcagtcaatagccagaccttaaacagaaatcagcccactgtttacatagctgccagccccccaaatacggatgagctgatgtcccgtagtcaacctaaggtctatatttcagcgaatgctgccacaggagatgaacaggtcatgcggaatcagcccacactcttcatatccacaaactctggagcatctgctgcctccaggaacatgtctgggcaagtgagcatgggtcctgcctttattcatcaccatcctcccaaaagtcgagcaataggcaataactctgcaacctctcctcgagtggtagtcactcagcccaatacgaaatacactttcaaaattacagtctctcccaataagccccctgcagtttcaccaggggtggtgtcccctacctttgaacttacaaatcttcttaatcatcctgatcattatgtagaaaccgagaatattcagcacctcacggaccctacattagcacatgtggatagaataagtgaaacacggaaactgagtatgggatctgatgatgctgcctacacacaagctcttttggtacaccagaaggccagaatggaacgacttcaaagagaacttgagattcaaaagaaaaagctggataaattaaaatctgaggttaatgaaatggaaaataatctaactcgaaggcgcctgaaaagatcaaattctatatcccagataccttcccttgaagaaatgcagcagctgagaagttgtaatagacaactccagattgacattgactggcttaaccaaagaaattgatctttttcaagcccgaggaccacattttaaccccagcgctattcataacttttatgacaatattggatttgtaggtcctgtgccaccaaaacccaaagatcaaaggtccatcatcaaaacaccaaagactcaagacacagaagatgatgagggagctcagtggaattgtaccgcctgtacttttttgaaccatccagccttaattcgctgtgaacagtgtgagatgccaaggcatttctgagccaaatggccctgtatcttctctaaaaccacatctaaagttcaagaaactagtctgtcatcgggaaaaagtttcactgctacataggattttgtcaaattgaaggtgtgacaagatggtgttctgctaatgttaaatgtcagcccacagagctaataatacctcagtataatgtcatgagcagttgaaattcatcacatgaaaagtaatctgctgaaagacttggttgcccactgcctaactgtgtacagtgttaccagtgtcccattatggataattctcaatatgttaacacctaggtgttcccaatacctttttcccctcatgtcactactgaattttgacaggaggaaggaatagaatgatagcttgttttatttgtaaagctttcagtgaaacactacatacacgaagaaaaggaacaaggtttaactatttaagaaccatttggctgccgcatagtgccattggatagggaagaacttcagaaatctgtggtactcttggccttgtctttgtcttccctgaacgtgtctccactctgtgaagccagcatctaggggctaaagatgcaaaggaaagcagcatgcattgtctgtacaaatgtgcagcgaaatacccgaaagcttttcctactgtacagatctctcgagtctgctttaagtgatttcttttcttcttgattattttcttatatttctatatgtatagtgtaatagccttttgttaactaattttcttttttccttttagtaattaagcacgatcatgtccctttttaagccttacctgagaggaacaatgccttaaaataaaaaagcattaatgagatgaaagtatgcacagaataactttcctctacttattctgtactttgccctcatgagttccaatgttgtgtgaagacaggcagatgctgcacagtgaattgcagatgatattacagaagtgatgtctgtaggtcacattaaatactgacttgagcagtgggtgacacaacacagtgtttgtcttccacagggaagcttaaaacaaaagatatttttaacccactgacagaacaacaaggttaagcttcatctgcttggtgtcccacagaacttgcacaagcagttgttattgggaaagtacagtctcaaaaccagcaacagcagcagtacctacagccctttttttggagagaagtttaaatgctttactgttggggcagtccatttctaatcctgacttggtgacagtatcatgtgtatttataaaacaaggctagccatatttaggacaactgaagaaaagctggaaaaaaaaacaagcaaacttgaacactgaagcaacctcaagcatctctttattttgatgatatatttttgtaaggaaaatattcagatgatcaggaatgtatataactgaaatcaagaaaaagaacagtatgcatttaaaaagacagaattatgaaattatatgagtgcttagaatggggctaagggaagtgctgaaatagagcaaaggatggaagataatatagactaccacccactgtaaatgtttgcaagtggctgtgttttaaatgggattattacagttgatctctatgaatgtcagagccctaactttcaggctttgcattttgtatatgggaagaaatatgacaatcctaggtaattaaaccatagacccaaagcccttacgtttgatgcaatttatttttaaaataggccttgtttttcagcttcatctgcagttctatgtgaagattgataaatcagtttttacttgttttattaataaaacgtaatttggatatcttgagttgatggttttgtgatttagctgggtaaactatctttgtaacagataagttatttataaaaattaaaaaacttatattctaatgtgaa

SEQ ID NO: 48988 - DNA, 819 bp, Homo sapiens
tttttttttttttggaaaaggagaggagactttatttcttataaagggttaaaggcctgcaaggtggccatcccacaggccaggaagtacaatctctggcaaagaccagagacaggcacttcaaaggaggagcaggggtaggaacttgatgctgaataggttggctaaacatacatattcaacaggttacaggaggagctatgaataattatgaaggtcatcctgactcatgcttattgaacaaacatgcatgtaacatacaacccatgttcactttggggtggagacttgacatttaaatacattataattaggccctacacatcaaaaagtgaagcagggacatgaaggtactcagcctctgtaaaggctcagcctctgtaaaggcacagcctctaaaactggccagaaccagtccatggctggtggtcttctcatcaggagaaagttactgaaatcagtcccttgtccagagaaagctgtcgttaaggttagtggggcaggagatcagttactcagcgtctgtgaactgggtgagttgtaattgttttaatcttgcttctctcacagccagtgcttgcttggctgctagagaaaaataaaacccatgtggtagttagaatctagttaattctttaagagtagggtacaagacttaaccctcgccctggcatgccctaggccctgtttataatttgaggtcttattgccacaaagagtctgttctgtcagtctcatgatctctattttaacattaatgctgctcagttgttgggtctaaaccataagagggagggaggtacagggaggtatgtctga

SEQ ID NO: 48989 - DNA, 1548 bp, Homo sapiens
ttgcattggtaacaaaatgatcaactttaatccaggtagaattcaagatggctgtacttcagttgtatgataaaattaatggttctcatgacttgtgtggcatctaaaaataatgtttttatagcatctctctgccactaaattgttgacttgaattttgggaaaaaaaaaagttgggtgtggatatgtatatgtgtgtgtgtatatatgtatttataaacaagtgtgtttgagtaacaagtgagtttcatagtcttcccctacgcatgtgtattccacacacaaatggctgagttatagtcataaaacaatttgcaataaaaaaaaaaccaaaacagattgtcagttaaccaggaaacagttaatgttttttaatgaatctggcattatagtgagcaaatgtcgtattaatttaggctaatttctaatactaccataatttgtgtctaaatttctgttggggtagaaattactaaaattgtggggagttttttctgatttttacattgctttaggaaacatttttactaattcagctgtcttaggtaaaatgaatagttttcttcctgtttttttatgtgtcattgttagtggtctcagaattctgatcagtaactttgtgtatgatgctgaattacaaaccgtttgaatgatccagttgaaaacgtatccctctactttcttcagttgtagaaaaggttaatttccctcagtgtcccacattataccaacctaagagaagaacaggtaatagggagaaataaacatacggtggtttcagtggttttggtcatgtgtccacaggagaaactaaccattcagttgtcttaattttagttcgttctaccctgtgaggagtttgtttccatcagttgttgactttccaaaatgttgcattaagtaatagttgtcactctgttggtctcatggtcaatatcaatcagactttcatgatctctactaattattagtagagtcctgtactatgtctgtaactactaagtttaaagaaaagcacatagtcacttcatctctttttttcttagcctacgctcactccccaacccatcccaacattgacatgctatctgtggacaaatagcagttctcagaatctagtcaagttgccatcatcccccttgccttggccgttcatagtaggtatgcatatgtttgtttctgtacagtactgtgtgtgtgtgtgtatatatatatacatctgtatgcacacatctttgataaaatagctatttgactagcagggttaaagtggcttttaattacttcgtgagtgttattggatacatcttaaaaaaaaaaaatctgaaccagaaccatgccatacttggttgactattttgagcattaaaattgctttactaattatttagacatgatcacaattctgtatctttactgaggaaagattcacgtaagctctgaaaaatcggattctttggcagatttccgtttgagtcaagtgtctgaaatggagtgaaaatatatcctaactaaattaatgtggaaagagcatttttttagacaatt

SEQ ID NO: 48990 - DNA, 1548 bp, Homo sapiens
ctgagccctacaacacccccagcggccgccggctcccccacgaggtgtgaatgacagaggtggtgccatccagcgcgctcagcgaggtcagcctgcgcctcctctgccacgatgacatagacactgtgaagcacctgtgtggcgactggttccccatcgagtacccagactcatggtatcgtgatatcacatccaacaagaagttcttttcccttgctgcaacctacagaggtgcccattgtgggaatgatagtagctgaaattaagaacaggaccaaaatacataaagaggatggagatattctagcatccaacttctctgttgacacacaagtcgcgtacatcctaagtctgggcgtcgtgaaagagttcaggaagcacggcataggttccctcttacttgaaagtttaaaggatcacatatcaaccaccgcccaggaccactgcaaagccatttacctgcatgtcctcaccaccaacaacacagcaataaacttctatgaaaacagagacttcaagcagcaccactatctcccctattactactccattcgaggggtcctcaaagatggcttcacctatgtcctctacatcaacggcgggcaccctccctggacgattttggactacatccagcacctgggctctgcactagccagcctgagcccctgctccattccgcacagagtctaccgccaggcccacagcctgctctgcagcttcctgccatggtcgggcatctcttccaagagtggcatcgagtacagccggaccatgtgatgtcggctgggcagccgccaccaaggccccacccttcagccgcccgcagagcccgccttcctgtccatctgaccccttctgttttctgcaaggagctgccagccatctaactgggctcgtcggcctgccccagctgcaggcccggtgctaacacgggttcgggaacagaacatcgtgggcatgcgcagacatgccatccgtggcaggctcttcagctcccctccctgcttctggaaacctctgcctgctgccctggccctgcccccctgcgcatgaccgtccccagggctgacccagtgtggctgcattcactgggaggggcctgccctcactgggcctctcccactccgctgcctgttcttgcagctccttcctggaaagctggaggggactttctcctgcaagggaggaacgcaagtattatggacacacttgaccgtaaaggcacaggagcctcggaacaagggggcgcaataaagggaatggcccgtccccttccagaaccagcccaaagaagcctggggggtgaggagtggcccccactcctccatgaggggctgatgaggggtgggcagcctgggggaggctttcctcgcaagcacagagctctgaggctcagccccctggcacaggcggtcacgcatcaggacggttcctactcctcagcaccttccgtgcagttaccagtgccctgggaggtcacactgcccgtcggaccttggcatgctccattcagctgacctgctgaggacaggcatcgccgagact

SEQ ID NO: 48991 - DNA, 976 bp, Homo sapiens
gtgcttcagttgctgcactccacgagcgacgtggtgcggcagtacatggccaggctcatcaatgcttttgcgtcactggcagaaggtcgcctctaccttgcccagaacacaaaggtgctgcagatgctggagggaaggctgaaggaggaggacaaggatatcatcaccagggagaatgttcttggggccctgcagaagttcagtctcaggcgcccgctgcagacagcgatgattcaagacggcctcatcttctggctggttgatgttctgaaggaccctgactgcctgtctgactacacgctggagtactcggtggctttgctcatgaacctctgcctccgcagcacagggaagaacatgtgtgccaaggtggcaggcctcgtgctcaaagtcctttcggatcttcttggccatgaaaaccatgagatacagccgtatgtgaatggagctctgtacagcatcctttctgttccatccattcgtgaggaagcaagagcaatgggaatggaagacatcctacgctgcttcatcaaagaaggcaatgctgaaatgatccgccagatagaattcatcatcaagcagctaaattccgaagagctaccagatggtgttcttgaatctgatgatgatgaagatgaagatgatgaagaggaccatgacatcatggaagccgatctggacaaagacgaactgatccagccccagccttgggagaactctcaggagagaagcttctgaccacagagtacctggggatcatgaccaacacggggaagacaaggcggaaggggctggctaatgtgcagtggagcggggatgagcccctgcaaaggcccgtcacccccggcggccacagaaacgggtacccagtgtaagtcagggctaaaggaagcgggaattgactttcttaagctttgttttgattacagtgtaagatgtatgtatttttaaaattcaaaataaagcattcattttg

SEQ ID NO: 48992 - DNA, 2918 bp, Homo sapiens
  misc_feature (1)...(2918): n = a,t,c or g
tttttttacaaacagcagaagttatttaatgtagcaatttatacattcaatattgacttaatgaacttaaagtcacttgcttaaaaattcagattttcagggaagataaaagtacagaaagttgttagaatttccattaaattaggggtattcagtactataatatcaatttgttggaacccaaagtgatactattcaaatgctagtaactattaggctctattcatacagtctttaatgtaggtcataaaagtaaaggattttcatctgtgggcctgaaagagaatatttcaaaatattgaagtcttcagtgaacacatttacaaattactgagttggattacaaaatgcaaattatgcttgaggaagaaggctctctcatcttctttcatgctaaaagatgacttttttctttgcaggatgaaaaagggaagagtcccttttctgtgtttacatagaaanaatatnnggnnnnnnntctctgtatgtttctggggttccacctggtantnnccnacaagagaggnaattctgtgcagaaggccatgctttccagtaatgaacaatctggcaagaacttgaaaacctgacaggcttaaaggttacatgccagagtgctctgcatctttatactctttcccngnaatcttcatttaaaaatccacaantcaagttcaaatgaaggcaacaagcttgagttccacagaatacatcagttctgtctaccagaattcaaagccagatcaggaaaaaataaaaacctaacagcataaaggcagaaagtgaaaagaagaaggaaggaaagaagagagggaagaacagagagaggatcaaaaaaaatttttaaataaagcatcatgttacagaatggatatgctccagggaactgatgaatatttgaacttggtcagtcttcaagacacaaagatagagaaatccagctataaaacaaagatgagtgttttggacatcatttgaccccctgtgttttacaacatgtgctacgggatcnattgngcccatnttatnttccaaatgaaaaaagggtttngggatgtncnagntagcatttnattaggacatnccatntttaaaaggaattnaaatnaattaggaaacaaggaaaaggcccatgctgtatagcccatgaatctcatcggctttatcatgaaagtttattgtttttaatcctagtacaatcagctaccagttacatacagtaaaaaacagaaacagccacaaagcaatgatgatagagatagtctgtgacattgtacagtggaggaaatactctctgttggaatcctccagcagacccccgcctggcttcagcagttaagctatcactccctccctccccaaaacagttaaaagaaaaattaacgtcttgcttgggtacagcaagattctaatacctcttggggacactggagaactttaaaaaaaactaaagcagtagaaacaaaacaagaactgaaacgtggaagcaaggtgacacacaaagaagctccgcgaggccttggcttcagaccacctcaaagcgaaccaccttagaggaataatgactccgttcaaaaactaagtctcatatatatttggttcgattgagggctttttcagccaggtgaccactttcatctgtgatcttctcccaatcagtctgtccgaccacaaaacctatggcccttttcctatctgcatccttcttctcttccaggtctgcccatctgaccctcttcttcccaggctcagaagcacgagtatcataatcatcggggagctgaagataatcctccattctgctggcaatggcctcccagtcacgtttccttttagtaccagtcctcaagccatccaacttgtctagctttgcctcagatgtgtccatctcccatttgcttttcggaatgtaacccagttcgctttcctcttcctctgcatctttcttttcttctttctgttcttcgatatttgcatcaaaatcttccatctctacctcttcaatagcagcatcttgcagcaaagaacgaatatctagacgcatcatgtgacgaggtgcagtttcccagtgatcagccatcttatttatttctttaagctttcttccatgaatatttctcttgccacaagtctggttatctgcactcatttcagccaaatatacctcaaatcccttggtttttgctgcactccaaaactggtcaaaatgcctaactctgtcattgatggcatccaggatgatgaagggaaaaaagccatcatccagagtctttttgaaagttttgaacatgctggtgcggtaagtctcctccatctcagcttcatattcatattccattaccttctttttcactttctttccagaatctggatctttttcttctttttccacttcagtgatgaagtaatcatccaggcttagaactctgggtgcaggtcctccaaattctacctccttatctcgaataagttttgcaacatgtgtctttccactgccaggtaatcctctcattataacaacaattctctcaggtctgctctcccggcccggtggtttcaaaatatcgtccacattctttgattcaggcttcttctcgactcgtggagctggaggtggctggtggctcagtgaaggagctggcagaggcattcgctcctcaggataagtccttaattctcctccaaacatggatggtccttcatagactggtcggtcagacttccggtcataggatggcctatcaaaaccccctcttctggatgaggaatggtcttttttgtctcgatatgactgagctctatcatctcggggtcggcgttctctgtcaaatcgatcccggtcatagtcaataacaccacgatcccggtctcgatctctatgtgtctcacgatcccttttaaaatctcgatgatctgct

SEQ ID NO: 48993 - DNA, 2329 bp, Homo sapiens
tttttggaataacaaaataaaagtttattttattagaattaggaatgttctttccctctgggcaacctgaacagtccagttacaatgaaatctaagaacagttatttccacagcatagggtgctctatgcacaaaattacagggttaggagcatttaatcaatttaccattctgattgtctcaccaacccaccccatcccatcccccaagtgctctattaccggggtttgtagctaaaataatttgttacattaactccttttccctcttctactaaatttcagttcctaatcatggttgaaccactttattacacagcagattcaaccatttcaaatgaagtcagccagtcttggatctgttgtatatgggtgtatgtatacacgtgtatctaacatatttatttaaacacacataaaacacatacaatctgggttgtggaaaattacagataatttagtctgatattatatgctactcaattttaccactgtggtttgtgtcctgagctttggatcaaaattttattttaaatcactgaaagtccatctgctgctgaatgaattgttcaaatgaagcatgcacttttcaaaagacaatgaaactgacctcaagacatggagaccttggtgcttactgtgaatagatccctcagataagacttctgtaggtgaaacagggaagctgtcatggcttgcctatcccagctgggggcactgaatctactaataacacaagcaattcactctgggaattctgtcaaatatggtggtatctgttaaaagcttggaagtagaaaagggccagttcatcttgatcatacaaattagggaatgcacccacaactgcaataccctcaggcagtatgccaacattgaaatagaaagcatctctaaaaagcactgttcctccatgggtgaagactggtattaggaagtgcacacacaatttttgggtatttgttgcaacaggaacacgtggatttatgacactcaaacctagacactgcaaagttaactggtaagattttttttttttaaacaccacacatacacaaagcattttaaaggagccacatatatctatatagcaactctgactgcttttcaaagttaccagggaaaggaacttattcaggctttctttaaaaaaactccttagttttaatgtatatctttttaagattgatgctgtcatttgaagtaaaataatgtcatatggataatgggggaagaggggagagagacgagaaaatggaagaagcagacactgagttcagatttgcacctgaggtggcaagggaggaaaggagaaaaggtacaggtaaagttgatcctaaagcgacaagtggtttaaggaagcagcatttatactcagcaaacattcactgatttttgatgggaaaagaacagttgccagtaaatctcctgtaacaaccttttctaaaaggaaaagtagggttgattcagcaaagccctaacttaggcaaaaggccagaggaaagtgaacctacttcccaatggagtaataggatgtacagtgtaacgagcagacaaagctgcctcacaaatggtaaacactccctaggcaaaagacatttaaaggaagacgaagaggtcctcagcctcaactggtatttcatatttagacctcttaatctagttgcctagttcactctgcactcctgtataaaactgacagatttacagatgctgacctattgaaaaataccacagccagaatggcctaaacaggtatatagttaatacaaccaccaccatcctttacttttaacatagctcttagtaggaatttcataaaaatggacatcacagctaaaatgcattattaattctcctatctgctgacaataaaaaggcagcaaactcagtgatttctatttaaatgcactagatgggaatatcatgttctaggggtgtttgccttcaaaccaaacccacagcaacacacacaagcaatttcggtatccaccattttaaattcacaatctgagactaaatgaatggctatttatatttaaagcaaaacattctctttgacaccctaatgtagagaaggggtgagcagacgagccataactaaaatctgaaaagcagcaattaagggaaaaccaaaaagtaaaagaaattttaaaatgcttccactggatgcgacaggggacttaagaatgcctacagctgtgtgcataacatgggcacacaaaggcttgggtagaggcatgatgcccatggagggggatttaggttgggaccaggttaaattccatgaagctgtagcaaacaaaactccctgcatgtaccccttaatc

SEQ ID NO: 48994 - DNA, 1687 bp, Homo sapiens
  misc_feature (1)...(1687): n = a,t,c or g
aaaagaattaccataagttttatttttgcttagttttattaaaaaaataaatatgtcataaagctttctttttccttagggagaaaaaaaggaacaagtctcataaaaccaaataagcaatggtaaggtgtcttaacttgaaaaagattaggagtcactggtttacaagttataattgaatgaaagaactgtaacagccacagttggccatttcatgccaatggcagcaaacaacaggattaactagggcaaaataaataagtgtgtggaagccctgataagtgcttaataaacagactgattcactgagacatcagtacagatacatcttgcttaaacaacacagaagttcctgaaaagttttgtgtaaatgatataaccacaaacattaccaggagagcttggtaactgaaagaattccatggcgaattcttttgtgaacaactactttcacttttgtaaatccaggtatttgctttttataaggagtttacctagttgctacctctctgaactgaggaaacagcatattcaccaaacgttgtgctccagctggaccactggcacaatttccaagtttgtgtttctattaagtaagtagtgtaagtaaggtacagagtcagccagggaacccagctgtatctgacaaagcaggtgtaggagtgggactgccatctaccaataattccagnaaatacttttgactaatatactttgtgcaaaacacagtaataaccttatcaattcggctatagatgtacttcctttttctaaaactttcagttcacaagctaggttctgggacccccgaaaagggaggtaatacttctaacccctccaaggactggcctttacccaaatttagctgccccaactcccttcaaattgggaatggatggataatggaaaggagactggagttttcccaaacctgaagtttaacaacacaaaaatcacatttcatatcactaattagtggaaaagttttgcctggtgacaaaaatttttcaaatggttgttttttgttgttgttttaacttcctctaaatagaactctgaattctggggcaaactctgcagaagttaaagtcactgatgttctctggttggctgatacattttagtactgctgatagaaataaaaatttctttctacccaccagaatttcatgaacttatactataccaaagcagtgatgctttggacagggaatacgcatggtagtactagttccagtaagttttatcaaacgtaaataaataaatagaatcctcacattgctcacagcctccattccatttggtcaaacttctaccaggcccaagccacatttaaattaggctgttcagttttttaatttaatgctcctaataacattgctgtctatatgtacaagtgtgaatgaaaagagtgtgtaatctgtagtcttttccacactgagtacactagcaattagtaaataattaaagagtaagtggtcattttaaaacttgtatttttttttaaaaaaaagcattttctagcactttaaaaaatgggtctgaaaagtgccctattaatgtccaatgctgttccccacccagtcccacccattcaaaacctgctacaaatgctggattgagttcatatcaaataatttagcagtaccaagatttttcaaatggaaacagtgttactgacttcttc

SEQ ID NO: 48995 - DNA, 2139 bp, Homo sapiens
acagctatgacatgattacgaatttaatacgactcactatagggaatttggccctcgaggccaagaattcggcacgagcgtgtttgagaaccacaatgttaacaatatagccaatatgtacagtctgcacagctgggttggactgatagctgtcatatgctatttgttacagcttctttcaggtttttcagtctttctgcttccatgggctccgctttctctccgagcatttctcatgcccatacatgtttattctgggaattgtcatctttggaacagtgattgcaacagcacttatgggattgacagagaaactgattttttccctgagagatcctgcatacagtacattcccgccagaaggtgttttcgtaaatacgcttggccttctgatcctggtgttcggggccctcattttttggatagtcaccagaccgcaatggaaacgtcctaaggagccaaattctaccattcttcatccaaatggaggcactgaacagggagcaagaggttccatgccagcctactctggcaacaacatggacaaatcagattcagagttaaacagtgaagtagcagcaaggaaaagaaacttagctctggatgaggctgggcagagatctaccatgtaaaatgttgtagagatagagccatataacgtcacgtttcaaaactagctctacagttttgcttctcctattagccatatgataattgggctatgtagtatcaatatttactttaatcacaaaggatggtttcttgaaataatttgtattgattgaggcctatgaactgacctgaattggaaaggatgtgattaatataaataatagcagatataaattgtggttatgttacctttatcttgttgaggaccacaacattagcacggtgccttgtgcagaatagatactcaatatgtgaatatgtgtctactagtagttaattggataaactggcagcatccctggcctgttgtcatgcagtcatttcctgttaattctgggagacaatgatttcacaactagagggaagcagtcctaaaagtttaaaatccgataaggaatatctgggacagggtttagatcatgactctacacagataccatgatgagagtatattaaagaaatttaggaaagcacctggttcctttctccccatgcctgccttctgctccctccccagctggtttgggctcaaattgtccctggagactagggtttatgttagggtattgatagattagagcaggtggttgaagagatcttctctggtcagacttggaagaatttccaaaactgaagttagccccaagacttccctagggttgatgtactttatgatccagatgctaaacttcttagaatgaaaatatgcttcaacacttaagtagcatacactgccctacaaacctcagagagcacttttccccaagttcttgtttttatttttgaaagtactcacacagcacttactatgctccaaacactcctctaagcactttacacatattagctcattcagtccccagacagacgggatgaagtaggtattgttactggttcccattttacaggtgagagatttgaagcctggggaggcctagtaactcaccccaaggtcacacggctcatacatggtgggactgagactcagatgcaggcagtctggcacctcagtctggattctaaccatttcactaagctatttttgtcttgtactactttgacccacccctgaataaacctcaattgctggagtggggtgtagttattaaagggatgctttttaccttttgctgtctgctgtggcagattccccagataaccaaggaaaaggggccacccatacctggaaataggccatagggcccctactactgccaacaagccatggcctaccttgacacttgtttgatcttaaaattgtgtcttggtaacaaaagatttggacaggcatatctgtagctttcaagttaattaattgcaatatttttttcttcaggattttagctgctgaacaactttcagtttggagctaaaagagacctgtctcatggtctgcccttccctggggcaatagctagggtctttcctgattttaaatggattttaaggggatattttgagctttgg

SEQ ID NO: 48996 - DNA, 753 bp, Homo sapiens
attagccgctaggaccttaggcgagaaaatgtggacgcatccccgccggccctgaggccagagaatcccccctcaactggttgcacctcatgtccctcccgcacacgttgactctccctcctaatccccaggaccccgagggctctcccacatctcccgcagcaagagccaccgatcccccttaagaagcgttgactgtacggcggcgccagagggccaaactaagttcggtttcgggaaacgctctcgggagcagttctgtaaatccctgctgggagcagagactgcgaaaagctgagtccgccgatcgtgcccgggacaaggctgccttccactcgccgcatctacctggtaggcggcatgcgcacgggcttagaggcttgagagcctctggaagagaaagggtcccaggaaggaaacctgcccccggcctaagtgtcggcgcccagatcaccacgaaccccgcacctaggcgccgcccaccaagttccaaagaagtccgaggcgacctgggagtcggtcggatcccagccgagaaaagaaacaagcaggatagcaattcttaggggagccaccctgggagttttaggcagcgtttgcctttccctggttttcttcaccaagccccatcctccccccgcataccacccccagtcaaaagagtgggagaaaatgcacagttcgaagtcggtgagagcaaaaatgggtctagtaaatcaacccgtggtggtagctaaaaggtttggggctgct

SEQ ID NO: 48997 - DNA, 1537 bp, Homo sapiens
ttgagacggaccgcatctgccaccatgcccggcctcacaaagtattttctaaaatataatttgctatagagttcacagatgagcacttttcacattaggtgatatgcaaacaaatcactattggctcagcaggaaacagactttttgtacactctagttaacatgaagttttccaataaaacaaatgacagcgggagggggtagtgaggaattcaactctgtaatgtccacctagaatccaagtaggaaaaaaataaagctattgaaataatttagtaatatcctataggtcaccagtgatttccataaaatgctgcacagatacaaagtcttgagtatgttacttagtagctaaaaagagagccttgtgtgaggcacagctgacttggaacattaaagagcctggcttccctttctgctttccattctcccaacagaaaaaaaggtcttcaaagaattggccagtcttacagctcaccttggggtgtagatgactctccactgtggtgcctaggcaattttattgaacaggtggccactggtggtgatggctgaaccactcattaaacaaattgctctaaatggcctcagtatcaaggtgtgctttctgtacccttaatctgactttaatcctgcagaacctcagtcttaccatgtttaacagcattgcccatgtacgatatgcctttatcctacactgtatatatactctttatgcagaagtatatctaactgaaaagtataaaaatataatggtggaaaacaaatgaattaaaaaatgtatcacggccgatagcccaggtaactgcaggtgaaatgtagccagaagtccagaacccttggggccaaaatccaaagtaatagtccttaatgggctgtgcccttccaaatggtttaagttttaataccctcttaaggcagaatcaaagttcctcttaatgttttggcaagtgtttttcttcctggaggttcataaaagtaggtggaagaatcagtctaatggcttgttggcatgcctaagggaaggatgtcaagttgacatccttggatacttggttaaaaactaaggctagtaggtgaagaaaaacaacagaatagtttttggttttaaatttgtacaaaggctacttattgaatactggaaaaaatgacaacagtgttttaccatctttgcataagaaaaaaatgattttccttttgaaactgtagctcaggatttaatcctgagtcacgtcatcatgtggtaaaaacaatctggattttacaataatttatataaagcaaaaaaagtcataaaaatgctaaatgatgcagagctacaaatatgatgaaacatgagcagaggggtcaaatcagatttttactccaggcaggtgttaagtttgtgaaaagtgatgcaatttgttatacattcaaatgcaaattagaactagctgccttacgatgagatttcactgtcatttttttagcaccctaatttttgtcggttctgtaggtttcaagtagcagaaacttacatctatttcccctcgtgccg

SEQ ID NO: 48998 - DNA, 6278 bp, Homo sapiens
  misc_feature (1)...(6278): n = a,t,c or g
ttcttttttttatggttcagcatcaaacacatttatttcacttatattgagtatacaagaacagagagcacacgcatacagcacggagcactgaggtgggggagcatggggacgagaaaggagagaagggtgtgagtaaaaaggaacaggacagcatcgcaattggttgttaaggtgcttttgaaaaaaaaaattatttcgagtgatgttgctcatgcagtttcaggccagtcttggaatgtgcttgcaggattcaaaaactgaaacaggtcctggtacttcctgtaccctcagatggaaaagatccagagaaaacaaaataagagaaaatgaagacccatgagatagcaaagtagaaaaagaccctggagagcatctggttctttctgcttattttgcaagtcgggaaactgaggcccaagagggggaatggggatagcctgatgtcacatggtgagttaggagctgagccaggatggtcacccagaactcctaaccgccctcagggactttttccactatgctacatggcctcctgggtggagaggtggcacagagaggatgagaaacaaaaaagagaaaaggaaaagtaggttgaagacagacaagacaaacgtctctattctctacaccgagaaggatggggaggaaacagtgccctagattctagctttgcaggtcccctcctccctcgtggcactgcctgcatctccgtagaagggaggtcacagcatccgcgggatggtgatttccccaaaccctggtggcccataaactccacaagctaagcctggtcacttcacccctgccccaaagccaggtgcaaaatccacaacaaggatcctccctctgaggtgtgttcagtgtgctcaggactcctggttcctgcaaagatgagttcctagaccgaagtggcccagagaggatggagccaccactccagctcttgacccagaaagagggggaactctcaagaagggcaggaagaaggttctgtggcttttccaccaggattgtagaaagaacctggtgtatggaaagtgtgctgctacactcagggggagttggagtggacccaccggcctgcaccagggggaatgccactgattctgctgccccgctgaacttcccatttgcccagagaagcaaatgctattctgatttcctgccctgcctcaggccagcaccagctaagcagctaaggtgtatgtcatcactgacaagccaaagggacgcatctaacctgggccgcctgggggcatcccctgggctatgccccgataggttggcgagagtggggagatgctctcagatgggccagccatggttgaaatataaagctggctcaggtggctcctcaggttccgccctcccctcccaccttcttcagcctgagaatagtccctggcacaagcaggtaatcagtaaatacttgtggaatgaatttattaactggtttagaaggaggactgggaggtaaaatggaactgagaaattcgcagtgccagtgggacattttccctcatcaaggggcactttctgagctcagagaagtagcttgtggcagacaagcctgaggaagcccacgtgtggcagagagcaatgcccaagcttgtgatgggagcttcttgaagggttcctgtggtcttggggtaatttctgggcacaagctcagagttcagctgttgactgagagggaggtctccaagccaaggtcttatgcagagctggagcctatgagcaacatcacccgtcagtctcagctttgtcctgggacaggggagggctttgcaaatgcagttttgatctttcagggtctgccccatgaagcctccttaccatggctactttggcctgagaagaagaaatgattcagaacaaggaagagagtagaggaaaaggcttagctgggaatttttagacagtcaggttaaagccaccatcttctacaatggctgagagcaccacctccctttggatatggagttggttattacaatggggtcagggaagggcagaatgtggcnnnnnnnnnnnnnnnnnnnnnnnnnnnnnnnnnctgaaaaccaaggcaagccccgtagggagataaggactaagccagggacctctactgtggcaacttcagcagcagagtcccagactgggacccagtacctgagcacagaccaggccctgactgttactaccaggggggcagggagaaggtgtcttgaactggcattttggggacgacatctgtgttgcttctttcttgccaaacccacacctctccattagggccccccacccctccccaccaatcaaccaattacaaacaccacacacagtattactacactgaacccgtcagcccctactgtgagccaacccacacccagagtccaggtctccttagctgggccagttcagtgagatctaggaacctcaggatacatcaatcacagtcagataattataattttagaatgtcagcttcatacttaccagcactgtttattttaatattttttcctgttatatgtaatatacataacttcaaagcacatccgtacaaacctcctacaagctgcaccttcataatgagaaaccataagcatacaatgtctacttcccttcctgtggcttcgttttctgttcttgctttcttttctttttctcatttcaaaggagagtcatctgcagtggccctcagaaggaccaggacacagagggtgaagggtgtggggtgggggaagggggaagggggaggagggagccgagacagaaaatgacagcaagacattgagagttgagggtgaggggaggcgggagagaggaaggtaggttttgcagcccagtgtcaagatccagaaagtaagaatccagtgttcctcctctttctttccaagtggggaattttctttttttctcggaaaatggttgactgtgcgtgtcttgctgctgtgacttctcttgctttgctgtgcaagtgttttcctttgcattcaagtgggccttagagatgctggagaagaacaaatggaattgctcgtctgctaactgtaacgtgcagaaccagggcgggagggacttctacaatcatcgtggtctggcttgcgtttcttatttggcgggggaaaggggtgagcaagggattatagttattatataattttttttcttgaaaaaaatcccaccagttcttcaatttgtctgcaaaggaaatgtaggtgttcagatgtcggttgttgctgtcagccaactgctctgccagccccagcagcagtgcaaggatgcggtgtttcctgtatatatatctatatctctatatatctatatatatatgcttttcccttcccagtctctcatcagtgacagtacgtcgcagctgggacgtcagtgttgcgtcggagaatccagaatgaaggccccttcttaatggttctctggcttgggttggaccagaaatgccaggatctcttcacagaggtcaggattcctgtggcttcttgtccctctcctctggggatgggtctgtttctctgtatacgacagctttggttaccagcatatcaggatgctgcagtttggcctccttgatggccaaagccagggcctggtcttgatcgacatcttcatccccagtaatgatgattcgcttctcgatccttgtctcagaaaaccctcctttcacagttttggtgacatgggtggtggtggaggttgagagggtttccgcagtggcgccgtaggtgctggtgaggacatctttcccgatgatcggagaaagagaacggatttccgtggccaccgtctgtgggcctgggatcatggcagctgcccccttcccggacttgagactgttctccatggtggtcgatatggtctccgtggtgatggagggagtggttgctatgaactccctccccactgaggcactcccatcaacctgctgggtgttatccatagcggagactctggtctgcagtacggcctccggctcaatcttctttctaatggccagactgctgacagtcatggtttctgttttcacgggctcaaactggggcatatccggggtggagcaggcccctcgatccgggctgtcctcaatgcccccagactcatcatcctggctgggggcccccttgttgagatcccgggagaacagcaggccctcagtgtccgagtcgcttttgtcccggtcgagctcaggcaggctgcgggagaagtcttcgaaggcgctgccatggtagtcaccaatgaccgtgaagtccacctcagcctccaggctagacgtagagctgaccgtgatgctggagcacttgcgctcaatggccaggtggttgtccttcaggaacaccgtgtccctctcctggtcctggtcctcatcgcctgtgtcactctctggggcccggggacgtggtggtttgactttctcctcggagccctccctcagccctgctctctcattggctttctcaggggtgcccttgggggagggggaggcgggggaggagggcagcctgcgctcccgttcccagtctcgatcccggtggatgagtttgctgttgggctccttcagggtccttttgagctcattgatgctggcctggtgcttcagcaagacatcttctggcttgtctaagaactcctgcttgtgtctcggcgtggtttcctgctccggctttagctccttgatcttggttggagtcctgacctctccctcctcagcctctgaccgttgccccccagactcgccatcctcatcccgcttgtcaccgtcaggccctgcatcatggttctcgctgaccgaggctgggcgggagaactctgctccatcaaggctgcgggacatggtgtaccgtttgctggaagaacgctcaaagaagggtgcaggccggtcaatgagggcgctggcctggcgagtctgtgcctgggtcctcccactgtaccggaacttggagcccatcaccaggaagcccttgggtgggggctcaggggacaccagccggaagaatgtatgatgctcgatgcagaccttccacagtctcttggctgaccggtggtttgggagcttaaagccaattgtgctctcaaattgctcatactccccaggccggatcttgatatagaagttactcctcttgtaggagatcttgaggatcttgggccaggcaaagcggttgattctcagccggtcccggtagatgagcaggccattgcacaaacgcctaacatgatgtcgatgccctcagagtccttggcatggtgcaggtctactccgtacatggaaagcttcttggcattctctaagaagtggatttctgcttctcccggggtcatccccctatatgtcttatgcagctccatgatcctctcctccagctcccgggtctggttaggggcgaagcggagctcgctgacatagttgcccacatgctcctcagcatcatagtcacccagctcagcctgcacagcgtaggagcccagtagggcatgcgtgacaaaggagcatggcagccggcccgtgatgatgtctgcccgcagctgcaggcacaggtagtatcttgtgatgtcttctgtcagctgggcaggatcaggcgggtagaacttgactgtgaaggcaaaattccaggggctactccggatctgcttcttgatctccttggaggggtccagccagttcttctggctgtcagcatcacagaaggtcaggccgaagtagtccttctctaggaggttgaggtgttcacagaccaggtcaaacagcacctggccccggccatgtttctccacctcacactcatactccgaggcatcaagcagagtgacccggcagatggcactcttgtatttcttggcaatcttctggggcgatttctgggccttgctgggcgtggtcctctccgaaaggccatcggcctcactgtagtccttctcctccatgtctaggctctgttcagcaggccgcgtgtcctgctgggatggatgcttctcattggagttggcctctgggtggccgtggcctgcaggggtcacaggggtggtcacagcggcagcagcctcgggctgctgcggggcctcctcctgagctttcttcacctcagagtcggggcctgtctctgttgtcatggtgaccagcacgcctgggcccggggttccccatgtcgggcaggttgggcgaggggcggccccctcggctcctctggcaggcaggccgcggggcggggcggcgcggggtcgcggcgggctctgcggagcagcctgttcggcgacacccccgcccgctgatg

SEQ ID NO: 48999 - DNA, 586 bp, Homo sapiens
aatggcatggtgccgcggtcctgtcttgctgtgcctgcggcaggggctcggaaccaattcattcctgcacggcctggggcaggagcccttcgagggagctcggtcactgtgttgcaggtcctcgcctagagacctgcgagatggagaaagagagcacgaggcggcacaaaggaaagccccaggagcagagtcttgcccatctctccctctgagcatctcggacattgggactggatgtctttcgtcactggaaaacctcagactgccgacgctgcgggaagagtcatcacctcgagagctcgaggactcgagcggagaccagggccggtgcggtcccacacaccagggatccgaggatccttcgatgctctcgcaggcccagtccgctaccgaggtcgaagagcgtcacgtctccccttcttgttcaacttccagagagagaccctttcaggctggggagctgattttagctgagactggggagggagaaacaaaatttaagaaattatttaggttgaacaacttcggactcttaaatagtaactggggggcagtcccgttcggcaagatcgtggggaagttcccc

SEQ ID NO: 49000 - DNA, 1908 bp, Homo sapiens
  misc_feature (1)...(1908): n = a,t,c or g
ttttttttttttttatcgaatataaatgtttttattgaagcagcagtcacatgaccttatatctagcctttagattaggcctgacagagtgagccagccctaaaaaaatgatgtttctttttgcactaagagacataacatgtttacatacatcatccagtattggaaatgagcagactcaaacacaacatgtgttggttacctgggaggtacagccccactgttcgtggtgtccatatattttacagagacccccaaagaccattactaataggatgaaagttaaaagaaaatacagccacaccaaatcatgaacacagtaatcaaagacagcagcttatacacatttaaaaactgtccctttcagagttgttttctttcttttctaagcagtgtctgcaaagcttcctctacatcaaatccaaaggtttccaaggtggaagctgcacctcttggggctacacaatggaataaaatcattggaaagaacaagaagtggtattgatatcttgttctgtataacaaagattaatgtttccctaattagaggaatggaaatggtgatgtgactacatattgcagcggcaaaatagtagggtgaaggaagagggttgggtattgaaataaagaccacacacttgtgaattttaatttcatttccaggctaacctactttttatttaatgcaaattacagtaccagttaactatttccaaaccaagtcacatagaacaaaatgtatttacaagggaatggggaaagggaaaaaaaacattgagcatacttttcacaaaaaagtttatatttaaaatgaaaaaaaaatcagtcacagaggcattcaagtagtaataatgttatacagattttgcttttcctttatatcaagacagatttgcacaagtgtttgcaatagtttgtatacaacccacagtcctttatatatatatatatatatataanancnncngttttttaggtttgtttttaagatggaagtggtcacgctaattggtatgtgtacaggcccaagtgatccatcggcaacacatttataaatgcaaattttacaggcaagcagattttcatacaactatctgtatctgcctgtagacagatatagttaaggaaaaaaaaacttaaaaattaacacaaggaagtctactttgtcaagctaaccccttatgtactggttgtcattttgcttttattgcagaggtgcaaaacggagcaacaaacttgaataaaacggcataacccttgtgaaaataatccaaaccccagggattactttcaaagcctctcaaaggtagatctcagtctgggactctactgtgcttctagttgtctcttttattttcagtggctcaggtttctaccagaaaagacagattttattgtaaagcatacctacttttccacacaggggagaaaagtgtttggctctgtgattagatgatcactaacatgaacagtaggaatcagatacaatttcagttgaaaagaaagaaaaccccccaaattcctggggatctggcattggccaaacttcctttggaagattccaaagttaaatcctttaaaaaggaaagggaaaaatagatgaaatgccagtgtcttcatatccacagggatagagaatactcctctcagaaacctttgcattggtgcagacaagatgactggttaggcatacattgttaaaacataaaccaaaaatgtgtctaaaaattaagaggacttaaaaaaaatgacacagcatgtcactggaaagaaggtgcagtcttctgccttgctggaatgaacacacgatgtttcaaaaatagtaacctttggtttggtagttttttcttctattcaagacattttatatggactactttgaggcaaaacattccctcgtaccgaatc

SEQ ID NO: 49001 - DNA, 1049 bp, Homo sapiens
  misc_feature (1)...(1049): n = a,t,c or g
ttttttttttttcatgtttgaaaggtatgtattttattactcttgcaggtattttggacaaaaatattgaccagctaattatgctcttccacacatcatgttcactgagtttactaccacagttttagtgcaacaaaatatctttgaaaagccactctacagtaattatggcaaggctcattaatatgcagaggtaaagatttcatttgtatagaaacttagaaaataatgtttgaaaaggaaagccattccatcaggctaaatattttttgtatattaaaaaatatatataaatatttcttgaattagttttatagtcaattttgatgcagtgtcattgagtggtgataaattttgagaggtatatgttaaacaaacatcatacttgagattatagtcttaggtaaacatttaatacacaatgtcaaggtagttccctttttaaaaaatttttgtaccaagtaagtcatacatttaatgttgacatttcttcttacctgtgtgcctcacaccaataaagtactctgcattaaaatttaaatcttgagacagtagtacagcattgaaaaaaaattgtaaagcagcttagatacactgaactcagattttacattttcatttgtcagattagaatataaaaagtaagcttgaaaatcaacttgaaaaagcttattcttcctcaagaaaaagtatgaacaatctgaaaatgatcaactagtgtgaatgaacattgtacatagttaagtcacattcagtggttgctaaacataccactccctcctggaaattacggaaccatctacatgtgaaactaagtcatcttcgttttcatcataatgttcatcactgacaaacttcattcccatttttagatcttcataataatccattggtctttcaaacctattgagattttctacattgttccactgagttttttcaggctcttctaaatagtctttacgtattagattgttcactggatttttgttttctttttttacactgtctgggtaagaatcaagctcatctngttgaagaacatctat

SEQ ID NO: 49002 - DNA, 1246 bp, Homo sapiens
tttttttttttaggttaaattacttcgaaactttaattacagatacttttccacgcaacatttctgaaatgaaagctttgattctcccctttttttgcataaaggctgggaaggtggtttggccagaccgtacatctttttgtatatacatatctacacctgtgtctcttctttattaataaaaggtgtcttgatcacagtcccaaaccaactctgcattggattccagcatataaaactcagagagtaaaacaatttcaaaggaagacaggctgcaaccacaggaaaatggcaggaaaagttgtagcttgatagttgtttcttctaagtttaactcagaaatataataataattaagagaaaaaaataagaggccctagctttcatccctgctaccaaacacgctcgtccagaactctaggctgtcttaaagtgcaattactgttgtgaagttgctcaggccagggatcaggctggacggagttcaaagcagaaacttcaaacactccttgctgttcatgactcaggggctgggagggagggagaggagaaaaagaaggacagttctctggcattcaagtgcatcaaaagaataaatgtcttttcttttggtaaagaaaatctgtcaatagtaaggaatcctggtttggaaaaatagaactttctaaaacttctatctgcggatgttccaatgcagcagagggacaagacaggcaagtgcagccagcagcagggaccaggtgtgcctcccaggggcccggccatacaggctgcttccactgtcttctgcgaggtcctctgccctcggcgaagaggaggcacactggaccaagggcatctggtaggacgtggctctcttctctggcctgtctgggctggacccgtcgctgggcctctgaccgttgaacagcagatagcgcccccgggcatcctgttccattttgaagatctcgtactccgtgtgaggtagtttgatgcccagggccacgcagccattggtgtgggtcacatcctgctggatgcccacctgcccaggaaccctcggccccgcactcattcccgttgaagacgttgagcagtgaggctgtggccgcatccatgggggtgaccttcatgtgattcactttgaacacgaactcggtgcctcccatgaccctggacgagaggaacccgcggctgtagcggccccgggcgtagatggagaaggtggggtgcttgcacaccgggtctgagtagtggtagtagt

SEQ ID NO: 49003 - DNA, 2001 bp, Homo sapiens
ggagcgcgctgctgtttagagccacgagttaccggagcgcctgattcctgcgccgaagtcagtggtggccgaaagtccggagtcgctgtaaaacctgagattgtgagccatggtggggagatcccggcggcgcggagcagctaagtgggcagctgtgcgagccaaggcaggtcccacgctcaccgacgaaaatggagatgatttaggattgccaccctcaccaggggacaccagctactaccaagatcaggtagatgactttcatgaggcacgatcccgggccgcttagctaagggctggaatgaagtacagagtggagacgaggaggatggcgaggaggaggaggaggaggtgctagccctagatatggcgatgaggacgacgaagatggagggaatgcgggggaggaggaggaggaggagaatgccgatgatgatggtgggagctccgtgcaaagtgaagctgaggcctctgtggatcccagtttgtcgtggggtcagaggaaaaaactttactatgacacggactatggttccaagtcccgaggccggcagagtcaacaggaggcagaggaggaggaaagagaggaggaggaggaggcacagatcattcagcggcgcctagccccaagcgctgcaagaggatgattttggtgtcgcctgggttgaggcctttgcaaaaccagtgcctcaggtagatgaggctgagacacgggtcgtgaaggatttggctaaagtttcagtgaaagagaagctgaaaatgttgcgaaaggaatcaccagaactcttggagctgatagaagacctgaaagtcaagttgacagaggttaaggatgagctggagccattgttagagttggtggaacaagggatcattccacccggaaaaggaagccaatacttgaggaccaagtacaacctctacttgaattattgctcgaacatcagtttttatttgatcctgaaagctaggagagtcccagcacatggacatcctgtcatagaaaggcttgttacctaccgaaatttgatcaacaagctgtccgttgtggatcagaagctgtcctcagaaattcgtcatctgttgacacttaaggatgatgctgtaaagaaagaactgattccaaaagcaaaatccaccaagcccaaaccaaagtctgtttcaaagacttctgctgctgcctgtgctgttacagatctttctgatgattctgattttgatgaaaaagcaaaactgaagtactataaagaaatagaagacaggcaaaagctaaagagaaagaaagaagaaaatagcactgaagaacaggctcttgaagatcaaaatgcaaagagagctattacctatcaaattgctaaaaataggggacttactcctaggagaaagaagattgatcgcaatcccagagtgaaacacagagagaagttcagaagagccaaaattagaagaagaggccaggttcgtgaagttcgtaaagaagagcaacgttatagtggtgaattatctggcattcgtgcaggagttaaaaagagcattaagcttaaatgaagtttttgcttagcataaggtttttggcagttttggatcaataaatttttacttttaactaaagtcattgtattaatatataatactttaaattttaaaaattcttgtccacaaggaaatttgtctgggttattggacaatttataagaactatgggagcaatatgaaggtgcttgagaaaagagatgatgttgaagttttccaatattctgttgaagttttccaatattaagtattagcttagggaaatttcacagttcattgtggagtgttaaacttagaacatgtgtaacttttcacataaagagaatgcatctttgacagttatcttatttgtaaggcagcctataaaatagttctgaagtattttatttacctaactataattattgggccagatacttgttaataaatgggcttaatgttaacatggaaaaaaaaaaaaaaaaaaaa

SEQ ID NO: 49004 - DNA, 399 bp, Homo sapiens
gtccttcacactctcaggctacgtcattatgtggaataaagccattgaactgtcatctaaatctcacccaggacctgtggtccatataagtgataatccaatggacgagggaaagcttttgattggctttgaatctggaacagtagttttatgggacctcaaatcaaagaaagccgactacagatacacatatgatgaggctatccactctgttgcttggcatcatgaaggaaaacaatttatttgcagtcattcagatggcaccttgactatatggaatgtaaggtcccctgctaaaccagtacagacaatcactccacatggaaaacagttaaaggatgggaagaagccagaaccatgcaaacctatcctcaaggtggaattcaaaacgactagatc

SEQ ID NO: 49005 - DNA, 2237 bp, Homo sapiens
  misc_feature (1)...(2237): n = a,t,c or g
cctctcgaaggttatcgacactggccacgtcagtgcacctttgcggaccagcttgcgcctaagaaaagccgggcatctcagacaatcctgtacgagcgccatgtacgaatggggctgcctccacaccgtgatgtggctcagcttgtgcaccattgtccaccactgtaaccgcgcggcagtaatccccacaaggaacgctcgcctaataaagctttctttgttccccttgtctttctttttgacccaagatttactgttaactnacgcaacattgtgagattaatttttcttatctccaaaatctctcgtttgaagatagtaaatctcaaaacaactgatcatggaatcacacaggactgcctcaaggactgcgtggtaccctctgctatccatccacacacagtgaaatggatgggagggatgagggaacaacacatcatgggagacaaagggaagaccaaggaaagtgctggcagtctccgcttttccattcagaatggatggaactgggccgttagtggcactaagacagggcagggctattttttttttttaaataaaatattttaaagatgcataaaatggacaccttagcacgtgagtgtcctttgggctcttcaagacaccttctttaaggtttacccctggagtagcagagggtctcctcacccaggtggaaagagatgggctccatctgcagatgaaggaaaggcactggcgcacagcactcagcaatgtagatacaggcaccaggtaggagcaggatggcttacccagcaacctgcctcttagctccctgctagtgttcttccctcctccccagtttccagttaaaagtacccttggcctgggctttaaaaaaaaaaaaaaaaaaaagattaagctggagagaaaggggatacacttgggcaagaatggatattttgtgctagattcatggaattttctaagtgtccaggagttttggttttaagcaccggcaagagctccctttggaaatttcagtgtggccaaatgattatcaagcattgcagcatctctgccagcctcccacccttagaaaggtggcagagtgagagtttaaatacccttggaaatgtgtttcatctcagtaatatttccactgggtatccatgacatacagtatggtctgccagggctgcaggcagagagccataagcaaagagaatccacagacccgctgaacagggactcaagccttctcctaaatctaagctttgccaaaaggttatcaacttccaggaccagcctagagaaataaatttaaattccagagagtaggctaggtgatgtaagtgactgactgaaaaaacaagtatcaaataactccttaaagttttcagttagaaatttctgtaagttagcctcaagaaactccactactaaactggaaaaccatgactaggaacaggaagcggccctggggtagaagcattctaaagaattgtgaccccaactgcatcaatatctgatttcatcttttattaaaagctgagagttaaagaactgtagggataactaagtccacctcaaagtccagacagaaactgccctcccaaagaaacaatgtttctttaaaacaaataccacaccttcccagatattatgggtaggtaagtgactaggttttgcagattaatctatagctgcccatgtgcatgtagtccagaaaacatgccaagaaggaagagctctgaaccagacacagaaaggcagtgtggcttcctcgctcaaggggaatgcaaagggctaagagccctggcttcaagcagctgttatgctagatgaggaaaatgcaaacagattcaatctctgggatattgctgccaacatgctaagcccttcaccagttgccttgattcgaagcagttcctctatgtatactggctaaatgatggactccggcagtgaaaccccacatactcagcaggctgcattctaatgagaatgaaggaatttaactaatggtgtttgagctggaaaggtaaggtctgagagtcccagtgagctggaaacccaaaaaaagagaagaccaatccacctcaaaataagaaagaaaaacaaaattcatttaaaggtactctaaagatgagttctttacttctggaagaagaatccttttcttatagctccctcaacagcaatacttcttatccaagtatactctcaagcaagcagggctacagataagaaaatgctgggaagaggcagagcat

SEQ ID NO: 49006 - DNA, 1127 bp, Homo sapiens
tttttcagaatattcaactttattttccattgacaaacacgacataaataacacacatttattaaatacacagactagccatgacttgaatgccagcaaaagtctaacgtacttttcatacgctcttttattttttgtctccacagtattgaagaccagcctttaaaacatactagaagatatatttaaatacactgacgataactacccataaaactttacatagaggtgataaaagagacttttccatttaatcaagtatatagagatggatgctgaggaggagaggtgaagaacactatgcttttgatactgatctttacaatatggattaaagtgccaatgatttcagctcctcctaggcacaccatgtaaatagtacttacattcatttgttacaaacagatcaaaataatcagtgcctattttaattggtttgcttaaacaggcttacactatttgtacaaaaacatttgataaggagagcaagaaggcaaagtatttttttctctttcaaggaagagttgggaaggaagagagttcagcagtcaataatggcctgagtgaacttatcatttgctttgacagacaagacccctggccactcagtagtactactgatgctcaagtgttcaaagataaatgcagtcggtcccttcctctctttgcttccagggcctggcacaaaatgatgaaggttaacaggtagaaaatggacaggttttccatcatatctttttctatgttctctgccccacccacatgagtatcctttcaaaagtagaacgttgaagtgtattagtaaatcacacgcatttccctctgcttaacattacaactttgatttctacagacatggaaaactgtatgagaaatctatatttgaattactattaaagtttaatgattggctgtttttgcctagacgtttggcttactttaattaaaggatcaaaatattctaattctaaagcatttaacaatagcattgaagagatgcacaaatgataataacttgagaagtggaatcatctccaaaaatgctcaaaaaagcatgaaaaggctgacttgtttctgatggtgatctctttccttcttatctttactcccataataaattcttcaac

SEQ ID NO: 49007 - DNA, 4556 bp, Homo sapiens
ctgctcccaaaaatggcggacgcattcggagatgagctgttcagcgtgttcgagggcgactcgaccactgcggcgggaaccaaaaaagacaaggaaaaggacaaggggaaatggaaggggcctccagggtctgcagacaaggcagggaaacgttttgatggtaaattacaatcagaatcaactaataatggaaaaaataagagagatgtagatttcgaaggtacagatgaacccatttttggaaagaagcccaggatagaagagtcaataactgaagacttaagtttggcagacctgatgcccagagtcaaaggtacaatcagttgaaactgttgaagggtgtacacatgaggttgcacttcctgcagaagaggattatttaccacttaaaccacgagttggaaaagctgctaaggaatacccgttcattcttgatgcttttcaaagagaggccattcagtgtgttgacaataatcagtctgttctagtatctgcacatacctcagcgggaaaaacagtatgcgccgagtatgccattgcattggccttaagggaaaagcagcgtgtaatatttaccagcccaattaaggctctgagtaaccaaaaataccgtgaaatgtatgaagaatttcaagatgttggtttgatgactggtgatgttactattaatcctacggcatcttgtcttgttatgaccacagagattttgagaagtatgctttacagaggttccgaagttatgagagaagttgcttgggttatatttgatgaaattcattatatgagagattcagaacgtggtgtagtatgggaagaaactattattttgcttcctgataacgtccactatgtctttctttcggctactattccaaatgcccgacagtttgctgaatggatttgccatttacataaacagccttgtcatgttatttacacagattatcggcccactccattgcaacactacatttttccagcagggggagatggcctgcatcttgtggttgatgaaaatggtgacttcagagaagataattttaatactgcaatgcaagtgcttcgagatgcaggtgatttggccaaaggagaccagaaagggcggaaaggaggaacaaaaggaccatcaaatgttttcaaaattgtgaagatgattatggaaagaaatttccaacctgtgattattttcagttttagtaagaaagattgtgaagcctatgcacttcaaatgaccaaattagatttcaacacagatgaagaaaagaagatggttgaagaagtattcagtaatgcaattgattgcttatccgatgaagataaaaaactccctcaggtagaacatgtacttcctcttttgaagaggggaattggtattcaccatggtggtttacttcctattttgaaagaaactatagaaattctcttttctgaaggattgataaaggccttatttgccacggagacctttgctatgggaattaacatgccagctagaactgttttatttacaaatgcccgcaaatttgatgggaaggatttccgatggatttcttctggtgaatacattcagatgtctggtcgtgctggaaggagaggaatggatgatagaggaattgtaattcttatggtagatgaaaagatgagcccaacaattggaaaacaattacttaagggctccgctgatcctctaaatagtgctttccatttgacctacaacatggttttgaacttactacgtgtagaagaaattaatcctgagtacatgttggaaaaatccttctaccagtttcagcattatagagcaattccaggagtagtagagaaggtaaagaattcagaagaacagtataataaaatagtaattcccaatgaagaaagtgtggttatctattataagattagacagcagcttgcccaaattgggtaaagaaattgaagaatatattcacaaaccaaaatactgcttaccttttctacaaccaggtcgtttggtaaaggtaaagaatgaaggagatgactttggctggggagtagtggtgaatttctcaaaaaagtcaaatgttaagcctaactctggtgaactggatcctttgtatgtagtagaagtacttctgcgctgtagcaaagagagcttgaaaaattcagctacagaagctgcaaaaccagctaaacctgatgagaaaggagagatgcaggttgtcccagttttggtgcatctcctgtctgctatcagcagtgttaggctttacattcctaaagaccttcggccggtggacaatagacagagtgttttaaaatcaatacaggaagttcagaaacgttttcctgacggcatccccttattagaccctattgatgatatgggcattcaagatcaagggctgaaaaaagtcattcagaaagtagaagcttttgagcatcgaatgtattctcatccacttcacaatgatccaaatttggaaactgtgtatacgctttgtgaaaaaaaagcacagattgcaatagatattaaatctgcaaagcgagaactgaagaaagcaagaacagtcctacaaatggatgaactcaaatgtcgcaaacgtgttttaagaaggttgggatttgctacttcttctgatgtaatagagatgaaaggacgagtggcttgtgagataagcagtgctgatgagctccttctaactgagatgatgtttaatggccttttcaatgacctttctgcagaacaggcaacagcattattaagctgctttgtgtttcaagagaattctagtgagatgcccaaattaacagaacaattagcaggaccacttcgtcaaatgcaggaatgtgctaaaagaattgcaaaagtttcagcagaagccaaattggaaattgatgaggaaacttatctaagctcatttaaacctcacttaatggatgtagtatatacctgggcaactggagctacatttgcccatatctgcaaaatgacagatgtctttgaaggcagcataattcgttgtatgaggcgcctggaagaattgcttcgacaaatgtgtcaagcagcaaaagccattggaaacactgagctggaaaataaatttgcagaaggaatcaccaaaatcaagagagatattgtgtttgctgccagcctctacttgtagagtcagctaaaggaatgtgagattttaaattattgaccacctgtttgattacagttgactacaaatgcctgcaagtgtggatttggttctcccatacattttaatatgtattatatttaaatcaaacatcattcatagaaagcatattacatacatgtttatacataagcattacatttttttaataaaaatgtatacaggtggggcactgttttggtggaaggcttggagtttttttaatgagtttagagctattagataaccactgagttaaaggtaactatgtacacacaaagtgtgccatccaagaggcatagcagcagcagaaagtctttaaaggcttgtacaccaggaagaaagatgcatccctcttgccttgtggcaatccattttccctttagaaaacaggccagcttcacctgggcaccctgctgccttttcaaggctggtggattgctcggatagtgattcccagttgttggtgtttcatgcagagttgtatgagagtcctcctcttttctttctttaaaagaagttctttctttgaagaaatccgatacatatacagcaactaatattgcaaccagagctccctgaatgagtccagtcaacacatcgctccagtggtgtttataatcagaaactcgagaaaggcccacataaatggatacggcaacaagaccaaattgcagtgtggggcgtaagagtcttgcccagtctcccttcatcctggcttgaagataaagtgccacaaacagcatgcagtacatggaaaacgaagagtggcctgaatagaaggacaacctgccttccttaactctttctgcattccctcgacatatgtagtattcaatgtaaccatcgctgcagttgatttttgaccaatctggatcacaaacatccaagaagtgaggccgcagtctgcctattgaatacttggcaatgtcagtcagggactgacctagcagctgcaccaaataaaaaggttccaatggctttgtaaatagtggctatgtagttattcctgataaaggaatttgagtgcaaaaaggttacagtaaacagacagggtttctccaagaataataacgataatactgaatggaatgattattccacctaataacgcataaggtatggtgtcttctttgtaagggtacttgatggactcatcattacagaatactcctcgttggaagggggtatgccttgaagtaagaattgcaaaaggcaatccagccagcaacacgcagagcacatcgagggccacgtacggcagccgcgtcttgtcaaacatggtctctgcccgggctgcccggcaagggcgatggactgagctgcgggacggcggccgaggcccttgattctcgagcccgggccgggacctcctcaagccggcacggcctgccccgg

SEQ ID NO: 49008 - DNA, 1540 bp, Homo sapiens
gggggccatcttgccgatttaacgctgctttttgtgttgttgttgttttccctcctccctgcctgcctgccccttctcccccagcgaggacggtgtcgtggagaggtccagccccaagtctgagattgaggtcatttctgagccacctgaagaaaaggtgacagccagagcgggggccagctgtcccagtgggggtcatgtagccgatatttatcttgcaaacatcaacaagtaagctctgcttttcattttctgctcccctgaatgacttgcaacacccagcctcaccctctggcctaacccccatctccattccctgtgctgcacgtagggctcccagctccccgagcctaacagtttgcatgtggtcattgctgctgcaaggcggacagggctgaggatgctgctacaagcctcggggcaggtccaggtctccagctagctgccctcgtgctgtggaagggtgctttactgtgtgttcccgcagtgtctgtccacccagacctttgtggcagtcttacagctaaaactttgaccaaagctttggtcactttatgcaacctggttttgtactgtttctcagaggtgccttcttttttccaatccatactcaaataatagtctttgatgtctgtcttccttgacccgtgttcgtgcaaagattcagagtctgtgtgtgggcttctactagggtgatgttacaacaggtggggtttaattgaggatatcaagtgtctgttcctccccctgtcctgcattcactcctgtggaggaaaggaggccacgatgtccctaaggaaagctttgtcctgagctcttcattcattggctaacccctagctcccttttcttctgccctttcacaccaggagaaataattttccattttgttcctattgctttggccttttgtattattctacccccttagtccctttgcagatccccactcctgctcagcaggctcttacctctgacccccagctttcattgtggctgttagcaacatcctggggtttaaactccacccacgcccgatctggctgtctagagggattctacgcctgcgtgctgccgcctccccaagaggcattcaggttattggagaactaatctcatctcaaggggccagacaccaagtcccaaagcctacagacctctttccgccaggccctgaaacctggccccgtgccagcaggatgacaagccccagggcgctcctgatgaatatggattggagatgatgtacagtttttattcccctctggcttttgaggaatgaaatgatttgcactttgaaaacctgttaaccgtagcctctggacactgagactggaaggagaataaaggatgcttgttgtttttaaactataccaggtttcccagatctcttggcttttttccacccagacggtagcagggggagtggttggggcacgtggctcttttccatctctttcaccctcaagttagtaaagtcgtttattcagatcacttactcagtgtagttataatttaattcagaccagttaaaaaaaaa

SEQ ID NO: 49009 - DNA, 683 bp, Homo sapiens
gtgtgcattaaaattggtttctgtaaaacgtgtaataagttgagtatctacgaagagtatcaagttctgaagtttaatttttttattatcctcctctcttcttagtaacttctttctgtggcaaaaccacaattctttaagattcctattgttcaggctaaggcaaatttttttgtttgtttcttcagtttaatattttgattttgtgtttttacgtaaatatttatattccttgaaagcaatttttgccaaggtagttcagtttaggaatatgttgttctaaaatatgtcttagaatcctgaaagcatagattttgaaatgtttttttaatgaaaatgaaggtcagagagaataattgccctgaccacatttgcctttcagtaggaggaggctgtgaaatagtaaaattataatcgtttatgccatgataaatacaagattggtaaataaatacattgattggtaaattatgagaatcaaaatgataaaaagagcctgcttttttccctaaccaatatagctatcttaagtatccttaggtttctgtgaagaaccatttcccatgttttcttggcaaaataatgctgtattccatatgtacatgtgaaatgatgttttaaattgataaaagcttaaataagatctacctatacccagtattttcatgatattagaacaaatg

SEQ ID NO: 49010 - DNA, 651 bp, Homo sapiens
cagcacctgctttctgcatctggaccctgatcttctggtgggtttaccagttacttgtagagtgtccctgtgatagttttaggtgtcaacttgacaggattgagggatgcctagatggctggggaagcactgtttctgagaaggaccatgtttttggaggagactgttttatgagtgaatttcaggggacacattcagatcatggcagtggcattataaagagagacacaaaagcttgctctctctctctgccatgtaagactaccacacaaagactgccatctgcaaaccagaagcaggtgggctttcctcagacaccagatctgcctgcaccttgatcttggacttgccagcctcccagaactctaagaaagaaatggtagcatggcttggtctaagttggaaggcctgagaaacaagcacatggtggaactgagttcaaggataaagacttgagaatacctgctcagtggactgagtagggaagatcaaccctcaatgtaggcaggcactatccaatcacctgagggcccagatggaacaaaaaggtggaagaagggtgaattctctcttccagagctgtgacacccttctcatgcccttgtaccacacaactctaggtcctttggcctttggactctgacacttgca

SEQ ID NO: 49011 - DNA, 960 bp, Homo sapiens
gtctggggagtgggtctcacgcactgctcaggttggcacgagggacctcccccatcccaacccagccccaagggtcccagcagggctctcagcatggctgttttgagggtacacaggtggctggagaggggtggggcagttgcatggtgggtggcaaagtgtgcatttagaagctgcttcgtggcgttaagaacggggggagagggaccagcactgtaacgttagaaataattccttcttgcagacttgaaaagcatcagtttccctcccacggctgggtttttgtgtctgaaatacatctaattctccagactgcagcccctctcaagccccgagcaacctgaagcgctggggaaggcccttattgaagctcagcctggagaggggagggttcgcacggggtcccgggggcaggtctcctgcactggctcttcccttctgccagcttggaatttggttctcatcttgccacaggggtgcgtttcctaaagggcagccggagcagctcaaaggtgacaactgagatgcatttctaggcaggggcagggaaggccaacccaccttgcagccagttttctgtttctgtaaatagcagtgtatagagatggaagggcagcgtgggtgtatccacagatgggtttaggttttttttttggatgttttctattacctcattcagcaactttatgtttcacaatgactcaatgatgctttatttatattgtttgtactgtaattaaaacccattgacagacatttcactttgcttgttatttcatatgatcttgttttgattaaatatgccagtttgtattttcctgccttgggatttttttgtgtccgctgtacagtattctaagggaaaaagaaaaagaaagagttgtaaagtaacagagagaggtggctatggtgtagagacctctttctaataaagaaatgaaaatatgtctaaaaaaaaaa

SEQ ID NO: 49012 - DNA, 596 bp, Homo sapiens
ctctctctctttctgtctcttcctcgctccctctctttctctcctccctctgccttcccagtgcataaagtctctgtcgctcccggaacttgttggcaatgcctattttttggctttcccccgcgttctctaaactaactatttaaaggtctgcggtcgcaaatggtttgactaaacgtaggatgggacttaagttgaacggcagatatatttcactgatcctcgcggtgcaaatagcgtatctggtgcaggccgtgagagcagcggggcaagtgcgatgcggtcttcaagggcttttcggactgtttgctcaagctgggcgacagcatgggcccaactacccgcagggcctggacgacaagacgaacatcaagaccgtgttgcacataatttgggaggttttccacagctgcacggtcacagcccttacggattgccaggaaggggcgaaagatatgtgggataaactgagaaaagaatccaaaaacctcaacatccaaggcagcttattcgaactctgcggcagcggcaacggggcggcggggtccctgctcccggcgttcccggtgctcctggtgtctctctcggcagcttta

SEQ ID NO: 49013 - DNA, 895 bp, Homo sapiens
  misc_feature (1)...(895): n = a,t,c or g
ctcaaaacacctgtatttaaaccttaatatgaaaatcatgcaattaatagttacacaagatgttttcattacaaaatatgtacctatatattgatggactctacatcctatattgtgacatgtaagtcctttaaaaggtgaaaagtatgatttcttaccacttaagtatgattgatatgatccaacaaatttgatcagaagctgtaggtaaatcctcttctgaagccaaaatggtatattaaatataatttattggtacttccattttctcttccttcttacttgcctttaagatcttataaaaaagaaactaaaagttaatatttagttgcctatattatgtaaccttttaactatatataaagtacttttttggtttctttctcaccacttttattcaaaagtacttttaacataccaatacatagtctgtctgatgggagtataaattggacagtaaggttttgtcttaataaaatgaaatttgtttctcatgatatgaatcttgcaggtaagatgtagggtttattgaaaatgtgtgggttaaatgctttcaggtacaccaattctttctactaaattgagctctatttgaagttctttggaatctgtggtgaaaaataattttctggatttcccaaatacattaagggcattaaatggaatattaatccacctttaaagtccttttaggaaaagggacttggtattgggtttttggctgccatagaggggggtgnaataagtggtatggtatggtggtggtncggtgtggtgtggtggccctccctaaaggaanatggtaaatccnccaaataggtttagccccccctgccgcccccaggntggtaggaatnggaantagggnccatnatccccaggttaattgggaaag

SEQ ID NO: 49014 - DNA, 1236 bp, Homo sapiens
tttttttttttttttcccagttgggtgttttattatttatttacttgacaggtaacatcgatttggtcctacaagacaccatgctataggcttagctacttgctgttgcacaagagaactttcctgaactctcaggaagcccttgcatggcctatcgaggacagctcagtcactgaagggaaaaattccataccaaagaagagagaaaaattccataccaaagaacagacttcccccagggaacctccgtcctacagcccttcagggccatcacactcacacacatcagccatcatcaaaatagtggccatgctgggaagaacaggagtcctgaactaggaaggtggtcttcaaaccatggcgtaccgatttatgtatattacagatagataaattaagaggtctacatgaataaaaaatctctcaaaggggaacgaattccattctgtcatgccaggtgtttgtcagaacctttgaaaacgaaggtggttttcagtggagcttgtattaaaaatagaaggtatttatacacaggccctgctcctctcatggccatgaaatcctctggtgttgtcaggacccctgggcaacctcagcacccctacgggtagcccatctgcagtctgcatcttccgggagagcaggggactcgtaccggggcttttctcctgggtccccatctcggcttggcgacgcctccggacccaggggctgccagagggagtgacgctgctgtcagaggaataatccatacacttgcggaagatctcagggctggtgctgcagttcagtctaccttcctcctcgaactccacgatggcgcactcctgggtccccacttggctgtagcggctgcctgatcctccggatgtcagggggcagctctctcccaggtttgaggatccgcactgatgagatgactccaaaagtcccaaaaagcttgagcaggtgttccatcaccttctcttgcacccttccattcttctggggggtggccagagcccacagcttaggagacaagtagagatcatagaccaggagcatcttgctggggaggttctcgttggggaacagtgggacgggggtggtcctccctcaccttccggtggtcctcattcaactcaaggaccactgaatacttcaaagcatgtgctgtggttctccagtcccgtgtaagatgtttcacctttttgaaggatgtgagtagcttaacgctcacatatcccagcttgttcc

SEQ ID NO: 49015 - DNA, 1043 bp, Homo sapiens
ttttgaacagctatgacatgattacgaatttaatacgactcactatagggaatttggccctcgaggccaagaattcggcacgagcaaaaagaagaaagcaggcttagatgggaagcccccttcatagctccctccccaaaaatcccttctacccatatctattgagtgcttgttatgaagaaagagagcagcacaccggccctctgtctgctgggggagactgacgagtgaacagattattccagaaacctgggggtaagcaagatagtggataggggacagagggccaaagcttcctagactgatgattagctgagctgagtgataaaagagaagtcagataattacacaaaaatgagagcggcagcccagcccatgcaaaagcatggccctgaccggaagctaccaggaaggattctgatgtgcctggcctgggtggtgcctgctccaaaacctgcaagctgggttctgggggaaacatcctctaggtgatagagcaggctgtagagcaagccctgttctgagtgaggaggacaggccctgtgtgtgatggccccacctgagccactggcatgggcagtcagttcccaagacggagtccaggacagacaaaaaatgaacagctgaaaagtgcaagtagtgtaggttcaaggaagtggtgtaggaagagggagacggaatgggatctgaggagggctgcacagcacacagtaggcggcacaaaagtctgctcagttaggtcacatgctccagaggcactcactgcaaaagagcctgaagattgaactgaaatatgccatcggctttgctgagtatgaatgccaagaggagcagagagaagtcaagccctctaggtgataggcaggaacgagctgaaagaaggacataaatcttggtttgctcagacgggcctggattatacttacgttaattatgtttagtgcccttttcatgctaagaagtgtcctactttggatgataaattgtacagtcactctaggtttaagtgatactcaggcagtctggcttggaaagtcaagtca

SEQ ID NO: 49016 - DNA, 429 bp, Homo sapiens
taaaacaaaataaattcttaatggcatttgtggaatgtgtttaagagccaaaactgtgaaaatgtaagctttatctttcttttttcctagattatttaaagaggattgtagccacaattcagatgaatgtttacaagccaaataatgatttaagagtgtgctcaataaaaaggccataggtttaagaattaaatggaataatataaattactaggtcaacaagaatatttcatgtatagtacactgtctaaggaatgcagagaaattttacaagaaacccaagactaaatacttcattaagaacactggttactaagtaaatagatggctcatgtaggaaaaagctaatatatgtagatgtaatgtcaactaagtgcatgtgacagaaatgaagaactaggaataagaatccagattttctggccaggc

SEQ ID NO: 49017 - DNA, 4209 bp, Homo sapiens
  misc_feature (1)...(4209): n = a,t,c or g
taatagaacacttcacctgaacctaaaatggtgagcgagagtcaccatgaggccctggcagccccgcctgtcaccactgtcgcgactgttctgccaagcaatgccacagagccagccagtcctggagaaggaaaggaagatgcattttctaagctgaaggagaagtttatgaatgagttgcataaaattccattgccaccgtgggccttaattgcaatagccatagtcgcagtccttttagtcctgacctgctgcttttgtatctgtaagaaatgtttgttcaaaaagaaaaacaagaagaagggaaaggaaaaaggagggaagaatgccattaacatgaaagatgtaaaagacttagggaagacgatgaaagatcaggccctcaaggatgatgatgctgaaactggattgacagatggagaagaaaaagaagaacccaaagaagaggagaaactgggaaaacttcagtattcactggattatgatttccaaaataaccagctgctggtagggatcattcaggctgctgaactgcccgccttggacatggggggcacatctgatccttacgtgaaagtgtttctgctacctgataagaagaagaaatttgagacaaaagtccaccgaaaaacccttaatcctgtcttcaatgagcaatttactttcaaggtaccatactcggaattgggtggcaaaaccctagtgatggctgtatatgattttgatcgtttctctaagcatgacatcattggagaatttaaagtccctatgaacacagtggattttggccatgtaactgaggaatggcgtgacctgcaaagtgctgagaaggaagagcaagagaaattgggtgatatctgcttctcccttcgctacgtacctactgctggtaagctgactgttgtcattctggaggcaaagaacctgaagaagatggatgtgggtggcttatccgatccttatgtgaagattcatctgatgcagaatggtaagaggctgaagaagaaaaagacaacaattaaaaagaacacacttaacccctactacaatgagtcattcagctttgaagtaccttttgaacaaatccagaaagtgcaggtggtggtaactgttttgggactatggacaagattgggcaagaacgatgccatcggcaaaagttctttgtggggctacaacaggcaccggcgcggacttgcggacactggttcaggacatgctgggcccaaccccaggggggacctatttgcccagtgggcacaccctgcaggtagaggaggaagttgatgccatgctggccgtcaagaagtaaaggaaaggaaggaagcctttcttgcattttgcccatatagtgctcttttagccagttttctgttaaatacctcagttattttgggtcctttcatttttccagccatgcattcctaacacaattcagtggtacttggaatcctgttttaatttgcacaaatttaaatgtagagagcccctaagtccttcatcataccactgccctccaaatctactcttcttttaagcaatatgatgtgtagatagagcatgaatgaaattatttattgtatcacactgttgtatataccagtatgctaaagatttatttctagtttgtgtatttgtatgttgtaagcgtttcctaatctgtgtatatctagatgtttttaataagatgttctattttaaactatgtaaattgactgagatataggagagctgataatatattatacggtaaatatagtatcgtctgcattccagcaaaaatatcaactcgtaaggcactagtacagttaaactgacatcttaaaggacaacttaaacctgagctttctattgaaatccatttggagtacccaagataaaccttaacacccacatacttggtgggtgaaatcccaattttgtagaattccctacacaggcaaaatagcatgatctgagcagcagcatccaggctgacctcaaggaagcatagccacaaaacagaatagcacctgtctgtacatatttacaaagctaaaataatggcttcactcttatatttgaggaagcaactgaacaggagtcaatgatttcatattactgcatatagaataacaacaaggtgttcnnnnnnnnnnnnnnnnnnnnnnnnnnnnnnnnnnnacatttgtttggggatgggggagaagaagctaaggggagaagtcaacatttatgaaatattgcctgactatttaaaaagaaaaaagtagctctccattatcacctttatacaaaatgtacatcctgtgaattctgttccagatttcacacctacaataattccaaaaggtttgcacattagagtttgtaacaaaatattttattatataaaaccaggttagaaggaatgcaggatatttttaacacaacaatctgtgcttattacacaaaattactttgtggtaaacagacagtattgtaatcccatcaaaagatgaaagaaaaacaaaaacaaaaaccaacaacaattagccatagttctgaatgcacttcaattaagccaaaacagacagctagtgatctttttatatgctctttttacttaagttttaatttgtcctttaaaaaaaggtgaaacaaaccaagaacaagttctagaaaactgaagcaacctcttatgtatactagatgcttgatttaggaggagtttttaaacgttttcaatgttattatgtagtaaatgacactattatgaagctactagtcattccataagagtcttaaaggactgctctgtgtaacactgtgactgccgtgtgtgcttagacccgtagtttcctcagtggatagcactcaatttattccgtagtgatattgtaacaatactgccattcccttctactggcactgcccaaggtgtgtgtagcacaaacagttctcattacaaaggaccaattcagaactgaaaagctatgcataggacaaggaagatacatagaatggggtggaacacagcattttgtcaagcactgtgcaatattccatatttttccccactatggtagacaaccatttcgtggaagggcagcctattatcccacactgcatctagccttttgtcccattcacttctgtgatccattttaatttccaggccacaagacagtagtgatgctctgaaatgaaagtttgtcttcacaaatatcaaaacaaaatggaggaaaactaagcattggcctcatgttcagtcttcaggatatcacaccacgtcttttcaaaaactaaagagaattcaaaaagggctgatggtaggcttttgaacatggggttggctgtttcccagtaaaactggaattcctgtcgttactgtttccttatcaaagaaggggcaagctcttttgccttttaggccagacatagcaaacgctttataattggcatagacataaaggataaaaggaaaataaccgtctgccgatggtccgtacttcttaaaaaacataggtaatagaaaatatacacaagtcagaatgtgaaattaaataatggtttgaacagaaaattcaaacaagactctttccaatttaaagggccaaaccctaccaaagagagggagttgactggcttttaaaaagtatttaaataccacaaatgacatttaatttcactgtattcagctttaagttgttcaccatgaaaccacactttcaaacaagcaggttcaagctgctgaatagacattatttcttgcattaaaataccactaatgcattctcttgcaacactgccagacatgggattgtcaccatagaattagttggtactatgccatctttcactctttcacaagtcagtgatggaacctgctttatgaccaagattcatcctcaaataagccacatgtacccttctgacaaagctgtgtaaagtattagaatgctgatgctctagaaagatcctagttgcctttgtgtatatttactgcctgcttgagtgtttctatgtgtgggttttccctgtatcttgtagaaatgttggggtgttttcctctgccatatggctcgtggcctgcgagccaactatttcagctgtattttaccttcatttttgatgaggtgatttaaattttgtttcactttgtgtagtgaattccacagtagttttctgattgttgttaaaaatgacttaacatattacacagatattcaataaaaatgttttatttcc

SEQ ID NO: 49018 - DNA, 1813 bp, Homo sapiens
  misc_feature (1)...(1813): n = a,t,c or g
caaacattgggaggctgaactggctaccctcaaaggaaataatgccaaactcactgcagccctgctggagtccactgccaatgtgaaacaatggaaacagcaacttgctgcctatcaagaggaagcagaacgtctgcacaagcgggtgactgaacttgaatgtgttagtagccaagcaaatgcagtacatactcataagacagaattaaatcagacaatacaagaactggaagagacactgaaactgaaggaagaggaaatagaaaggttaaaacaagaaattgataatgccagagaactacaagaacagagggattctttgactcagaaactacaggaagtagaaattccggaacaaagacctggagggacaactgtctgacttagagcaacgtctggagaaaagtcagaatgaacaagaagcttttcgcaataacctgaagacactcttagaaattctggatggaaagatatttgaactaacagaattacgagataacttggccaagctactagaatgcagctaaggaaagtgaaatttcagtgccaattaattaaaagatacactgtctctcttcataggactgtttaggctctgcatcaagattgcacaaaaaaaaaaaaaaaaaaattgaatatcactcctccaggaggaggatcttttgaaattggaattgtatatttcactgtaaattttagaatccagcttgtagctagttggggaaaaaagatgaaaaacttgaactacaaattacctccatgtatattattggccatagttaactagaaagttataaatagacacttaatgcaatcttttttcctgatattagccaatgggagaattaacaatgtctagggtcaccatcccctttttgtgttcaacacagtgaagattatctgctttttaaattaatttatttaccgatatctagagctgtgttttgtgcaaaaacttagtgatgaaagcctgtcttttgttgtaatctgaataatttctcaggatattttttnactgctgagaagcagtgccattaccaattaattcttgccaggagtgagagagagctgtatctttaattgaaatatactataactgggtgtatagagttcttcccttttttgtgctggaagatatttcactctggtgactactctggtacactctggtgttctctaatcttgtctgttgtatagtttacttttccatattgattccatgtatttatgagaagatattgtctcccattttattacacattttaaagccaactaacgaaggcagctgagtccctcagaaatttttctttttaagtttctaataaatttgacacacagtactgaaatacagcagcccgtcattgacaggctggtctagcaatgttaagtatatttacagaatatgcagttacatttatttatatattttgcaagaaatcttttctgaatgatcaatgcatttcaatttacgaataataatggttattggggaactgtttattatagataattttaaggtgtatagctattttaaagggggtccatttacatcaaacagccgatcagaggactctatctaaattgtgatcgtggcagatagagatggagtcatgtactctatctggctctacacatcaatcacatcttgattcaaacctcacaaggcaatattctgaattgttaactaggtatttcaaaacaggaattaaattcaataggctcttctcagtgaacaggttttaatgttgttttgatgtaattttaaaagacttttagcaaacatgcatttctttatatgatatatttcttttac

SEQ ID NO: 49019 - DNA, 867 bp, Homo sapiens
ttttttttttttatggggaaattttcttcatttttaatttacagcagaaagaatataaagcattcagaaaacattttccatattttaagggcaattcaaaacattttgcatggtttccagcagctgagttcttcaacagatccattgattcaatgatgctttacatgcacaattacaaaaataaaacttacaaaaaaagaagacatctagactagttttacatgcaagtctcagggaccccccattgggcgccaactactgtgtggaactgccataagcgaccgtgcagccagagaggggttcgtattattgtctttatttcggtttcacacagtacagctgatttcgaatgggtaacaatagcaattaaatcttcaggagatagaataagattagctattaattttataatgaaatcctactcctggcacttgggaattcagattatccaagaaagctgcgcttacctatcatcttatattcgaaattaagattcataaccaagaaaaagcggtcagaaatgcttcgtttcagtggaagtgcatttttgcctcgcctaggattcacagttgtactggtaggttacactggtaggctttaaacctacttcctatcccctccatgagaaccctcttaattctatggaagtctctaccatctgtcattttctaacgtattcagctaataatgtaacatgtgaaacattaaaaaaaaaatgtgagggttaaagcaaatccactgaggtcattactctggttaaaacatcagttatttgtaccataataaatggaataaagatatctaaattcagtattaatagaggatattctgaaagagctggctttcaccttctattcccatttatga

SEQ ID NO: 49020 - DNA, 2070 bp, Homo sapiens
attgagggatctcatctgggcgaacaagaagagaaagctgtgaattgtactgtatcatgtacattcctgatttaatactttacagaacattttattcagatatcaatttgttacataaacatttcagcaatgatacaaagataactgataaaatatattacattcaatgaggttttctttacaaatgctctacttgaggtctgtgtcttaaagatggcatgacacctaagtacaagacatcaactgaatgaggattttaaaaaatggtatataagcataggacaagggctatgtttgtttgtttttcaaaagtgctttgaagataacagcctttaggtttgagttatttcacttttcataatttttaagtaggcttatatataatggtggtaccataggattttcttttttcaaatgactgtcgggcagaaacagtggggcactggactcaccttttgagttttagcagagaattatttatttctttacaatgcactttctaacccattgtagctatattagcattatcttttaaaaaagacatgcttttgtatttaaatattgtaggatttaagtgtctttctcaaaatagcttattcctttctgaaagaaaatgagggaaatactctgaattattaggagacttaaacccctatttaaatatgctattttataacactgcatcagttttaggagttgcatctctcctgctggctcttttatatttgagcaagatcagtgtagaatatgtgtttagaaacttgtctgttgtctcagtttagtgaaaaggaggtgctgcatgtgcctgaattaaaaccaagaaatttttccaagccaaatgcagccttagtgatgagagatttaattctccattgtcaccttttagcttttatgattgcttagttttttctgaaggatgtctgcattgtaaaactatggactaaaacctaaaaaacagaatcctcaaaaactttgctgtatgtgttttaacattttagagaacagtatgttgaataactaaggtatgtaacttgaataggaaaaatgtccatcaaatgcaccttggaaaatcacagtaggtagaaggctgtgttaaccgtttgtgtcttattaacatccttaagttaattttgaatttttgacagttttgagggaaaagacctatggaacctaatgtgaagtatttcgtatgttaactggtgttgagttgaagatttttactgtgtataagcagatatcatttgaatgataaaaatgtcattaacctgctgtcttaagatgttcacacaaatatggagagtaattctacaatataaaaatatttattttaatactgagtttcagttaagtcataaacagtgttaaaactcttgggaaggtgtaggggttttttgtttgtcatttttaaaattgaaactgtgtcatacagtgtttcacgtctctgaaattgggattataatagcactattttgatgtagctctaccgatactatgtggtaatgctattttgttttactaacaagctctggaatatttagcagtcattttcactggcacaagagccttttgtatgttattcaatttaaacttttaaaccaaaaattttatggtccagtgtctttggcaaaaagatgctggagggaatgtaacatacaattaatatgtggttatatatatatataaaaagacacaaattgccatgttatggttctgccttgaaacagcacaatgaagtgtatcagtatattctgtgattatgaaacttatatgttgtgttgttttgtgtcttctgttgcctgtcctttgggccagatgtgggccagttaaatgcagttatcatctcattaaatacagatgcagataaaatatctttagtgctgcaacattttacctaactttttgtatgttttcatgactgtgtgttattttccaaagctgttcctacctcaccatgaggctttatggattgttatgtattataaatgttctatatgagacagactactgtgtttcttctcatttattaaaagttaagtagaaaaataaactaattttaatatctaaaaaaaa

SEQ ID NO: 49021 - DNA, 2227 bp, Homo sapiens
  misc_feature (1)...(2227): n = a,t,c or g
caagggaacccttaataagtgttgaagagaaacaaagatctatcttctgcaacttcttcaggctgaataggggcaatgctattcctgcctaactattagggtctcttgtattcagggtagggaggagctcagtcagaaagcgttggtatggcaagggccattcataactcttgagttctgacaaaaggtgatatctagaagattaataactgttcagtttaaaagaacattgagtaagcttatcctgcattcctacacaaagagtacaacagcaatatattccacaacagtaaagcaaaataagtaaaattatcccaagtaaactaaataagaaggctttccatgaacgggcaactgttggaaaccaagctgatatggggttgctaggtgattccaatatgtgcccagaactagaatattgatccagatttctatattaaccatcccttttgctgcttctgagcagcagccagagatcactggttggttcacaggaataagcagtgttagtttaaaatgtgggccaaaacttaaaaacaactaataaaactagaatttaatgacaaatatataagtcttgaaacataatttctctccagttctcatttttgttaaaaataaatcatgataggactgagttgtttgcaaaataaactttagtcttatacttggcctgattatttgcataaagtacagcaagaataattatttttcacatatgcttttaaaattggctctgatggaattctgttccataaggaatatcagaaaagactttttaaagtcaagcccagcaatgggtttgtaccctccaatacctatgagttgggtaaattcctctcttcttgaggtcccaagataacttggggctcctggacctgttagaaagtgacattctttacttaccacagatcagaaaccctgtacagggactgtgtagacaaggtatgaggccagtttttccaaggactttattggttccataagtcaagtttgattccttaaaggaaagcacaccattccagtcaaagccttggtaaaataaccagtttctccaattgtgtcctgttacaaaagaaaacagattcttattgcacttatgcaaataactatattgccataagttaagaatactcacaaatagtttctgaattctggagaaatcaggtagagagaaacaattatgctccaaattttgtttataggagtatactttgcttaattgttaaaagctgtcaatagctcaaaaaaaaaaaagtttnnnnnnnnnnnnnnnnnnnnnnnnnnnnnnnnnnnnnnnnnnnnnnnnnnnnnnnnnnnnnnnnnnnnnnnnnnnnnnnnnnnnnnnnnnnnnnnnnnnnntaagtttactattttaaaactggttaatcatttatgtattttgccagtaaaattactttaaaagatattttaacaaaagtctcatatccttgtacttcagtttttttgtgtgtgaatactatccctataccactacccctaaaacctcagaattatttgctttattttttcatacaacttggggaagggaaccatgggagtatgcacatgggatcataatccattctgtggtttggaaaaagaaaatgttaacctctgctttagagggtagctactagctttgttggggataaaagtgtaatacatgcacttttgaactctgaaagtttgccaatctgaaaaggggtgtttctgaagaccactatcttttacgaacacttaaaaataagtgtttgcagttgtgtatgggcacgatactgtattctttacatttttatggccctacagctacttcttatccctgcaagtatataaattaaaaccaagtcactttagaacagctttgaaactagagtttcaaaggtaaaaggatctcatgtttctgaatctgcgtaaagcaagatggctgtgatttgacaggtttaattgctagttttttataggtggatagaaatgaatagtttggagtctttaaaatgttttaaaaaatgtttgcttactatctatatatatgacattattcccaattagttttatatctccaagatatatatatgtatataggtatatacacatatgtatatatacatagtctatatattctatataagaatatattccaataagaatatattccatacgggaatatattagtcattgatgtattttgccggtaaaattaaaagatattttaacaaaaaaaaaa

SEQ ID NO: 49022 - DNA, 2567 bp, Homo sapiens
tttttttttttttttttttaaagagacacttttttcatatttttaattaccattattgacaccaatacagcatacactttatatacatatatcttaaacattttccatttttcaggaattcaaatacataatatattatcatctcaagaatacaaagaacacaacatggaggaagattgagaaaataggttcccagtatttagtcactagtgattccacagactttccttttagtgttttctattggaattttaacatgtcctgctatggctctgcaagaatagagctgcctggaaaaggaggcaatgaaaagaaaatggacccaaagtcagaaaaagtgaagaagagaatccaggaaagtaatatattttgaaactaaacataaggactccccttcggccagagtgtacatacccaataggtgcaaaaaggaagcaatgatatcttcccatttcatcctcaaaattgctcgtttagaaacaaaatagaaagtacccattcacctaagaagcagaacttttttcacagcattgtaataggaatggcagggccagagggaaaggaaagtagtgggagaacaacttgcttttaagataccctgggtgacaggtatcaaagccttgggcaaaacctgtcacagtaaagctgtgactctccaacttccttcacaaatgacaatatacataatagcagctttctattaaagaactacatgaactgaaaagaaatgtttatggaaaggggccagatacccaggcagcaaggcaatgaggatactaaacaagagttaagtgctttcaacctctctgctctacagatcaggttaaaaactctaaacccttcaactttaggtcaaagaacagggcaaatacaaattaatgccatgcttcaaatgcagcaaccagatggagctgcaagaaattaaacactcctatagactatcacttggaaagcacagcctcttgaacctccttcattacagatacacccactgatcaaagatgttacacaattcaaactcaacaaacagaaaagagtagtggaggtgccaccaacacaaccctcttatcatagaaagagacatgtaaacacacaagagggtgatggagctgcacccagcactggatgttcactgagcacaataagcctgaaggagactacacagcagagacccaggaaataggtctttctccatatctacccctatcaaaattctgaatttgtaaacactgaggtcagcctgtccatttttagtcctgggttagtggagaaggaagttgcaaggtttttgactcccctgaaattgctaaatagggcttcacaaagaggcacacaagggtcatgacatgaattttggaaaataagttaaagaaattaaaagatgaagacaaaattttaacagatgttaagaggtcaattcccccctccaaaacagacgctggcccttttaaagccctgcatagtccagcccaaaactatgataagatccactagtcccctaccttggtactacgcaggagataacagatactttcttggctgtacaagtaacaacacaggggagtgacataaaccagcttgaatgtgatggagaagctatgaaaaagattgtccagtcattctggttctggggaggaaatgggttcctaacttccctcacagattggtgccctcaaggtcatttttattcctcaagtctgtccttaatgtcctgccaatgccattcagaactggacccagttggatggctgtggtgcctggtttggaacagagctggaggcagtgctgaagtctccccacaagtcattgcttacagaaactggagttggtgctggtgtcgtgacaggagcaggagaatccaaatctaaaaggatatctgcatcactgcctccatggttagatttcggaatggatggtggggtgacatgattgctgatggcaactgaggaggatggtgggggaatagtgactttgcctcatggcgggggtgggagtaagctcagaccccacccttgcagtcctgggcttagaagcacctcctttcttgtttgtaatgttcccgatacacaacttgatggtttgtccttccttgaagcccagatccaacttaggacgagcatccatttcttgagattccttggaaatctcagattcctgctttacccacttgaagtgatcctgcaaggagacattaaagtcgaaggcatctccccgatctgtgaagccaatgccaatgaaagcactgcgcccagtaccatcctggatccggattacaaagtagcggctagaatctgtcaccgtctccacagcaataccaggatattgttctactggtgcctgagcaaagagctcccctgaaactttatcctcgagtttgatataggcagtcttcccttttgaagtgattcggaggcgaccagtccaatcaggctggtctaatttccagtcagaggccctgtaaccgcggttggaggcccggggcggaatccggtacacgctgacgtctggcttcacactcagcacagactcgtactccaactcggcccacgcgtccgcccacgcgtccg

SEQ ID NO: 49023 - DNA, 8980 bp, Homo sapiens
ggaggttgtggggccgccgccgcggagcaccgtccccgccgccgcccgagcccgagcccgagcccgcgcacccgcccgcgccgccgccgccgccgcccgaacagcctcccagcctgggcccccggcggcgccgtggccgcgtcccggctgtcgccgcccgagcccgagcccgcgcgccggcgggtggcggcgcaggctgaggagatgcggcgcggagcgccggagcagggctagagccggccgccgccgcccgccgcggtaagcgcagccccggcccggcgcccgcgggccattgtccgccgcccgccccgcgccccgcgcagcctgcaggccttggagcccgcggcaggtggacgccgccggtccacacccgccccgcgcgcggccgtgggaggcgggggccagcgctggccgcgcgccgtgggacccgccggtccccagggccgcccggccccttctggacctttccacccgcgccgcgaggcggcttcgcccgccggggcgggggcgcgggggtgggcacggcaggcagcggcgccgtctcccggtgcggggcccgcgccccccgagcaggttcatctgcagaagccagcggacgcctctgttcaacttgtgggttacctggctcatgagaccttgccggcgaggctcggcgcttgaacgtctgtgacccagccctcaccgtcccggtacttgtatgtgttggtgggagtttggagctcgttggagctatcgtttccgtggaaattttgagccatttcgaatcacttaaaggagtggacattgctagcaatgagctcccaaagccatccagatggactttctggccgagaccagccagtggagctgctgaatcctgcccgcgtgaaccacatgcccagcacggtggatgtggccacggcgctgcctctgcaagtggccccctcggcagtgcccatggacctgcgcctggaccaccagttctcactgcctgtggcagagccggccctgcgggagcagcagctgcagcaggagctcctggcgctcaagcagaagcagcagatccagaggcagatcctcatcgctgagttccagaggcagcacgagcagctctcccggcagcacgaggcgcagctccacgagcacatcaagcaataacaggagatgctggccatgaagcaccagcaggagctgctggaacaccagcggaagctggagaggcaccgccaggagcaggagctggagaagcagcaccgggagcagaagctgcagcagctcaagaacaaggagaagggcaaagagagtgccgtggccagcacagaagtgaagatgaagttacaagaatttgtcctcaataaaaagaaggcgctggcccaccggaatctgaaccactgcatttccagcgaccctcgctactggtacgggaaaacgcagcacagttcccttgaccagagttctccaccccagagcggagtgtcgacctcctataaccacccggtcctgggaatgtacgacgccaaagatgacttccctcttaggaaaacagcttctgaaccgaatctgaaattacggtccaggctaaagcagaaagtggccgaaagacggagcagccccctgttacgcaggaaagacgggccagtggtcactgctctaaaaaagcgtccgttggatgtcacagactccgcgtgcagcagcgccccaggctccggacccagctcacccaacaacagctccgggagcgtcagcgcggagaacggtatcgcgcccgccgtccccagcatcccggcggagacgagtttggcgcacagacttgtggcacgagaaggctcggccgctccacttcccctctacacatcgccatccttgcccaacatcacgctgggcctgcctgccaccggcccctctgcgggcacggcgggccagcaggacaccgagagactcacccttcccgccctccagcagaggctctcccttttccccggcacccacctcactccctacctgagcacctcgcccttggagcgggacggaggggcagcgcacagccctcttctgcagcacatggtcttactggagcagccaccggcacaagcacccctcgtcacaggcctgggagcactgcccctccacgcacagtccttggttggtgcagaccgggtgtccccctccatccacaagctgcggcagcaccgcccactggggcggacccagtcggccccgctgccccagaacgcccaggctctgcagcacctggtcatccagcagcagcatcagcagtttctggagaaacacaagcagcagttccagcagcagcaactgcagatgaacaagatcatccccaagccaagcgagccagcccggcagccggagagccacccggaggagacggaggaggagctccgtgagcaccaggctctgctggacgagccctacctggaccggctgccggggcagaaggaggcgcacgcacaggccggcgtgcaggtgaagcaggagcccattgagagcgatgaggaagaggcagagcccccacgggaggtggagccgggccagcgccagcccagtgagcaggagctgctcttcagacagcaagccctcctgctggagcagcagcggatccaccagctgaggaactaccaggcgtccatggaggccgccggcatccccgtgtccttcggcggccacaggcctctgtcccgggcgcagtcctcacccgcgtctgccaccttccccgtgtctgtgcaggagccccccaccaagccgaggttcacgacaggcctcgtgtatgacacgctgatgctgaagcaccagtgcacctgcgggagtagcagcagccaccccgagcacgccgggaggatccagagcatctggtcccgcctgcaggagacgggcctccggggcaaatgcgagtgcatccgcggacgcaaggccaccctggaggagctacagacggtgcactcggaagcccacaccctcctgtatggcacgaaccccctcaaccggcagaaactggacagtaagaaacttctaggctcgctcgcctccgtgttcgtccggctcccttgcggtggtgttggggtggacagtgacaccatatggaacgaggtgcactcggcgggggcagcccgcctggctgtgggctgcgtggtagagctggtcttcaaggtggccacaggggagctgaagaatggctttgctgtggtccgcccccctggacaccatgcggaggagagcacgcccatgggcttttgctacttcaactccgtggccgtggcagccaagcttctgcagcagaggttgagcgtgagcaagatcctcatcgtggactgggacgtgcaccatggaaacgggacccagcaggctttctacagcgaccccagcgtcctgtacatgtccctccaccgctacgacgatgggaacttcttcccaggcagcggggctcctgatgaggtgggcacagggcccggcgtgggtttcaacgtcaacatggctttcaccggcggcctggacccccccatgggagacgctgagtacttggcggccttcagaacggtggtcatgccgatcgccagcgagtttgccccggatgtggtgctggtgtcatcaggcttcgatgccgtggagggccaccccacccctcttgggggctacaacctctccgccagatgcttcgggtacctgacgaagcagctgatgggcctggctggcggccggattgtcctggccctcgagggaggccacgacctgaccgccatttgcgacgcctcggaagcatgtgtttctgccttgctgggaaacgagcttgatcctctcccagaaaaggttttacagcaaagacccaatgcaaacgctgtccgttccaatggagaaagtccatggagatccacagcaaagtaacgtgcgctgcctgctagcgcacaacctccacagcggggcgttctctgatcgaggctcagacttgcgagaacgaagaagccgagacggtcaccgccatggcctcgctgtccgtgggcgtgaagcccgccgaaaagagaccagatgaggagcccatggaagaggagccgcccctgtagcactccctcgaagctgctgttctcttgtctgtctgtctctgtcttgaagctcagcccaagaaactttcccgtgtcacgcctgcgtcccaccgtggggctctcttggagcacccagggacacccagcgtgcaacagccacgggaagcctttctgccgcccaggcccacaggtctcgagacgcacgattgccgcctgggcgtggcagcctcacagggaacacgggacagacgccggcgacgcgcagacacacggacacgcggaagccaagcacactctggcgggtcccgcaagggacgccgtggaagaaaggagcctgtggcaacaggcggccgagctgccgaattcagttgacacgaggcacagaaaacaaatatcaaagatctaataatacaaaacaaacttgattaaaactggtgcttaaagtttattacccacaactccacagtctctgtgtaaaccactcgactcatcttgtagcttattttttttttaaagaggacgttttctacggctgtggcccgcctctgtgaaccatagcggtgtgcggcggggggtctgcacccgggtgggggacagagggacctttaaagaaaacaaaactggacagaaacaggaatgtgagctgggggagctggcttgagtttctcaaaagccatcggaagatgcgagtttgtgcctttttttttattgctctggtggatttttgtggctgggttttctgaagtctgaggaacaatgccttaagaaaaaacaaacagcaggaatcggtgggacagtttcctgtggccagccgagcctggcagtgctggcaccgcgagctggcctgacgcctcaagcacgggcaccagccgtcatctccggggccaggggctgcagcccggcggtccctgttttgctttattgctgtttaagaaaaatggaggtagttccaaaaaagtggcaaatcccgttggaggttttgaagtccaacaaattttaaacgaatccaaagtgttctcacacgtcacatacgattgagcatctccatctggtcgtgaagcatgtggtaggcacacttgcagtgttacgatcggaatgctttttattaaaagcaagtagcatgaagtattgcttaaattttaggtataaataaatatatatatgtataatatatattccaatgtattccaagctaagaaacttacttgattcttatgaaatcttgataaaatatttataatgcatttatagaaaaagtatatatatatatataaaatgaatgcagattgcgaaggtccctgcaaatggatggcttgtgaatttgctctcaaggtgcttatggaaagggatcctgattgattgaaattcatgttttctcaagctccagattggctagatttcagatcgccaacacattcgccactgggcaactaccctacaagtttgtactttcattttaattattttctaacagaaccgctcccgtctccaagccttcatgcacatatgtacctaatgagtttttatagcaaagaatataaatttgctgttgatttttgtatgaattttttcacaaaaagatcctgaataagcattgttttatgaattttacatttttcctcaccatttagcaattttctgaatggtaataatgtctaaatctttttcctttctgaattcttgcttgtacatttttttttacctttcaaaggtttttaattatttttgtttttatttttgtacgatgagttttctgcagcgtacagaattgttgctgtcagattctattttcagaaagtgagaggaggggaccgtaggtcttttcggagtgacaccaacgattgtgtctttcctggtctgtcctaggagctgtataaagaagcccaggggctctttttaactttcaacactagtagtattacgaggggtggtgtgtttttcccctccgtggcaagggcagggagggttgcttaggatgcccggccaccctgggaggcttgccagatgccgggggcagtcagcattaatgaaactcatgtttaaacttctctgaccacatcgtcaggatagaattctaacttgagttttccaaagaccttttgagcatgtcagcaatgcatggggcacacgtggggctctttacccacttgggtttttccactgcagccacgtggccagccctggattttggagcctgtggctgcaaggaacccagggacccttgttgcctggtgaacctgcagggagggtatgattgcctgaccaggacagccagtctttactctttttctcttcaacagtaactgacagtcacgttttactggtaacttattttccagcacatgaagccaccagtttcattccaaagtgtatattgggttcagacttgggggcagaagttcagacacaccgtgctcaggagggacccagagccgagtttcggagtttggtaaagtttacagggtagcttctgaaattaactcaaacttttgaccaaatgagtgcagattcttggattcacttggtcactgggctgctgatggtcagctctgagacagtggtttgagagcaggcagaacggtcttgggacttgtttgactttcccctccctggtggccactctttgctctgaagcccagattggcaagaggagctggtccattccccattcatggcacagagcagtggcagggcccagctagcaggctcttctggcctccttggcctcattctctgcttagccctctggggatcctgccacctgccctcttaccccgccgtggcttatggggaggaatgcatcatctcactttttttttttaagcagatgatgggataacatggactgctcagtggccaggttatcagtggggggacttaattctaatctcattcaaatggagacgccctctgcaaaggcctggcagggggaggcacgtttcatctgtcagctcactccagcttcacaaatgtgctgagagcattactgtgtagccttttctttgaagacacactcggctcttctccacagcaagcgtccagggcagatggcagaggatctgctcggcgtctgcaggcgggaccacgtcagggagggttccttcatgtgttctccctgtgggtccttggacctttagcctttttcttcctttgcaaaggccttgggggcactggctgggagtcagcaagcgagcactttatatccctttgagggaaaccctgatgacgccactgggcctcttggcgtctgcgctgccctcgcggcttccccgccgtgccgcagcgtgcccacgtgcccacgccccaccagcaggcggctgtcccggaggccgtggcccgctgggactggccgcccctccccagcgtcccagggctctggttctggagggccactttgtcaaggtgtttcagtttttctttacttcttttgaaaatctgtttgcaaggggaaggaccatttcgtaatggtctgacacaaaagcaagtttgatttttgcagcactagcaatggactttgttgtttttctttttgatcagaacattccttctttactggtcacagccacgtgctcattccattcttctttttgtagactttgggcccacgtgttttatgggcattgatacatatataaatatatagatataaatatatatgaatatatttttttaagtttcctacacctggaggttgcatggactgtacgaccggcatgactttatattgtatacagattttgcacgccaaactcggcagctttggggaagaagaaaaatgcctttctgttcccctctcatgacatttgcagatacaaaagatggaaatttttctgtaaaacaaaaccttgaaggagaggagggcggggaagtttgcgtcttattgaacttattcttaagaaattgtactttttattgtaagaaaaataaaaaggactacttaaacatttgtcatattaagaaaaaaagtttatctagcacttgtgacataccaataatagagtttattgtatttatgtggaaacagtgttttagggaaactactcagaattcacagtgaactgcctgtctctctcgagttgatttggaggaattttgttttgttttgttttgtttgtttccttttatctccttccacggggccaggcgagcgccgcccgccctcactggccttgtgacggtttattctgattgagaactgggcggactcgaaagagtccccttttccgcacagctgtgttgactttttaattacttttaggtgatgtatggctaagatttcactttaagcagtcgtgaactgtgcgagcactgtggtttacaattatactttgcatcgaaaggaaaccatttcttcattgtaacgaagctgagcgtgttcttagctcggcctcactttgtctctggcattgattaaaagtctgctattgaaagaaaaagaaagcgaacagtttttgtttgttttttttgccgtgtgtgctccatagtggaggcgctattttccaattgatgagaatgacaaacatatataatctatctatctatctatctatctatctatctatacagggggcttgaaccttactcacccaagagcttcttacggaatgtggtagaaaaccaagttgtaacgacactgtaacctacctgatgcctgttcgcgcccgccgtgagctgcgcactggccgtggccaccattcacctctgtaatttaatccgtttctcttggattgtctggacgtgcccgatggttctttcttttgctcagtggagttggaggttttgtgtttggttttctcattcttgtcttgttttgtgtgggtggattttcaccgaccaatgatatcgtcttctgacggtcaccttctttccacttcactggagtccagtattctgtaccacatcacgcaacgtgttatcttgtggtgtaaataaagactgcgttacttgcc

SEQ ID NO: 49024 - DNA, 529 bp, Homo sapiens
atttttgtttttgcaatgaaaaccctttaatgttgggctttctttaaataaaacagaaaggttgcagctttcccatggtggctgtaaggcaagaacagcagtgagggcgggcgtgttctatcgggcagtgctgcagcccttgactctggctcaaggtgggcttcctggaggcagcggcaaggaggcagttctggatgtgcaggcacagatgtaggggaacaggcaagcgggcacagggccctgagctgacaagcagtgacccctgcacccagctagatggggcaccccctctctgggagctgagggcatcagctggagcctcaggctgggaccagccccaactttgccttggtgactctgggccattccaggcctcagtttccccagctgtaaggtgaggcattaggcaggagggggtggccccagccagtgtcctagtagcctggtgtctccattagggagacctgagaagctgccaggagaggctctgctagcgcaaggcagggccggcccagcacggacgcgtggg

SEQ ID NO: 49025 - DNA, 5847 bp, Homo sapiens
  misc_feature (1)...(5847): n = a,t,c or g
agcgggcggacgggtaggcccggcctgcatcttcgcgaggaggaagaaggtggccactctcccggtccccagaacctccccagcccccgcagtccgcccagaccgtaaagggggacgctgaggagccgcggacgctctccccggtgccgccgccgctgccgccgccatggctgccatgatggatcggaagtgagcattagggttaacggctgccggcgccggctcttcaagtcccggctccccggccgcctccaccccggggaaagcgcagngggccgcagctgaacttgctgcctctcacggccctcgcgaccacaagccctcaggtccggcgcgttccctgcaagactgagcggcgggggagtggctcccggccncaggcccaggctgcgagaaagatggcggacctggccgagtgcaacatcaaagtgatgtgtcgcttcagacctctcaacgagtctgaagtgaaccgcggcgacaagtacatcgccaagtttcagggagaagacacggtcgtgatcgcgtccaagccttatgcatttgatcgggtgttccagtcaagcacatctcaagagcaagtgtataatgactgtgcaaagaagattgttaaagatgtacttgaagggtataatggaccaatatttgcatatggacagacatcctctggggagacacacacattggagggtgacttcatgatccaggaggcatgggagttattccaggaatagtgcaagatatttttaattatatttactccatggatgaaaatttggaatttcatattaaggtttcatattttgaaatatatttggataagataagggacctgttagatgtttcaaagaccaacctttcagttcatgaagacaaaaaccgagttccctatgtaaaggggtgcacagagcgttttgtatgtagtccagatgaagttatggataccatagatgaaggaaaatccaacagacatgtagcagttacaaatatgaatgaacatagctctaggagtcacagtatatttcttattaatgtcaaacaagagaacacacaaacggaacaaaagctgagtggaaaactttatctggttgatttagctggtagtgaaaaggttagtaaaactggagctgaaggtgctgtgctggatgaagctaaaaacatcaacaagtcactttctgctcttggaaatgttatttctgctttggctgagggtagtacatatgttccatatcgagatagtaaaatgacaagaatccttcaagattcattaggtggcaactgtagaaccactattgtaatttgctgctctccatcatcatacaatgagtctgaaacaaaatctacactcttatttggccaaagggccaaaacaattaagaacacagtttgtgtcaatgtggagttaactgcagaacagtggaaaaagaagtatgaaaaagaaaaagaaaaaaataagatcctgcggaacactattcagtggcttgaaaatgagctcaacagatggcgtaatggggagacggtgcctattgatgaacagtttgacaaagagaaagccaacttggaagctttcacagtggataaagatattactcttaccaatgataaaccagcaaccgcaattggagttataggaaattttactgatgctgaaagaagaaagtgtgaagaagaaattgctaaattatacaaacagcttgatgacaaggatgaagaaattaaccagcaaagtcaactggtagagaaactgaagacgcaaatgttggatcaggaggagcttttggcatctaccagaagggatcaagacaatatgcaagctgagctgaatcgccttcaagcagaaaatgatgcctctaaagaagaagtgaaagaagttttacaggccctagaagaacttgctgtcaattatgatcagaagtctcaggaagttgaagacaaaactaaggaatatgaattgcttagtgatgaattgaatcagaaatcggcaactttagcgagtatagatgctgagcttcagaaacttaaggaaatgaccaaccaccagaaaaaacgagcagctgagatgatggcatctttactaaaagaccttgcagaaataggaattgctgtgggaaataatgatgtaaagcagcctgagggaactggcatgatagatgaagagttcactgttgcaagactctacattagcaaaatgaagtcagaagtaaaaaccatggtgaaacgttgcaagcagttagaaagcacacaaactgagagcaacaaaaaaatggaagaaaatgaaaaggagttagcagcatgtcagcttcgtatctctcaacatgaagccaaaatcaagtcattgactgaataccttcaaaatgtggaacaaaagaaaagacagttggaggaatctgtcgatgccctcagtgaagaactagtccagcttcgagcacaagagaaagtccatgaaatggaaaaggagcacttaaataaggttcagactgcaaatgtagttaagcaagctgttgaacagcagatccagagccatagagaaactcatcaaaaacagatcagtagtttgagagatgaagtagaagcaaaagcaaaacttattactgatcttcaagaccaaaaccagaaaatgatgttagagcaggaacgtctaagagtagaacatgagaagttgaaagccacagatcaggaaaagagcagaaaactacatgaacttacggttatgcaagatagacgagaacaagcaagacaagacttgaagggtttggaagagacagtggcaaaagaacttcagactttacacaacctgcgcaaactctttgttcaggacctggctacaagagttaaaaagagtgctgagattgattctgatgacaccggaggcagcgctgctcagaagcaaaaaatctcctttcttgaaaataatcttgaaccagctcactaaagtgcacaaacagttggtacgtgataatgcagatctccgctgtgaacttcctaagttggaaaagcgacttcgagctacagctgagagagtgaaagctttggaatcagcactgaaagaagctaaagaaaatgcatctcgtgatcgcaaacgctatcagcaagaagtagatcgcataaaggaagcagtcaggtcaaagaatatggccagaagagggcattctgcacagattgctaaacctattcgtcccgggcaacatccagcagcttctccaactcacccaagtgcaattcgtggaggaggtgcatttgttcagaacagccagccagtggcagtgcgaggtggaggaggcaaacaagtgtaatcgtttatacatacccacaggtgttaaaaagtaatcgaagtacgaagaggacatggtatcaagcagtcattcaatgactataacctctactcccttgggattgtagaattataacttttaaaaaaaatgtataaattatacctggcctgtacagctgtttcctacctactcttcttgtaaactctgctgcttcccaacacaactagagtgcaattttggcatcttaggagggaaaaaggacagtttacaactgtggccctatttattacacagtttgtctatcgtgtcttaaatttagtctttactgtgccaagctaactgtaccttataggactgtactttttgtattttttgtgtatgtttattttttaatctcagtttaaattacctagctgctactgcttcttgtttttcttttcctattaaaacgtcttcctttttttttcttaagagaaaatggaacatttaggttaaatgtctttaaattttaccacttaacaacactacatgcccataaaatatatccagtcagtactgtattttaaaatcccttgaaatgatgatatcagggttaaaattacttgtattgtttctgaagtttgctcctgaaaactactgtttgagcactgaaacgttacaaatgcctaataggcatttgagactgagcaaggctacttgttatctcatgaaatgcctgttgccgagttattttgaatagaaatattttaaagtatcaaaagcagatcttagtttaagggagtttggaaaaggaattatatttctctttttcctgattctgtactcaacaagtcttgatggaattaaaatactctgctttattctggtgagcctgctagctaatataagtattggacaggtaataatttgtcatctttaatattagtaaaatgaattaagatattataggattaaacataattttatacggttagtactttattggccgacctaaatttatagcgtgtggaaattgagaaaaatgaagaaacaggacagatatatgatgaattaaaaatatatataggtcaattttggtctgaaatccctgaggtgtttttaacctgctacactaatttgtacactaatttatttctttagtctagaaatagtaaattgtttgcaagtcactaataatcattagataaattattttcttggccatagccgataattttgtaatcagtactaagtgtatacgtatttttgccactttttcctcagatgattaaagtaagtcaacagcttattttaggaaactgtaaaagtaataggggaaagagatttcactatttgcttcatcagtgggtagggggggcggtgactgcaactgtgttaggcaggaaattcacagaggatggggggatttaagggttaggcaggaggaaacttggggaaagttctgtgttagggatcttgctgggccaggaattaacttttttgccaaaagttttatacacagatatttgtattaaatttggagccatagtcagaagactcagatcataattggcttatttttctatttccgtaactattgtaatttccacttttgtaataattttgatttaaaatataaatttatttatttatttttttaatagtcaaaaatctttgctgttgtagtctgcaacctctaaaatgattgtgttgcttttaggattgatcagaagaaacactccaaaaattgagatgaaatgttggtgcagccagttataagtaatatagttaacaagcaaaaaaagtgctgccaccttttatgatgattttctaaatggagaaacatttggctgcatccacatagacctttatgttttgttttcagttgaaaacttgcctcctttggcaacattcgtaaatgaagcagaatttttttttctcttttttccaaatatgttagttttgttcttgtaagatgtatcatgggtattggtgctgtgtaatgaacaacgaattttaattagcatgtggttcagaatatacaatgttaggtttttaaaaagtatcttgatggttcttttctatttataatttcagactttcataaagtgtaccaagaatttcataaatttgttttcagtgaactgctttttgctatggtaggtcattaaacacagcacttactcttaaaaatgaaaatttctgatcatctaggatattgacacatttcaatttgcagtgtctttttgactggatatattaacgttcctctgaatggcattgatagatggttcagaagagaaactcaatgaaataaagagaatatttattcatggcgattaattaaattatttgcctaacttaagaaaactactgtgcgtaactctcagtttgtgcttaactccatttgacatgaggtgacagaagagagtctgagtctacctgtggaatatgttggtttattttcagtgcttgaagatacattcacaaatacttggtttgggaagacaccgtttaattttaagttaacttgcatgttgtaaatgcgttttatgtttaaataaagaggaaaattttttgaaatgtaaaaaaaaaaaaa

SEQ ID NO: 49026 - DNA, 1530 bp, Homo sapiens
gccccaggccaactcctcatgcagcagtgtgctggggcgacacgtcgtctcccctctcttaagcacccgcttcctcaccacccccactgttgggcctatagtagcaggttagtgagtacctagggcggctcaactcctcccacagcaccaacccagcatggtcccactgaagtcctactacgccctcccctccccagccttttccagaaaccatactgggctcagatcagagctccgaagcggtcaaagtgagctgagcagggacaggcccagcctttctccactgccacgtccctcatggcaacatcactcatctcctgcttgcaggccaaagggcaaaaatttggggctagtcctggccagggaaatcagaagctcttcttgggtgagattgagcctcctgttgctccctggagttccggaggctgggctgcagcccactcagcttgcgggcaaaatacgtgctctcctctctccttgtcagctgagcaaacccagggaatagccctcctctccccaggaaacttctctgaaatcttagacttagccagtcttaggcctacggatgccacacaaaggttgttcagggagaagggggtgcaggaggcagagggtgccccgcagggagctggtggctccagccccactagagctcctaaagatcacacagcagctgctcctgacagggatgctcatgcccagaaagcaagcccaggagaggaaggcagagtgtgacagagcagagccagggccaggcgcaccaggagaggcgtttctggggctccagagaagtgccacgggaggcagaagtccagaactgcccatatagatgcccttctacatcctggagcccaaatcagtcatgtgggtgggaagttccccagggcagtggtcacatcgtgagaattagcaggaaaggcggggcctttcttgtcatagctatttctgaggatgaaatgggagacatatgcccagcacctgatgtaagtttatataatgtaatattatgtacctaccactaagaaatacatgaaccgtgccatgaggacagtaagtgttcataaagcaacatgaagcaagaaacagtgcagggtgcccagtgcacacactagagagaaattgtgaacattaaggacaaggagaattggtgtctttctaaaacatacttatttaaaaacacatacccacttactaatgtggaattacacagtttgtaacaagaaaacagtctctcccattctctagtactgctcccctacccagcagtcacttccagttcattcagctatttttaaaatgtgcttatatgactcttgcttgatatatcaatcttagacattacctgttgactccctgttgtcatacatgaggctttagctctcttttgtcagcaaccctcccccatccctagttattaggttaaaaaatactcagattactatttctattactatgtgaaagttaactgcggagccaagagttggactataattaaattaccttccttgtaacacaaaaaaaaaaaaaaaa

SEQ ID NO: 49027 - DNA, 1430 bp, Homo sapiens
gtcgacttttcagaattaaatcattttatttttgccacaagaagctctaagaactaatatcaggccatggttaatgaaaagtagaacttaaagtcatgacggggaagattgtacaagtgtgaacattacagtactcggaggaatgaacaaggtttcatatagttgaccagccagaaagccagtgctgttaagttagcatttaattctttagaatatgcatgccttgacaatacaaaataccttgatcagtgtttaccatttttttatctttttggtacaatgggggaaaaatgcggcattatttcttcatagtggttgtgtgtgggggatcgttaccaccaaaatcataataatcatttaaagtatattttaaagttagtctcgcaagattgttatggcatttttaaatttctgtagtttaagcattttcattttgtcatatcttttaacaaattactatttcaagtagttcctatccagaatatttacaggtaatttagcataggagcaaatttgaagctaacttcaaacaagaaaaggaagttcaatagccagagagctaagtataagataaaaaaacaatatggtaattttaaacagcatcttgctacagatttccaatccaataaataccaggaatgaaggacttttgccccaaagaagtatttcacatgaattctgaactttggatatggaaacttatagaaaaactgaagaccctgagacacatgcaagtaagagtcttctggcaaaaatacaatttaattttccagtttctctcctcccaaaaactccagaagatacctttagtaggcacagagtttaaatgtcatattcagaatttacagagcacagcagcagcagcaaataattacatacctattattcagaatggatagttttccattatagaattagttcctggtttgtcataatagacttgtagaatctgccaagttttattatgacaaactaattgacctagcagttgagtctgaaagatctggaagctctgccggcatccgtatcattcacatcggtagaagtaattatgtctaactggtgaaatagcattaatgaaactcaaaacaaattttcactgagtacatttcagagtgcacactatagtcaaagagtaatgttattaatatctacacaaaaaagaaacatatggtgattccagagatcacagagtcttaagttatcaggtaatttcaaatttcccaggggttagtttacaaatggtttgaaggtctagacttacagaacagaaaacagataaatgcacatcactctacctcttggcaagcaaaggattttttttcttgtattattgcatgaactgatgcctgataccctcagctaccaacttaagaaacactgaaaccactaccttcaaatccagcttaccatcagaagaacgatgtata

SEQ ID NO: 49028 - DNA, 771 bp, Homo sapiens
ttttgtggttatcaattttagtatttattgaatgatggaagacaaggaaaatatctctcaaactccaaaaacaaatgttgcacctttgctaaatgtaaaatgaattttgagatatttgttttacatgacaatgaacctgtccaaaaaataatgcaaatttacccaaacggtgctagtttattatttacaaaaatgctcttatctgccataagtatttgggaaaaaactgttttacactcaggaacactaatgaaataccttaacgacaacttaaaaaataaaatcttccctaccctcaatgaccaccactcgagaaaagttacagaatgcattaaaaatgaatatatgcggaaacaaacataattatttcccacaaacatacacacacaaaaacaggcacatgcacacacacaaatacagtgttgtgcaaaatcaacttaatgtttatttaaggtcaacagccttggtgacaaggaagataatgaatatggcttcagtaaagtttgcaagtaaatatcacaaatgttaattcttttgcctagctaaccagctatcctgagtatggaatacgtattatttagatagctaaaaggttataaacaaaatggaggggtagggagggggaagcactgtagcagattccactgaggtaccttagtttttatgtaaaggtctgtatactcatttaataatttacataacaattctttattctatatagtatatgaccatatagaaacgatgtcttatgtattttattgttctggtcca

SEQ ID NO: 49029 - DNA, 872 bp, Homo sapiens
ggtgagatattgtgaacgcaacaactggagctgtagttggcgtgtgtgagtgtgtacctgcggttctgtttagtggcgagacaaggtatgtttcagtactgctttcacggcaactgtgtaatgcatatgctctttctacactagcggtttgctcagttttgtctgtccggttaagttggagaaagaaccaagttgtgttgttctctggagggggtgctgctgcctctccttgagtagttctgtgacccccaatccagctgttttgtagagaatccttctagcttctggtatgcctgctctccagcagctgggaaacagatcttcctgcctggaccaaagctccttgtttcttgcgtgggcatgtttgttctttcccgatccggtggctgtcatagccgagggctgcctgccaccttcctttatcatttgccctgttggggttcagggtgcatccttagcccaggacctgctcttccagcatcatgggttttttcctaaagatctcaacggctcccttgggctccataaaatatttcttttttaaaaaagcagactcctttcatgcattgggatgaacggccctcttgtctgggtgctgggctacagcaaacaaatgtgtttgaatcccagtattccagagattcctggcggtgggctgtctagaagagggcgaggctggatctcacggtttttaaactgtatttttacccctttgggacccatacctgtgccctggagtctttcatgaggcacgtgggtcctctgcatcctcactctcccccctagcccaggtgcagcccccgggaggggtgccctgaccccgccttaaacaaccaactttcccaccgaatcccatctggcggggggggggg

SEQ ID NO: 49030 - DNA, 717 bp, Homo sapiens
tttttttcacagacacagcaaattatttaatgtctgtaggtgtacctcaccctcacattgctattacgattcaaaagcctccataaactgtcaaactggcagaaccagagaaaccatgggcactttcttccaacagggtttgaaaaccatcaacgctctagtcctgttgacctggaaatggtggcaggtgaagtctctccacagcatgccttgggcctctctgctcaggagaaaaagccccccagttctacatgattcctgaggtcttctgttcttctgcggcctggcgctgggccctgcgccactggaaatagtggtagactcggacactgcagaggtaccccccatacacagtgagaagcatcatggaggtagagaaggtcttatagccaatgtcagctagctgcttgccagttggcatcttgtcccctggatgctgcagctccttcgcatccaaccgaggcctcctcaggcaggcagggtctcgaggccactgtctacgcaacttcccagcacagccgaacgcagcactcggaaccagacacgtgagggtagcgtccctggacaaccctgaacgcctcagctattggtgcagaaagcaactttctccctcccactgccgggttagcctctaggattcggcttgccgcgctataaagggaactgcgcatcagacgcggcacaactccgcccactaaggcgggagtccgcgcaggc

SEQ ID NO: 49031 - DNA, 901 bp, Homo sapiens
aacaaacaaaaagaaacttttgttcaagctgcatcttcacattgaatgaaagcattcagacgggtgactgctgctgtccacaactgtgggcggaagtgtgccttttcccagtttctcgtccaggaggttgcatagcaaatactcaagtcactgggatatatgctttccaaatgctggcccccatagcacctttccccatgtctttctaccaagcctcttatgtttaatctgtgcagggaagacaagagtagaccatattctctgtgtgctgtgcatgtcctggtgtcactcattgcctcttatctgtcgccattctaatataagtcagcttaatagttgactctgaataatgcaaaacccagcttgcttccagaatggcctagggaccctcctcctcctggccattttttttttttttttttggttcatgtggcataatcatctttcaaaattaaccgaatgccccagaaaatgatgttaccactaaaatattttctccaagaaggcatactgtaacagaaaagataggtaagatatttttttcccaagaagtaagaattgattgtgctgaatgttcaaactctggaaactgttcacagtatgttgttcttagctgttatttatataaagtgaattattttctctctcaatcatgccatagtggagacttttgtttgtgagtaagtgacagagtaatatgaaataatgtgatatgtcagagtgacatgcagcatcctgagcctgtttttatgttctgtgtacagtggcatttgattgagatcaaagcctgtcacagcctgctgctgggggtgtggggatatgccagagtcctgtgtttggttttagaagtttactgaatgtttcccacatggagaataatggatggcatgttagtttcttt

SEQ ID NO: 49032 - DNA, 679 bp, Homo sapiens
attcggcacaggctgaaaccagaagactggatcaaggggttcccactggctcctccagcaagacctcgtctttgcttgtcctgctcagatgctggtcatcctgggcatgtccccagtgtggactctggactgggaagggggcaggcccttttggacctgcagttggcctcagcagaaggccttgccttgtgtatgtgactccatatcccgggagcagttgacctttgccaaacactttacagttctggaggaggaggtaacatagatgcctgggcctgatggtggggccatacccatgtgtcgcctctcactctggcagcctcagaggccccttgctgctggctcccatctccctcccatttgcagaccaggaaggaagagcaagctgtacaaagggaagcagagcctggggtgggtgtgagcagggtgacccctcatctgaaaggcccaaaccagggggaagcaccagcctcagtgcagccccctcctgaccccacctagaatggaagcctccacctgcagccccaggcctccctcccccggggtctccacctcaggggagacttaggccagaggtgaacattcatgtgtaggaagaggccgctgcagggtggcatcttaaggtaggggaagtgtgctgaggtgggcctttcatgggcatgggccgttgcctctctgg

SEQ ID NO: 49033 - DNA, 1224 bp, Homo sapiens
ttttttttttttttgtccaataatattttaatacttttccactttaaatactggttttaattctgtgattgtaacatggaagatccaactttattgtgtttaaaaaacatcatcaggatcataaagctattatagaagttactctacacactcccaaggtactttaaaatgattatgttttgagtctgtagatgaaccatgacaaaatccaaatacatcgtctgtacaactcggactaaatactggtgaaaagtgtttaattggacaaataactgataagcttaaagataaccagcacaatttcacaagagaaccagctcagcccaactaaaaatttcttaatagcaattgacactgaagttgtattaagtgtataaattagttgatgaaactgaacaaatagaaaacccattcctccttttccttattttgccttcttacacctcccttgcagatataaccctcctttggtttagctacccctgtggcaattccaaaccaagtactgcagtgatcatcctctacctcaaaaccaggagtcctgaattccaactgaaacactgtactctcttgtcctgtacagtgggcagtcagggacaaaatccccacatcaccaatatatttcaagtttctaacatagcacaaaagagtaactgagtagaaaagagagtaaagggtagttttttttcttttagtttgggggaagacaaatatctgtagatgaggaaaacatgaatattcaggatgtaggaatcagcttaatgaaaataattgtagagggtctaaatgttgtccagaaggccagtacctctccaaattctgacctcttttggactctttccacattccccaatttatttctcaatctgattgggtgggattaactctagtgaggtacaagtgcagttatctaaaggtaaaatgttatcttttcttcttttaatacaaatattttagtgtaatccttttatttacagaatcaattgcaaaagtatatcatcacatttagtccaaatgcaactaatgataattagatttagatattgctttgtaaacttgccatacttctgtaaaataaagctatccaattcagttatgaaagagttaactgtctgtgttcatgatagttaccagaaatggcaaacagagaaacatttatagtgcgcatatagaatttttttgaagattcttatcagcggctatggtgaataaacctgccctccc

SEQ ID NO: 49034 - DNA, 7318 bp, Homo sapiens
tcggccgcatcttttttttttttttttttttgaaaggaaagtataatttatatgtacaaccaataaacctgatacagaagaggggatcaggacagaccaggagtgggtgtgaagagagactgggaaaggggcagcaagaaagtgaaggggcagcaaagaggaagtggggggttcgccatgcaaactgccactctccccggcccctcctgggaggggggatgtgcccacatttccctagcctgccctccactattttgctctggtcccaacgacaaggtagctcccaagaccctgactaggtcccctgcctgacttatacaaatttagtctgtatccaggccttgaggagggagggtagtagaagtcttccaggaacctgagccccagagctgggcttccaccacatctggcccattgtattctctcccacccttctaggttacctgggtccctagaacaggttggggagctcctctttggcttgagggagtatcacccaaccattactctttttgtaggggtggtccttggtccctagggaggggggaacattcccaacacaagatgccggtacacaggaggtaactgagccagtgaacggcacctttattctgaggctgaacagcagttgacttcctccctcataactgctccaccctccacgtggggagaggtaggggacggtaacatgcagccacccctcctcgtcccttcctccctcccagggctcattttcatccctctctaaagtccccctcctctcttcaaagctctcttccccacaaaagttcctaaaggccaggcaaggctgattctccacttccacatgagacagagctgattctgcagggaaacggctggggaggctccacctctttcctccccacaaccatttactgggaagttgtgtatacttggcagtgtgggaggaaggtacttggaagaccctgccagccatctcccacccagacttcttctcaccagcacagtcttcaaggcttggtgggaaaggtgtgtgggagtggagaaagacaaagggcccttcttgaagagaggagctgcagagaggggcaaaggggttcctagcccagtgatggcccaaggggtggggaaggtggagggctggcagcaggccccagcgcttgagctgggggtcggcctcggggacggggcctgggtgaagggcaggcctgggatccagtcagtcgtctatacagatcacctacccggctcggggctccttccgatccagcccgtctgacaccaatgcccccaccatttccttctccttcttcacaagcactggaggccgttggtggcggctgtgatgaaggaccctgcaggcatctggctgtaattggcgcctgcggcggccaggtgccctacgggtcggcgctgaaggccgccccgtaccccggaggtgtagcgtagggacccggcgggtaggccggtgtggggtgaggctccgtgcccttgctgccagccggctgaggatgctgcgctcggacatctgaaggcgggctgcgatggggggtattcgggacagcgtggctggcaggcgggtcacgtccgccttcatgtcgctcagcaactcctccagctggttcagaaccttgtgcaggacggcgttggccggcttgttccccgccagcgactccttggagaggtgctggtggctctcggccaggcactcggcctcggcgaaagcgggcgtggaagggccatggcggggtgcgccggctcctgcgacaggttcaggtaggccgcccgccgcagctgctcctcaatcaccagcgcctgctccaggagcttgaacctccgggccaggaacttatttttcatctccagaaagttccccttattggcttcagttttaaatggctcgttgataatggcaaattgagcatcattctggatgtcctgccaccgtgcatagccatggaggacaatcccagccagaagccaatagtcatgtcttctgtgccagatctcattgagtttccccgaggaaatagctgcccgttcctcattctgccacagtgtgtgaagctctgtgaagccaccatcggcgatattgaacatgaaccggggcttctctgtcttttcctctcgtcgcccattggaccgtggctcatctcgaggccctggtcgaagctcccggtcaccttttacatcttctgacttctctctgtccccacggtacccaggttcaggctccatctctccaggcacccctggcacctcatcctctagaggaatcttccttggctccagccgctccccaagtgatggggctgggctgggggcatcagcctctgtctccatcttctccccaattctgctgttcttctctggcttttcctcctggttttcagcttcctccttctcaagaggtgtccttatgccttctcctttctcacttggagctggagtagcaggtttagaggtgcagggactgttggtagcagaagcctcaggagtggtgggagacgttttggtaggagaggaggctctggaggagcgcttagaatcggcgctggggtcaggcatcagttccggcattgaccaacgcccattgatgtgctcaaactcctgcaccttctttttgacgagagacatgactccaatgcgggtcaacacctgctggcgactcagtccctcccgagggaccccatcggcaaaggtttcagagccgtctgccccaggctcacacagatggcgcatgaacaaagacacataggccttaaactccttctcagtcttgcccctcaggtcccgcaccagccactgtgtggtgaaggcatcctgtggtggcatcccccagcgcatcacagcattgaggaaagccttccgctgacgggtgttgaagcccagcacctcaatgttgcccccgactcgggccagcagtggaggcagtggcttatctttctcattccggagctgcctctttgactgtctacgcccttcaggacgttcatcgaagtcttcatcctcctcctctgaacccaccgagtactctgactggttgtcttggtcttcctggagcagcatcattgtagttaacttgcttgcgaaacccgcttgccccttgccctagattccggggcttaggtcttcctgctgttgctcatagtgatgcctcagcagcttctcccagtagtcagggtccacattctcctcctgcttgatgatctctcgctcaatttcctcaatcttgtcttcttcccgcacgacgtactgtgccaccttgaaggagctgagatactcattcatgttctgcacgtcagtgtcctcagttgcatcctggttccggtccaacagccgagcgatggcctcattgtcataatgaatcacactgctgtcctcctccttgttctccccctcgttttcatccttgaatagctcttcagtgccaaatttgagaatgtcgtcaagctcctgcttggacatggagcctgccttggagcccagcccaggccgcacaaccaggtgtgtcagcatcatctttctcttggccacttgtgtgattcgctcttccactgacgcgcgagtcacaaaccggtaaatcatcactttgttggcctggccaaatccgatgagcccggctaaagggctggatgtcattatgggggttccagtcagaatcaaagatgatgacagtgtcagcagtgggcagattgatgcccaggcccccagctcgggtggacaggaggaagcagaattgttgggccccaggagcattaaaccgatcgatggcctcctgcctcagggcacccgtgataccaccatcgatgcgctcatacttgtagccttcatagtctaagaagtcctcaagcaagtctaacattttggtcatctgcgagaagatgagcactcggtgtccttgctccttcagctttcgcagcatcttctggagcagcatgagcttcccagacgacttaataagtgccccaccctcataagccccactggggagtttgggggactccatagcagccacgggaaaaaggtatggatggttgcagcacttcttaagatccatcatgatattaagcagcgacacctggttcccaccacctcgtgaattcaaggcctcaaaatttcgagtcaggatgtatttgtagtatttcttctgcatggggcttagctccacccgaacgatgagctctgtcttggctggcatgttcttaaagacatctgccttgagtctccgcagcatgtgtggccccagcaaatcatgcagtttcttgatctggtcctctttggatatgtcagcaaactcctccaggaagccctccaagttgttaaatctctctggggtgaggaagttcaggagatggaagagctcctccagattattctgcaatggggttcctgtcagcagcaacttatgatctatcttgtaaccattgagaaccctgaaaaacttggactggttgttcttgagtcgatgggcctcatctaccacaagacaggcccagcggatggaaccaagtgctgcctgatcaatggtgatcagctcatacgatgtcaggagaacatggaacttcacctgtgcctcccttttcatcttaaaagctttcttgccccctttgatggcattgtcctcaaaggagaattcattctcacgaatgatggcccggctgtccttgtcacccgtgtatgtcaccacatagaatttgggtgcccacatctggaactcccgctcccagttaatgatggtagagagtggggcactcaccaggaagggaccttttgtgtggccctccttgtagagtgagtagaggaagacgatggtttgtatggtcttgcctagccccatctcatcagctagaatggtgtcagtgccctgggcccaggagaagcgtagccagttcagcccttccaactgatacatgtgcagggtgcctccagtggctgtgataaaccgtggctgagtctcatatttcacggtaggatcattagtgggagaactgggaggcccatcaccctgtagctccttcttcttcttcttatacttgcggggctgggcagggtcttcccccataattagttctcggtgtctccagtagctttgcttatgttcttcgtattcagggatattcatttcatcttcctcccacgtggactggtcatatggtaagtccctccattttactagatagtggtaattcccctttttatccacactgtggttgatgatgcggtggacggtcatccactctggcttgatgccaaaacgatagtacttctcctccatctcagcatagtgcgggtctttcactttacgcttgtcgctcttcccatcatcctcgccggagccatagtccaggggtgggggctcatccatgtcattcttccgctggtagtttcgatacataaccaaatggaagatttccagctgaagctccttggcccaggagcagtgccagtaggatagtcctacccacttgacaaagaactctcgctctgatctgccttgaagaggacgggggggtgggacatctggatttccatctgcctgttgaggggctggcactgctacaggtggctccccccaccgccaatgtaggatcttctgcactcgacccttcagcacggggcatgtgcatcggggacacagccattcaccattgggaatgtcaggcaggggagggtttagacaatgaatgtggtaggaggagatgcacgcgtcacagcacaggagctccccgccgtccttgcatacgcggcagtactccatgtgatcatcctcctcctccttctccccttcttcctctccctcctcttcgtattcttcttcttcctccttggcctcccactggaccccctccttctcacagtgagggcagctccatttgccctctggagcccggtcaagctcaggatcaaggcagacgaggtggtaggcacgagggcaggtgtcacacagaataatttccccaccctgctggcacacctcacagtaatcctggtgatccgtctcgtagccatcaacctcctcctccccggccactgcaggacagcccaggaccttcttcttcttccttcctggccggcctctctttagtttcttggtgcggacagggccatcaggccggcctgaggcactgtggacactgccactgtccaggtctgattcctcagcctctggttcaggaccttcgtcgctctgaaaaacatacgagcctcctttcttcctcttgccacccagaagccctagttttattttgagtggtgccattttctttccccgaagcttcttgcgtccatcaggcactcgggggctcttactccgcctcttatggcctggacctttgccctctttggttttggctcttcggatgggtgggggctggatatcagcagcagggggtggtggaagggcggggggtccggagggtgctatgggggtggccgacgagacagcagctgacacctgctcagctacagctgctgctgctgctgccgctgccgccgccacagcagctgctgaccccttgaaggggttgttggcactgaactctctccatttggccccaaggatggtcatcatcttagacattgggatcttaggattcttcttagcaattaggggcctcatgaactggctgaaggctttgtagttggtgagcgtgtggtaatcctcctcagagaacacatgctccacatcctccaggccccaggtcagaagcagagttgctgatgacttctgttccacttgcttttgccccccatctccctccccctttttccgccgctttgtcttcttctcctttttttctcggtgcttccttcttcgtttccgacccggtccggttccatattcactgcccccactctctgacttctcccggtactcatctcgctcagaaccaaattcctcctcactgtcacgcttcttgcgttttcggggttttcctggcttgttctccttctgcttcttgggtcctcgttttctcttcttcacacccaatgctgacggcagcagccgaatgtcatccttatcaggcatcctgtcaccccaacacagtcctggaggaaaagaaatcctcagctggtcatttttacttcttgcccacaggatcacagtgtctgccgccttcatcacacaggagaaagtctccacaattacctaaatattcctcctcccaagtagcctaaaacctaccttcaattctattcccatctccctgctccctttgggaactagggggccataccctttgtttcccgatctcacccttcacctccatattttgttccagatatcctgacccattcatctatacgcagtatgggagacccaaacaaagat

SEQ ID NO: 49035 - DNA, 848 bp, Homo sapiens
cggacgcgtgggcagcgatggcggctgcgtcggggtcggttctgcagcgctgtatcgtgtcgccggcagggaggcatagcgcctctctgatcttcctgcatggctcaggtgattctggacaaggattaagaatgtggatcaagcaggttttaaatcaagatttaacattccaacacataaaaattatttatccaacagctcctcccagatcatatactcctatgaaaggaggaatctccaatgtatggtttgacagatttaaaataaccaatgactgcccagaacaccttgaatcaattgatgtcatgtgtcaagtgcttactgatttgattgatgaagaagtaaaaagtggcatcaagaagaacaggatattaataggaggattctctatgggaggatgcatggcaatgcatttagcatatagaaatcatcaagatgtggcaggagtatttgctctttctagttttctgaataaagcatctgctgtttaccaggctcttcagaagagtaatggtgtacttcctgaattatttcagtgtcatggtactgcagatgagttagttcttcattcttgggcagaagagacaaactcaatgttaaaatctctaggagtgaccacgaagtttcatagttttccaaatgtttaccatgagctaagcaaaactgagttagacatattgaagttatggattcttacaaagctgccaggagaaatggaaaaacaaaaatgaatgaatcaagagtgatttgttaatgtaagtgtaatgtctttgtgaaaagtgatttttactgccaaattataatgataattaaaatattaagaaataacaaaaaaaaaaaaaaaaaaa

SEQ ID NO: 49036 - DNA, 1934 bp, Homo sapiens
tttttttttaaatcaccaaccaactatctaaatggacatttgggggaattccctcccaaatttgattttgttattagaaaaatgattccgtgaacacagatgtgttttgaagaagtagcacgtaatggcttttatctaccatcaacctgataaggcacatgtgaaatggaaatgttctctttcctctgaagcagcaaattaatgttgaaaacttacatagacagaaagtaggttttggaaagggaaaccacagagattagggggacttaaaattaatataggcacaggaaagagaaaagtgtgcgctccattctcagtgggggttcaccacaaaacacgggccccaggagggaagcgctgtctaggcacacggcaaggccttagtaacagcatgctacactgctcgaggtacggtatgtcccatcgccctgtgcaccgtagagacctcagtcatctcaaggaagaatacatttgcttctccttagaggcgttcgaactagaagctatgcgttacctctgattctggaaacagaatagcagccactcattctgcattcccatttttctctccacgtgttctggtggaatgagatgctccttggcactatagcctgatgtcccacattgacccactgaccacacaggaaaagcagcgaaacctgcaccctctcttctgagtcacgcctgtggctcatcggcttccctcttaacctttagtgccctgaagactgctgccgctgtcaccgttgcgctgaaaccccatgggcccgttctgattgaaggtgaagcccaccagattatttttcaaagtcttaggtttcggtgtatctaacctgctcagtaaatatggacgcaattaaagatgctctaggaaatttggggactgtatttaatttttctttccttccatctgaggagcaaggaaatcctactgctgaatagctgttagtatctattttaccaggatttactcattttcaggtacctaatgtagctgcttagcatgcatgcacaacaatacaatttatatggtaaatggaaccaaataatggcttcactgaatgttatggctgcactgaagggaaatgtcacggtaaatagctgccaaattatggatcatgccgaagtgtcacaactgcactaaagacaaatagcactagaggctattgccactgtgacgcttttgagttatgaagaagggtagcggcctgatgcgaggctctttgtgtcctcattatagcaaagggttactggtgcaggggactaggaaaaacccgtccagtgtggtgcttagttattcatccatccctttcagacctaacgagccacagccacacggaaagagactttgcctcacttttacattcacaaacaaacaaaggaggggggagcaggttttatgaatgtaactgtgcacaggaaatgactggtaatggaaaaaatgttgtaataaaataatctaatcaaagaatattattaaatttaacatagtctatgtccaaaaggcttagttgcttcttatgcagatagatgtgtgaaatctaagcagtaatgtactttctccctttgtaaagacttggggagtaaggacattaccaactaaattgcttcttcgaaactgaagtgagtcccggtttgtttcattttaatgggagggtaataaagatgaaagaccaacattttaactgatggatcccttaagctacagaatagaaatttattgtgttttgagggaatatactaaatgcagctatgtaaaaataaaattcaaacgcccaggattaaaataaaatataatctgaaaacctcatgttctctctttccccaaactaagaaagtgcactgcatgctgttttcacttattcttagaaaacaagcatgaaagattccgcccattcagataatgccaaaaatatgttaaacttttttttatt

SEQ ID NO: 49037 - DNA, 610 bp, Homo sapiens
acctgtgctgcagcggctctctcaggccgtgggtcgtcgctgcagctgccgggaaagaaggaaacgacgactccgggggcgaacttggcacacagggaggaagggaaaggatgcatggtcatggaggctatgattctgattttagtgatgatgaacactgtggagaatccagcaaaaggaaaaaaaggacagttgaagacgacttactgctccaaaaaccatttcagaaagaaaaacatggaaaggtggcccataaacaagttgcagcagaattgctggatagggaagaagcaagaaatagaaggtttcatcttcatagctatggatgcttatcaaagacatacaaagttcgtaaatgactatattttatactatggtggcaaaaaagaagacttcaagcgtttgggggaaaatgacaagacagacttggatgttatacgagaaaatcatagattcctatggaatgaggaggacgaaatggacatgacttgggagaagagacttgctaagaaatactatgataaattatttaaggaatactgcatagcagatctcagtaaatataaagaaaataagtttggatttaggtggcgagtagaaaaaaaagtaa

SEQ ID NO: 49038 - DNA, 513 bp, Homo sapiens
  misc_feature (1)...(513): n = a,t,c or g
atataggttaatgaancattacatttataataacaaaggccacaatttaattaattggtaagatataatgcaaaaaaaaaaagagaaatgtttgccttatgtatattccctttatttcctttaccttttgtttttccttggacctaaacagagaaaataatgcttatgtatctgaagaaaaggtcagatctattggaaatgacagcccgatacttgagcctcctctttaaaaggtatccagccctgatattttgtgtaaataaaatgtttttaaaacctgttagttaaaacacttaggtgatgggcactgctgcttataaattcatcttttggttgaatcctcactatgctatttggtacctaaaaatattctccaaacccttgctgccagttcctctttgataaatatatagttaattcgaaataaaatccattgcaattcatttatgagttatcttacatatcacaaagaccaattagaattagtcattattcttgatgaagagtctgttt

SEQ ID NO: 49039 - DNA, 1150 bp, Homo sapiens
attttttttttttttcatttttttttattacatttggacctttaagaaacatataccatcagatataccactattcagtaaaaatctattctagtttttgggaagcttatgtgtcacaaactatcttgcttctagtctccaagactttactaagtttatcaaaaaggtgggctctggtctatgggatcctgagccttgaggtttggatgttctgattattgtaaaacaatttcaagtggattaacttaattcccagctgtttttcttctggaatgggctaatcagtttgaattatctagtccattacaagaatattaaattccttgagctttgtgatctattctgtctttggaaaacctggtaaaaaagtaattttttttctatacaataaggatggatttacccagaacatacccagtattaatcataacaaaaagcagtatagataatgtatatgtgctgtgttcactttaataaccacttcataagtaactactctaactatggggactatttctggatcagtaagatccaagtgtagttagttacacactacactcagcttaacacaactcttggtatctgacattgattaaaagtaaaaaagggtaagtgaacaaatacatactcatacatgatcacgtttttaagaagctaccctttgcagaagtaaacaagagaggagactttcaggaagctactgatggggactgggaaggtttaaagctatggctttggtaagcaccccagtgagctgtaggaaggcattgtaagagtagattctgcagcatcaaaggataattctctaaaagaggtgggtgttttctcaattaatctaaattctgaggctttcagcagttgagggctagaaacaagatccaaagaaaagagccatcttcacaacacttaagaaaggtgactgactgagccattaggctcatgatgctaaatggtccaaaagcctttggtggtatgatatggacaagaaaaaaaattaatacacaaaccacgtaacaccattaaaaccaaaaaacattttttcattaaaaaaagtatttagaacacacaaaacaaggcaacacttattcttttttctcatcttctggtatgggatctgttggtggctcctccactgttgcactgttgctct

SEQ ID NO: 49040 - DNA, 2087 bp, Homo sapiens
  misc_feature (1)...(2087): n = a,t,c or g
tttttttttttttttttgataacatgggtggatttatttcttaagatttgagtgcaaacttaaaaacaagaacaaacaaagcttttcatcaagaataaacacaaaatctaaacaattctgcaatcatgcattttaacagaaagtacaaatatgaatacattataatttgtaactgcatttaaaaattaaaatatttctctccaaatccaaaacaccacacaatctttatctgttctcatcttgttaccttagaaacatttgtcatatgctatcaggaaaatataggcaagacttactaatcagttattcatgatcaaagaaacatgattctccttaactgtgactttttgaatcatttatctgtatttctgaaatatcacacaattatacctctactctagagaaaaaaagaataaatacaaatatcaaggaggcaggaacattcatggaattaaagcaaaagtccacaagtgtttgacttagaaatgtacatattgtaggtaaatttttaaagtacaactttagttgatggctgatgtgtatgtaataactgtgagcaatttaaacaggtataaaaatgtgagatcaaaatctttaggcttaaatacttgaaaagtcactatggatatggaaagatttgtttacataaacatgtatatttttagatggaaaatcaaggggtagtggcatctccctggtcccttaacaatatttggatttttgcaaagaattagcagcacccaaccttaagtgttaattatgtgtttctaaaggacctataacagatcagttggcagtgttctagcttttgggagttgggggcagattgggggtgcaaatatctgagataagatagtacatgcactcacacatttaaaatcaccattctaaatgggaaaaaaaatcacatattggaaaagtctaagaaactcattcttaagggataaacagcagggcaggaataaaagctgaacagtagtctacttgataataatggtatttcactcttcaaaggcaagttgggaagaatgagaatactcacatacacataacttcagggaaaacttgcctaaaattttaccttgcaaaacgctgaacagaaatctttacaaaaaccttcattcttgtttataatacttgatttttcccttattaccaccatatacataacatttaagtattttcttcataaatattttagagcaaaaagaatgtattttgttgcaatggtggcccacatctgtacaaaacaacataagcaacacacacacacacatatatatatgcatatatataaaaaatgattaagaaaaagtgcaaagaataacagtattaagattttttgcattttacaggtaactatggttcaagtgtgaatatttatcagggatatataatcccaggttttaattaaagattcaaaaagaaaccacactcccaagttactgcacaaacatcagtcccttatcaagtaactctgcccttctcccaaatctagtatttccagtttctaagctcttcccaaacaggaaaaaatgataacagtgttttcttccctttaacttcccaaaactcatccaagttaatcacctgtaagttcaagcaagatattggggaagtcattcattataacccgctttgctaaaattaaagcaaaatgaaaggctttctgaaatgcaaactactgatcaagaataaaatcagcaacagcaaacagaccttaaattacaaatgtaatttaatacatgtacattttaaaatcaatccctgttatcaaagataaattcagagtttaaatctctttcccaggttcagtgctgtgcaagggttctaattccaaatacttatgattttatcaccttttctaagagaaaatgtttgcctgttaactttttaccttccttgctcttggtctcagcttttcagtttgaataaacacagaaaggcaattttcagcatttcaaaaaatgtactttcctcttagtcattcaaataattacagttatttttagatctcaaagtttcaaaaaaagcagctcaatttccctttaaatatattactagatattttttggntgttggtatat

SEQ ID NO: 49041 - DNA, 1492 bp, Homo sapiens
ttttttttttcatcgatcaattcttccattactttcttttaattcaaacatgcatacacaaagaaaggtttctgtcctttaattttttaacagaatatacagagccacacaatacgatttcaatttcaaattatgggagatcatattcaaatatgcttaggtttgacaagttgctgttacaatactgagaactttcatgaaaacggtatttaacaatttttaagataatcaaatatctttttgctacgtgggccaacgcattaatactaacttgtttaaaaatgcagtcttttagacttcaaattattataaaacaatatcaagatcatatagatatacttcctgattactcaaaactcgttccattctgatggaggctgaaggtaaatgttattatacattagaacatttcatgaaaccacttctcctttgcacttacctgtaaaagtcaaaaattaaaccacaatttcctaagacataactatttctagaatacattggtgtaatcataaaagactacaagtaaattatcatttttatactaacactttttaccacaacacatctttcctaaaaagaccaaaaaaaattgggaatttggatttcccttaacataacaggatctcatactttctgattttaataaatttccactctttttccagtaggaactatctacacagcacagtgctacatataattataccagtgagatgtacgttcagattcaccatataaccaacacagtggtaccatacaaagtttttctgcaggtaaaaatgctaagaaaggccacagtggacagtgcccgacaatgaatacagtaaattcccaggtgccaccgagcttcagagacccacaagtttcaaatatttttcagcaacggaaagaaaaaaacatgtagagaaacatagagtaaaaatatataattcccactatcaataaggtacttttccagatagtgtttccttccttaaactggcaaatggagcttaacagaaaattacagaaagtgaaacaagatcataatacgaaaggaaatcttccttgttttctcatcaaaggaatgcactaggatttgcgcgggggtctttctggttcctgtatctgtaggtcagccaaacacccaggatctctgtaaaactgaagaacaggccaatgccaccaacaaatctcaaaacctctccagcatattctcctatgattggagcacatggcgagcacgagtggtcacttttaacacagctagccagacaggtgtcatttgggttaacacttcggaacccacagcagtttagatttctctggatgtcatttcgagcacttgccgtattgttccaaccaacctccagaagctgaccctgttgctcctggttcagggctaaacaagcgcaagatacagaaaactgaacaataaatacaagtaacagaataatcatataaaaaaatagcaacacctgatgatgttttacagctccaatcagacccacta

SEQ ID NO: 49042 - DNA, 401 bp, Homo sapiens
cttgccggaagccattctgcactaatagcggcaaaaagccttctggttcctggggcgacgcgcccggcggccgtactattcacttccccagaacgccacagcccaggctttcttcttagtgggcttcccagaccaagaagggaaacctttcatccgaaggtactgaggggaggaaggtggcctgaagttatctcagtgccgctttgtttcccaccccagtcggtcagcccttcctcagcgccctttaacccttgcagatcggatggagaaagctgccagcacgttctagggatgggggcagattgaggagcgggagggagtagtctttgtctaactttataccagtaccaaactatgttaatttaatgtagttttataataaatctttaagtcctgtaact

SEQ ID NO: 49043 - DNA, 2011 bp, Homo sapiens
ataaatcctgtttcaatgcattctttaactttgaggatatgcaagagatcacccagcacgtttgctgtctgtcatgtggatgccccaggccagcaggaaggtgcaccctctttcccaacagggtatcagtaccccacaatggatgagctggctgaaatgctgcctcctgttcttacccacctaagcctgaaaagcatcattggaattggagttggagctggagcttacatcctcagcagatttgcactcaaccatccagagcttgtggaaggccttgtgctcattaatggttgacccttgcgctaaaggctggattgactgggcagcttccaaactctctggcctgacaaccaatgttgtggacattattttggctcatcactttgggcaggaagagttacaggccaacctggacctgatccaaacctacagaatgcatattgcccaagacatcaaccaagacaacctgcagctcttcttgaattcctacaatggacgcagagacctggagatcgaaagacccatactgggccaaaatgataacaaatcaaaaacattaaagtgttctactttactggtggtaggggacaattcgcctgcagttgaggctgtgatggcggactgtgggggactgcccccagggtagttcagcctgggaagctcaccgaggccttcaagtactttttgcagggaatgggctacataccatctgccagcatgactcggctcgcccgatcacggaacccactcaacctcgagtagcctcggctctggagaaagtcccttcagccggtctgtcaccagcaatcagtcagatggaactcaagaatcctgtgagtcccctgatgtcctggacagacaccagaccatggaggtgtcctgctaagcagatgctcctcccctggaccattgcaagtccatccttcaaatgaccactccataatataacatttcatccagtaaactggcctctactatctttaactcatgcatggccactgaacctctctctagtagcctggatttatcattctctctgcctgcccacccccttttttgtatagcccaagaaccacttccatgccatactgtaacattccaacatctttagctgatcagatctctccatatcctctcttgccagctttttcccgtgctcccccaactatgtatcagataagattctttgatcccgactctgtgtgtgcgagcacgcgtgtctgtgtttgtgtgtgcatagttctgtggttttagacacgctttcttgtagtgcttctgcaaaaaacaaaaaagggacttattttgcattctcaatggtgtttttaagggaattaggcagaacagatttctaggttgggtaggccactgcattctcttttgtttgcaaattggtcaacaaaatttgcaaagtgatttcaggagagagcagctttgagggaatgtgggaaaatcataattgccgtctgggaccattgattgattgtgaccagtagcagaagggtgcctgttacatagagaggctccttctgtccaaatgaatttctgtatactcttctataaataaaagggaggaatatattctgctggaagcccatgaaccatcgctgaggttctgatacaacatagagttttttccaaggagtgaatgtggtttaattactggactctcttagcacaggaaggtggaaacaaaatgccaggcctctgctctgaagagcaaaactgctgtcgctgcagtatctgataccagacatccacatatccacaagaagtgcctcttaggtctgtgacagagagtgtgtctccattcctcagttcccagaaaggggagaggtttggcctaaaaagcatgtagatgggggagaaatgggtggggggagaggaacagccattaacacagtatcatgtttaacaagtatagccttgatttcagtagatgtaatggaagccaaattaaattgatacagaacccattgccctccagcctgggatacagaggaagactccattt

SEQ ID NO: 49044 - DNA, 672 bp, Homo sapiens
ttttttttttcaactaatttttatagttacatcagcctgggctaattatacagaaaatttatacaaatacacacaaaaccaaaaataccaaaccaagcaacaacaaaaaaacaacccccaaacccaaaaactctcattccataaggtgacaaattttacttctgagaggtagtacaaccaaccaaatgaatactgtacgtgcattaactgaggcacttaagatcacccaacctttttaatttataaccaaatctctcctcttcaggatttcagtgctcatgaacaagtattatattagattaatggtctcaatttattctgacaaaatcttactttgaagtttagtcatttagaccttaaagttacaaaaataaagtatttctatctcaggcaagtatttaaatttcttaaaagctagtaagaaatgaaaagatcaatgtggagagaagtatgatttcttaaaaatgggtacatattttagttttttaattgtgaaatacattatgacctgtaagaacactgttcttcctattctattcagggtcattttaacatgtgagccttcagcttcattttgtacactacaaacaggaaaacataaacatcatgaatcagtttaggcagagatgtgattaagaattgtaaaagatggctttcataacatacataaaa

SEQ ID NO: 49045 - DNA, 989 bp, Homo sapiens
tgcgccgctgcgggagccacaggaagtgaagagcttccgccgggagaccgcggctgcaggaacggaggcggaaggggccctgcggcgacgacgtcgtcgacgggggtggccgtgggagctgagcacggagaagactccctctctcggaagccggatcccgagccgggcaggatggatcaccaccagccggggactgggcgctaccaggtgcttcttaatgaagaggataactcagaatcatcggctatagagcagccacctacttcaaacccagcaccgcagattgtgcaggctgcgtcttcagcaccagcacttgaaactgactcttcccctccaccatatagtagtattactgtggaagtacctacaacttcagatacagaagtttacggtgagttttatcccgtgccacctccctatagcgttgctacctctcttcctacatacgatgaagctgagaaggctaaagctggctgcaatggcagctgcagcagcagaaacatctcaaagaattcaggaggaagagtgtccaccaagagatgacttcagtgatgcagaccagctcagagtggggaatgatggcattttcatgctggcatttttcatggcatttattttcaactggcttggattttgtttatccttctgtatcaccaataccatagctggaaggtatggtgctatctgcggatttggcctttccttgatcaaatggatccttattgtcaggttttctgattattttactggatatttcaatggacagtattggctttggtggatatttcttgtacttggcctgctccttttcttcagaggatttgttaattatctaaaagtcagaaacatgtctgaaagtatggcagctgctcatagaacaaggtatttcttcttattgtagagactgcatcaacccgacattcctttcttataccaatgtgaaatttccagatcatctgtaaacctacaactttaatagaagactacta

SEQ ID NO: 49046 - DNA, 3001 bp, Homo sapiens
tggaatcttgctgcaggccctccctctactcttcctgtcctaaaaataggggccgttttcttacacacccccagagagaggagggactgtcacactggtcttctctacagttcacagaggtctttcagctcatttaatcccaggaaagaggcatcaaagctagaatgtgaatataacttttgtggaccaatactaagaataacaagaagcccagtggtgaggaaagtgcgttctcccagcactgcctgctgttttctccctctcatgtccctccatggagaaatgactttattgcttaatttctgcctttcccccctcacacatgcacttttgggcctttttttatagctggaaaaaacaaaataccaccctacaaacctgtatttaaaaagaaacagaaatgaccacgtgaaatttgcctctgtccaaacatttcatcccgtgtgtatgtgtatgtgtgtgagtgtgtgaagccgccagttcatccccttagaggacctgagtttggggagagtggtgagtggaagggaggagcagcaagaagcagcctgttttcactcagctttaattctccttcccagataaggcaagccagtcatggaatctttgctgcaggccctccctctaactcttcctgtccttaaaaataggggccgttttcttacacacccccagagagaggagggactgtcacactggtcttctctacagttcacagaggtctttcagctcatttaatcccaggaaagaggcatcaaagctagaatgtgaatataacttttgtggaccaatactaagaataacaagaagcccagtggtgaggaaagtgcgttctcccagcactgcctcctgttttctccctctcatgtccctccagggaaaatgactttattgcttaatttctgcctttcccccctcacacatgcacttttgggcctttttttatagctggaaaaaacaaaataccaccctacaaacctgtatttaaaaagaaacagaaatgaccacgtgaaatttgcctctgtccaaacatttcatccgtgtgtatgtgtatgtgtgtgagtgtgtgaagccgccagttcatctttttatatggggttgttgtctcattttggtctgttttggtcccctcacttgtggttcaagtcaaatgttcagaatcataacaggccagaaaggtttgatcccgagcacaagcccacgagggaggggaccaaaacagaccaaaatgagacaacaaccccatataaaaagatgaactggcggcttcacacactcacacacatacacatacacacggatgaaatgtttggacagaggcaaatttcacgtggtcatttctgtttctttttaaatacaggtttgtagggtggtattttgttttttccagctataaaaaaaaggcccaaaagtgcatgtgtgaggggggaaaggcagaaattaagcaataaagtcattttccctggagggacatgagagggagaaaacaggaggcagtgctgggagaacgcactttcctcaccactgggcttcttgttattcttagtattggtccacaaaagttatattcacattctagctttgatgcctctttcctgggattaaatgagctgaaagacctctgtgaactgtagagaagaccaggggctcagcccagcccagcccagcccctcagggctctgtgctcttctagggatggatggttttggtaaagaacagacgcccagcagcccccggtcactcagcaccagtgtgacagtccctcctctctctgggggtgtgtaagaaaacggcccctatttttaggacaggaagagtagagggagggcctgcagcaagattccatgactggcttgccttatctgggaaggagaattaagctgagtgaaaacaggctgcttcttgctgctcctcccttccactcaccactcttcccaaactcaggtcctcttaaggggatgtgtccccttgacctttggtccccaaatccacattgtgctttgagatcaagaggaaacagaatgcaccagcgccacccaagactcccaagagattctctgcctccccgagcccccaaatcgcccaatataagatattccacttgcctccacctaggctggggccagaaaggaaaagggatgggtcaggcagggcctccccacccacagtcttttcctcaacctctcattcggggcaaacatccccaaatcaattaacaagcagttgacaaaaacacccatgatgactgattgttgaacaggccaataccttcaggtcctgcccctcacctgtgggtacaagtgtgccaagggacaagaggccaatggcagggcctggttgggctcaggatgaaaatgggatggggactcccagagggtggcaagaaaaccagagatgaatcaagtgaggccagggttgtcacagccacccatgagcagagagcaggaactggatatagcaccgtctttccctccccatccccgaggctgtgcttccagttttgcagccctgggaccctctttcttgcttcaagggagctttatgtaagtgagggggaggtctaggggaagagcccccgagggagacacccacagggtgacacttctgccaccctattctgtagccccagacagagatggggaaacatatgcctggagtgacagagccttcctccaccgcttagccccagcaggctgcagaccctatggcagccccaactccacaccaacctcttaccttccaccctgcacactgcaaagggcagattggtgggcttcctctactcagagatggggggaaggaggaatttcattccaaagaaaacctaaggaacttctctgccccaggagccctcccctctcactgtgggttctgaggaaactctcaggggaagacagctcttcataccctcacataaccccacccacacacaggcccagagacacctacagacacaccccccgccccatctctcacactcacactcacacacttgtgtgtc

SEQ ID NO: 49047 - DNA, 2127 bp, Homo sapiens
ctctattttggtccaatttgtatctagtggctgagaaattaaataattctaaagtatgaagttacctatctgaaaatgtacttacagagtatcattttaaaatggatgtctctttaaaaattttgttacttttaccaacaaatgtaatataatttatgtatattttattaataatagtgaattccttaaaatttgttctatgtacttatatttaatttgatttaatggttactgcccagatattgagaaatggttcaaatattgagtgtgtttcaatatattatctggcttatttcaacatgagtaatatgagcaaaataagttaaaacctgcgtctgatcaattttcctcatgactagaactaaaacagtaaatttggacaatattaagcctcaaataatcatctccaaactccttctaacactttttaaatcagattggaagacatggacaaatcaggttcatgtgttgcatctttatgtcctttgccaatatccaagatcatcacatatggtagatattcacatggagtttcaaattcagaatagattaccattaccttcctgcccttacacatcctactccttatttaaaagttctatttgtgacttttcatttcctgaaagtttaaaaatacaatttgagaatgtttataatacattctctcctgtcttttcacggttacgtctgttattgctgaaatacaccacattttctttgttctggtcaaggttaactcaatatctgtgtgaaagagaactactaacaacgttacaatagaggctagatttgaaaaaaaaaatctatagatctaattgatacaattgtagaacaaaatgtcaaaataatgttttaagtataagagaagatggaccaaggagagagagatcatttgaaaatctaattgtagcttttctaggctcacattcatgtactacttttagcacccttatgggcctgtgctcgccccctggacagttgagctttgggattatcttcctcttcaattttccctctattgacccgagtgtctccctctgcttctacagatttatagtactccttggctcttttgagtctccacttttactcactgtctctgggatttttaagatccttttcttctcttataaatcatcctcttaatgaaaattagcctaacaaaagtttggagactggaatcctactttgagccactgacttgaaataactcttttggcaagttgcctgacatcctgtcttaccaaggtggcatatttgcatttttactgcttaaaacatttttttttttttaccatctttatccaaatttatcatattgatggtaggactaacaggctttttagaagctggctttaactttgagtctcaagctacaatgctgttgggcagcctggtcttcccacgtgagggtttaactttgtttatttgcctccagttattccaaaatgcttattaaatgaaaggcccaggaacatgtttattttagtcacctttgctttttaacaattttgttttgtaatcaatgagtaattcatgatgaattatttttgactaatggatagccgaagcaagcttttaattctaataggtaatgttcttcttttgtcttattgaaacaatgagaatactctgtgcatttcaaatgcactccgattatgctgtggttttattcacataagcacaatatgtgttttatttataacttcataacaaacttataatataataatttaccttagcagacatgcaaaagcttattcttgtgtgacttactttctttaagctaataatataaaaataaatatgtatcttaaaaatctataataaaacattagaaattaaagatatgtgctttttattttgcagatgagttcatttgcttctgtagatgtgttttcagagctaggtacagaggaatgtttgctacctttagcggtgaaaaaagaaagagagtcaagaattttgttggattgtgtttgtgtgtgcatatatttgatatcatcatcatatttgtaatctttggacttgtaatcatagcctgtttattctactgtgccattaaatatactttaccttatacataacgaataaaatacctagatgtagatttatttacaaaaaaaa

SEQ ID NO: 49048 - DNA, 848 bp, Homo sapiens; identical to SEQ ID NO: 9607

SEQ ID NO: 49049 - DNA, 2068 bp, Homo sapiens
ttttttttttttttgagcttggcaaaccttttttattttgtgataaaaatgctttcatataaatttcatcttaactacctttagaatgaaacggaaaagtaaaaacaaagtgtgcattttccttactacgtttagtcaggaatatgcggtcattttattggttactgggtttctcatacaaacagatataatatcacttttaagagaaatgtacacaaggaagtaaccatagtaccacttattagtgggggcctctgggtacataaatgtgtcctcccaaatagtcatcatacattcaatgtattggttagggccaaaatccctaaaccacctctcaacaaaacattacacctttggttctttattatgcaaaaattacaaattggcaaattcaataagaggatgcaatggatttgagcatcacagccaattgcttatactaaaatattttaattctcagactctctttccctcatacctttcccttccccacctcacataagaaaatgatgcttaaaacaaaacagaggaagcaaataaacaaacaaaaaaacctatccccaaaggcaggcagaagaggagtcaaagaaagaaagcatttataacaataaaaataaaccaaaaatagcaggggaggatctatacatggcataaaagatgtgtctcataaaaactgagtctccaattcagaacccaaatgagaaagtgattatccatcttaccttcccttttattagataccacacaattcaagagttcttaaaatctaagagatcagtaaaaagtttgaaaggcagtgttgtcctcctcatcactgaaacctgttgtctgtaatgacagctttcacattccctttctccaaacccaaaggatccaaattaaagtagtccaagaaaaagaaacaagcaatttggtctgacattgtgcttaaggaaaagggaggatataaaatatcccagtggctggatcagtagctgatactttcagaagtggggctggagcaggagggcagaaaggggcaggtacgctgtggtccacagaggtccatgcagataggttctccccatctgtgaataataaatgggtccaagggcagagagtcaccatttagaatgataaaatgtttgcacactatgaaagaggctgacagaatgttgccacatggagagaataaagcagagaatgaacaaacttaatctgcttatctcagggcagaagtaattatttttgttggttcaataaatttggataggactgaaaaaaccatttgtaaactattatgccaacagacacgcagggtttccatatggggccaccgacagacaaatcaggtaagtgggaagcactgatgcatacttgcagccatagaaggaatgagaactgtcattcaaaccaaaagagtcgggaattcacctgttaatatctacaaaatgcccaggcagaacttattttgcaggtgtcatgggcatcacagcactggacggaagttgcagtgtagccatggaccaattattaactggcccaaggagaagaggaagaaaactattctttatctacaattaactaaaatgcttctgcccttaaaagaaagtcaaagaaattgccaagagcatgaatacagagagtggattcaggtgaggggcaatcagtctgaacaatgagcaagtctatagttgtccattatcatctaaaaggtgactctaggaaaggaaaatgttctgttgagtttctacgttagttgccaaagggaatgtcatggccgcttcagaggaaaagaaatggtagcagaaaatagcaaaggctgctatatagttcctccttttccaaccttcttatagggctgttttggatcatagaaaacaagtccaactttccaattcctgcacttgaacatataaagtccatgtcttcagtgagaacatactgggtataccagtaacacggaccacacggtgtgaaagaaagattggtgagcaggcctttaagcagcaagataatcagtagagactgatcatctgacaaacggaagacaactgtcactgggtcccttgggctaaggaaagttcag

SEQ ID NO: 49050 - DNA, 1710 bp, Homo sapiens
gaagaacttctgaggcgtagaaaagtccaccgagaagttatatttaagtacttggcaacacaggggattgttatacctccagctactgaaaaacacaatcttattcagcatgcaaaagattactggcaaaagcaaccacaactgaaattgaaggaaacgccagagccagttacaaagacagaggacatccacctatttcaacagcaggtgaaagaagataaaaaagctgaaaaagttgattttcgtcgcctaggagaagaattctgtcattggttctttggacttcttaattctcagaatccttttctaggaccacctcaagatgaatggggaccacagcacttctggcatgatgtgaagcttaggttttattacaacacatcagaacaaaatgttatggactaccatggagcagaaatcgtgagccttcgtttgctgtcactagtaaaagaagaatttctttttctcagccccaacctagattcacatggactgaaatgtgcatcttctcctcatgggctggttatggttggagttgctgggactgtccatcgaggaaacacttgtttgggcatttttgaacaaatttttggactcatccgctgcccttttgtggagaatacttggaaaatcaaatttatcaacctgaaaattatgggagagagttcccttgctcctggaacattaccgaaaccatctgttaaatttgaacaaagtgatctagaggccttttataatgtaatcactgtatgtggtaccaatgaagtacgacataatgtaaagcaggcttcggatagtggaactggggaccaagtttgaggtagtggaaatgagacattgctgaacaaaagagaactgggtttacctgaccctctaaagcgctaagtactgtcagcctgaaaaaaatcttctatacagaaactcttccaaatactatatcagtaatgtctgaatgatttcagatgtgaaaattgacatattttagttgaaatacctttctggactacagacttacatatcatgtgaatacttacctatttctacccgagttgcagcaagtattctgaaagcttaatgcaaataaatcccactttagatcttacagctaactgtgtgccttagaaaccaggtaatattttccttttacttagtgaatattctgctaatatctgcacttttcatgtgggaaaggattaataatggtccaggcttcccctctttaagtttcatgtttacttttgtctaactctggataattgtattttacaaatgcatctcactgtagtatatttttaaaactattaaatattttagagatgtttaacgtaaactcaaagttctcattttagaaaatttaaataacattctttttgcaaaaaagtccaataatttaacagttgaagaaaaacttactacctctttaaatatttgagaaacatttttcaaagttatcagctgtagtccaagctaaatatcttttgtaatctgcaacattttccttactgtttttgggcagtgataaatgctgttctcgaaatagactttattcttacctaggcttcagccaacagttttatagagcagttactgtaatacaatataaaggaaatatgctgttgaaattttaaaggtatgcccagttcctaacttttaaacgaattaccgttcttcctcttggctgatcttggcagagatgacaaaaaaaacccc

SEQ ID NO: 49051 - DNA, 1701 bp, Homo sapiens
ttttttttaccaggaatgctataaacattttatttattttttaagaaagtagcttcagaaaaagaggaaaatatctagatcatttatttatacatatatatattttttaataaaaacctttacattatcttcatgcataaagacccaggtgtggccatattgcctgagatagccctaacaccagctatctcatgccattacctggggctccctatagctgtcagcagtgtagcaaaggccctctgcctgcccctaacgcccaactccatgcctgcctcagtcatggtttgtttttgcttctggaaggggtagatggagggtgggaaatgctttggagctaacatgggatgaacagggagggttacccaacctgccattttttatccaaactctgcaggcaaatccagacagagtctcagcaagactgaaaaccagggaccaaaccaaactctgggagcttcccacagacatgtcacatgtgaccaagggttcctgcacatagtagtagcaaaggtatggtgttcatgggactcctaaaggcaggaacaaaaacagccctgaagatcaatccctccgtgcacaggcattcacttctgccctaagtgtgtcagaaagatcccattttgtttcctaactcaggccaaccctcctttgcctccaaaattcagtgttaactaaccaattacttaagagacggatccctcttccttctgtggatagttcatctgttaaggatccattatcacctgtctcactcctcctaaggagtcctagtataaaagggccagggtaggagtagggaagctggttggcatggagggtcacaagatccagaatggctagggatggaaaaagaataccctggttctttgggggattctgccaaaggagctttattgaccatttttttaaaggaaaaacactgaatgatcttgaggatggtaaactgtctcctcttctgggttccagaagcccttatgctacgttcagtattaagaaaagccctgaacaagtggaggatgctgcttctggcagcagggagggagggtagatgccacagccaacccagagaatggcaaacagtgccaatccaaacaaggcagggaacctctgtgtggtgtgaatgggcatgtgactgtgatgcaaagtgcctggggctcacaggctcccaacagccagttctcgcagataggactgggtaaggctgcgcagttcgtccatggcatagtcctcaggcatgggaagccggccaatgtggggagccaagaggcgcaaagggactcgctgagggtctggtgttgagtcggaggttctatcaggaggatgatgcagactcagcaccacgcgcagcaggttggctacacgtttggccatgtctgactgagccaggcgatctttagcactgtaacactgaatctgctctatccgactgcacagtgaagtcactttgatgtgtaactgctccaggtcattacctgagcaatccacctgctgtatatggcggagcatttcaatgactctaatatagtccaggtaaacaagcccagatgtttcccaatcctgaattaggctcgtgcgctctggaggtgccaggtcttccaagaaccccttcaggtagtcatagttctcattaatgatggcatcagaagctaagtgtcggatgatgagcttgtggcagcggttccagtgctcagccttaac

SEQ ID NO: 49052 - DNA, 1316 bp, Homo sapiens
  misc_feature (1)...(1316): n = a,t,c or g
tttttttttaatcttaacatggtattctctcctactctctcaccctcccccccaaaaaaaggccacaaagtgctttcacgaagcgtcattcttttagataaagccattgcacaaaatgtacagttcaggtatactgaaatgagtaccacaccggcgtccaattgcggcagtttttatacaccagtatggcataggcgaagtcttttaacagaattacagcaaacacctttataagggccatacaaataacacatttaaagtattaaaaggtacagctgactcaatagcagaatttaaaagctacatcctattagcacatttaacccaaatgaacttgaatctttctatgatttaccacgcaggaaactaggacagaataaatttcttgtcaaaagcagtttgttcatttacacaaaactataagtcaattaatgtcactacctgctaaagcagacagcaaggggggcccttggtctataatatttatactgtcccaaatattgtcaccttaaaatggcaaaactttaaattactattttctttacaaaataaatgtaatctattatatatagacctggaaaaaactcaaaagttcaaattcttaatgtgaaagcaagtaggtaaagattcaaaagtgaaaaaatcttttacactttatgtaaatgatacttaagtatgacaaagaggtgataattcaagttcgtaactagtaagtcactaaaaagataaatgcattcattcatgtaccacaaaatcagagaagacacgaggacatgccgcagtcagtgaaatagccgagaaatcaacattttactagttattttgtcccaaactattaccatgtgtgtttggtatgttaacaatttaaatatccacattaggctaaacaacaagcacctgtcagcagtggaaaccaaaacattttgatgctaaaaaatatacaagatatttagacgctatttcattggttgtcaaaaacagtgactactgccaaataattaaatttaaaatattgtgccaggtcctctcagggaaatgtgaaaataatactgacgatctcattgtcattgctgttattttactggaattaaacaaaggccagaagttataaatttatgactgccaatactatctttggatagttacaatacagtatgtaaaattaaggatggctttgtttagaagactgccataaatcaacaaaacccaactgtgtctgggggacatggtagagaaaatggcaattttgagagaggagtgcctcctaaggcatttccctggagggcncgagggtttttttttttttccattaccgg

SEQ ID NO: 49053 - DNA, 1986 bp, Homo sapiens
tttttttttacaatgttagtttctggaattttattatttttaatacatacatttcacaaacagaaaccctctaaaaccacacacaattccacaaccaaatgtttcaattttatcaacattctttaactatttacactgtctttcctcaacaaaagtgcaatccaagacatcttgacaagaaatctttactgacaagaatttatttttgagctggttttaatggagcccatccattatattttctttcaattacccggaatattcagtgaacaggacatagagatgaactgggttaggcagcatcctattataggaaataaaacactaaacaagaacactttctcctcacttccttcccaacctccaatgaaaggttactcaacagctgctaccaggacacaaaacagaaaagcaaactggagttcctgacctagacacagggagaacagactgtgtattaagcatcagtcttgcaggactaaacaaaagacttagcaaattagttctggtgctctaataaggtacatatctgtcttatctgttagttttagagttcaaatacctaataagattctttttagatgagttaattttcccccaacatatatgaaaataacttttactcagaaaatgaacttcttgaacaaaacctagaagttaaagggcatttaaggaaagctcctctgtaactagaatgggataattcacccaactccccaacttcatggcaccatgtctatcttttaaagtataaacccattatatcaactgcttcaaatgtaacaagagaatgaagaggtgagatggcctgaagagaaaacaatcaatcagaaattgtcctctcactaaagcagatcattgtatctgctcaaggtataaaactcttaaaaataaataattaaaaaatattaagaatagacgaaaaatcactttgaaattattagtcactcttaagactgcttcattttactgaacactattcatcagaaaaacaaattggatctcttgggtaactaatatccttttagtatcctaactacaacaaaaatactaaccttttttgatatattccaattccaatcaaagtattccagggcaagcttgggggtattaaggtccagtaagatttccccaaaataaagatttaatccttccatggtgttggaataattccggattaatatttttattccccaaatcagcccagattttcccctcctagacaagaatgaatcgtcttaaaggcaaaagatattcccagatatgcttcatgctcttatgcttttctctttaagtaacatccacagaatccttactttagcatcgaaataatgtccaagagtaaactttacccaattacagtaaaacctcatcctatttattgttcagggggtagaaagccatctaaaaaggcaacatggaacacagcatacactacactgacggcagttctaaattcaggagcttgctgaatgcaatgtataggtcaattgtaagcttcagaacaacaatataaagcaggtttcactataaaattttaggtgggttaaagatcagcatccataaatattttacctatttaaattccagaaataaaatccaaatggtattacgaggacaagagaaacttagcactttttgcatctgggtacaggagagaatcaataaggagatagttaattcaccactacagctttgtgcattaaagacaagtttgcagaaagctatgtcttacaatcctcttttagttgcatcaaacactgtcagttcaatgactttctacttcttataggcattttatgcatttcttcccactgaaatgttttttcagatgatcaaacaccgacctagatgcagcaacccaaaatcatccaaactgaaagatgaatgatattagtgaataacattggttctttaatgctgtattgtttcaaacaaaacatcaaatacttcatatagaactgaaacttggccaggcacagtgac

SEQ ID NO: 49054 - DNA, 1482 bp, Homo sapiens
ttttttttttttcttgtttttaccatatattccaggggttatgtgtgtggaggggttgtttttacatttatacagtttacattgcttgacccataagtaacacttgtaagattaatagggccatagttttaaagagtacttacatagccccaccatgcatacagagccttttttaatattggaaaaaaaaatcaaaaaaagttgaattttccatcactaggcaatgtaaatttgaccatctacatttataaaccctgactaaaatataagcaatcagttcatccataaattctggttccctggcaaatctagcactgcagcgtaacaaacggcttacaattcagggatataaaaatatcagctttaaaatctgaactgtacagtatatacattaatatttgcaccgttaaattaggaatacacttaagtctatgaaatactaagttataaatagcaatgttttttgttttttttttcaatctgtagctggcgctgatacaatacaatgtttacctggccaaagagggttcgaggggacaagctggcctcacaataagatgcacagtgttagctaggtcatcgtgacaggcatgcctcacaccaagacggactatcaagacctgagccgacctgacttacataaatgacaaacactagtgctttacaaaggtggctggagttctccatcttctaaaatcaacatccaatccccttcagtcagcatcttcagtattcccttgaggactggaaaaccaaggcagctacgtccatctgtaacgcacccgcaccggacaggcacgagatgtcacgtccacctggcaccatccaaagagggtaaattgggagaaatcacacctttcaaatgttaatctgacactgtaaacagcagttgagttctcatttacatgggcaaagaaagcactttaagctattttcacaactttcctacggaagaaaaggaaacgattcagacggttaatggctaagttttaaacaaatgctctgcatcactacttggttaagaaataatacaatttttgcccttgtgtccctttttcttcttggattttgttgtcctctgaccaaactgaggggtgggaagtgcagatggtggactagaaaggtcatctgtatagtaggcaaatctctgtggccggggttgagggattggttgtccaagaaaatatccttcttcttccgagtcggaagaggaggaggaggaagaacaccaggaatcatcatcctcgccgtagagtcccagaaaccgattcattcctgggttctgcaggccataatcggaagtggcatgggcgtactgtccgtagagatcagcattctggatgtatgcttggatctcccgggcacttttattctgtataaatttctcatagttatcgggggtgtacagccgcagtctgtccttgggagagtattttctttctgtaacaagattcagggcattgtcggagcgggactttctac

SEQ ID NO: 49055 - DNA, 965 bp, Homo sapiens
tctatggaactcagaatcctggctacatttgaggacaggaatatgttgagcctgattttcctggtgtgtgtaaaatatttcctaggaataaattaggcactttttagaagcaatgttaaatcattcaggttttattttctgccctgaagcagaaatttaaaaaatgatattgggacctggaaggtttaatatagttcacagtgcctgaattacacctgctccgaaaactagctttgtatttcttatgactttgcataagaactgttcatctttggatcttgagcaccttacagataaaactttttatggcatctctttcatggacagtgatattgatcttttcacaatgtacgtagcctctagaattttgtacatatgtttgctctttttttgtacagactatttagttgttgagaaaacaggggcgtttcctaatttggtctttatcctgcgacaacactttcagcagactagcctctccttatctcacagatcacaagcacccctagatagtgtgatcctgtcagatagcatttatgcaaaaatctatgaagttaaaagatcgtagaagcccaaatgaaatgtacatatctactgactgatgacaagggaatttcattaggaagaaggtaaagaaacatcgttgagtagcctaccttgatttctgtcaagttcataaccagcttcatattttaaaggcttcaggtttgaaattaagtcaactgcatgcagctttgctgataaatgaataattctctttgatgccatttatgagaaaagacttcaatatctgttgcctgtcatatttaagaaaaattactgtttctactctctgtatctgattttaaaagaaaaaactattcatacctggcttccaggtaattgactttgaattcttacaagcaaaggtcattgtgtttttcttgaatagacatctaataaattttgcttggaagtataaaaaa

SEQ ID NO: 49056 - DNA, 1849 bp, Homo sapiens
actgccagggaggtgatgagcacaccagtgacctgcctgaggcggcgtgagaaggtcggcgtcattgtggacgtgctgagcgacacggcgtccaatcacaacggcttccccgtggtggagcatgccgatgacacccagcctgcccggctccagggcctgatcctgcgctcccagctcatcgttctcctaaagcacaaggtgtttgtggagcggtccaacctgggcctggtacagcggcgcctgaggctgaaggacttccgagacgcctacccgcgcttcccacccatccagtccatccacgtgtcccaggacgagcgggagtgcaccatggacctctccgagttcatgaacccctccccctacacggtgccccagggaggcgtcgctcccacgggtgttcaagctgttccggggccctgggcctgcggcacctggtggtggtggacaaccgcaatcaggttgtcgggttggtgaccaggaaggacctcgccaggtaccgcctgggaaagagaggcttggaggagctctcgctggcccagacgtgaggcccagccctgcccataatgggcactggcgctggcaccccggcccttctgcatttcctcccggagtcactggtttctcggcccaaaccatgctccccagcagtggcaatggcgagcaccctgcagctgggcgagcaggcggcaggcgcggaactgaccctctcgcgggactgaccctgttgtgggcagtggtctccccccttggcgcctccttgcgcaggcccagcctccactctcctcgtctaggtttctttacctccagggatcagctgtgtgtgtgtgacctccctaccgggctatcggcctcttgggagccagcggaggggccggcacctgcgtgcctgtgcccgtgtgcgtgagacagagcccttgcccctgctgctgccccgagggttgccctgccctgggaaggccccttcttgcctccacaccagtggagtcttcgagacttgggagctgcttggcctcattttcagccatgagcagacggcctgtggtccctggggcctgaggcacggactcgtagcaccagggtttggaggctgcgaccgccccggagagcagcttcacactggcgccacagaggagccccacgtgcactccccggcctgcatccggcttgggtacacaggcccagaggactggggtgactcacgggccctgttgctgtgatgttgagagctgagaaaaacctccaaggccctgagccccatgcccagccctgccttggtcccccaatccccagagcttggagtctgggccccacacccagccctgccttggtccctgagcctcagagcgtggaattgctgccctgtggacactggctgggaaggcaggtcttcccctagcacatggggacccccggcctcgagggtgacctccctaccttgcccctgccagccaccaagcgcaggtgcagcgggggccagactcctgccggcctcagaggacacctggcccagcacaggcagctagaagggccggtgggcaccggggccgggaagcccccacctcaccacctgagggcccctgggaggctcctctggcctggctgggctgggtctggggccgccacaggcccctcacggggcggcagaggcaacttcagtgtccctgttagagcaacacgggtccctccgtggggggctgggtgcggccccctgccgtgtatttcctccccagggagtggggcctccccgggagctgacgccaccaccctgcttagccctcacagggccccaaggtgtccgagtgtgttgggtctgaacgcgaaataaagaaatcctctcagccaaaaaaaa

SEQ ID NO: 49057 - DNA, 1540 bp, Homo sapiens
  misc_feature (1)...(1540): n = a,t,c or g
ggccggataatggcgggcgctgcagaagatgcgcgagctcttttccgggctggggtctgcccggccctggaggcctggccggccttgcagatcgctgtggagaatggcttcgggggtgtgcacagccaggagaaggccaagtggctggggggtgcagtggaggattacttcatgcgcaatgctgacttggagctagatgaggtggaagacttccttggagagctgttgaccaacgagtttgatacagttgtggaagacgggagtctgccccaggtgagccagcaactgcagaccatgttccaccacttccagaggggtgatggggctgctctgagggagatggcctcctgcatcactcagagaaaatgcaaggtcacagccactgcacttaagacagctagagagactgatgaggatgaagatgatgtggacagtgtggaagagatggaggtcacagctacgaatgatggggctgctacagatggggtctgcccccagcctgaaccctctgatccagacgctcagactattaaggaagaggatatagtggaagatggctggaccattgtccggagaaaaaaatgagtggggatgattggaaatggctttgggcccttatttgntgttctaagagttgtctgtaggggtttntttgaggaggattgaagacctgtggactggttaccccatctccaccctctcccctgttcctctgtctggctccctccagggcaaggaaaacctagggtccttggtcttgggggtggggggacctttcccagcatatccccctgggcctttagttaacatccaagtgacgaagccggntcccccagtacagtgtcttttgggtgcggtcattgtgaggaaggggatgagtgagtgtgggtgtggctggaggaggagctagatgccggtggacagtgggcaggtggatttggggaggagaggatcagcagcagcagcagtactcagtgatagggggctggctgggtcaggaatggtgagatgaacatgcaagtggaagagagaatagttgaaaatgtgaatgaaagtagctctggagcctctcccttaccccaccccacacacacgcaacagctctgtacccctgcccagaacttggaacctcccaggaatgctgccttccttcagcccagcctccagtcctgggttccctcaggaattcgaagaccttggctaggtggtgagcttggaagagctgggctttgttttctgtctcctctaacctctttccttactccttatcccatcccatttgagttcaggggtgaggcttaagatcttaataaataataccttactgcttaatctgtggcttgacctgtgagtagtagccttagaatcagccttctgggagctcagcttcagagtttacaagggagcagtttctgggcccaccctagcagcctggtactttggacaaccaaacagatgaacgaacggagcacagcagtgctatgaaagttactgtaagcctgaaataaactgtatttttcttaaaaaaaaaaaaacacac

SEQ ID NO: 49058 - DNA, 852 bp, Homo sapiens
gctggcttccctccttcagacattgacatgagatcttaagcaaacagtcccaaacctcttaggggtgaaaaaagaaacatgccacttgattaggagagagacagcagtgtttgaactacagcatctttacactatcttgtgttttgtgctacgtataccagcttccaaaattagcatctcattgagccagagaagacaaggagatctccctctgggcatctggctttgctgcgtctctagagggttaggataccaggccgagttcaggccactgctagctttctcatactcccacaggctagaccagagatgccaagtcccaacagcactgagctgtgtgcactgtgccagggacaggagggtttgtgaactgcctgtcagggtacctgttagcccctgacaactcagtggggtgaagttttggaggtcagagtctggctttcgtaggctctttaggacagcacctaccacttggttctccagcgtagactcctggggagcagccaactgcaggccattgccatccagtggggagatgggttagggaggaggacgggctgactcctctcctgtaataaagctgacaagagttctagaggattctgcttctctagtaactagacaggtgatacggcatttgcttgccacattaagggaaaatggtgtcatttgttgcagaaaaacaatggatacattttcttctggcctaaatgaatatttatgtgcaaacataggcaactgttaaaggctggaattttcaaaagatccaaacagagacttcctgcatcttctgcctttccaacagaagcggtgatcgtctaagtatgagcctgtggcttcctttgtgcattt

SEQ ID NO: 49059 - DNA, 1746 bp, Homo sapiens
  misc_feature (1)...(1746): n = a,t,c or g
gcgcaggaggaagtgcgccgcgcgggacccggaggaccggtatccccagcccactgggctacgcagctattccaatcaagttctctgaaaagcaacaggcttctcactacctctatgtgagagcacacggcgttcgacaaggcaccaagtccacctggcctcagaagaggactctttttgtcctcaatgtgcccccatactgcacagaggagagcctgtcccgcctcctgtccacctgtggcctcgtccagtctgtagagttgcaggagaagccggacctggctgagagcccaaaggagtcaaggtcgaagttttttcatcccaagccagttccgggtttccaggtagcctatgtggtgttccagaagccaagtggggtgtcagcggccttggccctgaagggccccctgctggtgtccacagagagccaccctgtgaagagtggcattcacaagtggatcagtgactacgcagactctgtgcccgaccctgaggccctgagggtggaagtggacacgttcatggaggcatatgaccagaagatcgctgaggaagaagctaaggccaaggnggaggagggggtccctgacgaggagggctgggtgaaggtgacccgccggggccggcggcctgtgctcccccggactgaggcagccagcttgcgggtgctggagagggagagacggaagcgcagccgaaaaagagctgctcaacttctacgcctggcagcatcgagagagcaagatggagcattcttaaggcaagtgcgcaagaagttcgaggaggacaagcagaggatcgagctgctgcgggcccagcgcaaattccgaccgtactgagctgtgagagccgcagtgaatggctggaggtgcagggccaggaggaggcgaggcagggcctgcagcggtctctgagaggccgagctctggccaacgggccccaggttgaaggccaccgcgtccaacagccccatcagagtccacacaggccaggagggaaggaccaggccacccctcgggtcttgtgcttcagcagtcctggggacccaggcgtgccgagaggaggacttgtccttcctgcttcttgcctccacaccctcctctccaggaccctggatgaatccgttctgtgcttccttttccctcaatgcaaaagcccttgctggcaacgaaaaagcctcaaaagcagtgagaatacaagaaccttttattttccatccagttgggcagcagggaaaggctaggtgggcccagcccgcccttccttcctccagctggctggatatttattattagccaggagaaagcagccctcgaacccagactctgtctccctcttgaggtcacagatgttgaagttggaatctcgctccttcccctgactaccatcctaggctgggcctcaagactagtgaggcctgtccccaccatccctggccttgttgtggggctcaggaactcagagtcccagtgttgagtctgggagcactaggtcttcatagttccaggcccagagctacagctgggctgggagcatgtgtgtgcgctgtaaagaaggagctgatgatactggccacgtgctggggttcgctcatgtggacacagtgattgcctgggacttccacaaactggaactgctctttgagggtggatttcatcgtgtctatcatgaacgacagggactccttctcagagtaattctgtcttgaatcaaaatatccgtggactgctttgatcaacaggacat

SEQ ID NO: 49060 - DNA, 646 bp, Homo sapiens
  misc_feature (1)...(646): n = a,t,c or g
ttttggaacttaatgtcagtaacctcactctctctctcaccaccaccacacatggtattatttttccctcagggttcttaagtgcctatagtacgtaacaatttttgttctttgtagaattataaacagtatcaagaatttagaccacaaagtcaattataaaaaactcttgctttaatcattaaatcttaaaggaccattagaaaaggccagtcacattctgttctccagtcttgtaggttacataagccatttccataaattctatagccttcttcttagagtaacacacactcttgtttaggaatgttcatgttggttttgttcacggactgagattgttagtgggcaggagtttacttcttctcaattttctgggagataaagggggaaagcagtcttcaaaaatttaagaccaaaaatcttaaagacatttcacaaataatagtactccatgtaaagtggaatcaaaggcatcacaaaattggccatactttactgtttgtgagggagtccaatatttgacttggaccaggacacaaactatgtccttcatatggtagatcactaggatcagaccatctagatcccactttctctgctacttcagcngtgtagacttgagctaattgaacctgtctaaacc

SEQ ID NO: 49061 - DNA, 2202 bp, Homo sapiens
  misc_feature (1)...(2202): n = a,t,c or g
atggatggattttatgaccagcaagtgccttacatggtcaccaatagtcagcgtgggagaaattgtaacgagaaaccaacaaatgtcaggaaaagaaaattcattaacagagatctggctcatgattcagaagaactctttcaagatctaagtcaattacaggaaacatggcttgcagaagctcaggtacctgacaatgatgagcagtttgtaccagactatcaggctgaaagtttggcttttcatggcctgccactgaaaatcaagaaagaaccccacagtccatgttcagaaatcagctctgcctgcagtcaagaacagccctttaaattcagctatggagaaaagtccctgtacaatgtcagtgcctatgatcagaacccacaagtgggaatgaggccctccaacccccccacaccatccagcacgccagtgtccccactgcatcatgcatctccaaactcaactcatacaccgaaacctgaccgggccttcccagctcacctccctccatcgcagtccataccagatagcagctaccccatggaccacagatttcgccgccagctttctgaaccctgtaactcctttcctcctttgccgacgatgccaagggaaggacgtcctatgtaccaacgccagatgtctgagccaaacatccccttcccaccacaaggctttaagcaggagtaccacgacccagtgtatgaacacaacaccatggttggcagtgcggccagccaaagctttccccctcctctgatgattaaacaggaacccagagattttgcatatgactcagaagtgcctagctgccactccatttatatgaggcaagaaggcttcctggctcatcccagcagaacagaaggctgtatgtttgaaaagggccccaggcagttttatgatgacacctgtgttgtcccagaaaaattcgatggagacatcaaacaagagccaggaatgtatcgggaaggacccacataccaacggcgaggatcacttcagctctggcagtttttggtagctcttctggatgacccttcaaattctcattttattgcctggactggtcgaggcatggaatttaaactgattgagcctgaagaggtggcccgacgttggggcattcagaaaaacaggccagctatgaactatgataaacttagccgttcactccgctattactatgagaaaggaattatgcaaaaggtggctggagagagatatgtctacaagtttgtgtgtgatccagaagcccttttctccatggcctttccagataatcagcgtccactgctgaagacagacatggaacgtcacatcaacgaggaggacacagtgcctctttctcactttgatgagagcatggcctacatgccggaagggggctgctgcaacccccacccctacaacgaaggctacgtgtattaacacaagtgacagtcaagcagggcgttttttgcgcttttccttttttctgcaagatacagagaattgctgaatctttgttttatttctgttgtttgtattttatttttaaataataatacacaaaaaggggcttttcctgttgcattattctatggtctgccatggactgtgcactttatttgagggtgggtgggagtaatctaaacatttattctgtgtaacaggaagctaatgggtgaatgggcagagggatttggggattactttttacttaggcttgggatggggtcctacaagttttgagtatgatgaaactatatcatgtctgtttgatttcataacaacataagataatgtttattttatcggggtatctatggtacagttaatttcacgttgtgtaaatatccacttggagactatttgccttgggatattncccctgtcatttatgagtctctgcaggtgtacaaaaaaaccccaatctactgtaaatggcagtttaattgttagaaatgactgtttttgcaccacttgtaaaaaggtatttagcgattgcatttgctgtttgttgttttattttgctttatatatgacttgcagaggataaccataaaatggggtaattctctctggaaggttgaaataatcaccatgactgtaaatgaggggcacaattttggactctggcgccaaactgagtcataggccagtagcattacgtgtatctggtgccaccttgctgtttagatacaaatcataccgtct

SEQ ID NO: 49062 - DNA, 1163 bp, Homo sapiens
ttttttcataacattaatatttattgctttatatgaatactgtattgaaagcccaagcattcagtttacacacagaaattatacaattatataccgcttcacaaaggcagtgaacacattacattctacaaaatctactttacagaaatttaaaaactttaaatatcaaaaggtacagctgaagaaacaggtataaatttggcagccagtaattttgacagggaagttacagcttgcatgactttaaatatgtaaatttgaaaatactgaatttcgagtaatcattgtgctttgtgttgatctgaaaaatataacactggctgtcgaagaagcatgttcaaaaatatttaattcacttcaaaatgtcatacaaattatggtggtttctatgcacccctaaagcttcagtcatttagctcaggtacatactaaagtaatatattaattcttccagtacagtggtgtttcataccattgacatttgcataccctagaataatttagaaagacatgtgtaatattcacaatgttcagaaaagcaagcaaaaggtcaaggaacctgcttggttcttctgagatggtctcatatcagcttcataaacattcattctacaaaatagtaagctaacatttgaacacaatttccaagataaagcatattttctcataaataatgaagtctttttctcaggcacctcagaagtatacaaaagaatttgagtttgaacagatctcttggaatgtgtttaacctggtatttcaacagacttaagatttccagggtttcacaagggccagattttatttcaattactcagaagagaaagaaaatgtcttctgaaagaggtgaactcaatcattaccaatagaaaaagtatccactgtattcatctcttatagaaacagaaaaatataacatttccccccttagaatataacttaatgttccattgtatgtagctgaacaataacatctggaaaccagcatgaaaccctattattcacatgttaaaatgttgaaactatgaccaaaatatgaaaactgctagagctatcagaaagagacaagacaaaaaccttcttgcatatgtataaactaaatgtgacaatctcaaaaaacttttcaacattatgattaccttccagtttaaaaaccttaatcc

SEQ ID NO: 49063 - DNA, 484 bp, Homo sapiens
ctttttagcagcaacatacaagccggccatattagagagatggaaataaagcttccttaatgttgtatatgtctttgaagtacatccgtgcatttttttttagcatccaaccattcctcccttgtagttctcgccccctcaaatcaccctctcccgtagcccacccgactaacatctcagtctctgaaaatgcacagagatgcctggctacctcgccctgccttcagcctcacggggctcagtctctttttctctttggtgccaccaggacggagcatggaggtcacagtacctgccaccctcaacgtcctcaatggctctgacgcccgcctgccctgcaccttcaactcctgctacacagtgaaccacaaacagttctccctgaactggacttaccaggagtgcaacaactgctctgaggagatgttcctccagttccgcatgaagatcattaacctgaaagctggagcggttttaagaccgc

SEQ ID NO: 49064 - DNA, 761 bp, Homo sapiens; identical to SEQ ID NO: 9689

SEQ ID NO: 49065 - DNA, 687 bp, Homo sapiens
cggacgcgtgggcacgcaggccgcagcgagggcccgggccctggggatcccaggccatggatgctccccactccaaagcagccctggacagcattaacgagctgcccgagaacatcctgctggagctgttcacgcacgtgcccgcccgccagctgctgctgaactgccgcctggtctgcagcctctggcgggacctcatcgacctcatgaccctctggaaacgcaagtgcctgcgagagggcttcatcaccaaggactgggaccagcccgtggccgactggaaaatcttctacttcctacggagcctgcataggaacctcctgcgcaacccgtgtgctgaagaggatatgtttgcatggcaaattgatttcaatggtggggaccgctggaaggtggagagcctccctggagcccacgggacagattttcctgaccccaaagtcaagaagtattttgtcacatcctacgaaatgtgcctcaagtcccagctggtggaccttgtagccgagggctactgggaggagctactagacacattccggccggacatcgtggttaaggactggtttgctgccagagccgactgtggctgcacctaccaactcaaagtgcagctggcctcggctgactacttcgtgttggcctccttcgagcccccacctgtgaccatccaacagtggaacaatg

SEQ ID NO: 49066 - DNA, 451 bp, Homo sapiens
  misc_feature (1)...(451): n = a,t,c or g
ttgganaaccgntatgacatgattacgaatttaatacgactcactatagggaatttggccctcgaggccaagaattcggcacgagcggcgcctcgtacgctagtgtcctcccttttcagtccgcgtccctccctgggccgggctggcactcttgccttccccgtccctcatggcgctgctccgacgcccgacggtgtccagtgatttggagaatattgacacaggagttaattctaaagttaagagtcatgtgactattaggcgaactgttttagaagaaattggaaatagagttacaaccagagcagcacaagtagctaagaaagctcagaacaccaaagttccagttcaacccaccaaaacaacaaatgtcaacaaacaactgaaacctactgcttctgtcaaaccagtacagatggaaaagttggctccaaagggtccttctcccaca

SEQ ID NO: 49067 - DNA, 493 bp, Homo sapiens
tctccctaaatgcttgggcagcatcagctttcagtagctgtgccccatgggaggcacattaagctagtggcaagttgagactgcagacctcagcttaatatcagttgttgcccaagacagatctcaccccacatcttccatgacaggcctaacaacaaggcactttgcccttaatcctctactactgcctgctcttcattttgggccaactgtacagctcattttgagatagtagctgatcatttttctgatcagttaactttgtcttattaagcaaaatggagaatataatgttgggaaataagtgtgttgattaaaagaaagtatccccttctaccatcttccatttgtgtctgggttgtgctgggtaaagttctagacttactaacgcagacttcattttggtccggtttccacagcatgcctcgggcatcagtgtccaggagtagctgtatttgaggtttccttcactctggtaggttcctgattcctg

SEQ ID NO: 49068 - DNA, 547 bp, Homo sapiens; identical to SEQ ID NO: 9710

SEQ ID NO: 49069 - DNA, 512 bp, Homo sapiens
cgcattgttaacaaaatttctttatcagaaactataatttaatatttaagtatctaatttacatgtgacaaggtatcatattcaaaaaattaaatgcaactggaaaactattaaccactaaaaacaataccaaacacaacccaaacatttataggaaagcaatagctagaatttgaattgggaaaaaatgtttcatcatatttggctcattaaacaaagcatccattatagcttggaaaagagcatctcttctaattcatcaaacgtttactctttatagcatgaataacatttaaagatagtttcattaactgtatatgcacacttgtgtatatatattgtgagacatacactcgtgtgttcatttaaagatattgtatctactgataactggctgaactttgggaaggtgctgaaatccacatttctatatgtcctttgacccatttaataatgtctttttaaaaacagaaattacataaaatactctgttttttattaactgaatattt

SEQ ID NO: 49070 - DNA, 2006 bp, Homo sapiens
cctttcctgtccgaggccaatgcagagcggatcgtgcgcacgctctgcaaggtgcgtggtgcggcactcaagctgggccagatgctgagcatccaggatgatgcctttatcaacccccacctggctaagatcttcgagcgggtgcggcagagcgcggacttcatgccactgaagcagatgatgaaaactctcaacaacgacctgggccccaactggcgggacaagttggaatacttcgaggagcggcccttcgccgccgcatccattgggcaggtgcacttggcccgaatgaagggcggccgcgaggtggccatgaagatccagtaccctggcgtggcccagagcatcaacagtgatgtcaacaacctcatggccgtgttgaacatgagcaacatgcttccagaaggcctgttccccgagcacctgatcgacgtgctgaggcgggagctggccctggagtgtgactaccagcgagaggccgcctgtgcccgcaagttcagggacctgctgaagggccaccccttcttctatgtgcctgagattgtggatgagctctgcagcccacatgtgctgaccacagagctggtgtctggcttccccctgggaccagggccgaagggctcagccagggagattcggaacgaggatctgctacaacatcctgggttctgtgcctgagggagctgttcgagttccactttcattgcaaacaggaccccaactggtccaacttcttctatgacccccagcagcacaaggtggctcttttggattttggggcaacgcgggaatatgacagatccttcaccgacctctacattcagatcatcagggctgctgccgacagggacagggagactgtgcgggcgaaatccatagagatgaagttcctcaccggctacgaggtcaaggtcatggaagacgcccacttggatgccatcctcatcctgggggaggccttcgcctctgaatgagccttttgattttggcactcagagcaccaccgagaagatccacaacctgattcccgtcatgctgaggcaccgtctcgtccccccacccgaggaaacctactccctgcacaggaagatggggggctccttcctcatctgctccaagctgaaggcccgcttcccctgcaaggccatgttcgaggaggcctacagcaactactgcaagaggcaggcccagcagtagggctgcgggccacgcccaggccggctccgcgggaactctctccctcagacaggccaaaaaccagtagcgaggtcgtggtgatgctctttttaactcctttgcccaataaggggggtggctgcctggagccccgtagccagcgctttccacggtttctgttgctaaatggttgtagggtgagaagtgcaagaatgaagatgaagccccactgctcggtcagtctgcctccgtgtgtcctctgaaataagcagatgaagatgaaagggcaactttgttttcttctttttcctgatgtgaatgttaagcagaagggagagagtccttactcccttccaatctctgttcagtgcaaaacccagaaacatgaacagatacgattgtgggatttttatcatctgtgtagtaggtgtgtgtatgtgtttctagagtgagatttgtgttttctgcccttttcctctccagccgatgggctggagctgggagaggtgctgagctaacagtgccaacaagtgctccttaagcctgcgaggcccaggcctgtggggctggttctcacctttgacagctgaatgttcctaaagaactgctgccccacagtgagggtgggagcagcggaacagggaatgccagacacaggctcgctgctgctggaaggcggggtgggacttccttcctctgtccggagaggcacaggtgtcaccagttccagccaaaggctcctcacaggcgctgtgaatttttgtacaagtcttgtaattatcgaatcaacaacttgtttcaatttaataaaaatgctcatgggaagtgca

SEQ ID NO: 49071 - DNA, 1028 bp, Homo sapiens
  misc_feature (1)...(1028): n = a,t,c or g
ttttttttttttaattaaaaaatgttttatttatacaaatggacaatcagaggccagtcccccgtccttgccttccggctccagtgtggtgtaccaggtggccactgcctgctgtcccggcaagcacgtcctcacgctcagctctggcccgcctcgtcgtcactgtcctcaatcagacagtcccggatctcctgcaagccccaggccctctgtgtgcggacgtgggcctcagccaggatgtacggcggcagggggtccagtgagggcaagtccttcatgttcacgcggcactngtagcacagctgttcctcaatgcaggcttgggggtcctccctcctgcaggccccctggccacagcgctggggcccagcccacccctggagaacagcagggccccgggggtgtccgggtctcagtcagggggatgggtgactgcatctgggagagacgcgaggaggtctgagccccaaaagccgtggcactgtcagcggcgtcgacgtccagggcacacatgcagaggaggcagcgggggccggagtcgccagcagcagggccatcccgggggcccttcaccagcttctcacttgtcctgtacacagtgctgacagtggaggggaactgggtctgcagcctgaggatgaaggcctccatcagccggtggatgctggccttttcaggggccttggtgtcgacggctggtgtgaagacagaaggaacggagaacaggcggttgtagaaagcgacctccttcagggtgtggtcccgcatgggccgcaccaccaccacgtccccgtgccgctcatccgagaagcccgtatccccagcccaggaaggcccctcgacccagcgcccaggttggtcatgagcttgatagccaagcgtgtgcagctgtccccagtcatgaccttggagtagccgtgggctcgggccacgtggaggatcaggtgggtccgcagggtctgcagaagctcctccttggcagtcagtgtcctcactgagcagaacagttgggaaagagcctcagtctg

SEQ ID NO: 49072 - DNA, 439 bp, Homo sapiens
  misc_feature (1)...(439): n = a,t,c or g
tgnanaccnctntgacatgantacgaatttantacgactcactatagggaatttggccctcgaggccaagaattcggcacgagaaaaaggcatgaggggtcgtcttcggaatctgtgccacccggcactaccatttcgagggtgaagctcctcgacaccatggtggacacttttcttcagaagctggtcgccgccggcagctaccagagattcactgactgctataagtgcttctaccagttgcagcctgcgatgacacagcgaatctatgacaagtttatagctcagttgcagacatctatccgggaggaaatctctgacatcaaagaggaggggaacctagaagctgtcttgaatgccttggataaaattgtggaagaaggcaaagtccgcaaagagccagcctggcgccccagcgggatcccagagaaggatctgc

SEQ ID NO: 49073 - DNA, 1477 bp, Homo sapiens
atgaaccctttaactaaggtgaagctgatcaacgagctgaatgaacgagaggtccagcttggggtggccgataaggtgtcctggcactccgagtacaaggacagcgcctggatcttcctgggagggcttccttatgaactgactgaaggggacatcatctgtgtgttctcacaatatggggagattgttaacattaatctcgtgcgggacaagaaaactgggaaatccaaaggattctgtttcctctgctatgaagaccagaggagcacaattctggccgtcgacaattttaatgggatcaagatcaaaggaagaactatccgagtggatcatgtgtctaactatcgggctcctaaggactcagaagaaatagatgatgtgaccagacaactccaggagaagggctgtggggctcgtaccccctcaccaagtttgtctgagagctctgaagatgaaaaaccaacaaaaaagcacaaaaaagacaaaaaggaaaaaaagaaaaaaaagaaagaaaaagagaaagccgaccgggaggtacaggcagagcaaccatcctcttcgtcacccagacgcaagacagtaaaggaaaaggatgacactggccctaagaagcacagcagcaagaactcagagagagctcagaagtcagagcccagggaggggcagaagctccccaaatccaggacggcctactctggtggagcagaggacctagagagggagctgaagaaggagaaacccaagcacgagcacaagtcctcaagcaggagggaggcaagagaagaaaagaccaggattagggacagagggcggagctcagatgcacattctagctggtataatgggcgttctgaagggcgtagttatagaagtagaagtaggagccgagataaatcccataggcataaaagggcccgacgctcccgggagcgggagtcttcgaatccagtgaccgttggcgtcactgaagacttcagctgcacagtagatttggaaataattatgttttttaaatgcagtcaaattcagttgggtggttactatttttgtatctaaaacttctggggctggattcttttaatcccttgactatttagagtcattgggagggctgcagtttcaacagctagatatcctggatattgtttgcaccatccattgtccctgtaccagagtatgtatcctgaactttggttcataaatatggctcttgaacccatagaccccagttgaagatggaattttcaggaaagggaaaatactagataattctagaattctagtcttcgtgttagatgtttatagcccagcatcttgggacctttccagttactaggtttggacagcttgatgtgaacgaatgggataggatttttaaaatcagccagctccatgcccaaaccttcctgtttgcagaactttttaatgtcttttctttttcattaaaacttttttgttcgataaaaaaaaaaaaaaa

SEQ ID NO: 49074 - DNA, 1024 bp, Homo sapiens
ccaaatcagttcctgaatataaaggaggaaatgatgaggatgtactgaggcaacggggaagtatagaaacatccaagacaaaagccaagggatgcaaaggcagagacacaggtgctttttggtgacccagtggatatggcaaccagtgtaactgccatacaagaaaccctaggagcaaacccacaccactcattctcagctaagagattttacacaggcaaacgtgtcttaaaccatctataaatcagttattttatatgacagtcaaaaccttagaaaccttaggatcattatatctattttctgcctattaattgctgtgaggtttgatttgaccaatctgggcaatttattcatcagcttcccttgaagtgcaccagaaaatagaagaaaggtgtgtggagacttagggtattttattacatgttttcatagtcttaaatagtgattaaatttctctagaaagaagttaacagctcattagaaaagttttaacctgtgaaataagtatttttctcaacattctttaaagtttttatataagttaacactaggtaaacattctgcatactagaagtcagtttattacaaatacatgtcaaaaataaagattatacaaggcaccaaactactagatttggcattaaaacaaatgtttatttctaatcacaacaaaattataatgaataaatgttcttgctttgtatggaaatacaattctttattaaagttaacagaaaggaactgatcgtttgtaccagtaaaagagagaaacacacaggttaaatatcttcttgtggggttaaggggtagaacctatcttgccttcactctcaagataacgactcaaattaagctttttgagcaccactcttgtggggacacacatacgctgatctaggaatgaaatcttcgtggtctcaattctagatctactatgccagtttctctctggctttagcctttgagaacctgtataagaataccgtaagtaatccagagctgtgaagaagtttaaaggcca

SEQ ID NO: 49075 - DNA, 788 bp, Homo sapiens
ggtttttaatgtcttgtggaaatttgcagaggggcaggtgtgtggtaaacgggtaatgcatgggaaataatgagaagcagctcacagagtttaaactattttcttgtccccaccaccttccaagaacctgcgagggtagtaatcatcttgtcccctttttcatgttcagcactttaatttttttgccttactttcatgtgcaatgagaattacttaagaattggtaacgcatgtagccttttttagtaaccttggaagctgtagtaattctaaggaatcatgaaccttgcctggacatttgccacctaaacgatcagtgtggtgctgcgttctggccagtaaattccatgtttttggcctatatcctcatcccaaactgagcagtttctgtgtatatatagaaggtagaaatgaaaagtgagaaaatatttgaaagggattatattaattgctaaatattttattcacaaaggtcaataacatggcaagataaaattatttgtatagttttgtctgaatgagcgagaaaaatgtggatgtactgtttgtatatattgtatatattaaaacagatatgtgcatgaaatcaagaaaaaagaaatgaacaaaagcaaagcattagtggctatggtctgtaaaatgaaacaaaaaaactttatttcactataagagtactttattttaaatgttctttaggagaacattttctaaagcatgactaaactgcaaaaaaaaaaaaaaagagctactgtatttagacttaggaaaaaaggcagagtaacattact

SEQ ID NO: 49076 - DNA, 2784 bp, Homo sapiens
gaattcgggcggggtttgtactatcctcggtgctgtggtgcagagctagttcctctccagctcagccgcgtaggtttggacatatttgactcttttccccccaggttgaattgaccaaagcaatggtgatggagaagcctagtcccctgctggtcgggcgggaatttgtgagacagtattacacactgctgaaccaggccccagacatgctgcatagattttatggaaagaactcttcttatgtccatgggggattggattcaaatggaaagccagcagatgcagtctacggacagaaagaaatccacaggaaagtgatgtcacaaaacttcaccaactgccacaccaagattcgccatgttgatgctcatgccacgctaaatgatggtgtggtagtccaggtgatggggcttctctctaacaacaaccaggctttgaggagattcatgcaaacgtttgtccttgctcctgaggggtctgttgcaaataaattcctatgttcacaatgatatcttcagataccaagatgaggtctttggtgggtttgtcactgagcctcaggaggagtctgaagaagaagtagaggaacctgaagaaagacagcaaacacctgaggtggtacctgatgattctggaactttctatgatcaggcagttgttcagtaatgacatggaagaacatttagaggagcctgttgctgaaccagagcctgatcctgaaccagaaccagaacaagaacctgtatctgaaatccaagaggaaaagcctgagccagtattagaagaaactgcccctgaggatgctcagaagagttcttctccagcacctgcagacatagctcagacagtacaggaagacttgaggacattttcttgggcatctgtgaccagtaagaatcttccacccagtggagctgttccagttactgggataccacctcatgttgttaaagtaccagcttcacagccccgtccagagtctaagcctgaatctcagattccaccacaaagacctcagcgggatcaaagagtgcgagaacaacgaataaatattcctccccaaaggggacccagaccaatccgtgaggctggtgagcaaggtgacattgaaccccgaagaatggtgagacaccctgacagtcaccaactcttcattggcaacctgcctcatgaagtggacaaatcagagcttaaagatttctttcaaagttatggaaacgtggtggagttgcgcattaacagtggtgggaaattacccaattttggttttgttgtgtttgatgattctgagcctgttcagaaagtccttagcaacaggcccatcatgttcagaggtgaggtccgtctgaatgtcgaagagaagaagactcgagctgccagggaaggcgaccgacgagataatcgccttcggggacctggaggccctcgaggtgggctgggtggtggaatgagaggccctccccgtggaggcatggtgcagaaaccaggatttggagtgggaagggggcttgcgccacggcagtgaatcttcatggatcttcatgcagccatacaaaccctggttccaacagaatggtgaattttcgacagcctttggtatcttggagtatgaccccagtctgttataaactgcttaagtttgtataattttactttttttgtgtgttaatggtgtgtgctccctctccctctcttccctttcctgacctttagtctttcacttccaattttgtggaatgatattttaggaataacggacttttaaagaagcaaaaaaaaaagactgaatttccttgcttactttgcatatacagactgggattttttttttttttttacagccattttccccaaaggaatgtgtcttgcgtattactgacatttggtacgtttcattcattggaatatttcttattttctacgtgtttgaaaagcctgtaagaaatacaggatttgataatattttgaaggcaggaaaaacccaaattgtttcttctttgagagtcatgactaccttctggtgtggagaaattgccattggaaaatttgacaattttgattctcactggtatgtttaaaaactgaataaaaggaatagaatttttttttgataaaggatcacaaaacaattctaaaacctaactgtttttaccattgaaatttaaattgtgataataggttttaaatgtctagaatgcaactgataggcttttcttgaactgttagtttttttgaagtagttttttcatgtttaatttgtatttgtaaaaaaacaaaaagcaaaaaaattcccaaaacccagataacaaccagagcaaaactgttgtgccttctatttatctttgatttcagtcttggcaattgtttaaaaaaaaaatctagatttgttttattaggttcagagtatgtggggaattatagaatccctctttcatcactttgtgtatgtcttttgttaacatatttgttatgccttattctaaaattgagtctcaaactggaatgcctttgaagacagatgcttctatagaggttctttgacctaaatagttcagcatttgtatttttattctggtatctaatcagattcctaatcatagcccgtaagaaggaatgttactttaatattggactttgctcatgtgctcgtgtccgcatttttttttttcttaaaatcatagccatatggtaaattttctattttgttatggttctcttttattgatgggcatgcagtgggtgttacttggaaatggccaatttttattaaaatatttctggaag

SEQ ID NO: 49077 - DNA, 494 bp, Homo sapiens; identical to SEQ ID NO: 9761

SEQ ID NO: 49078 - DNA, 419 bp, Homo sapiens
ttgaaatttttattctttttattttgcagtgaaagaacacgaaatatcttttcaaaatggtaaagtgatcactttcaatgaatgatgtaataggaaaagagaattaaacactgtaattatggcttacacaattacacagaacaatatgtgcaaacttttgaaaatactgtgactaacacttcaccgacaaacaataacctcaatataactaagtttcattatttatcacagttacataaaatacaagagcctatgaacaagctgttattaacaataaatgtagttttgcctgaaattcttatctatatgcaggcctcttaagcatccaagttttaaattctactgcattgttattgcaaaatgaagcaggcacaacaaaattaaatccactagctaaaggactaagtaaaccaaaatag

SEQ ID NO: 49079 - DNA, 1196 bp, Homo sapiens; identical to SEQ ID NO: 9766

SEQ ID NO: 49080 - DNA, 1905 bp, Homo sapiens
tttacaatgaaatatatagagaattttattcatatttgatgggaaaccaactttttttcattgaacagatacttctgaaagtatcccaggctcacgttctttaataaaaaacagggagtggggcccaataactcaaattcaaatattctaaaacacaaaggcccatgtctgaggactaagaagtcaacagacagaaggttcagatgaactttaatgcgatttaccaatagcatgtcagtaagcctagtaaatctaactggacacactggtataaaaagccatcaatgccaaaatagctagaaggctctctttctaaatcagtgtttggccctggaggcaaggccagatcaaaaaccagagaataataaagaaatacacacaccgatatctagctatatctcattaacaggggaaaacagtcttcaagtaagtatctgaagagggttcttctttcatttctttaaagtttttttttttttaagtaatgcacctttctcttataagtagattttattttttaaaataagaacttggcattgaaacatgaaacttgagttttgaaaactaccctccaagatgctgaagtatgtttactttttctttgtaaaagggggcttaacctatgtttcctgaaggtctaagtctgtgcagataaattatatgacatgtatctgtttttaaaacactctatatgctggtactcacatagaaatagaagccagaatgagaagcctcccaaattatcccatcctgacagcccttccctttttcatttcctgtttatgataaggcaaagttcttgcctggaagcacaatttaaccccttttaccaaaaccaaatccaaatctctttggaggaaaaatccctaaaagaactggcagggtacacatgctgggatgtgggtatgtcaatactgttcttcctcacagtatgctgttttaaaattatttttttaaaaaaggtcaggtattgatgtatcttcagaaaaatacccaccctaaactaggttacatttccatgtatcttcaggatttgtttttctctttgacaatatcacaatgctctgtttgaaaggtttttgtttttttttttgacataaaaatatatgtgtaaacaatatgctaaatgctgttattagccctctaggaatggaggcatcatctctaaccacagctcagcagcaatgtccaagctgtccacacttacaaatcaacttccccatcagaacatggtttaaaaaacaaaacattttagaattgaagagttacagagaacaatgtaagagtctgaatttcctttcctttatttcaaaaaaagtaaagaattatcccaggttcttgggcatctcaacgattttttccaaacaaatgcctcaaagaggagagaaacagcgagagcgagcaagcgagacagacagagagagagagagagagagagagagagagaaagagagagagagagcacacatcagcaaaaaaggaaagagactgggtaaagtctacctacttgcccaagaatgccacgttctacaacctgctttatgtgcagggagaagggcgtatcttttgtcaaagtggagtaaactttaaggatgagtaatttatttggaaaaaaagtatgttcaagatgctcaatggggaaaaagtgttcacttaaaagcaaaatgtgagatggtggagaggaaagaaacatttattcaaatcagccaggcccactctgtttcccttatagcaaaagccaaagagcagctcaaattttgtgaacactattctctttaaaggaaaaaaacccaaaacacctaaattaaaattcaaaagaaagaaaccacacacaaccccccaccccaaaactttaaaaatcaaagagcctctcctgagccatctcaatactgaaactgttctttc

SEQ ID NO: 49081 - DNA, 858 bp, Homo sapiens
atgacaacttccatatcagagtcataaacttttagtcccctcaacttttttacaagacagacattataatttatgtaacatgttcgtctgcttattagaagttaacctagcactgagatttatataaaaggttacatttattgcttattaaaactttactgtactttcacagattcttcagaggcatggctaacccaacaagactaaaatatccccaacaagactaaaatatctaataatcaaacattaatcaggaagtgttttattgagagcagtggtttaaagcatagggaataatccagtataaaactgatttgaggcatattacttcccaattagtaatatgtagaatgcaagtaatttattttttaaagttgatatgaaataaataataggtaagaattttgaccatgacccagcaaatcagtaactgagctttttatagaatggaaggtgatgatcagagacagaaaccatagaataaatttttattctttaagagcacattagtttactttcttctcctaaaaatgaatctgagctgtccttcaatttaagcatatatatgtgtcaagcaccctctattctgatataaatttcctagtctcaatttatgcctagaaatttctttcaactttgaagtgggtctgtttagtttatatctcactgattgattgatttagaattttcttctattttaagatattaacctttaaatctctacctatgacaaattcgtacactgattagcctagtaactcctaagtattcctctttaattctgatttctatctcatcttgtaaaatcagaatacaaactttcacatgcatttcatttttcctgtggcactgcttctc

SEQ ID NO: 49082 - DNA, 1927 bp, Homo sapiens
cgactttttttttttttttttgtactaaaattactttattacagttgatttttttaaacatttcctttgctatgatacaaaggatacttacaaacaaaatattacatatgaccttgttttcgctcttatgttctgacaacttggtaacagcttttaatgcacaatctatacaattaatacaggttatatatgaactataaggtatgctgaaccagaagaatactgacaatatactgtacaataagccttaccagttagtgctgtggaccatttataccaaaaggaaaatgcacatctgtacagtcacctttaccagctggtgctgacagagagggagaggcttcttccccaatgcaacccttgataagcctccactgtgagcgtctgtttggtccaaaaatcgagaggacaatgtgtatttaaaattagttattgggtaaagtgggtagaacatcacactttcgacacgatactctctcaaaaaagtatcagtcccagttttaaaagacccacaagttctttgtcccactatgaaaaaccctacgggcttcagggggtttgggagatgagaagatgaaggctgccaaaaaaggaggcaagaaaccaagccaaaatctagggtcttgcaaaatcatcatttttcccttcaccaaagggaactagaaatgtacaaattcattgatgaacctcaatgatagcatatcagttagctgataaccctcattttatctggacccctgacttgtgggaataactaaaatacattgtggataacagataccacttttagaaaagaacctcttgcttaattaacatattccctttagccaccacagctggtcctgggctactacaggtgtgcattcatcgctcaatggtctactcagaaatgataaggttacagctttttttctttttttttttaaataaaaaagcaattgactgaagcattttctttttttaggtaaatagcaaaaataaaaataaaaaccaaccctggcatttgcacaaataatgcaaatggagtgatatggcctttaaggaaggagttagtagaaaggaagagggaagtgaagaaaatccagagaaaatgatgtactaatttctttcttttaaaaaatttctacatgtgcaaaaaaatcatgctgtttgaggaaaacaaagggaaatgagtacataaaactaaaaacataaatatgtttggggtgactggtaaaagtagaaaccaacctgggttacaaaaaggattatacattcaagatgctcttaaacccagtgggataacttatgttaaaactgtgttaatagttacgttaaaaatctcaagtttgtttttaaatcttcacaatacaagcaaagctgttttaaaatatacactatacatatttctcatagtctcttcaacctcattaatgcgcattaggctttttcatatactaaaacaagggggttctgaaagcgaaattgctcatagtaacccatccattattttaaatggttgtcttaagttttaagtgggctaaaaaactttagcagacttacataaatagaatttagcaacacaagtgttaattaaaaaaactctaaagcatttacaaattatcagattggaacagtccggggaagttatgtgcactatactttaaatgttatttacatccgaccattgcttttgcaaaagagttccctaaaaaataacaaaacaaaacaaaacaaatttggagaattaacctgttctagcagagaaggatcataaaagaaaaggtaaaatgagaacaaaattatcttctaatagaaaccccacacatccttctcttttcttggattttaccctatgaaaccacctgcagctcctaataggctcatatataaggtgtcaaggtgtgataaaataccttttcagataaattactggccttaagaggac

SEQ ID NO: 49083 - DNA, 494 bp, Homo sapiens; identical to SEQ ID NO: 9778

SEQ ID NO: 49084 - DNA, 1736 bp, Homo sapiens
ttttttttttttttatagaaccgagataaacctttttatttatttatgcttctccattttgtttaaaacaacaacaacaaccaccttaatgtaactgacagcccttccccctcaccctgcctcgggctgggggtagttaatggggaaatggcccccagggtggggctgaccagaagagcccctcaaggagctcatggagcccaaatcccctgccctggggaggggacctgtagtgtgtgacgggagcctctcccgagcctctgcttgtaccatcaaagatgcccttggccaacaagggtcaggaagcatgggggagggatttcggcctcctctgtccctacccagcccaatctcacgagcagggctggggggtttaaaaagggtggagcgggtggggttggctcacacgaaggagtactggttgttaatggccctggggtggcccccttcctctccatcaccccctagtggtgactgctgcagctgcaccattgggggcacccccgcgtccccaccagacccagcgccctgggcctctgaacctggggctatggcctcttccaattcaaccacggggaccagctcaaccacggggaccagctcttccgggacccctccaccgcccggctttctctttctcttgcctctctttggctgctgcggctgccttctgccgccacttctggcgccctcgacgcctcttctgccccaggctgtgggggatctgtccatgaagggggttcagggggctggggtgggtcatgggaggtggtcggttacacagtcactcgctccgaagggcatgagggtgcaggaggcatcggggtggcatccatctccctcgcacacccccgcatggctcccagcctgctcccggccctgctgtcgctgggaggatgggacatagctgacaaggacaacatcactggagcctcccgactccaaagggatggggtgcacccggaagtgctcgagcatatcgaaaatggactggaaccacaggtgctggacccggcactgaccctcctcgttcagcgacaaacgcaggtgcttggccttgccctggaagttgaaggtgaggacgtattcaccccgccttgtctcactctggcgcaccaggaagacaccgtgggagccagtgccgccagtcagcaccaactgtgcagccttgagccgagagagcatcccgtggaaccaaggataccctgagaggggctggtccccctcaccgccctctggctcccccctggaacaggaaggaccctgtggctgtttccggagtgtccaagggagggtagggggctgagaggggatgaactgtccctgttgggggtccctcttcaatggggatgcgggggggcaactctgggggaagcagttccatcgagtcaaaatgggaggcggcaatggaggcagagctgggggagatggatgccgaggggcggtctgagaggcccccatatgccccctgcgacaggcggtcaattgtctcgctgggtccaagcagcaggtcctggctgggtagactctccgagtgattcaggcaggacagctcccaggctgtctgtgttctcccttgtaaggaatgaggtcccaggggccagagggagggtcatggggcggggactggtagcagggcagggtcctgggctcaggcattcttggatgtcagacacccaggccttcacatgctgggcatccactgtctccatgatatactcggatggaccttccac

SEQ ID NO: 49085 - DNA, 676 bp, Homo sapiens
  misc_feature (1)...(676): n = a,t,c or g
ttaatacaattatacattaattatattacattaatacaatatatggtttgtgaattcagagacattaccagtttgcctccttctctcaatagaacttgtattttcattttcttggttaagcagttgtctcctaatattatcccatatgctacctagtttgctggtcccaagcagtttactgtacttcactagatttggtacctgctctcccctggacttctttttcaatattctagcctttcctagatgtaaatctttacctccttgttagtgaaattagatataagccatgatttggagagggaagaaatctggaatacttaatttcatttaattatctatgctgatgaatgcctgtatcattgttaataaaggagaattgaaaatactcatttctactttctgccctcaaatttctgtgctctatctcaactaggcaagaatcagcagggtgcatgatgccattttaagctgcttcacatcagactgaaatcctaattacagttcataagtgaaacagactaattcaatggcaataccttttgtataggtcctgtgcttaaaggaggcaagtataaattttctaataagaaatccctgcttcttttgggtgcagnggctcacacctgtaataccagcagnttgagaagctaaggcnggnggatcacttgaggcc

SEQ ID NO: 49086 - DNA, 1452 bp, Homo sapiens
tttttttttttttcccaataaatgtttattgaatgaataaatggaagaaggagtgaacaaagtaatgaacaaaacagaccccagatcagaggaagagatggctttcttgttaattctggagcagattcaagcagcaaatatttactgaacacttgctatgtgctggaaattgttctaggaactggagttacagcagtaaaaaaaataacatttgtattttcataaatttatattctagagggagaagaagataataagaaaataagttatacagtgtcctaactattaaggagaaattatagcagagtaaggggggtggagagtaatgagggtgacattttagacaggaggtcagggaagcctctcagggaaggtgacacctgagcagggacttgaataaagtgagtcggggaaccagacatatacttgggagagagtgttctaggcagagggaacagcacatgcgaaggccctgaggcagagtatgtagctggagaggggagggaagagcagtagaaaatcagagaggtcaactctgtggaatccccagcccaggaatttggggctttgaagctctcttatgttcagaaaggcaaatcatctccaggtccaaagttgattaacattctttatttcacagtatttttgatcagaagtcttagaaatcatgattcatctggttacaaatcccatgagtttctctttgaatgaacctcttgcttccagtcccatacaacgcatctcccaccagccccagtgggttgtaactgtgattcaacactgagtgctcgcttggaaaggaggtggagctcaacttccaactcagagggcctctcccactgctctcagggaaatgcccatgattcacttatgctgtatcaacaacaagtgcagctgggcgctgccttcccagctggccaagcgctcctaggggaatctccaccctcagaggcttaggaaagggaagtgtgacgagtcagggcccctgggctggtgtcttttccaatactgggctaatgctgggccattccattcagcagacacttcctgagggactgagctcttcactgggatgccagaatgcttctgcttggaacaaagagggattaacccttgaaggcagacaccacttccagcctcgggctcacggggacgtctcagttttacccatatgcagaaggggacaatcttttgcttgcctgagacattttacccatgccttttacaaggccccaatttatcttttgacttttctctcacccctgacaaatggggcctttgataattaaacatgcttaccacttaaggtggggcatggagagatcaaggccacctgctgggacaagcagcaactgaccgccttgcagccacagaggcctatgggggccacatgtaggagagtcctggctggaggggtcatgagtcaccccatgggagggcaggacccaggcc

SEQ ID NO: 49087 - DNA, 768 bp, Homo sapiens; identical to SEQ ID NO: 9796

SEQ ID NO: 49088 - DNA, 1599 bp, Homo sapiens
  misc_feature (1)...(1599): n = a,t,c or g
ttttttttttttttagaaaacacacagtgaagtttaatcaggaacccaacctccggtcctctgctacaaccacggaaacggctccaaacttgaggggggaccccccaacgcctgcttttggcccaaagctctgccttccagccctcctcatacccactggccacctaggaccaggaaaggggggtagagccctgagaattctgggtctggggtcaccagctcccacacctgtgctccccggccccacacacatgatgcccaggggtgggcaatccctgacagcggtggccggcacttgggagctcctgctcagccacctgccacggcccaccctgggggtccggcaggagccagggcagtgcatggcagcataaggccccgctgcagatcgactgccttcagaaacaaaaagtcccggcgcaaaggcgttcccggagtggcagcctggcctgcaccccagctgtgctgcccctgcagagccccagcagcgaggcacacccaggtcaggggagggggcttgggtaccaggggcctcactggctcttcacccagnaccctgtagagtgagaagctgaggactgcggccacggcggccccgacaacccccagcagcccccggagccagaaggaagagggatgcagctctgcctggaccaaatgtccacgggaaggcggccatggtggcgagctgggtgaagatggtggtgctgggctcggctgggccagcacaggagaacggcacgggagcgggtagccggtgcttgcggcaaaactcggccggtgatgggccagacaccgcgacaccttcgggcaaggtcggccttggaggagacaaagaggcagggggtctgcccgtccatgtaatggtgcttgtagacgctggcacaatgtgcaaaggactttgggtcactgccatcaaacatcaagcaggcaacgtcacaggtggcgtccagcgatgtggccagcagaccatctgtgcccacctcacagaggatcaagtacttctcctgcccattgacctgcaccgtgtcgatggcgtagccgggaggctgctccctcgtgtcctggtgccccaggccgcggccgagaaaggcctgcaggaaggcagacttgcccactccacgggcccctaccaccttgcacaggaggacgctccgctgcgtctgtcccttctcctggtccagcctcttctcacgagtgactgtgatggcatgggcctggtcctgctcacagagggtggggtagcccaggtagcctaggtgtccaaggcagctccggacgtccaggtaggtcaccagggtccactggcagaggtatccgtgcaggggcaaccggccggcctctgtgcggactgtgcgtgggagctcggggccccagggcgctgctgggaacacactgaaaaggctttgcagctccacgggcgagagggcgccgtcgcggtcctggtcgtgcttctcaaacactctctgcacaaactggtagccaaggtggttgagctccgtgctgcagccggggggcacgtggatcagaggggagagatagtccgcagtcagctccagggcatcgctgtagccgaagcgccgcaggatggtccaggtg

SEQ ID NO: 49089 - DNA, 899 bp, Homo sapiens
  misc_feature (1)...(899): n = a,t,c or g
gtcagaaacgggtccagatgaggatgaggctgaggctggatggggtgactgacagtctggatcattgaaactgattgggtggttggtcagaaacgggtccagatgaggatgaggctggatggggtgactgacagtctggatcattgaaactgattgggtggtcagaaactggtccagatgaggatgtggctggatggggtgactgacagtctggatcattgaaactgattgggtggtcagaaactggtccagatgaggatgtggctggatggggtgactgacagtctggatcattgaaactgattgggtggtgagaaatgggtccagatgaggatgaggctggatggggtgactgacagtctggatcattgaaactgattgggtggtgagaaatgggtccagatgaggatgaggctggatggggtgactgacagtctggatcattgaaactggtccactatgacgcagcaggggcagtttggcagagcatcctcttcccttgtccttgtgaaagaacacaggaaacatttgggttttacagcttttcacaccctactatcaggcatcagaatcaaaattagttactaaattgggtgaatttttggaaacctgcatttctatgcatctgctattccagaaaaaaatgggaatgtattacaggagagttacctcacagtgtcttatgttgtggaacctgaaacataaccacgtgttttcttatatgatcatttgtgttgatactgcttttatttgagtttatggaacaggaaataggaaagtatgggtgcttggggttttgccccttttcttactcctggaaagtttaaatccaggaggacactggntttcatttttgtggaanttaggctcaggggaccatttgancctttngtttccat

SEQ ID NO: 49090 - DNA, 1600 bp, Homo sapiens
  misc_feature (1)...(1600): n = a,t,c or g
tttttttttttttttttttggctttcctcacttctcaggctttattgggctttatttgtgggagaagggggctggtccccagtttttgcagtgcaaagccagagcgccacctgctggtagccctcaggtgtaggttcgaagctgctggggccccctggggtttgggacacaggagaatttcaggctgtgagtggagacagttactgccacgattccacaggcaagttgttcacctcaaagatctcctgcaccgactggtgaaagtggtcgtaggtgaggcgcagctttagccgcaggggggccttgttaggattgaggattctgaagagctgggtgataggaaggccaccccgagctggaactgtgttcccactgggggcctgcagctgcagctggagactcttgggcacagcagcctggcagatgaaatgggtgacatcaccctctgagaagttggtggcagtgatggtgattaacagcaaagcagggttttcagggggtcgaatgaaagacagattcagctgtactccctcacgctcaaacactttgagatctgggatgggagctgggggtggaggtacacagggaaggtcaagcaggtgtaccagggncactcctggggaggggtccagatggggaggatgctggacatccccagaagccccatccaggagatctagcagatccaggagctgtgagcctggggctctgtgggcactggggctgcttctgaaagctgggctgcttctttgctttcctttgcttcctcatcagctgaggccatctcgctccacaagaggcattttttccaggatggcagccctcatgtggtcgtatttccggaagagtgtgtcatactccacagcccgctgctgcagctccacgtccaagcagctcccgtagatggacaccacctggcggatgcggttgttgtccccacagaggcgagtgctgagcttcatgagggctgtgagggcatatcctcgagtggctggcagggacatgtgggactgcagcaccttttccagcaatgccagcacttcctcttcgtccacctgaaggggctcaatctcctcgcagttccctgccagcaggaggtccccatactccccaatgcaccaggctgccacctgcaccagtggttgctgggaaatgtcttctgccagggcattgtagaggcggcgcacagagtaggcatgtagctcctgggcccccccaatcagctgggtcaggttggccactgcatcatcccgcacatgggtgcccgcctggaaggtgtgggcactggcaagtcagtgtggtgaatcttgaccacttctgcccagctctctgactggcccctgcctcaccgttgtcagcacatgcaggatggtgtctatgtgccagcgtttggttggagcaaacctctctgcagccagcaggatgcctgaggcacagtcagcccgtaggccaggagggcaggactccagaaaggcctgcagctcttgcatcatggctcgcacattggagctatttaccagagccaggcttagttccagggctctcctggcaggagaaagaggtttccatgcaggtagcccaggtcatcctggtccatgcc

SEQ ID NO: 49091 - DNA, 742 bp, Homo sapiens
cttaataagaaggattcacaaggtggatattccatctattataaccaagaaactattaaaagcagcaatgaagcatatagaagtgatagttaaagccagacagaaagggagaaaatacagagtttttacagcaagctgctttagaagaatatggtccagagcttgatgttgctttgagaagtcgaagagatgaattgcactatttaaggaaacttactgaactgctttttccttatatttatgcctcctaaagcaacagactgcagatctctgaccttacttataagagagattctgtctggctctgtgttccttccttctttggatttcctagctgatccagatactgtgaatcatttgcttatcatcttcatagatgacagtccacctgaaaaagcaactgaaccggcttctcctttggttccattcttgcagaaatttgcagaacctagaaataaaaagccatctgtgctgaagttagaattgaagcaaatcagagagcaacaagatcttttatttcgttttatgaactttctgaaacaagaaggcgcagtgcacgtgttgcacgttttgtttgactgtggaggaatttaatgatagaattttacgaccagaattatcaaatggatgaaatgctgtctcttcatgaagaattgcagaagatttataaaacatactgtttggatgaaagtattgaccaaattagatttgatcccttcattggtagaagagattccaagaa

SEQ ID NO: 49092 - DNA, 512 bp, Homo sapiens
gctgcttcagatcatgtttattgtggggccagggggtagggatcctcgggtgagagggctggctggccggggtaagttgctctggacgtgctggcggggagcagtcctggtggcgggatggcgggggcacttctgggtcccagggtgcacgggatccgggcagtgctcagggtggcaagaggcggcgtgcaggcacctggggcgccggggtctctaggcgtttcacacgcagcagcgcccccagcacgccctcagggggcagctcagagcccacatcgtggtcggcggcacggcggaggcggcgcggggctgccaccccctcggagtccgcgcttcccgcaagaatccgtcccagcaagtacctcaacagctcggggtccacgtcgggtgtctcgtcgcctgcctcctcagcatccgggcccgcggggccgtcgtcgtagaccgggggccggggtcggagcgccgcggcggggacgggcgcggggacaagctgggctgcgagggcggcaggg

SEQ ID NO: 49093 - DNA, 313 bp, Homo sapiens
gtaagaatcgtttggtctcctgccgtgcccggaatcccagtcagaagttccagcctgccactgttctctgatgccatgccagcaccaactcaactgttttttcctctcatccgtaactgtgaactgagcaggatctatggcactgcatgttactgccaccacaaacatctctgttgttcctcatcgtacattcctcagagtcgactgagatacacacctcatccagcatatgctaccttttgcaggccaaaggagaactggtggcagtacacccaaggaaggagatatgctttcacaccacaggaatttttac

SEQ ID NO: 49094 - DNA, 886 bp, Homo sapiens
  misc_feature (1)...(886): n = a,t,c or g
ccttctctcccctccctcatgagtctatccacgcagttcttaacatacattccaaactgctgcggggtttcctctccacacccacgaggccaaacccgcatcattacagtccaactcttcttagacactaatcactttctaaaagaagtgagttctccagggaagaaaaatcaacttagccagtgaaaagggttaaacttaagtctattatttgttgccctcaatcaaaagatatgtatagaaaagtcatttaaattatttatttctacaagctaattgaatccaggagcagctttaattattaacactaacggaagagaaaagaagtatttccaagggctcaaatggaagctgtactcagtccggtggaggcagggggaggtaaagtttctcacactcaagtcgtcttcatagtttactgtccttttccaaacaaaagctaataacgccatacgcatccacacactccctcctgggatgaacctaagtctcgtccccactgtcaccccaagggccagttatcaaaaactgttccttctctgccctcaaagactgaaggccgcaggccctgttctggcctctgctcagggaatctgattgctcttaaagtgctcttacaagattccgtcgatgtttgctccctctgtcttatctctccttccagtattttcagacgggacaagtttgactcaggccacccagcacctggcagccttcctctgcgtggccagtggaaatctctcccagtagggtgcttcagggttctttcaccctcttcgttggcaggcagcccctctgggcccgaggattgtatttttttagtntggttcaagaacagagggggcngggggagggtnggaggaaggggaggntaccttccngggaa

SEQ ID NO: 49095 - DNA, 1223 bp, Homo sapiens
gaaagcaaataaccaacttatttgcccccaggctttttaaaatcattaactgaagataaaataatttgaaatttcgaaggtactaaaaaacaaaacaactccaaatgtaataaaaacacatcaagaaccaaactacaatttctgagctgcactgtttattttgctgcttgaaacctaagtgacagtatgccactataattatggggtttcgtctaaacctttactacactgcaggtacagaaatatacggacacatttttagagaattgacattttgcaaaatgcagcaaacattttaatttatacatgagaaaaggaagtgttcaaaagggtatgcatttcaagttattgcaggttatttgtgagagaatttctgcaggtaaaacatgtttaaatttaaccaacagtagcgtgtcagtgtatttaaaatcatgacaaaaatcttctctctggtcatgttgcccatgacaaattactatgatgttgtacgtttagggcaagatgtcaatacagcataaatcccatggtattttggttttcttctggagattaaagctgtttttcttgggataaatgcagcagcaaaacacaaaccagttgatcaaaaaagcacttctgccataactccaataattttcaggacacatcaaccgacagtagttttgccattcccagttcttttaaggattacatctctgcactgttgccttaaggacgtctgtaaaagcttgttctctgttaagccagtttactgactacagcctggttgagagaatttagttggttggtccatttatctagtgcagtatatcgtgcaccacccctcttctgatgatccagttcaaggagttggttgacttgatcaattcggccatgaatagtgttatccaatatgcactgcaccagcaagctctccacatcagctacatctatgtttaactccttagaaataaaaggaatatgtattcttgtgtaaggcttaattaattttataagcacttgtgttctgatgtttcgcaaaagctcttcaatgtgttctcttatgaaaggatcatccatgatgttgctgtgatttgtttttagaatcttttcaaattcagtgatgtcattattctgataggcacttactaaattcgtcattgctaaaatttctggatcatttttgtacggcttggcctcctgtgagtcaaatggatttattcccgatttcataagcatatttg

SEQ ID NO: 49096 - DNA, 1016 bp, Homo sapiens
  misc_feature (1)...(1016): n = a,t,c or g
gtgtgatggtacagaaatacagtcacatattatattaatatatatagatggataggaaaaacctacagccataggtattgtccaataactgattctagaggtagaactatagagtatacatttccttttttcttgctttgatgatatttttatacaattttatatgctataaaattttcaaaaatatatttgctattttcatttgtagagcttggttaggtttttatcagctcttgtgcccactgtacaaccagattcccctcatctaatttaaatgtcttccctttttcaaactctcctttatgttttcctttttttttcctcccatttttctacccttcacaaattccttcttttgcttctgtccagggnaacccattctgcttgcggtatcattttagcacgtacaaacacaaaataatgggaaaaataaaagcaccttgttccatgcaattcgtatgggaaagttttgggtgtcaaaggtcgctggggatagatggggaggcagaaatagcttgggaaaaggaagcaggaaaaaaggaaatctttatgggaaatcaattacccaaagcaaggcccagtcacctagaggtgaatatgatgttgttattgtcctcccttagtgtacagcacaatttttgctctcacagggtttttctctttaggatgcgtagcaccctatgcattaaatacatagcatcctaaagacaccctactcaccatgagtctgtaggctctttccctgatgagggcactggccatatatgaatggaaaactcaactcatctcctcagctttaggatgttgctgctgttcagctgggatttgtgaggaaatatctgggattactatccaaggaacatttagcaagactcaaaagagagaggcaaggcggaaccaaaacccaaacctcaaccaatgacttagctgaataaacaattctttggaggaataaggaaggtattttctggatgtattctgagaatgctcttccaaaggggaagatggtaataatg

SEQ ID NO: 49097 - DNA, 2181 bp, Homo sapiens
taaaaatatttatttaaaaaaatacaactgctgtccatatctagttgcacatatatctattaacatatatgtatacttttagacttgtagtaaatttgctacagtgcttttgtaaagccagcctgcattatacaaagcaaattcctctgtcagttcttacataaaatagatttttaaaaatgtatatctttcctaaaagatgcatatcaccattatagaatttaacaaaatttttgcataaaacctgggaagtgatagaaaaaatgatcacctgattggtcagagcaaccccttactatgtctggagatgcactgagtatcaactacacattttttttttcaagcagcatattattataaagccctcaaagtgcttttgcatcctttcgctcacctctctacactctataaagtttctctgccgtatacagatagaattcaagactctagctacaatcatcctaatcaatcttagagcaatatccctttgtttcccaacaggtaagtcagactgcttagctaggagatgtggcagcttccctccagctgtttcatcaactaacatgaagtttaataaatgttagcagtgaccattttaattgcttttttaggaaaaagaaaaaaaaaaggtgcttttaatactttgaaggtgctttttaggtctccctaatgtaaattatgctgaaatcaactaagacgagctattattaacactttaacagttatccattcctctgggtaggtgtgcacttacattatatgtaagtatctctacaaagtgttagatactggatatgagatacagatttcaataaaacaagggaaaaaataagcaatgaagtaactgtcttctcagttgagctgacaggtttgaagaaagcactcttgacatgttcttactaccacatatcccaaactaagacatacacataaaataacatatctctcctgtgttaacactgatggagacgcactgcaatagtcccatggcagacatatgcttttcttctgaattacagattggcttaatgaaaattaagagtttattattaagcatcttttaatttttaagtgatgttcatacttgacggttcagaaactgccactgccactgtggttaaatcacttggtgtatggaatttaaaataatctaacctagagctatttcccattaatcaaactcatccctaattgtctcttaggaaggtcttctttaaagaagatcgagtagggctcatgaaaaattattggtttgttcttcaaaatgcaaagttacatacccttattttttagccaatttgattatttggtaaagcaagggcataattttaagaaactaattttaatcaaaaatttttacttgcctcaaactaaagctaaccagtagcaaaatgactggactgaatttcatatttaatcttccctgcccacaaagataaatgaaactgctcaaaggcaaaaataaagaaatataattgtgattagaaaagatccagggccaaaacaaataaataggcctcaaggaataaaaaattaattgtattcgtttcttttctatctttacatatacgcatctgtcaatttcactaatactgaacagggaagttcataaaaatgctactctaccacttaaacaataaatgtaagcaatgaatgtacatacaaaggccactggttaatactgccccaagtaacaaaacaatgaaatgtcaggattgtgtcccctacacaatagacaataagcaacaatgaccaaacagaaaagaaacttaaaattggatactttataaatttaagtgtaatctatcaattgcaaattatttttaaaaatcgtaaatttctacaaagcacaatattaaaagcttgcaaattattttaaaatatcctagccaaaagggcataccttacagagcctagaagaatggctcattaggtaacccatttatcccttctacaaacaccctataaattccagaaaacataaacaagaaataaaccttacttctctgaccctcaatatccttaagttgaaattaaacaaacaaaataatcattaagtgcttccagttattaaaaatgaaacagtgctaatattggtgcccaagaaagtgccaagtgattaacaccaatatatggcattcccacccctgaactttaggcattcttgaatgattccattgg

SEQ ID NO: 49098 - DNA, 654 bp, Homo sapiens
  misc_feature (1)...(654): n = a,t,c or g
ttttttttttttttcaaatgagttggtttaatttcaggtgatacaaagtttagggtagaacaaggaccaaagaacagactctggcaagattctgagctggttttactttaaattcacagttatggtaggaatgacttagtgaaaacaactaaagagatgatgagccactgtaagatttttctttttttacaaaagtttattcttaaatgtacaacagctccaagacaacacttaattccagctatacgtggcaaaagatgttatggcagggaatagagaggtttaaatacagatgaaataaagggtcaccatctcctcaggcacaaggaacagcttactttttgccagatttcttaattccacctgtggccaagggccccttcccccgcggccttcgcttttagctcctcgagtttcttctgctcctctttttgtttctgcttgaaagccttatcttcctcgtccatctccttggcctgcttcttgggctgtttcagtggcttcttcttgccaccttcgcggccggacatggcgcctgccgccgctttccccagaccctgccactggacgataacttcttttagatcagcacctttttgttgccagtctggactcacaagtgatggnacatcgacaaggtagagaaatggattt

SEQ ID NO: 49099 - DNA, 1413 bp, Homo sapiens
caatgagattaatgcttttgttgtactgagcagagggagtcaaattttgtctctgaattccactaggtttttaacaaagttaggacattgctcttcagcctgtccttctgactcagtttcacagaccaacattcaaaatttgaaaggcttaaattctccagttcttattgggaagtcaaaagatccatcctgtgttgcaaaagtttctgaagaggggaaacctgtgatagggactcagaaaatggagttacatgtgaggtggaggtcagacacaggcaaatgtgtagatgcttcaccgctggttgtaatacccacttttgataagtcatctacaactgtgtacattggttcccattctcatagaatgaaggcagttgacttttactctgggaaggtaaaatgggaacagattttgggagatcgaattgaatcctcagcatgtgtatctaagtgtggaaactttattgtggtgggctgttataatggattagtttatgttctgaaaagtaatagtggagaaaaatactggatgtttactactgaagatgctgtcaaaagctcggcaaccatggatccaaccacaggactcatttacattggatctcatgaccagcacgcatatgctttagatatttatagaaagaagtgtgtttggaagtcaaaatgtggaggaactgtcttttcctctccgtgtttgaacctgattccacatcatttgtattttgctacattgggaggacttttactggctgtaaatcctgctactgggaacgttatttggaaacattcctgtggaaaaccactcttctcttccccacaatgttgctcacagtatatttgtattggctgtgtagatgggaatttactctgctttactcactttggagaacaggtttggcagttctctaccagtggaccaatcttttcatccccgtgtacctcaccatcagagcaaaaaatattttttggttcccatgattgctttatctactgttgtaacatgaaaggcacctgcagtggaaatttgaaactacttcaagggctatgcaacaccgtttgcttttccaaaactacaatgcaggcaatgaaatgttgctggcagcagcatctactgatgggaaagtgtggatcttggaatctcagagtggacaattgcaaagtgtttatgaacttcctggagaagtcttctcttctcctgtggtcctggaatcaatgctcattattgggtgtagagataattatgtttattgtctggatttattgggtggcaatcaaaaataatcaaatacagtccttatttgtataacaaatgtgagatatttgaaaatattttaccattatacatcatgtggacttattttatattaaagaaagaagattatattttggctaagaaacggaaaaaaaaaaaaa

SEQ ID NO: 49100 - DNA, 431 bp, Homo sapiens
ggaccaaagccgtcctgtgtatggtggtggcaggggccatcgctgccgtctttcacacactgatagcttatagtgatttaggatactacattatcaataaactgcaccatgtggacgagtcggtggggagcaagacgagaagggccttcctgtacctcgccgcctttcctttcatggacgcaatggcatggacccatgctggcattctcttaaaacacaaatacagtttcctggtgggatgtgcctcaatctcagatgtcatagctcaggttgtttttgtagccattttgcttcacagtcacctggaatgccgggagcccctgctcatcccgatcctctccttgtacatgggcgcacttgtgcgctgcaccaccctgtgcctgggctactacaagaacattcacgacatcatccctgacagaagtggccgg

SEQ ID NO: 49101 - DNA, 2784 bp, Homo sapiens
atcttttaagctccaacccccaagaagcatgaaagtcacacatgttaaaaaatactgtttaattttctagtaatgtcctttaaaaaaagctgatacatttgagatttttttttaatcttctcagatctgcctctgaaaccactgcaaagcagctatgcaacttaatttttcagtactcatatatgtattaatggaggaaaagccactctgaggaagcacgccaaggacatgtccccacgtgggcacaccccatcagcactgggtacccaggaatgtgaatgcaaccctggcatgttcacagctaacattatgcccttgcattcttttttgctgtgaggaacaatatgatcacacagcactgaaaacggtagacacaaagggcctgcctttttctttctcatttttgcctttccagcttgcacttctattcctactccagtgacccatttattccccagttacccataatgaaaaatagttctgtcatttactgagccttacattcaaatgcaaatgacggactttataaaactgctgccaataaggtacaatgttcattgatacaatacgtttcaactgcaggtatgttgagcacacaagcaatcaccgtattgtattagagacattttattgaaaatgcgaaaataggaaatgtattatagcctaaaataaattacataacatatacagcatatatttatatctttaaaatatttttttgtttaggttctttcagtctaggaattctgactaaatcaatttagtgaaccgtgtctataatttttttaaaggaaaaaacctgctttccaaaacttagaaaaatatactgcactgcatggatttcgaatgcgttatttcagggaggaccacatagtgactctggtatcgttaataaaatgtcttgctttatcgtatggtgtgggagggaagtaccgtagtacattctcaattacctgtaccgcagagttatgactaaggatagcagaaccaggtaatatatctacttcaaaagttaccctacagcaacctggcattagaatgctggatgagacttacttaaagcttcagttcactgtaaaaactaaaatgcaaagttaggatgctccatgtgactcgctctaatgcgaccttcaggaaaggcgagggaaaagcaagccttcaggaaaagtcatgcggcagggtctggaatctggagatgcgcttttgtgacaatttaaaaaagttagctcatgtatatacacggtgggggtgagaactgacagcttgctcagatctaggagaacgcagagtgaaatgctatcattcaaccatgtcagtttgctgcccccggggcatttcaaaccaaacctttctacgggagattctgtccatctgtcagcctgctgtggtcacaggtctccgttcctcagtgtgaacggggactccgggctgcagcgtgccacccgcctcctgcatgtgtggagtagatggtttcgaactccgtggcggaagggaaatttaagaggccagccggggctccatctctttgtacggccatgtgactgggaagcaaatcaaaggaagccgagttttaacctgttgattccttaagagcgatgaagggggacaggagagtctgtggcctgctgtgcagggtgaccgaggcgcgatggcacagctgcagtcctttggttccaagaggagattgtcccaggggaggaggacacaacgtcaaccgtgaggcagctgtgtcttttgggttttcgtgaggcaggggtatgaagtcagttgtttcgtttgtttttacatagcaacagtaaagaccattcactaggtccccccgtcagtgtgagcatacccagtatgctagagaattgacacgaaacctttaaatcaaggcctctttcattaccaaaacaaaacaaaaaaaagggaacaaaatacgatgggagagggaagagatgatgccgaagtgtcatcctgactgactgtccctgcagtgcccatggcgtcccgtgccttattcattctcctctctcatttccacgatgtctgtcacctcctctgtcggaggcatgtctgtcatggcagagtcttccccctccgtggccgactcattctccatcttctttttctgcttccggtagacatagcacgcagcgatggcgaccatggtggattctcccacaaagcccgccaggagggagcccacgcccagggtcgcaccgtgcacccccaggtagggtaggacccacgaggctggcgatgaggacgatgatccgcagcacagagctgggggcaaggacgaaggttttcttcagtgtcatcagccacccggtgagatgcgccctcactgtgactggaactgggaagaaggagaagatccgcaaaggaacaacacagagttctgcaaaggcaaagtccactccgatgatgtctatcaagattttctcagacacgttgggtgtccaaaacatcacgaaacagagcgtgagtgacagagccatgcagacgaaggtgaacttcttgatgtgggctgccgtgactgtgttgctcgtgctcaccagtttgttgctggggttattcttgtcgaaagcaggatacacagcacggatttccgtcaaccagccgtatggcatgtgaccacagggtatgtggctgtcaaaatcgccactgcctctgtggctgcagaactgccaccaaggtcccgggaaacaaagaggttgacaataggccgactgattctctgtgtggccagaattagaccaaaggccaccagaagctcagcatctttcttattgttgc

SEQ ID NO: 49102 - DNA, 777 bp, Homo sapiens
attcattcctgcctatgtccccgtgaaggattcggtaagagtgctatttcctcctccctttagaagacaggctgtcttctttcatcaacttagagcagataatccccatgtgtgcctctctccttccttagatggggaacaggatccctttttgggacaatcaagaaaaaaactcatgtaaacagtaatcttattacttgtatttgtgactaactccagggaaaagggtagaatatttaggccacttcaggcactaccatggagtgaactgaattcatacggatggcttgggctgacacagtttcttcccagtggaccaataaatcagactcacccgaacccctggggttttggtagaattggacctactctaggactgtggggaactaaaggagcatttggctcactgtagctcttctatcatgagccttgaccgtcaggccgcaatcagaccttactgatgggatctctgcagtttattacgtaggcctcccgttaccctggtacccaaatacgtcccccacctctagctccctagcctcacattgaatgtctcttcaacagcagattgtggtggaagttatagccgtgtgcctctatttattctctgaattgtactgtagaaaaaggtgtttataaagaataaagaaatcaccagaactgcctatacctagttttcctgactttctggccctgcgtcttcatgaatatcaacccatttgctgtttgtaaaagttaatcgggttagcccttggaactgaccctgcacactttcgc

SEQ ID NO: 49103 - DNA, 1569 bp, Homo sapiens
ttttttttttagaatactacatagccatatatttttaatttaaaaaataaagttcagaacagtgaacttagacagctgctgtttgcgaaaatactgagcaagaataaagatatacatatttgcttaatacacagtaaacttctctggaaagataaacacaaagctggaagaacggattgcctatgcaagaggaattagcaaaccttgagaaggattgagagtgaggctttcctctgtatacttctttgtgtcttttgaatttcaaaccacattcatatattgcttatttaaataaataaataatatattttaaaaagaggatagtaggaagataagtggagtcagggagtataggcaactcttttgaggagttttatgcaaagctgggcaagtccacctcttccttagctatgtgacccaggcaagttagtaaatgtttctaaaactccattttctcactcttagaattgagatagtaatacctgccacatagaattatcttgaaaaataaggtaagaagacaggtttcagatacttggcacagcaatagcacatagtaagcaccagtgaatgcttagtagtagtagtagtctaattcctaagagtccatggaactctaggttcaaaacccagtttcttctgggacccattagatggcatcagactcaagcaggtgctcctctagctgacagctctaaaacacaaggaagatctttgttttccttattccctagtcctttccccacaaaattctgacaattacgcatttcctgcttgtttcacaattgccatgtggattccaagtggctatccctgggtggaggcataaaggacttgaaactcaatgctgtttccacatagggccgggcagacaggctatggaggtgttttggcatccaaggaaatctatcagtttcccaagctttcccctctccattcatactttcctttagaaagaataaggcatgcctgggtgggaaagatactgcaggtaagcgacaagaaggggaaattacagggtaaggagatcaatcaaatggtgatggggggtaggagtgaacaaaaagaactctggagcaaaccaggattagtgacatctgtggttcccagacaaaccacacttacaggaatttgtctgtctagcccgaatattttgactttcagggagcatttttctgtgtccctgacataaagcctacctgggagtttcccctgagataagaaactttcaggacatcttaaggtctactgcatcttcctgtactgcccatcaagataagttttccacccagctttatcatgattagctgcgtgatttcatgtcagtttctctgtaaaattaggtttgactgttgcattatttttaagaatccttccaggcttaaagtattatgatgcatgggtataactgtactgaggaaatcaaagaatttctcagatcatcttcttctgtgagggctgcagcttccatgtagttgggagatacaggaattattattcctgttttatgaataaaggacatttgtgggagagaaaggaatcaggccagagttctttctctccaaatgc

SEQ ID NO: 49104 - DNA, 2615 bp, Homo sapiens
cgtcgactttttttttttttttttacaagttcaagtattctttattcaaagttgaaaaatgtaccatactgcattattgcaaaaattcactggtacaaaacactttgcagctggtgagaaggcaataaaaagttgatttttaaactcattactataaattattcttacagtactttgcaaattcagaatttcaaactgcatgttctttttctaaattgcccacagtactcgaggttcctgaagctaaggcagctgtttcagaggagggggaggaggtagcagatgtcaagggatttccatttctctttcgatgccgacatacttcagggcatcagcctggctgtatctgtaatcaaaaaacagctcttcgccagtctggatggctctcttggcaaaaatacctatcctgtgatcaccgttaaccatcataacttttgcatagcagtttggatttaccgaatgatttgcaaaacgaattttgttacccttgcgggttgcatccaccacaaaatcattgttcaagttgaacagaaagctgcacatgtatttatcatacactttccctcttctgtcagcttcatcttgagaaataatctctccacagtattctgagatgaattcatttttctgcacaggatctttgataaaaatcccccagcctgccacgtcagatggtgccagcaatagatgctttttggagccccgctgaatactgcagttcttgcaggacacatttttactgtcccaatggtcagcggctccacaagtaagacagaggtcagggtcacactctcggacagccaggtagcacgggcactgcttggtgttgcactgtgctttgcagcggcatcccggaaagcggttttgacactctgaactacattgacaaaacttttcacaaaaattttgtgctatcacacaagggcacgaactgtcacaaggctgccgtggatgatcacagggttgatagttgtaaacatggttagaggagccgtcctttttcagctgtatctttctgcagtgtgcagcccacaaccggtgtttcctcttctttttccttggaggagtatccacatcctcagcgggagctggagctatgatgctagattctttgactctaaactcatacacctgtctacatgttttggtcccaattaacctagcaatggcacagaaattgtcatagtaagtgccaatgaggactctaaacattgaggcttcagcaccactccactccacattctcaggaggttcaatatttggcttcatctttattggtgtttgacaccgagaatttgcttcagaggagctcgaagtttcatctttcttctcttcttcttctttatcattgttctctccccccgtttcagtccctgcttccctatcactgtctgtatcctttgattccagcacattaatggtgggggtgctgggcctgctactgttattgggaagccgtcctcttctgcggcctcctggacgttttggtggggtctttatccgctcagcggtgagagcagcagcaaactcctttgctccctccaaatgctggtaacactgtggtccacaaggtttgttgtctagagctgtttctgtgttcttccgcttataagtgttgggtgttgcatgaaaaggatgtaggaagcagtcatatttaaaacatcgcctacagaaaagcgtatgaaaggagtgtaagctttgctctctctgaacagatttagcatttggtccatctatgttgggggtacattcaggaggaagtgcgcctgggagctgctgttcggtgagttctttatatttttcctttagttcttctgctgtgcccttatctggaaacattgaggaaatggcttcaaaaattttatcagaaggaaatttccgaggtgggcggctttctttatcatctcggtgatcctccagatctttctgcttttcttctctttcttcaggatcgtctccatcatcatcatcgtcatcatcattatattgaccaagggcattcaccaactccacaaaaatttcatcatttataaacccacattctctatccccgtgtactttcccatcataattttttattagttcttcaatgaaagtaccatcctgatctaaaacttcatctcccatataaggaatgttatgtaaaacagtttcatcttccaccataaaattctgctgtaggggagaccaagaatacattatgggtactgaagcaactgcattcagagtctttaatgggatgacttgtgttggaaaatccaagtcactggtcaccgaacactccctagtcccgcgcaatgagctcacagaagtcaggatgtgcacaggctgtatccttcgctgtttccattcttggtttaagatttccgttctttccaaaattttctgacgattggaactaaacatactctttacttcatcagctcgtctgaacctcttgagctgtctcagtcgcatgtactctgattttacacgcttccgccaacaaactggtcccttctcagatttcttcccagtctggcccatgattattcttcgtcccgcgcgccgactcgcgttgttcccgcgcgtcgcccccgcgcgccgccgccgccgccgccggggctccactgcct

SEQ ID NO: 49105 - DNA, 1349 bp, Homo sapiens
gaacatttacaacactgtaagttttattcagttcaaatatcacatattagatatacaataccaattaattgaaatgaacagtacaagaatacatgaagtaaatatcataacatttaagtttcgtctcacttaggcaacaagaaatgctgagtagtattattacatattcaaaccagacttaaacttcagaaacagaaggccagatgagtgacctgtatcacaggatatgacaacacatcacctatctccaaacaagaaaaagcatgattattaagtttatctacaccagcttatttattcaaatttgctcttcttattaaacagaaaaaaaatacacattcaattcctaattggtaaaatcatttcacaactctaaaattaagatgctaatgacaccactctccactagcatgaaagaacaatatatgaatagagtacacagctttccaacctattaacaggttcttattttcagaattgagtgggaaattgtgtgtggggtaaacagcatgagagagaagtcggtcactggttgaactgttcacagtacaaaaaggtgacaaaactatgaaagtgaaaatactatggtaaataacgaaggccccaatgcaatttttgaaaatgatccctgaaaagcaaaaggttagagatactcatgttgcaaactccatcttcatccttcaaaggtcacatgcgccaaccagccgagactcatgacagtaaacttccttcagggttctctattatgatcagggccaatccttcacctcgagggctgtcgtagtaaccccgggagcctcacatgactctctcagcccctccctgctctgagtgactgagagaacttccttagctgcagggctgcaggcaggtgcttctgctcctgagctcctaaacacaccaaggggtgcttgaaggtccaggcccgccccctctctagaggaaaaacctactcatttgagactacaaacctcttctagaagctgtaacctgaaatgctagaatgagcttatattaatcatgcttttttataatgtataatgttttcacatcttggggacctcactgactggggagaagaattgccttccccagggcaggccaattcttagagatagcaaaggggtcccttgggagtgcacctttgcacactaaccaactcagagtccatctcctcgatttgactcttccactgcagaaggcagtatcccctcaccctgatcacccagggccaggcaccaggcagctggagaccacccctgtagctactgcccaagacattcaaacctgccaatcctacactctgcccccgcccatcttcgcctttgccatggagacacagtggaaag

SEQ ID NO: 49106 - DNA, 3050 bp, Homo sapiens
ttttttttttttgaagctgccacacgactttatttgtgaagcccccgggcacagcccagacacacacagagcacaaaggggaaagcatggggcagtcacgggtgctcagggaggtcatacagcatctgcccagtccagaccctaccgctcccctgccccaggaggtcctttaagagcagcgtccagatgcagctcggacattggggaccctgcctctccctccccagactggagaacagctttgggttgtcaacactccccctccagccaggccagtcacagacgacatctcagcagccaggagaaggcccactaggtccggggccagcgcagtcccagcagctcctgctcctggacaatctggtgtctgcctgtccacacggtgtggggcccagggttgccctctgccaacaaccccacgatccgacccccacagtcccacccatggcattctctgctcttcaggctgagcggtcagcacagtggtatggatggtaggggtgaacagtgccgcaggaccagggcttggtgacgagaagcagccccaggcagggcaggaaacaacccaatcacaacacagaggggaaggacagcacgcgggcaactccctgggttctgtccgccagggagccgggccggaaggcaggtgggtggggacggccatcagggcccaggcggagatcagcagagcgccctcaggtggaggtgagtttaatggcggagcaggctcacagccctttcccctgggggccaactccccacaacagagcagggctgggccagcagaagacgttaaaacccaaatcccgacaggaggcacagacctgcacatgcgccacacccacacacatactcaggggactgacaggacacatgggacacagacccgccctgcctgtggccagagtcctgtccaaggcaatggcgctaggctgcgcctcagttcatccgagtccctccccagctcactggtccaggccaagggatgggagaggctttgagtctagaccttgtacagcgtctgcagcagactgtggcgggcgaaggagcaggattccagggcgctgttgggcttggtcacgaacgccagcagcaggggtgcaagggccttggggaaatagtcctgctgcaccatgtggttcagcgccatcagggggccgtacaggttggcaatggccttgaccttgtcttcactcttgagcagacccatgtgcacgaggagcctggtgaggaaggtgttggagttgaaggacgaggagttgaaagccttctgcatcagggcatctactgcatcctgcactgccatcctcacagtagcttcgtccttgaacacagatgacacctttaggaaggcagagaccaccttctcggggtcagacgtgtcagtctgctgggctatcagcacggagctcttgggccctaggcgcaggagcttctctggagagggaaaagccaggaaggtggagacgtctgcaggaggtggggaggacagcacgggagctggctccccagtgttagggtccagaatcttccgtgagggcgtggctgacttctctccctgccctcgctgctgaggctcttcttcctcctcctcctcctcttcttcctcctcttcctcatcttcctcctcctcttcttctgcttcctcttcttcctcttctccttcctcctcctcctcctcgtcctcgtcatcactgagggacgccagcaccttggccatgttgaagccctccagcacctcctgaagctgttcacagccttcttctcccagggtgttgccattcaggtccagcttctccagctcagctttgtctgccatggcctcagcaacagccagggcagcatccctcttgatttcacagaatgacaagttcagctcctttagcttgggcaggccgccgcggatggcatctgcaatggcaactgcacccttggagcgcaccaggcagtccccaaaattaatcacctccacctgccgcaaggtcttcaaggtctcggccatggccacggcgcccttctcagtgaaggtgttgtcattcaggttgatgacccgcagcagggggttgacagcgaaagcctgggccagggcagtgatgccagggtggttgatcccattctgtggcatgtggacctcctccagggtcccgatgaccctaaaagcttctgccaaggcagtggcgccatcattctccagacggtttctgccagccacaaagaccttcagggccagaggcttgccttgggcactggatttccggtgacattcggtcagagctgcagccaggatcttgccgccgccaatgcccatgccacagttgttgagcttgagttcctgcagggtgaagcaggctgagctcttgagcagggcctcgaagccttgcacaccgtcgggcccgaatgcgttgtcgcttaagtccagctccaccagctgagccccagctgtgatgagtccttcccctagtgagatcagggctggtgggatctcggtccgcagccttcccgtgaacatgtcactccagtggcagcgcttcaactccgacttcttctctaaggccttggcgatgaccctggctgcttccacgcccactgtgttgccttccagacgcagagcctccaagctgtcaaagtcttcaatctctttaatcacatctttagcatcttctgcagtgttgagtttgaggctcttgcctttgaaactcagctgtcccccggccacctgagtcttggcaagtgtctctgccagcttggcaatgtcttccgaggccatgttgactaggctggtgggctcccctggagatctgcagacgtaaaacgacgcccgccgcgtggggggaatcgagcgcgcgcctccgccctctggggcggggacggatttagggtccgggtcaggccggggtcgccacctccggatccagcggtccagatgtccagccggctagtctgttagctctctcgagctcccggcctcacgcgcttccagcaccacctgctctccgcaccacggcggatgatggcggaggaggaggattttgaaagccggcagtttcttt

SEQ ID NO: 49107 - DNA, 774 bp, Homo sapiens
tttttttttttttccctgttggaaattttttatttaccactgcaaggtttttgctccaaagtgtcacaccagacatatgactacaatgtctcatgcatctttttgtgctttagttcatgactgcaaaacacacacttagcatttgacaacaggaaacacagagggcagaaacaaatcacaaggactagttggtttaggttacagccacattttacccgggactcctttacatccaagagaaatggaccctgaataactggtctcctagctgattctctgtgcccagttttgtttggagtgatttgtcattcaacccacacaaaaagttgtatctcaaatcaaaatggacagacatatgcaaggtcttaatcaataagtgctcaacaaatagatattgatttgatgcaagaggtggagtcacagattaatgagggcagactcccgattttctatccccgtagaaatctctgaagaaagaaccagatcacctttttgagcaacagtgcattctgaaatggtctctcaccttatttttacctctacctcacaccctttttagaaatgctcactggcatcacacaaggtgttcctttcgaaaatgatgagatacttcacacaggctcagttactataatttgatagtaaattggaaatgtttctggtacaaggtaagctgatgcaaagactactgaaatatttttatttggcagtttgacatctctggataatttaaaattcactaagatggagttttagtggaaaagcagagcaatt

SEQ ID NO: 49108 - DNA, 864 bp, Homo sapiens
  misc_feature (1)...(864): n = a,t,c or g
tggaaattaaaataattgattttggatttgcacggctaaagccaccggataatcagcccctgaagactccatgcttcacccttcattatgccgccccagagctcttgaatcagaacggctacgatgagtcctgtgacctgtggagcttgggcgtcattttgtacacaatgttgtcaggacaggttcccttccaatctcatgaccgaagtttgacgtgtaccagcgcggtggaaatcatgaagaaaattaaaaagggagatttctcctttgaaggagaagcctggaagaatgtatcccaagaggctaaagatttgatccaaggacttctcacagtagatccaaacaaaaggcttaaaatgtctggcttgaggtacaatgaatggctacaagatggaagtcagctgtcctccaatcctctgatgactccggatattctaggatcttccggagctgccgtgcatacctgtgtgaaagcaaccttccacgcctttaacaaatacaagagagaggggttttgccttcagaatgttgataaggcccctttggctaagagaagaaaaatgaaaaagactagcaccagtaccgagacgcgcanagttttccagtgagagttcccattcttcttcctcttcattcttcacggtaaaacttacacccaccaaggacactggcagcccagcaatcctggccgacagcaattaacccggaggaccctcttccagttcttgggattcagtaggnttaggggcatggggtaggggagtgtattcagtggatnccattggcancttttattttcccttnagggatattgccttganggggatcttttttatggnttttttaaaaatgttttcccntttg

SEQ ID NO: 49109 - DNA, 904 bp, Homo sapiens
tatattactagcaggtaggagtgctaattagaaaaacttagatggtattgaaattacagttgacaacttatatttttatgagatggagaaaaaagattaagttgatataacaacaaagtgggactttttttcttccttatcctgcacgaaatattgcccttgtttcctctactttcctcttgggtgttttctctttttttcaaacaggaaacaggccaattccattttcttgagcacgaaagcttagtgtgttacttcatcaaggccagctaatactgtgttaaaccgggctgaaaatgagaaaacttgggagatggaggaatggggaaatggcagtgggataggtagggaaggattactctttaattggttttaaaaagcccatagggaaagtctttccttggtacgtgggctgtaaatttataagaactattgtgtcacataaaccaacaagaatcaacctttgctgcttcagataatttgatttttccagcaaggaaattaataagttactgattcttcagcatagaaacaactgagaagaattaatgcaatgtttcttcactagaaaacccaacccttcatttcttttcattgctccaaaacccagttttcaactaatggttttctcattaaactaaatgtttagaaaagttgtttagagtttttctttttcttttacatagtcctcctgatccagtataagactatttagtaacgtgcatttgtatggtactatctaaagtaagttagattgatgtaagagatcgggtagctgcggaacaaaattagttatatcctaattaggtacagtgaatgacacaaaatcattttagcaatgcttcttaaccttttggggtcacaggcgttttgagactgatgaatcctagggacttatttaccc

SEQ ID NO: 49110 - DNA, 773 bp, Homo sapiens
ttttttttttcctctcacaagacctttagttgagagaacatgcacagctgcctgccctgaaagccccaggcgtcccattcaggaagaggcaaccagaacagaccgacggccccaccacagtcgtgcgcgggctcctctgcgatggctggcagcacagctcactcagcacacctgtatcatcatcgacgtcaccatgttatcaaaggccctgctggactggatgcggtcccccgggttgtagaaggggttgcacatcacgtctgtgtaggagttgtgtagcttccggaacatgctgcgaatttcgttgtctcgaagggctgtgttggaggaatctaccaccatgacaaacttcaccttggagttggtgacgtagccgtatctgcacagctggttagggaaggcactcgtaacacagggattgccgggtgggaggcctctgtgggcccttcacttttggagaaatgtggcaacccagttcacactccaggagccgaaccaccttagactccgagtctgtctgtctggaacacctcaccctcttcatgaatcaatgcctggcccggaaagttaacttgtagtcctccgtggggtagagcaggcccaggtacagctccctctggtcgaccagggccttccccattgcggagatcttctcatccaccacgtccagagatgtgtgcaccatgtagtggaacttcagctcgttctccgtaggggtgctgcgaatgtagagggggtaattctccttgcaatcaccggatcctgtgccgaat

SEQ ID NO: 49111 - DNA, 674 bp, Homo sapiens; identical to SEQ ID NO: 9900

SEQ ID NO: 49112 - DNA, 891 bp, Homo sapiens; identical to SEQ ID NO: 9901

SEQ ID NO: 49113 - DNA, 4437 bp, Homo sapiens
  misc_feature (1)...(4437): n = a,t,c or g
tttttttttttttttgaaacaaccacattttgctttattaggcgttccatggtaatataacacagagttcttaaggaataataaacacgagacttgttttttaccataattattttgccatcaagacagtggttacaaaaaaaaaagtactcttctggctacacactttatcagctttagaactgaaagttcctccactcatgggtcacaatcacaatttccaggattaaaaaccatctattcttaaatcctacactgttttagagcatcaagtcactgcagttattcagttctgagacactgtcgatttattttagcatttacatatgacattcatttaacagacacacaaagcaagccaacaggtaaacatgcttacacagcctgcagaaatcgtcaggttttaacttgttttttaagaaaacaaccaaaacaaccaaaaattaccatgacccggtacaggaaaaacaggaagactcaagtgaatactagagctgcaagtgtttcttagaattgaaacaaaaattgtttttttccaacttgttcaaatttcctctaagtgcaggtgagaaaaaaagcaaatatattaagtcaaccaattatttttttaaaagtgcaatttacctttaaaataacaaataaacaacaacaacaaaaaacccaaaaccccaaccagatccccaaaggcaaaatgtgtagagagacaagggtggtgatggaatgacctactttgtgatgtttttacgctttacaaaaagcagatttggtattcagaaaagcctgcaaatacaacattgcttaagagaacctgtaaacacgtttggaatacaatgcaacacaagtcagcaaggacaggggtaggtccaaaggagccagctagggggaaaggtgacagaaaaggagagggaaggatggagacagacatcgcctgtggtctctaagggggccatgtgtttaatttataaggtttcctccccacaggagttctgatgtgatctatcgttcataaaacacatttctcctcttgcaaagtagaatagactttaagtttcccaatgactttttgagtttatagggcctctttctatgtagtgtgtctttagaaataattggacaagaaaaaaatacggtttttccccgaaaataaaaagctcccatgtgttctagaatctcaaaagatacttaaccaggaagcagcaggccctcgggtcagactcctattagcttagcacttctgaactggtgactttggttggttcacttgggttaatgaggctcggtgtttaggtttgaccgtgactttagccagagagcactgcacagaggaaaatctctccggttctgcagcctcatacctctaaagcttctgggccctgtctgcggttccacgtgtgatactgtgggtgagacggcatggccccattcctgcacttggccagggtcccacactctagcacacatcctcatgatggcaggtggttagcaccagtcctacatggaccaggatgacacagcactatgcttgcaatggcaaacgctcaaatcctttaggcggacccaacgaccaccatgaaatgtagacctgggaggtgaaaagataatggggcaagggaggaaaacaccgtctccgagacaagggctggaggaaacacagagagagagagagacagacacgaaaatattcatgaattaaaaagctagagagagaaagagagagtgagagcacgcagaaaaatggtaaaagagaagagaatcctcaaaggatttaatctgcagcaaaatctaggccaataacgcaagcctgcccctttatcaacagctgaccctgaagactacagaatggcgatgcgggtgggcattgtggagcctctcaggacagacacgatgagtttgccaaccacccggaatcagctgggtgatgacgtaattgcatcattaggatgtccagttcaaaccccttgtattaatatggaattaaatgttccaatttagtatttaaaaaaaaaaaaaaaaagactctccctgaccccggcccctccccagccccacaaggaaaacttcttaaaatttttaaaaagaaaagaaaaaggcagctctgggcaattcactttatcttccctccccccatgaaaaggaagatgctaacagacactaggaggttgaaggcgaaggagaccctcgctgggggctgcttgttcgcatgtctaagtgttgggtgtggttccctgtatgagcttggtgggtagtcttgggtgtgatacccatagatgtgtagggaagtggatgagcaaaatcagtaactcttggtgagagacggggtgtggggccccaagggggaccccatgaactggctgctccacagtaactatcacaggcnnnnnnnnnnnnnnnnnnnnnnnnnnnnnnnnnnnnnnnnnnnngtctcagaatgtcctcaggtgtcccatccccagtccccagtggacggcacagcccaggagctctagcccaggctggtgatgttggcacggccaccggggggcgccacgatacgctgggtggtgcggcggggaatgttgtcatcaatctgagcaccagacaaactgaatccagactggtgcaggttccggacaggtggggcctgctgcttggcaggagacgtcttggccgaggaggctggagtgactgtcttgggcgtcacagacacttcacacacaggtccgtcatacaggccacgaggaacccctctcagctcagccagcctgctccttgccttgatacgcttgtaaacaaaatcagggaagggcttccggggaatgtagcgtccagagccttcggtgacatgcagggtgccgtcctccaggacaatcttcccctggctgatgaccaccagtggggagccgcggcactccatgccttcaaagatgttgtactcgagagagctgttgtgtgtcttggcagagatggttttaacgctgtcggggtcccagatgaccaggtcggcatcggatcccacagcaatgcggcctttccgggggtaaaggttgaagactttggctgcattggtgctggtcacagccacaaactggttctcatccatcttcccagtgaccacagccttgtcccagatgacggacatccgctcctcagtgccattggtgccctccggaatcagggtgaagttgtcctttcctacagccttctgggcagtgttaaacgtgcaatgggcactgcccgtgacctggaggtctccacaggacagcaaggagttgagaaagtctggagtggttggatcagggctcaagggtggggaggtgacaaaggcagcagccttggcccagttcttgctccagtaatgggagccgtccgttcccaagctggcagtgatgggctcgccatacaccacagttcccttcttccgtgcctgggcgatgacctcagcagagcttttgctcatcaccttggtgatatacagcgggcagttggtctggttggcgatggtgatggcacgattcacggcttcggcctcgacctcctcaggtcggctcagcacatgtccctcggggcccgtgatgcccagatccaggatcctctgctgctcctctgcaatgatgtcgccattttctgcgtggacttgggctatggcgccaatatcccggatcacactcagtacttcataaatctggcaatccgttagctggaagcgatctttgaaagccatgtacacgaggaaggaatttaccccgtgatccttcacaagcgcttccatctcctcctggatgcccttatgccactcgctgatgtccacatgcagagagtagtcacagcaggacttgctgtcggcccattccctccactggtcaaaggcagcgagcaggcttgtcccaggctcaggaacaacgtggtcaatgatcatagtggttcccccagccagggccgccttggttccttggaagaaatcatcagcagacgtcattccctgatcaggcatctggaaacgagtgtggacgtcaattcctccggggatcaccatccgggagtgggcctcgatggtcttcactcctcctggcacaatcagattttctcctatttgcttgatcaacccatcttccatgtatatgtctgcatagaacgactggtcatcattaacaattttacctcctttgatcagaagacgatcgctcgtgatgcgtggaatatttttcttcccctgataagacatctctctcctgggaaaaaattaatttcaagagggcagctttaaggcaaaaactgccgggaaggggacttgggttttttttgttttgttttgtttttttcctttgcaagattgaaaagggtgcaaccgcttcgctggtcttgctattaggaaatttcaagaacgtaacggatgaatgcaatcctctgtctctctttcttcctctcctccaacacagccccagctagggcggaaaaaaa

SEQ ID NO: 49114 - DNA, 660 bp, Homo sapiens; identical to SEQ ID NO: 9905

SEQ ID NO: 49115 - DNA, 1396 bp, Homo sapiens
tttttttttaagagtgtctacaaatttttattttgtttcataccaatttaaaaataaatacatattttattgatactaatacatattattagtttaataaatattctagttttacatattggttcacaaaagaattatataaacttcttaaaaataaaatctatactatagcttttattgaactgcaagagatgaattttaatatttaactatacatgtaaaatccgtaaaaacaatacaataatttaaaaattatagttccaacttcctgttttttgaaattattctgatgtttcttctacactcaagtcccaaccttctctacttctagaagttgaataagaaagacatggaagatacagcaggcaggcaacacaggttctaggggaaacctgatcaagcccttagcttctctagttctgttgatttctctacagggtagggatcactacagtcccatttaattaaaagaaactggatttaaaacacctgattctaaggacggtggtacactcttgagaaaagagttaaagcttttatttgtatgaaaggcaattactcagccctaaaagctcaacagacaattaagggcttaaattatacaatgttttcccatcttctccagatacaacctcaattacatagttttttagcttgagatattaattgaattcagcatgattgttgataaaatgccctttggttagaaaaggaggaggagagagaagggaggggaaggaaaaaaattctattaactaggagatgttgtacagatagaaatctacaatttcaaatatatccaacctgaatgaacactgaaataaaaagatttttaagatttacaagctccctagtactttagcaatttatcttatagattagtaacctacaggaatactagattctcattatttttttttgagtactgttttaaactttaagggttaactaagagttatcaacacaaactaatatttcatgcaaaagtatcacttttataataatctttttcttgtatgaaactaatttccttaaaaaatagctactatatactgaaaacagtattatgccaaatatttcccacatacacaagtttctaatacgtactacctacaagctacagaatagtcaaccatttaacaagaaggcagattatattctttcatttcaccaactgccatatcaaaagttacttatctttgaaggaaaatatttgctggcaataattttatctcattgacaactgatttatatctaaagtttagatgtcctatttatcaagcaatgaaggctctagagactaacaaagatttccatttaagatattattccgtattattgtctatttcatcttactacaagacaaattaataaatatgctataggactgtgctat

SEQ ID NO: 49116 - DNA, 2139 bp, Homo sapiens
ttgtaatgaatccactgacaatgatgaattagaagatgaacctgaagagccattttatagatactatgttgaagaagatgtcagcataaaaaaaagtggtaggaaaactctaaaacctcgaatgtcagtaagtgctgatgaaagaggtggtttagagaatatgaggccccctaacaacagcagtccagtacaagaggatgctgaaaatgcatcttgtgagctgtgtggacttacaataaccgaggaggacctgtcatctcattacttagccaaacacattgaaaatatctgtgcatgtgggtaaatgtggacaaatacttgtaaagggtaggcagcttcaggaacatgctcaacgatgtggcgagccccaagatctgacccatgaatgggttaggaaatactgaggagaaaatggacttggaagagaatcctgatgagcagtccgaaataagagatatgtttgttgaaatgctggatgattttagggacaatcattaccagataaacagtatccaaaaaaagcagttatttaaacattctgcctgcccttttcgatgtcctaattgtggccagcgttttgaaactgaaaatctagtggttgaacatatgtctagctgcttagatcaagatatgtttaagagtgccatcatggaagaaaatgaaagagatcacagaccgaaagcatttttgtaatctgtgtggaaaaggattttatcagcggtgtcacttaagagaacactatactgttcatactaaggaaaaacagtttgtttgtcaaacatgtggaaagcagtttttaagagagcgtcagttgcgactgcacaatgatatgcacaaaggcatggccaggtatgtctgttccatttgtgatcaaggaaacttcagaaaacatgaccatgtacggcatatgatttctcatttatctgctggtgagactatatgccaggtctgctttcagatattcccaaataatgaacagttggagcagcacatggatgttcatctgtatacatgtggaatatgtggagcaaaatttaatttgaggaaagatatgagatcacattataatgccaagcatttgaaaagaacctgagtgattttctactgtactaatgtttagatgatagcagataaaacaccaaagcaaaggatatgagctatttaggaattgattatataagatgatttgttagaaacaaatttcaaggcccttttaactttaatatttttgtttaggattttaagtatctacatttaggtattaaatgtttatcatttttgttgtttcttaatagaattatttgtttttagtttttcttagctatgattaaaatttttaaatgtagactacaagcggttgttacccattcaatgactattaaactttagtttttcatcaataaggtgatgacttcactatttctatgtgtttttttttttttaaggttaacccggtgaaattttaaacccagaatcattggccatttctgtttaaattttaaaaattccttaagtaattatttgaaactatcccgtttgcttttagtgagttaactactctttattcccccttattaatgaaattcatattcttaaattgacaagcttattaggcaagttaggtgcactgaatctaacctttaaggttgacatgggctcaaacttggcctaaaaagattgatgaacctgaggaaatttttataaatgaatatttcctataattgataaaatattatcatttaattatcacatttaaaacttatattaagtgtaaattccagtggctttacctcacttgaaaaattagtggggataagccattttgttttgtgatattaaatttaactatgatagttaattaaaaagacatatcttgtattcattaaaaatattttaatttaaaatattctgatttcctaaagtgtgttagcttatcaattatttttgtttataaatagactttaatagctctctaagaatatgacctctaaaggaaaagatgattttttacaatacatacttctggaactttgagatttgagaaagcttccatgtatattgataaatctaataaaataaagagatcaattataaacctggttgttctataaaagtagagtgcacaaaaaaaagtcgacg

SEQ ID NO: 49117 - DNA, 1087 bp, Homo sapiens
tacaaagcctttacaaatgcaaaaaaaaaaaaaaaaaatcaaagattacaagtcagtttcttcctgcatacagtaatagctgaaatgtaaagagatcaacttcagaaaaaatacactgaaaaacataccactttaataagacaaaactgcaaattaaatcaatagaaattaggtagatccatttattttttaaatacaagtataattttggaaggggtatttgacaaattcagcattaactgccaactctatagacatgttttaacaaaaagcaaaacaaaacaaaacaaaaaaacaaaacaaggcatttactcttggccctttcagtacaggcgaagtgttctattgcatcacaagtgctagtgatgcagtaacagatccaagggcataatattaaatatgtttttttccaactgcgatttagttgaaaaataacataatacaaacatatattaatggctatcaagaccagcagtgatctgcagaatacctagaggcctacctaattagaaggttgaaacttagtaaaaccgtattaaagtcagtgtttttattcttagattaacaatgacagagtgagatatctttgattacaattttataaggtgtggtggggaattgagaggagacagatattggggaagactggcagtgtgtgctgagttagagttgggaatgtggctcaaattagtcaatattgattaggatattgttttagaaaattttaaatgtgcccctaaattgtggcatattgaaaacgatattaaggaacaatgactcattagccctaaatacaatttaatgagtgccatcaatgggcttaagaaataagcagggatgggggatagagaggcaaaatgaggtgaaagagaaaatggaaagtggaaaatatgtttgaacattggagaatgtgaaaaggccaccaaactgctttagttatcactcagaagtgctcttcccattggctacctgcttctgatcacccaaacaccaattttagagcagaggagcagtaatcccctttatctgcaatttcactttctgtagtttgttacctgaggcaaccttggtccaaaaatattatgtg

SEQ ID NO: 49118 - DNA, 406 bp, Homo sapiens
ggctgagaagggtgatacggagaacggaaaggagaagggcggctgagaaggagaaggagcagcgcggcgtgaagcggcccatcgtgcccgcgctggtgccggagtcgctgcaagagcaaatccagagcaacttcatcattgtcatacatccaggttcaacaactttaaggattggtcgagccacagacactcttcctgccagcattcctcacgtcattgcccgaagacacaaacaacaagggcagcccctatacaaggacagttggctcctaagggagggactaaataaaccagaaagtaatgaacaaagacaaaatggccttaaaatggtggatcaagcaatatggtctaaaaagatgtccaatggtacaagacgcattcctgtgtcccctgaacaggcacgctc

SEQ ID NO: 49119 - DNA, 1233 bp, Homo sapiens
gcgctgcagccatgcagcccccgcccccgggcccgctgggcgactgcctgcgggactgggaggatctacagcaggacttccagaacatccaggagacccatcggctctaccgcctgaagctggaggagctgaccaaacttcagaacaattgcaccagctccatcacgcggcagaagaagcggctccaggagctggccctcgccctgaagaaatgcaaaccctccctcccagcagaggccgagggggccgcacaggagctggagaaccagatgaaagagcgccaaggcctcttctttgacatggaggcctatttgcctaagaagaatggattgtacctgagcctggttctggggaacgtcaacgtcacgctcctgagcaagcaggctaagtttgcctacaaggacgagtatgagaagttcaagctctacctcaccatcatcctcatcctcatctccttcacttgccgcttcctgctcaactccagggtgacagatgctgccttcaacttcctgctggtctggtactactgcaccctgaccatccgggagagcatcctcatcaacaacggctcccggatcaaaggctggtgggtgttccatcactacgtgtccactttcctgtcgggagtcatgctgacgtgggcccgacggtctcatgtaccagaaattccggaaccaattcctctccttttccatgtaccagagcttcgtgcagtttctccagtactactaccagagcggctgcctctaccgcctgcgggcgctgggcgagcggcacaccatggacctcactgtggagggcttccagtcctggatgtggcggggcctcaccttcctgctgccttttcttttctttggacacttctggcagctttttaacgcgctgacgttgttcaacctggcccaggaccctcagtgcaaggagtggcaggtgcttatgtgcggctttcccttcctcctccttttcctcggcaatttcttcaccaccctgagggttgtgcaccacaagtttcacagtcagcggcacgggagcaagaaggattgaggctgggccttcccctgccggcccagaggggcttctgtcctgtgtgttgtgggaggggatgggaggcgcccctcgagtgtgcgtgtatcagggggtctcttctattctcccttgggttttatgggcgctgtgggccctgaaggaagacctgggcccagtgccctcaataaagagaggcccagaggtggc

SEQ ID NO: 49120 - DNA, 662 bp, Homo sapiens
caccaggagagtctgcaggtttccttttaatcaaggctctactgaaggtgttttgtggggctaaaagcccccaaaacatgaaatggacatgtaacaccacctggatcccccatagcaggccagaccactctggcgagcactgctggtctgcccaaatctgggtaatcagactgggtattcattggctgcatttcaaagcacagcactgctttcagccaggatgaagtgggagtgaacccagctgctagcagagctgccactccaggctgagagccaagtaccagccactgccagtgaagactggcccctttactgaagggagttgttcagagtccagccaccggccctggggagggagagaagtcagggtattctgctcggggatggtcagggctccgcagctccatcgccagcatcctttggaaagccgcctctggcggagacagccggctgggggggcgctccaggtttggctgagacgttcccgccaccagccggctccgggcgccggcggcccagctgccgtaacgatctcctcgcaggctgcgatggtgtccagggagctgccgctgccgctgctccaccgcgtccagcagctgctgggcgcgctcctcccggggcggctgtgggggtgcctcccgccgagccccagccccgccttc

SEQ ID NO: 49121 - DNA, 1151 bp, Homo sapiens
atttagggggaccttgatagagaactttataaacttctttctctttaataaagacttgtcttacaccgtgctgccattaaaggcagctgttctagagtttcagtcacctaagtacacccacaaaacaatatgaatatggagatcttcctttacccctcaactttaatttgcccagttatacctcagtgttgtagcagtactgtgatacctggcacagtgctttgatcttacgatgccctctgtactgacctgaaggagacctaagagtcctttccctttttgagtttgaatcatagccttgatgtggtctcttgttttatgtccttgttcctaatgtaaaagtgcttaactgcttcttggttgtattgggtagcattgggataagattttaactgggtattcttgaattgcttttacaataaaccaattttataatctttaaattttatcaactttttacatttgtgttattttcagtcagggcttcttagatctacttatggttgatggagcacattgatttggagtttcagatcttccaaagcactatttgttgtaataacttttctaaatgtagtgcctttaaaggaaaaatgaacacagggaagtgactttgctacaaataatgttgctgtgttaagtattcatattaaatacatgccttctatatggaacatggcagaaagactgaaaaataacagtaattaattgtgtaattcagaattcataccaatcagtgttgaaactcaaacattgcaaaagtgggtggcaatattcagtgcttaacacttttctagcgttggtacatctgagaaatgagtgctcaggtggattttatcctcgcaagcatgttgttataagaattgtgggtgtgcctatcataacaattgttttctgtatcttgaaaaagtattctccacattttaaatgttttatattagagaattctttaatgcacacttgtcaaatatatatatatatatatgtagtactaatgttacctttttattttttgttttagatgtaagagcatgctcatatgttaggtacttacataaattgttacattattttttcttatgtaatacctttttgtttgtttatgtggttcaaatatattctttccttaaactctttaaaaaaaaaaaaaa

SEQ ID NO: 49122 - DNA, 3385 bp, Homo sapiens
agagcgcgaggggccgaggcctgggcttgctgagtattctaccttgtaaatactgttatttgtatatactgtaaatgatgacatcggtgggcactaaccgagcccggggaaactgggaacaacctcaaaaccaaaaccagacacagcacaagcagcggccacaggccactgcagaacaaattagacttgcacagatgatttcggaccataatgatgctgactttgaggagaaggtgaaacaattgattgatattacaggcaagaaccaggatgaatgtgtgattgctttgcatgactgcaatggagatgtcaacagagctatcaatgttcttctggaaggaaacccagacacgcattcctgggagatggtcgggaagaagaagggagtctcaggccagaaggatggtggccagacggaatccaatgaggaaggcaaagaaaatcgagaccgggacagagactatagtcggcgacgtggtgggccaccaagacgggggagaggtgccagccgtggacgagagtttcgaggtcaggaaaatggattggatggcaccaagagtggagggccttctggaagaggaacagaaagaggcagaaggggccgtggccgaggcagaggtggctctggtaggcgaggaggaaggttttctgctcaaggaatgggaacctttaacccagctgattatgcagagccagccaatactgatgataactatggcaatagcagcggcaatacgtggaacaacactggccactttgaaccagatgatgggacgagtgcatggaggactgcaacagaggagtgggggactgaagattggaatgaagatctttctgagaccaagatcttcactgcctctaatgtgtcttcagtgcctctgcctgcggagaatgtgacaatcactgctggtcagagaattgaccttgctgttctgctggggaagacaccatctacaatggagaatgattcatctaatctggatccgtctcaggctccttctctggcccagcctctgggtgttcagtaattcgaagcagactgccatatcacagcctgcttcagggaacacattttctcatcacagtatggtgagcatgttagggaaaggatttggtgatgtcggtgaagctaaaggcggcagtactacaggctcccagttcttggagcaattcaagactgcccaagccctggctcagttggcagctcagcattctcagtctggaagcaccaccacctcctcttgggacatgggctcgacgacacaatccccatcactggtgcagtatgatttgaagaacccaagtgattcagcagtgcacagcccctttacaaagcgccaggcttttaccccatcttcaaccatgatggaggtgttccttcaggagaagtcacctgcagtggctacctccacagctgcacctccacctccgtcttctcctctgccaagcaaatccacatcggctccacagatgtcgcctggatcttcagacaaccagtcctctagccctcagccggctcagcagaaactgaaacagcagaagaaaaaagcctccttgacttctaagattcctgctctggctgtggagatgcctggctcagcagatatctcagggctaaacctgcagtttggggcattgcagtttgggtcagagcctgtcctttctgattatgagtccacccccaccacgagcgcctcttcaagccaggctccaagtagcctgtataccagcacggccagtgaatcatcctctacaatttcatctaaccagagtcaggagtctggttatcagagcggcccaattcagtcgacaacctatacctcccaaaataatgctcagggccctctttatgaacagagatccacacagactcggcggtaccccagctccatctcttcatcaccccaaaaggacctgactcaggcaaagaatggcttcagttctgtgcaggccacgcagttacagaccacacaatctgttgaaggtgctacaggctctgcagtgaaatctgattcaccttccacttctagcatcccccctctcaatgaaacggtatctgcagcttccttactgacgacaaccaatcagcattcatcctccttgggtggcttgagccacagtgaggagattccaaatactaccaccacacaacacagcagcacgttatctacgcagcagaataccctttcatcatcaacatcttctgggcgcacttcgacatccactcttttgcacacaagtgtggagagtgaggcgaatctccattcttcctccagcactttttccaccacatccagcacagtctctgcacctcccccagtggtcagtgtctcctccagtctcaatagtggcagtagcctgggcctcagcctaggcagcaactccactgtcacagcctcgactcgaagctcagttgctacgacttcaggaaaagctcctcccaacctccctcctggggtcccgccgttgttgcctaatccgtatattatggctccagggctgttacatgcctacccgccacaagtatatggttatgatgacttgcagatgcttcagacaagatttccattggattactacagcatcccatttcccacacccactactccgctgactgggagggatggtagcctggccagcaacccttattctggtgacctcacaaagttcggccgtggggatgcctcctccccagcccccgggccacaaacctttgggcccaaccccaacagaaccagacgcagactcaccataccacgcagcagacattcctgaacccggcgctgcctcctggctacagttacaccagcctgccatactatacaggggtcccgggcctccccagcaccttccagtatgggcctgctgtgttccctgtggctcctacctcttccaagcagcatggtgtgaatgtcagtgtgaatgcatcggccacccctttccaacagccgagtggatatgggtctcatggatacaacactggaagaaaatatccacccccttacaagcatttctggacggctgagagctaatttggcccaaggctgggggctgtgttttgtgtgtgtgtataaatttgcactgaagtcttgtttcagaaaccagaccactgaggagagcctgctgagctgaggccatggcctgcgtggcttggggaaatgagttggtggataccttctgggcttttgaacttgcccctcccccatttccctctcccccatgtgtctgaccctgtcttacccatttcaagttcaagcggtgcagcaccttcgaagcatcaatgcacacacctgctgttgcttttgatttctggaaggcatgtagtttcaacttgtaacaaaaatatttgtagtcttcaataaactgtggtatttctttagctaac

SEQ ID NO: 49123 - DNA, 1571 bp, Homo sapiens
tttatcagctcatgataaaggtactcatgttgaggtcaatgtgaagattaaaaaggtcttaaaatctaccaaactgaagattttccgaggaaagcgaacattatatccagaatcatggacggacagaggatgcacttgtccaatcctcaatcctggtttggaataccttgtagcaggacatgaggatataagaacaggcaaactaattgtgaatatgaaaagctttgtccagcactggaaaccttctcttggaagaaaagtcatggatattttaaaaagagagtgcaagtagcattaagatggatagcacataatggcacttgtctatgtacaaaacacaaactttagagcaagaagacctcagacaggaaactggaattttttaaagtgccaaaacatatagaaatgtttgaatgcatgggtcttatctaacttatctcttctggacccatgtttaaatacagttttatttcatgaagagaaatgaaaacccctacactgatatctgttttctatgggactgattctgaaattcttaactattaagaatattttaatagcagcatgacatttagcagtaatccattaagggcagtacctctaacaaggacgccttccagcttcagcgatgttacttacgtttgatgctacttaaagtaatgaatgacgttttaaggaatccctaaccctactatcagaaaaggtgtttgttaaagagccttctcttgtgtgttacgcatgaactttggtctgtaggtgttaaatggaacctctccatgtgtatatagtatttccttgtataaagcactttactacctaccacttgtgttgtgaacgtttggtgactgctgttgaaagaaggaaaagggtgtgtgagaaagcctactgaagcagcagcactgccactacatgtggacaaaagtgaacatataaaagaagttgtgctatttaactctgaatacttggagaaactaggtgaagatgcaaccagaaaggagaatatgtatgcgtgaagtctcagctttgagctggaggctagattccaagatgacagccatgatgaaactttttaaaaaactaaaccagaagagactttaaaataagagaaagaaatcataaatgtagacatatgcttggctaaaggggaaatggactttaaattttaaagagctcatttgcaatgcacttgtatacacttcaaaaattattgtagacacagaatttgttatatttttgtgcttagtatttaaacctgaacattgaaacagttttcctccttgtctttcttaacagtaatagtcattatatttacctgttttttaacacaatgtatgtgatagtcaaaaaatcacagtttttcattattattcatcttctgtacccacgcataaccactatacatagtttcttttgtacttgaatatacaaaacatgaacacagtgccatatgaataatttcacatacagaacctttttttctctgaagtcctgtggacttgcaaatatatatatatattgctttgttaatttgtttttatatttcatatatgtaataaaggaatatgatctga

SEQ ID NO: 49124 - DNA, 2325 bp, Homo sapiens
cgtcgactttttttgctttgtaattagtatattaaggagacaatacatttcaagaattgcttaaattctgatacccagatttaagcatgtgaacatatgagacttttaaacatacaattaaagctattcatcataatttgctatactacccaacataactttggagcgaaagtcaaatggtttaaagtaatcctgtaacatacctaaagaacaccttcctatattacgcatgcaaattctccacgtaaaggtcttttcactttaatttctgttacccagctctgaagtcactacttgggcttatcatggtccacagacaaggaggggagcaaatgaccaggactggtcaagattatatatatatatgtatatatatatgaatggcacagcagaaggaaacacaattctggaagtgcaagccttcaagaagcagcatattatgataaacccctcctacagaaaggtatcatttttatcactgataccacaggataaattatatattacgccatcttcaagtaacagctgaggcaacagaataaatgcagaggcattacaatgaatcccacttaatataaagaactatacagaccaacacttctctacaaaatttttttttcctcattgccagttaaatacagagttttactttcatagcttaacaatgaagggtcatacactgaagccaatacatatacctagcatttcagtctaagcttgtccacgtacatagctgaagtcaattacaaggtttggcctagaaatgctaggggaacttctttgtagtttttacaggtattaaacttcatcttgcacactgaagtcatcatacatacagggcaaaatcagagcttttatatttgcgtttattcttcatttaactttttataacactactatagtttattaaaacaaaaacaagagcaagtagtgagcatattatgattacagtccttcactcattcactactgcacattaaatgccagcagtgagtgttattcactggcccattaagaggtctgacactgaacaccacctctgggatgatgttcatcatcctcatatgcttctccattgtagtggcgccgtctttcctgatttggatcaaagtccaccagttctacttggtccatctcatcagtctcttccacttccttcctctcgggtaggagtttttccagcaaagacagtttatcaggagagagaaagccattctcaggaaagtttaccttaaattcgatgattaggcgacccttttcatatggtctacgataaattggcatgccttcatttagtacacacttgatatctccatgcttgacaatctgacctggatgagaggtgatgacgatggttcggttgtcaagagtagatattggcttctggaagccacacagtgcttcaacgagctgtatgtccatacacatgaaaaggtcttctcctcgtcgagtaaaaacagcatggtccttctgatctaacacaatgataatatcgcctggctccagtcctggttcttggtctccttcaccatggaatgttatcttctggccatctttcatgcctttgtcaatatgaacttctaaaattttcttctctcgaactatcttccttccgttgcagcttttacatctatctttaggactgatccgctccccatggccctggcactccatgcacacagactgaatttgctgaaccattccaggtcctatctgatgaattcttatttgcattccagtacctcggcaattgggacagcactctactgctcctttcttacctcctctaccttcacatttgtcacaaatcacattccttttggcagagcccagttttcttgttgcaccattatataagtcttctagggttactgagagctgatgtacaacatttttacctctcctttctctctgcatccttcctcctcctccaaaaaacatatcaaagatgtccatgggggagccaaaaccgccacctgctccaccctctttaattgcctgttctcctcctttgtcatataattcccttttctttgcatcagagagaacttcgtaagcttgagaaatctgtttaaacttctctccttcatttgggttcttatcaggatggtacttcaaggccagtttcctataagcctttttcaattcttcctgagtagcattgggtttgacccccaaaacatcgtagtaagttgtttctttcaccatcttctactgccggtgcgggctgaggccggtgtgtgagggagcgggaaggagcgccgagctgtgcgcagccggggtagttaccgctcctccgcctctcaccgagcgttctggaaagtt

SEQ ID NO: 49125 - DNA, 991 bp, Homo sapiens
tttttttttttttttaaggaatgaagaacaaacaatttaatctctatattatcatattatcagtcaattaatacagttggactttcaaactataactgttggtagtaaaataatctgatcacatttcatacagcaattaaaaataacagaaacagagtctcacctatacaatcagagcatctcctgatatgaacaacagttaagcccacatacattttaaagatgctacccagactacaatctatctcaaaaggcaaccatggcataatgcattttataaaatgcctacctaaaaatacattgtattttgtaatgtttattaccaatgtgggaggcatttctagcctaaacactataaccaaactattcaacagtaagccggtagtagtcttacaataagaaatttcacatatacttgttattataaatagcattttatgttcattatttcagccatctctcaaactaagacaattttcaacaggttaccaggagacactggagctagagtccacagaccagatatctagttccagctctgccctctacctacctgtgagaacacggggaaagttctcttaaccttcgtaaggcctcagatttctcaaccatagaacaaaggggctgaacaaaatgaattctaaagagcattcccataaaacgggatttggctaaattttcaagaacttaatttctttaaaaaaagatagctatgagataccaaacttggtatttaccaccaataatattgattatataagagctttaagccaaggaattactgattctgcacttatggggtgaaaatataagactatttttagcatgcttttccagttaccagaaaaggggagagggggatttttacaaagacagtaaagcatacagcaatggcagtaaagcatgcagcatagcatgctagtaatggataggcattacttgtgtttccttttaggaagttttgcacacaagcaagaggttttataaaacg

SEQ ID NO: 49126 - DNA, 6240 bp, Homo sapiens
cattctctttaggaacaatgtgggttttttcctcagatttttatttttgcacattcttgtgacatttcccattgtagggaacaggagtttagcaaaatcagcttcttagatgatgtcattctaaatatacatcttaaacaaacaatatcaaaaccaccagtaggaaactgaaaaacactcagtgagtactgttttgtctcagtaacaataaatacaaaaagactggttgtgttccggccccatccaaccacgaagttgatttctcttgtgtgcagagtgactgattttaaaggacatggagcttgtcacaatgtcacaatgtcacagtgtgaagggcacactcactcccgcgtgattcacatttagcaaccaacaatagctcatgagtccatacttgtaaatacttttggcagaatacttcttgaaacttgcagatgataattaagatccaagatatttcccaaagtaaatagaagtgggtcataatattaattacctgttcacatcagcttccatttacaagtcatgagcccagacactgacatcaaactgagtcaacttagactcctcaccaccagtctgtcctgtcatcagacaggaggctgtcaccttgaccaaattctcaccagtcaatcatctatccaaaaaccattacctgttacagctaaaacaaaatcagcacatctctgtctgtattagaaacgacaaaaccttacaaagcagtcacctccataccagtctgacaatcactagttcatttggcagatggacaacaaaggtttaaacttgctattccaatcaactttctttccctatctgattcatggtgtttttaaaatagtatcttgaaagctgtgctgcatttctcctccacttatcaatgaagaaaacgtgctctccaagaaactacttgcggtagccactcccaggacctggggagacgtgcaccctgggggtctgagggcctccaggtgaatctgagagggaagaccctccagtgctgtcgttgtagcctggctgagggtggtgctagctcagactgttattccccagtgcgccacagtcagtgcgatgatgctgtgttactggaaatacagctgagacagcattatgtgaaagaagctagcctgaactaaaaaaaatgcgctgctagcgaaactctttttatatatgatgctacactttacagacagaaactttaaaacaatactgacgtgtaaaataaaatgaatccaatgaagcatgctcatcccagtatcttaaactcggtggtgcctatctacaggtccacactccgcggcccatgagcatgggggcctttctcgccccccaggcccgtcctgggtatctcggtgctgggctgcaggagagatatccagttccttccccaaaacatccttctatttaataaactgtttccctggacaaaacaccccaactgcaatgacttctgttcaaagtgcaaaaaaagcttccgtgaggtgggttcatggttgttattgtattcatctttcacccttgagctcagaaagacctgcatcccatgaatggagggttgggaaaggcatctttaagaggcacagtccactgtgtgcttccaattttcctgtacacagccagcttgccggtccagctgcagtctgagtatcggcattctcttcattgtcttcaaggtctacctcccaccagtgaaattaaatgtttgggtgctaagggataaggtgcagagaagcgcaagtctgcacagtctgataggaactggccactccagaaaagggcattcagactgtgtgctacttaatgacctagtgccaaaaaatgaaatggtactgtaagcgattcccaataatcatctaccctaccagtgccagggaacctgtgcaaatagaatgtgaaatatcacaacagactacagctgtcctcgccataaatactatattgtttaaagttctgtacatagaaagcaattcattcaagtcttaagatgaatttagctctatatggcaagtaattttttcctaaagatgaaatcatttagcaagaatttttttaacataaacagtctgcctatttcccatttctttttgaaaaggactttttagagtctaaattgtatttatttttcccctaaaatgttagtctgttatttcatattagcacatgcaagcaaaatttactcttaaatatattactttaatctggttaatgttttgacatctataattaattgtagtttcaaacagatgcaagccatgtctgtgaccaggtgcaaaacatagaaattcatctccagaagtggagagaagactccagggaaaaaagtgttttgtaaaagtcccaactcaaaaataaaattgcagtgccttttaaggcatgaattaactggaaacctttacggattaactataaaggaaattgaccatgccgggagtactctttaaaaaagtaaaaaaggggagattttcatagactccctcggcctcttaaaataagttaaggcctttggatgttggcacgtcgccaacaggctgccattaaaacaaaatgtttctgcttattaaaaccaatgcccatcattctcctcctcctcattgtctagatagaggagggcaactttcttttcatctgaaatcaccgacctttggtctaccattctctggagctgcaccttcttatcaaacatggcctgctccttgccctgttctctgtgggcctggtctccttccccagcagaggccttaaagctcacaccaactgcctggtcattcctactgtccgcgtctctccaggaaccacggtcagacacaccgagagctcccgcttcctgtgtccggctgcggatcgcctctacgttactcacatccatctgaaaggtaaacgaagtttctttgggccctggtgcaatgtgccttagcgttctgctgctgtctgctaacttgcctagctcaggggagtccgctgaaccagcaagcacaaatgttctggacacgggtccacggatggcaatgtgttcagaggtttccgtttctgtaggacctagtcgaatgtgcctaaaggatctgctaacacccgatgtcatttctgcccctgatgtgtcccctgcactatcctcctggggagattcagaaacgacactttggaaggtgctcttttcagtcataacggtttgtctacccgaggtatgactgtgagtggcctggtgcacatctgctgagccctctccgtgcacagtgctctctgagtcaccagattcccccagttggggaaccagcccatggtaaactatctgctgggtggtctgatgcctctgaggcccaatgctgatgtgcctgatggatgtgctgctccctggcaacccttccatgtgtacagaatctcctatgacacccaactccaccttgtctgaaagtggagctgtgaactggatttgcccactgaacccttctttagggcctaactggagttgcctgacagaagtctgggtacccactgactcttctgttgcaaaataatcaccaaccttccctgcagcagaaatggggccctgaaaaataatctccttttcagcatgaaattgtctgcagccaaatgtgctgtgcctccctgatccgtccatatctgcagaagactctgctgggccaggttctggcgagccccatgcctctggacaggcaggggcagggcctaggaagatgacttctctggacagtggactttgaccgggacccagcgtgacatgcctcacagaccggctggctccggtcgggctcgctgcctgacttaggtcacctcccgcacttacctccaccacttctgcagtgggtccttcatatgacattcgctcagtcctccagacttcagaggggccgagttttatgtgccttgcagcctggctcacatcctccagcacctgtgactgggcaaagcctgtggggctgctgacctccacagtggccgacactgggccctggggagtgcgctgtcccgagctgtgagaggccccaccagcaacctcgctctcgcctgaagggatgtacagctcccgggtggcccaacgcctgaagcgaatgccagcagccggggcctccgctccaccttcctcatctgggctgccaggcgctgggctgcgttgcctgctcaggctctcccgaaccaccgactccacagccttctccatctcactggcctcatctttgctcagctcctccaggtctaaccgatcggcatccacagtttgtgagacgttgacttcagcaaccagggtcacggaactgccaccagcaccctggaccttcttgacatccacggaaacgctccccggcccaccctgcccctctctggtgagggcggacagctcctccctcatgcgctcgggaagggtttcctccagctgcccgatgacctccaccagctgctgccggggctccttggaggagatgcccttcatggaggtgtggaattcgtggggtattttaatttctttttcaatgactgtgggttcggcatgaaattcaccgcttctagcttgttctttccagtgagtggaacccaggtccccctccagagagggcgctgggacatccaagggcttcacaaccttctcgcccactgcaccgtccttctgtgtcctccttcgagtcccctgcacgatttcatcctgccaagagtacctgatggtggattcctcctcgatgtggatctgcccgtacaccgagccgtcatctctgtcgtgccccccggggtgttcatctggagtggacacaaaataactctgctcgccctctgaatcacctgcctctgtcacttcttccacgtgagtcgtgttctcctggggctgcttggtccttcgatgctgattaactgagaatgtgacatcgctttctccataaccttcctcctccttaaccaacccccaggggcctggcgacacatcttcgacctcctccactttgaatgggacggaaaactcctccggcttctccccgctgacataactcacgggctcctccacgatctccacgttgacgacctttgctctcccctccctccctttcaggccgaggttgatgatgtctcctatcatctgctcggctgacttgcctttcagccccacttccttaatatccttgcttaaaaggtagtccaggccagcttcatcggaaacatcaacatcctcagtcagtttagactccacaactatttcagtctttgttttcctttccccaggaagctctttcctgtccacgtaagtgacttttgtgtctggaaaagaatcagcagatgcttctgtctctggagactgagtgaactgcttcaggatactggtaacgatgttttctgctacggtttctgtcatggaatcgccttgcagagaaccagtggcatcactggtgcccaacctgaaccgtagctctcttgcttctgcctctctaccggtcccaccaccagcatccttcacaggcgtctgcaaacctttcggggacacctctgctcttctgtcctgggatacttctagactaatcggcacctctctctctcgcacactcttctccttcggtgagtccttctccttagccttctccttcatctgctggctttctctctgtctcgcttccttatctaactttgtcaattcttcccatcttaggtttctctcctcagaagccttctctttagaatcgaacattttctcttctggctttgttcggatggtttctggtctgtttctttcttgctccctcgtggctttcacttctgttgtctttcccagaatgacggtcctctcatttgaccgtgtgctttccgaagcacctgctgccaccttgtctcggcgatcccggtacgactcgcgggcaattgtggaatcttcacctatgtaaacggggacctcccttgtatctccggcttttggtctgtcagggaatgttttcacttgagcctcagtatttcttaaaaggccataggttggagagaaagttctgacgttggtttgactgctgacggcttttccgtatgagttttcctgctgggtagtggccgaggaagaatatcccgagcccaagaagcctcttctggcatcacctccaatagatgtgcccgtctgagatccacggtgccctgacaggttagaatacagtgccgagctgtgattgaaacttgccaaaggtgctttctgccttgaaaatagattcctttcattttccctctgtagtagtgagtcggtatagtgataggatttgt

SEQ ID NO: 49127 - DNA, 1807 bp, Homo sapiens
  misc_feature (1)...(1807): n = a,t,c or g
ttttgcaaaancaaactgtcattttaccttaaaggaccatgcttaacgtcaaaaatggacacctgtacattcaataaaaagttaatttaaacatacatagtctagatcattctagagttatacaaacattctggggccacatatgtatctaattttctttcaaaaaaacttttttttttataaaagtgatgtattgagataattttaaaaagtatctgacaattatgaatggtccccagttttacaaaatgtgatttccaggatacgaaactgaaaaaaagtcaactcttcagagagtgttttatattgtacaaacaagttttgtagaaaaatgatccagcaaatgcttgagttaagaatatttatattttttccaattctttacacttttattaacacacttacaaaaaataacattcaaacactgagaaaattaaataactttggaagcagagctcattgttttctgcttacatataagtgacaattctgggctgttggcacaaaataatcaacattcataaaacccttactactatatatcaaacataagttaaaatcataggcactagtttatcaaatccacatttcttctgtaagactaaccacagtaaatccttagattttcccaaacagaaaaattgcaatatacaaaggctttctagtaaaaaggcaatttttctctttaagaaactaaaagtcaacagtctgtggtagtacaacagcaggtaaaataatactttaccaaactcagatcaaaaatatgttttaacaagtgatgaaatattttaataaaaaaaaatagacatttttttctgatgcagccatttaaaaacaaagttaaataacctgaatactccttttgaaactgattatctaacttaaaaaatgtaatatgtttcataataggtaaaattccttttaattattagattgcagcatatatattttttgaaatgttgcactgaaaactgagacttgttctgttttgtacgtggtttttaaaagagacagtagctacttctttcttttacttacttagacatgagatacccccctcccaaaagaagatgctttatcttcctctgaaaagcaacattttttagttcattatcatgtagaattctggcgccatcctttcctgacccaccccatcaccctcaaattcaaggataaagtttcttccttgcattatacaccaaatacatagtactggcagtttaaatctccagctgcttgtgctaaatgaatgactctccactggtcaagctgacagactaccatggtgtcagtcatgacagaatggaggtcctggttttaagtttttatcatcaacctatcaaccttaatgctgtccagaatatcaagccttcctatttctctctcccaatttcttttgccaacttacggaatgtctttgattaacaggaaatgaacttatgttcaaatctctaaaagcttttagatgacctaagtgacaatatcttagagctgttcaaattaagtatttaaaaacagacctcataataaaaaatgagaggcctgctacagaagcaagttttactctggtaaaagtctgataaaattgaaatagccgatttcaaggatatattaagagccattagagagcaagtatcaggttagagtcatacgtagtagggttttttttttaccaaaaatgcaaaaattgatgtaaggcagaatctaagtcaaaaggaaaagaattttcaatagatgttttatacagttactcagtttaaagtggatcaacttaagtaggatttagcaggctatattttcctaccac

SEQ ID NO: 49128 - DNA, 3444 bp, Homo sapiens
tggaagcagaggcagtgaagcctcttgggagatgacatatattcagaatgtaagcaccagacggggcaggggagacgaggatgaaaggagcagagcaagacagaggtcagaatgttctgttcacttgcaaaccatggctaaggtcaaacttgtagaaaataaaattccatgtaaatcccaaagatagggccccttggggtttcatccccttctctttctgtgagcccaagctcctctcttttccttgggaatggagcccggcagaggccacagaaggaagcaggaggccaaatgctcctctctcactggggctctgggttggaggttggtgagttgttcaagatggcaacagcagcttccagacactctctgacaacacgaaggccacgtcatatgaggtctcagcttcaagtacaggagttgcagcccactgtagggagcaggagctcccaggagtccacgcactcacatggggtaattgagcacaacatcctgtttggcaagttccagcaacataggatcatcgaagaatttgctgatgctcacatcttcactgaggcccttcctacggcgggttttgatcatgaattcccgggccaggtgaggagctggctgtggctccaaggggcggatgacaatgctcttgtccaggggatcaccaggcacaatctgccagtggtggaagacagacagagaaaaggcttgtccctgggtgtgagtccggagatcagtctcaaagccaaaagagtcgatggccgggataaaagctttgatggtgtacagaggggagcctgggatgggtgcatcctgagtcacgtgccccctgcgcctggccaggacggtataaactgcagagacgcaatctgcaggggcctggacctctacaaagtagtaaggctccatcagacgaggagtagccatgaggaaggcagagtagacgactctcctggctgtggggatgatctggcccccgccccggtgcaggggctcctgggcaaccaccgcatccaggatcttaaacttgacattccgaatcaattcatcacagagggggccctccctggttccccactggaaaccttgaacgatgctgtccttcactgaaccaagaagagccttgtccacctcagagggcagagtatcatccaccagaatgttggggccagtcgcatcagggccaaaagcccagatggaacgggcagccagcagatcccaatcgtacttggtctggaagaactctcccagcttcttcctgttccacgtaatctggaccacctcattctctatgtcctctgccaggcccttctcaagaggctcagcaatcatggtgatcttgttcttcttattaggcgtttcagcaaagcacttgagggaggatgtttccaccaccgtctcacaaaacgtgacaactgggtcagccaccttgatgtctatctctgagtacatcttccgcaaatcatgcatcacacagtccaggtagagctccccagtgcccaggatcacatgctcgccagactcctccaccttggtggtgagggatggatagctcttgttgaccttgcgcaggccatcaagcatcttgggcagctctgaggggttgactggctccacagcaatcttgataacagatgtggtattgaacttcaagggtcggaaaatctgagcctcctcattgcctcggggttcggttatggttgctgtcttcacaattggttgatcaacaccttcaatcagaacccagttgccagcaggaacacggttcacctcgatgtggtacctggccacagagatccaaaggcggcccacggtgcatatctgggagtcttcctcatcctccagggtgtagttctcccccagtaccttcacaggctgcccagcatgaatggtgccactcagcacccggccaaaggcgtgaaactggactccatcatctgtgctgtacatcttagtagtgtggcacatcagggggccatcagggtcacagtcactcatagcctcgccgaggtcggagtccacaccaccggtgtaggtgtgctcaatcttgggcttggcgcccacctttggagaagggatatgctgcacacacatgtccacaaagcctgtgaactcgccaaagaactttttgcagaccagcctgagcaaggggcggatgttcagcttcagctcctccttcgtcaggtggatgccaagctcgtctagggtccgtgggaggctggtgtccacgtcacctacaacctgggcgaggatcttataaagaggctccaagataaactccacgaaacttctctgggagctgctagttggggcctttttggtgaactttcgcgtcttagggttgaagtagatgtcaccccagagtcttttagcaaattcttggtaattaatgtcaccaaaggtgtcggcatagatcttggcaaaggagcccagcgtgaagcagatgctgtactgggagctggagaagcagacgttacccaggagtggggaaaggatcaggttctcatcagtggaatacatgcttattaatccattgacctcatccacaatgtggcgcagcttgtaataagcatcagttggaggcagcttcagctccaggatcagccggtcaatcttgttgatgcacacagtgactgccagcctctcctgcaccgcatgcttgatcagccgctctgtgttcagcatcaccccctcagcagcatcaatgaaaaggaccactccatctgagatgcgcaagccagctgtgacctcatcagagaaattcacatgtcctggagtgtccatgatattgaagagataagattttcctttggtgtctggcaagaccactgtcacaggagtgcttttgatgcctacacctctctcttgctctgtgaagaggatgtcagtatagcacagatcttggtcatagcgctttctgatttccgggtgagtctgttcaattaaacaatccacaaaacatgtcttgccatggtggagatgtccacaaagggtcacatttctgatgagctctgagttatccatcagatccgccaagaaatccatctcatacaccgtaacaggtaatgtctgctccatcagagtgaatttcttggttttcactggcttaataatgggttctgtgagaggctgagtgtcttcctcttgaactatggtctccacctcaggaccatacacctcctcggctgttgggtagtacttcttgtcctcatgcagcaccacctccatcccagggtggtcatcgtcatgatctcctacgtcatcgtcgtcgtcatcatcatccatctcatcaagatctttggtctctctacccaattcatcatcatcttcatcagaatcaagctctggtccaatataattcccaaactcatcatataagtcggtatccatgatgctctcgcctgctcagctaagagttcccaggccgctgccggagatcgtgcttccgcc

SEQ ID NO: 49129 - DNA, 1078 bp, Homo sapiens; identical to SEQ ID NO: 9977

SEQ ID NO: 49130 - DNA, 1299 bp, Homo sapiens
agtggtgctttttaaatttatttttaactgtttctcatatgtagcaacccctcctcccctcctgggcatgtttacacaggctctgctctgggggctggcctggctgtgaggtttctggggaggcagagaggcagggactttggggccttagtcaccatccatggtatcacctcatctcacttcctgtgagggacagggcctggctgatgtgatcccagctccccccagttcaggactgtctttcagctcctttgcccctggaggtgggggctgctggctgaggaggggtcaaggtgagttcaagaaagctacctgtggaaaatggaccaggttgggggggtgattgcaaagtctccccaaagcctggctcctcatgctcagttgccaggggcagaacactggggagccaggtatagagagccttcctgtcataactgccagtcctcttcctccaaggcctctgcatattctcatgttcccctcacccatcatgccagccacccctatccctcttctagcagggccaagatggggacagcagcagccctctggccttgggatgtgatgataaagcaagcctagggcagggtttggggagcagagagagccaagaagttgaccacgtgtgatttccagcccttcccactgggacttgactttcccaggtcaaggagtccgtctcattctggctggtcgagtgaccagaggcctgtgtgaatgtgtgcacctgcttttcctgcctggaatgttttctggctcagctgcagcaacatctgtgagcccagtgtctgccctgtgtccctgggctcgctccaagtgcaggaacatacatgcagggcccaacatgatgatggtgtgaagggcaggaaacagtcctctgaaggagtggggaggtgggcagtctgcccccgccaggtaccatcgcctcctgccagcttccttagaccaggcagggctgccatggtgctagctgcaagtccatcagtattgaccgtctcgctccatcttggtcctccggagtcccaagtttccttttcatcaaatctgacaagagagaagaaacatgggtgtggcttggcccacagggcctggtggtgatggacctccccgctccctcaagctctggatggctgcagtgttgtactagactttgttcaggctgttctcatctcagtattgccccttcctttcactttcacacttcatctcattcctgttgtcactttccccgaaacgaataaagtctccccagctcctgctgtgtaggctgggcagaaaccacaacaaaaaaaaaaaaaa

SEQ ID NO: 49131 - DNA, 2026 bp, Homo sapiens
aacgggaatagttttcaacgtctatttcattccctgcttcagaggacctctttaatctttgattttggtccctgtttctaagaaaagcaactgaaaaggtcgtaataccgcccctgagaaaaaaggagcagcgctaaataatcgagaaaatgcctcctcttgaaacggatatagagatggaaacaagatataagaaggattgagaatcatataatacaggagcttaaacacctatgcgcgatgataaagagggtactattagagcgcttggaaaataccaggaagttgagagagttaacagaagggcgcacgctggattggccacaaaatcgaattactgaagtaagtgcaaaaccgacaaattgtcacagaatacagagaaaaggggaaaagaaattaagaggagaaaaagagagatctagagggccggtccaggagatacaatctatgcataataggaatacctgaaactgaggacagagcaagtggagctgaaacaataaaggatctacttgaaaaaattttccagaattgaagaacgaactagatctacaaatggaaaaggctcataggatacctttaaagtttaatgaaaagaaagcagcatctagacatatccgggtgacgtttttgaatttcaaagacgaaacattttacaagcatccagtcagagaaagcaggttacttacaaaggggcaaaagtcaggctgacctcagatttttctcctgcaattctaaatgccagaagacagtggaacaatatctagagtgttaagggaaaataattttgagccaagaattatatactctgccaagttatcatttctttacaaaggaaacctggaagacattcttagatatacaggggttaggaaagtatatcaaccaagaactttccctgaaaattttgctgaaggatttacctgcagctaacagagaacctgaattaaaataagaatagggaggcaattgtatgaaagaacctgatggtatgcattaaaactagttaaggagcattaagtttaaattgttatgtatagggcattaaaactaaatacaaaaatagaaacataagctgggtgtaaaatttcagtttacgtttaaactggaagggcataccacatgttcaatatattggacaaatactgttttatttttagcatgtagtattgtagatacaaatacgcatgttcttaagctaaacctaagtaaaagggctttgtcactgtagatttgacaaataacattctaaatgtcaaatctgacaattggaaaacagtacagttttatttcccttatttttaagtatagcaggaaaaaaataacaagtttgtccatgttactactgatactgtaaagaaacttccaaatcactggtttgggagggggtggatacatcctcattttctgtacatgatgcatggggaaaaacagtagttactgcatcatatagttccaagtaaatcatatagttccaagtaaatttgacatggaaataagtgttaactacaaaaatagaatatatacattccaatgtttggaaaagaagtggtaaaaagaaaaatagcaaaaagacactaaaattagcaaaaagtagattgacagtacagatgacctataaactggttaaatagccctattacaattgaaattgggtcaaaaatcaatctctaacctgagatacatttgtataaaacaaatgatcaaagagtttaaagataatggaaactataaatcatagaaatggcaacatttttcttaaaatctaaacataagacattttatgtaaaacatacaatataggatgtaacatttaacaaactatatggtaaataatatgacattaatatataaaatatatgttccagatcttgatgtgggtgatagttttacttatgtacatcgatatacatctatttaaaaacatgtacatttaaattgttgcattttatgtatttaaaatttattgagtaatccttctgtatgtattattaaagagaatatagcaaaaaaaaaaaagtcgacg

SEQ ID NO: 49132 - DNA, 2616 bp, Homo sapiens
gcacgagcggctccgggaggctcgcagaaggggagggccgggcggcgcgggactgagcatcgccagggcgggcggcagggcgcggcctctccgccgggtgtaccacctgtcgcggcgcgagacctctggtgaaagaaaagatgttgtcccggttaagagtagtttccaccacttgtactttggcatgtcgacatttgcacataaaagaaaaaggcaagccacttatgctgaacccaagaacaaacaagggaatggcatttactttacaagaacgacaaatgcttggtcttcaaggacttctacctcccaaaatagagacacaagatattcaagccttacgatttcatagaaacttgaagaaaatgactagccctttggaaaaatatatctacataatgggaatacaagaaagaaatgagaaattgttttatagaatactgcaagatgacattgagagtttaatgccaattgtatatacaccgacggttggtcttgcctgctcccagtatggacacatctttagaagacctaagggattatttatttcgatctcagacagaggtcatgttagatcaattgtggataactggccagaaaatcatgttaaggctgttgtagtgactgatggagagagaattctgggtcttggagatctgggtgtctatggaatgggaattccagtaggaaaactttgtttgtatacagcttgtgcaggaatacggcctgatagatgcctgccagtgtgtattgatgtgggaactgataatatcgcactcttaaaagacccattttacatgggcttgtaccagaaacgagatcgcacacaacagtatgatgacctgattgatgagtttatgaaagctattactgacagatatggccggaacacactcattcagttcgaagactttggaaatcataatgcattcaggttcttgaggaaagtaccgagaaaaatattgtactttcaatgatgatattcaagggacagctgcagtagctctagccaggtcttcttgcagcacaaaaagttattagtaaaccaatctccgaacacaaaatcttattccttggagcaggagaggctgctcttggaattgcaaatcttatagttatgtctatggtagaaaatggcctgtcagaacaagaggcacaaaagaaaatctggatgtttgacaagtatggtttattagttaagggacggaaagcaaaaatagatagttatcaggaaccatttactcactcagccccagagagcatacctgatacttttgaagatgcagtgaatatactgaagccttcaactataattggagttgcaggtgctggccgtcttttcactcctgatgtaatcagagccatggcctctatcaatgaaaggcctgtaatatttgcattaagtaatcctacagcacaggcagagtgcacggctgaagaagcatatacacttacagagggcaggtgtttgtttgccagtggcagtccatttgggccagtgaaacttacagatgggcgagtctttacaccaggtcaaggaaacaatgtttatatttttccaggtgtggctttagctgttattctctgtaacacccggcatattagtgacagtgttttcctagaagctgcaaaggccctgacaagccaattgacagatgaagagctagcccaagggagactttacccaccgcttgctaatattcaggaagtttctattaacattgctattaaagttacagaatacctatatgctaataaaatggctttccgatacccagaacctgaagacaaggccaaatatgttaaagaaagaacatggcggagtgaatatgattccctgctgccagatgtgtatgaatggccagaatctgcatcaagccctcctgtgataacagaatagaagcactcccctgataaatactttctgtgctccagggaaccccttttttcagacaagaagagataatgtcttcagttttatggtgttttctgtgttttgttctccctgaccactttggttgatgtattttttccatgcgtctccacatctgttggggtagacgtgttgattgattgcattgcccaccagcaccctacaatcagatagttgtgatgctttaattctaacatacagcccgtaccacatccaggagatgtaaaaagtgtgtttgtgaatgtcttcacttgtactctaattcagacttgccaaagtatttgctatttactattatgggtaatactcttctctggcctagttcttacagagctactaaaatagaaatttacttttatggatagaagtacagaattttgagaagaaactaaattttcaccaaattttaaggaaaaattgtcattatctaaaaatgttcttatatatctgcttcatcttaccttcatactctgaaattccctatagcagacagagtctagggaaatattaaaaatttaccctatttattttctggaactaaatcaagccttaactataacattatgagagtaatgggaactactgctggctttaagtaaataaaagtcattgttttcaacagtgtataaaaatcatagtgtaacctttttatttaataaatatcttacatttaaaaaaaaaaaaaa

SEQ ID NO: 49133 - DNA, 1768 bp, Homo sapiens
tttttttttttacattgggaatatatttatgcaaattttattgaaatttattgtaaataaagattttctcagtggtctaggaaaatcagcttgaatgtcattcagcatttattgaagaaggatgacatcccttccacttattgcacaaacttggtagctttgagacaaatacagtagcacagtccgtttgaagatttgtccaaaaaattagtccatattttagtggctcagtgtcaagagttccctccctgtgcccccactgttgcttctgcagtgatacgaaggatgaatgcttaatttcttattagtcagaaaacttgaatgcaacagttgggcattcaaaaataatccagagaggtcataacctacttagccatttgagtgtggctctggtgtctgctaaaaaaagtagctattgaaaaatcagaacagtgagagctatgatgtggttcactcattctagaagcattttcattttcctcccgaaaacccccccagtgcctcaccgagccccggaccttcacccaacacggctgccacgctcaaatgggcctgattcaaactcccaggtacgtccctggcaccagggagtaggataagaaaacctccagaagtgaaactgatgaggaagtgacatttaatcacttcaaaaccgaaacttcactggcaagggtcaaaaccccaggccaaggctgacaatcgagcgctggtcagttccaggggtcaggctcggaacctgaaaatgcagatcctagctgttgctgcgtccctcaggtgtggaggaaggaaaaacagcctaggtgtatgtgctggctgtggtgagagtcgaggtagaaagcctggaagttctgaaacgtgaggggatggatcacacgccccagccttttctcactcaccaaagcaaacttttacccccttcttccagtcggcacctttggaacttgttctccctcctaggcctggtttcagtggcccccaccacgtgtcctgcccacgccagcctgcagggcttctgctgacatcacgcctaccccaccaccacctcttctgaacttgccacaccatcagtagccagaggtgttgcctctcctgcttcctaaggtctcccaagagcccagctgaggtgtttcattaccaccttctgctcaggtggcccagccgggctgtccctcttccaccccaagctcctacttaatgtttaaacccccaatttaggtgtatgctgcttaaacgaacagctccctacttctcccgcctcggggttccagaacgtggattcattcaacatggtttttagaagaggcttgggtgaggccagaggaggtgcctttagtctgagcaggaggccagagctctgagctcagcccatgaagggccagtgctctgtggttaagccggggctgaccttccatctattacagggatgggcaggcacgagtcacatttgaatcataaataaaattagtatgtgcttgtggtgggattaaaaatcaaagtgagctcactgaaatgtacataggggaggccttggagacaggctgtggagacactagctcaccagagagccaccagctcaccacctgtgggagagtcaagtcctgaacttcaagttcacctctgccctgccccggctccctgccgcaagcacaggctggcaggaagcagtctggtggctcttaggggaatgtgcacgtgagaaatgttccctgggtcctaagtgcctttagagctgggtcagggactgagacccgctgagaaagtgaagtca

SEQ ID NO: 49134 - DNA, 700 bp, Homo sapiens
ggccatccataacatctttcgtatgacagaatcgcatttattagtcacttgtgactgtttaaagttaattgatccacagacacaagttacaaggctcacgtttccattaccttgtgtagttttgtatgctacacaccaggaaaataagcgcctttttggatttgttcttcggacatcaagcgggagaagtgaaagtaatctgtcatcagtctgctatatatttgagtcaaacaatgagggggaaaagatatgtgattctgttggactggcaaaacagatagctttgcatgctgaactggatcgtagggcatcagaaaaacaaaaagaaatagagagagtaaaagagaagcaacagaaagaactcaataaacaaaaacagattgaaaaggacttggaagaacaaagtcggttgatagctgcttccagtagaccaaaccaagccagtagtgaggggcagtttgttgtccttagcagtagccagtcagaagagagtgatttgggagaaggaggaaagaagagagaatcagaagcataagcttatacttttggtagatattcccccttggaatttgacagtttctatggtgaaatggcagaaggtaacaactatgttgaaatatcaaggaggagattaagctttatatttgcttatttgttgtagctacattttaaaaaaaagattgaacttgatgaaaaaaaa

SEQ ID NO: 49135 - DNA, 405 bp, Homo sapiens
  misc_feature (1)...(405): n = a,t,c or g
naatacgactcactatagggaatttggccctcgaggccaagaattcggcacgagccaatactctacaatctctttcagaaaatagaagcagagggaatacttcctaactcattctatgaggctagtgtcaccctcctaccaaaaccagacaaagatattaccagaaaactacatactaatttattttattaacataaaacatcctcaacaaagtattatcaaatcaaatccaactatatattaaaagaataacatattaagtaggatttatctatcccaggtatgcaagattggcttaacattttaaaaatcaattaatatatttaatttatatcatatcagtaggctaaagaaaaatcacattatcatattaacacatgaagaaaaaatatttgacaaaattca

SEQ ID NO: 49136 - DNA, 1412 bp, Homo sapiens
tttttttttttttcaatgtacaaacaaatttatttacaaaaattacaattacaaactgtacaaattgagacaatttcccatgcctccaacagaagccaagagcctttactgtcaaatggcagtttttgttacttttaaatgacacacaaaaagaaatatgatgcctattcagtcatccactgccagtttaaaaatgcttttctaaataattccaagaagcctattagtgatatgtatatggataatttccctcaactctatttctagaatggctatgtacaaatccagcaaaactggaacagaacagggtaagaaagcacatagcaactgctttttcaacagtaaattttgactattcccctaaatatctacctagtggcttaaaactaaaactatggtctttggctttaaaaagaaagtcaaaaaattttgacttttaatgactgcacaattctaccaaagccagtgtttacctgggtattttttgtcacctgtagtttacatttccctgctactgttaaagaaacagaattctacagtattcaattctgtatattgtcttttaaggtttttcaatcagactcactactactgcttgaggagtccgttgacataatctctacatcatcttcattttctttattatgcccagggaggttcccaacataaagtcaactactatgaatttggtggtaacatattcatcgaacatgtcatttgactgcccatggatactgtggagcaaggacatctggcaatcttcctgctgcaagtgcatctccctggtaaatggccattcacgccattagtggaaggattgttcatctgacccagtaacccacttctcatctctaaatcagttgggtagggtcctcccgggggtcccctggaaccccagggtcagtggagcacatacagcattacttgcactgatcctatgtgcatacttaattatttcttcagaggagatagcaccttttcttgctttttctattgacttgagtttctccttcgcttggtaaacagctgttgccagtatttgttctgcttcctttagctgtttttgtagctgctgaatatcactgtctctcttctctacttctttttctaaaacttgcatttcatgatgaatttttccctgattaagtgccaatttcattagttcttgaaattccccatctcggtgaattaacaactccaggacctggttttcctctccagcctgtaacaacttttggtttcttgaaattgccagcatttctataagttccctagacaggacctccaagtcctcaagcgcagacagcagccgctctcgtgtgctgttaccacccgccactcccaaaccgcctcccagccgctccttctccttctcaccactcgaagacgcagccattttccccagagtcccg

SEQ ID NO: 49137 - DNA, 1849 bp, Homo sapiens
gctgaactctcacacttgaccaagaatgttccaatatttgtttgcactatggcctaccccactgtgccttgccctctccatgtatttgagccaagatacagattgatgattcgaagaagtatacagactggaaccaaacagtttggcatgtgtgtcagtgatacacaaaatagttttgcagattatggttgtatgttacaaattagaaacgtgcatttcttaccggacggaaggtctgtggttgatacagttggaggaaagcggtttagggttttaaaaagaggaatgaaagatggatattgcactgcccgacattgaatatctggaagatgttaaggttgagaatgaagatgagattaagaatctcagagagcttcatgatttggtttactctcaagcctgcagctggtttcagaatttaagagacagatttcgaagccaaattcttcagcatttcggatcaatgcccgagaggagggaaaaccttcaggcagcccctaatggacctgcatggtgttggtggcttcttgcagttctccctgtagacccacgataccagctgtcggttttgtcaatgaagtctttgaaagaacggttgaccaagatacagcatatactgacctatttttctagagaccaatctaagtaactaactctttggatctccctttaaagtgaccctaatctggctgcattgatggccagattgtctgctgcctttgcacatctagtgctggtttcagaaatttaatgaaacttttctttttccttcgacctcctgaatcatgtggttctgcaaatgaataccttcaactagggatttaggaccactaagaacttggcacaggaaaaacacggcattggaatgtgtgttcggaacctctacattgtggaagttggcacttatggtaccatactctaaaatgaaataagaactctttatgtctgtgagagagtgtgtgtgtgtgtgtgcgtgcgtgtgtgcttgtgggggttgggtagtgtgtgtgtattttctctggctttaaaattttaaaacaaacaaacaaaaaagccatagagagcagaacttgccgagggtcatttattgcccaagtttacaagagtagcgatacaagtttttgcaaattgaatttgcctcagatatatctgtcctaatgcttatatttgcacaagtatgtaaaatatcgtgttgaggatcattctttgttggaaatactgctcttgctgaactgtcttgaccattgactatgacacagtttcttatttatgtaaatacttgcatcacagtggccgacacgattggatgcagaacctagagccagttttcaggaacaattgtaaacctgacatggtactgtgcatctattcataaaacactcaaaactgtgaaaatatggtttacatttaattgtacataaaggtaaagggagaactcaattcagtaccagttagtttgtacattttagggggcttttcacattaactgcccatttgtgtaatttatagtttgacatgatgtgtttgttttaaaaaaaaatgcatagtataaacccattaaggatctgggaaaagagaagaagtttaatatagaactaagcttttaaagtttgtttttgtttttaattctggtctcggtgcaaatgttagttatgccttattcatatcacagttagatcaccatgctgcaacatggtttatattcatgctgccctagaaacttttgtaattatttgttgcaaatttgtgactgtccttattaactttcttttatgtaagtaatttgtaaaagtttcttaaaatttttgcttttgcttatttaattttgaataaaagctaaattcctaat

SEQ ID NO: 49138 - DNA, 958 bp, Homo sapiens
gggaaatattcttactgtgagggagaaaaatcagaagataaactataaagaaagactttatttgcaaatatacccatttactttaaactgtataatggttagttttctaacatgtgcattaaaaacaaaacaagaaacaactaagattcaaatttgttttttttttaactaaaattattttttaaatgaatagatgtgtttaaaaaataagcttacttattgctagactggcaaaatcccctactccatttactgaggtacttaaaaataactagcatgctgtatctctttttttcccagctttgtcttgaattggcattgccatccttgttttatctcaactggctgtagcttttagataatatcataaggattaaccagtaacctcttaacattcattactgttttctagggggaaaatatttggtatttggtttttctgttgcagcaaataaaacctcaggtgtaccaggaaatcgtcctggaagtgtaatccgtgtatatggtgatgaaaacagtgataaagtgactccagggacatttataccctattgttcaatgggcacatgcacagctttgcttccatgggcacccgggatgctgtgaaattctttgtggcagtcccaggtcaagtcatcagcccacaaagtagcagtagtggcacggatctgacgggtgacaaaggcaggggccatctgcacaggagcctggtagtcagacgcccttgaagtctatgcttgtcatcagtggaggagagggctacatcgacttccgaatgggtgatgaaggtggagaatcagaacttcttggagaggatcttccacttgaaccttctgtcaccaaagcagaaaggagtcacttgatagtgtggcaagtgatgtatgggcaatgagtgagcccatgggaaacaggttggaagatgggggaagccgtctcttctgcatggtttaattttccc

SEQ ID NO: 49139 - DNA, 1249 bp, Homo sapiens
gtgctgctggcctggggttgtggttgaggccgggtctccgctcctgtgcccgggaagatggtgctaggtggttgcccggttagttacttacttctgtgcggccaggcggcttttgctgctggggaatttacttctgctgcattgtgtgtctcggagccactcgcaaaatgcgaccgctgagcctgagctcacatccgctggcgccgcccagccggagggccccgggggtgctgcgagctgggaatatggcgacccccactctccggtcatcctctggctcttacctacctgatgaatttataagaatgtggaagacccagtgggatcatgtttggaaatggcaactgcatcccagggaacttggttatggttgtctcaaagttcggcggtcaggccttacagcgacgtggaacacactttcagttccagttgccatgcctttagatggaattgagtgtgccagtcctaggaccttttttacgagaaaataaaccttgtataaagtataaccggacactacttcataaccactttactctactccttcttcctgggatgttttggtgtggatcgattctgtttgggacacactggcactgcagtagggaagctgttgacgcttggaggacttgggatttggtggtttgttgaccttattttgctaattactggagggctgatgccaagtgatggcagcaactggtgcactgtttactaaaaagagctgccatcatggcccagggaggcgggtgaaagctccgtcttctgaattcatctctacaggctcaaaactcctctttgatatcagacctgatgttattttccttcttttggagggcatttgtttggttaagaaggcttctttggactttggaatttcaacccagattttaccttgcagacggaatgacaagcaaaaagtgttgtggggaatcaaatttgttcctttcctcatgcacaaaacataaaggatagtggcgagtttacaagctgtggatgggtttccatagtcttcctttctgtacattgctatatcttcagtcctttggagcaagtggacctaacaagttgagcaaaatgaatatttggatccatgttcctcttgtgaccctgagtcttcatgcaaggagatctgaagctgaacaatgaaaatcttcagcagaaatagaaatggccgtggattgtaatacacactgaaattctgactttctgaatttaaatgtagaataaattttaccaacttggaaaa

SEQ ID NO: 49140 - DNA, 1613 bp, Homo sapiens
gattttaccgagccgcccatctctgctcagcttttggcttttctccgagtattctgtatgactgaagaagaactgaaagaacacttgctgggagacagcgctattgatagaatcttcaccttggggaactcggaatttcctgttagctgggacaacgaggtcaaactttggacatttcttgaagatagagcctcacttcttttaaaaacatataaaacaactattgaggaagataaatccgtcttgaaaaaccacgatctttctgttcgtgcaaaaatggccatcaaattgcgcttaggtgagaaagagattttggaaaaagcagtaaagagtgcagctgtcaaccgggaatactatcgccaacagatggaggaaaaggctccgcttcccaaatatgaagagagtaaccttgggctgttggagagcagcgtgggggactcgaggctccccctggtcttgagaaacctcgaggaggaggctggagtgcaggatgccttgaacatcagagaggcaatcagcaaagcaaaggccacagaaaacgggcttgtaaacggtgaaaactctatccctaatgggaccaggtccgaaaatgaaagtctcaatcaagaaagtaaaagagcagttgaagacgccaaaggatcttcttcagacagcactgctggagttaaggagtagctcgaggtgaagctggatgggggatccagtggagcaggagttgacggacagtccgttcacatcgctgtgtttccttgttaacatttttctttctgcagagaggaagatatgtttttgctgctttatataaaaatggtttttttaagttattttaaaaatctagcttccctttttgattaagattgccatcttgcttttaggcaaaacaaaccaattaacaaacaaccacaagaaagggagaagaggtgcctgtgggagattttgcagacctattgtgggtataggtatttttcttccctgggggaaagaattcagttcccgtctcagctgtacttttgtgggcctggtcattcttggatgccccggaatgaaaagcttgctctgcctcctgccagccagaattggtggcgggacttggggatacagcgtgaaggtggggaagttgcacagcagaaaacagaattgaagttgggaaactctagagtctgggcaaaatgtttggttttttctcttaaaaaaaataacaccccattaccaaaagaaaaggtaaggtggcaaccttatttttaatagtttgaaatgatggataatcctaattatataaaaatatatatataaacacacatatatatagtgatttctaaagatttgtttacttttgtgttttgttttactgtactaagaacttgtcctttctccttgaatcaaagtaggacatgcatcatcctcctaattttaaatgttggctctgattttaaagtggtgcatttgattccagccttggtaatggagagtttgcaaacacacagcggcccacagcttcacgtggtggtgtgcagtgtgaggcagctccttggctttcctggttttcacaacaagctagagattttcaaagctacacttttgagtaaaaacccttattaaaagaaaaacatgat

SEQ ID NO: 49141 - DNA, 670 bp, Homo sapiens
gaggagatgtatttattccacatttggggccagagatggtatcagaaggaatttgcccaggaaatgacctttaatatcagtagcagcagccgagatcccgaggtgtgcttggacctacgtccgggtaccaactacaatgtcagtctccgggctctgtcttcggaacttcctgtggtcatctccctgacaacccagataacagagcctcccctcccggaagtagaattttttacggtgcacagaggacctctaccacgcctcagactgaggaaagccaaggagaaaaatggaccaatcagttcatatcaggtgttagtgcttcccctggccctccaaagcacattttcttgtgattctgaaggcgcttcctccttctttagcaacgcctctgatgctgatggatacgtggctgcagaactactggccaaagatgttccagatgatgccatggagatacctataggagacaggctgtactatggggaatattataatgcacccttgaaaagagggagtgattactgcattatattacgaatcacaagtgaatggaataaggtgagaagacactcctgtgcagtttgggctcaggtgaaagattcgtcactcatgctgctgcagatggcgggtgttggactgggttccctgggctgttgtgatcattcttcac

SEQ ID NO: 49142 - DNA, 1891 bp, Homo sapiens
ttctctttatctttttcttttttactttaaaaatggttttattgaatattaatcatttacaagtacagtgagctagacattaagccaaagcacaattgcaggttaaatataatcacaaagatgtcttaaatagaaacccaccaggcaggcaggttaagttccttgatcgccctcctttggaaagaagtggagggtgagggaaaaaggacttccatttcaggtgacgagatgatgactagagggactttaacatgctgtaggtgatttcccatgaccacagctgtaggattgccagatttagaaaaaccaaacaatgagaaaaaccagcatgctcagttaaatttgaatttcagacaaataatgaatgcttttactgtaaatatatgccaaatattgcatgaaacattcttaacgtgaaattgtttctctgaaattcaaacttaactgggcatcttgtacttgatctgacaatcctacaaatagataaatacaaaaaagaaaggagagggggttgtaacccctgccactgttgggtcacacagagactaaaaataaaaacaacacgaataatgaaccaaagagtcactacactggttgctcacacagaccaacatcacaatgagaaaacacaattactactccgagtgctgttgccccggcaacataacattttctcaaagctggttttgtaaatgttttgagaaaccttgataaaagtacctttttagtttgtaggtatcaaagacaaacattactactacaaagataagatgagcttgaaacaatgggagcagaagcaggtgttatatgcacatgaagagtttcagtgttttgtgtcacggagacaatgtttacatactcaaggtcatcttctaggtctaggctatcggcctcaaagatctgtgttctttcctaactttgaatgggttttctagcctttcatcctgaactttgggaggggtgcgcgggtgtgtgagggacaccccactaccagggttcaactgcatttctctgcaaacactctgaatcaacacaagggctttcagggctgcctgcaggaaatgggtagactgatgtaaaagaaatcacagaacaatctgaattctggaacgtgaaagaaacctctttgaaaggatgggaggtagggcaggtgccgaagacgtgaagtgtaaagcaaaaaagaatgtgaaaggaggaaaagccgaaatgcaatctacagtgcgaatgttatttcagaggaggcagaactctctggcaatgtataaaactcgtcatactacgaccatatttggtcgtgcaaagtatataaaatcattagcttcctctaggttttcactttagcataaccataatttacattttaaaacaattaaaaaacacagcttgcatatcactcatattctacaaggtatcacagttgctgtcgtatccccacatacacaactgaataggctttgaaatctttccagcacttctccaaaccagaaatctggtagctgaggaagttccaatatggagaaattgaaatggattaattttaatcagctccattgcatgtaagggaatattacttatgaaatataccatcataaaataagatgaacaggtctgaaacacatggagacatggccgactcactgacacacctttcaaacactaagaaatgggactacaatgttttatttattaaaatataaaaggttaaaaagtttccgccatagttaaggctttctagaggggaaaaatttaatttattaatggcagagtgcacaagttgctgaagaagcctcatgttctagaatagtagttttcgagtgcatttgctttccatatgctagatgtgtacaatagctcaaacatcactttcacaattactttcttttcacttctg

SEQ ID NO: 49143 - DNA, 1101 bp, Homo sapiens
  misc_feature (1)...(1101): n = a,t,c or g
gcggcacgaggtagtacaccgcttgttaatggcagccatttcaaaagataagaaaatggaaattaagggaaatctgttcagcaacaaagatcttgaggaattatgcagacatatcaacaacagaaaccaagcagcacagcattctcagaagcagtctactgagctcttccagtgcatgtacttcaaagacaaagaccctgccaccgaggagcgttgcatatctgacggagttatttattcaattataacaaatggtgtgcttctatttataccaaggtttgggattaaaggtgctgcttatctaaaaaataaagatggtttagtcatctcatgtggcccagatagctgttctgaatggaaaccaggatcccttcaacgatttcaaaacaaaattacctctactacaacagatggggaatctgttacgttccatttgtttgaccatgtaaccgtaagaatatccatacaggcctcacgttgccattctgatacaatcagacttgaaataattagtaacaaaccatacaagataccaaatacagaacttattcatcagagttcccccttgctgaagagtgagttagtgaaagaagtaactaaatctgtggaagaagctcagcttgcccaagaagtcaaagtaaacatcattcaggaggaatatcaagaatatcgccaaacaaagggaaggagcctatacacacttctagaggagaatacgggaacctagctctcctggaatgtttcaaacaattatggaatatgagaggctcttacttcactaagagctgtcatatgtgaatgttttacagtcttttcaaacttaacatttaatgtgtgtcactcagtgctctagtcgatcaggactgggtagctatttcgcatatatgtaaaatgttctcagccgggcacggtggctcacgcctgtaaccccagcactttgggaggctgaggcgggcggatcacgaggtcaggagattgagaccatcctggtaacacggtgaaaccaatctctaccannatnnaaaaattacccgggtgggggaaancccctgttnccccangcanntgggaggntgnncngggaatttcctnnaccaggaa

SEQ ID NO: 49144 - DNA, 2218 bp, Homo sapiens
gcagcaccttctcctggactccgtgactgtcagccatcttgtcatcacaaagaggtgaggggtgccaggatttcactatgctgctccttcactggaaagggaaggaaatgctccagctgttttaatcagtgacatttattaacatgcttcaaaagtgaccaaagtgtccagccagcacaatagccgaggcaatcaacgttctcttagtgtgtgatctcctccaaaacaccaaataaataggtttaggaataacctcaaataaattgtaatttaacttcgcccaaaattatacatcctctactgctcttccctgctcctgtaaagatactagcgggaggggagaaagctcaaatgactctgtaatttagaattacaaccagagaagaaatacttcaagcacaataaagacgttccattgaagagcgacattcattctggaatgtttgttttgaaaacaactcttctgggggaattcaaaaggtactgaacaaagcaacgtaaagtaagttttgggttgttttgcaaaataaaaatatacaattgagtggaccagatggcaaaaacataccaattacaatctgaatgctatatttaaaacccttaaattctgaaggcctgaatatcaacaaacctatttatgtttatgatcctaaaaagacattaaatattattaaacccccaacttccaaaacatagagacccagcaaactgggctagtggtatctcagtacacagtcacacatgactagactagactagactagactagactagagatctgagtttgcaaccaagtacaagaggtctttaggagctcaggctaagggaggcactttattcaaatggcatggcctgagagaagagggaaagtaccttgtaatcttaaactatgtggtccatcatatattctacctcaaagacaatctagactacggtatctcctcttaaactgccagttcagaacaaaatatactttatttggaagctaaatatttgcttcactcaagtgaagaataatttagcagcgacagagaacacaactcctgttttaaccatgggaaagagaagagagagtggtaagtatctcgctggggaaatcaaaagatttctgggtctgtctgggtgtatcatattatgagcttgattcttcaaccgtcactccatttggtagtcagggagaaagtaagtgtagctgcaaggggaaatggaaagaactaccctgcccttctgcacccccagccaggcccactagctgcggtgctgtgcacaactccagttccaatgcttccctccacagtggaggcatatccagggctgaaccagatgcacgcccacagtgtgtttctggctcagagcctgtcaggaaattcatgtctgggaagaaactaagtgttctggtgatggctacagtcagtagatctaccagcaatttgtccctttttttgtttcagattttaaggcagaaactcaatctcagcagctaatttcatccaattttcttcagaaacattctccaatttagttgagtacgcaagaaaagtgtgtgaacattcactcctgtcctccccacatacatatatagacatacaataagaaacatacatacatatataccctagattgtcaatgtatggctgctggaaatgccctgaaaggttacttttcacttaaaaataaaatttgatgaattattctgcaagtatggatttggccctagcaaatttttataaatatagtttgagaggacagcaacaaaggttttaactagaagctgtcttgagggttttcctgatagatattgttaatatgtatgttatttaaaacaggcatatccttatggattataaaaatagaaatgtatatatttgttaatacatattcacagcttatgctggaatggctcacaggagaaatcatggttcatgcagagaataaacattactcaagtaaataaaaataagattaggtccataaaggctgagaacttatagtcagtaatcagctcatttggtttctctttgtagggcaatcaaaaacatgaaaggtggtgacacataaaacacacacagacatacaattacatgaattacatggaaagaatataaattaaccaataaagcaatgtggagttaaggtgcaaaaatacaatcttcatcgattttctctactcctgtgttttcaagcatcacaacatgttaaatgtcatgggtggcaatac

SEQ ID NO: 49145 - DNA, 954 bp, Homo sapiens
gcactgatggctgcggtgccgccgggccgtggagccgtggaaccgtgtgagaatccctaaggcggggaaccgcagcgcagtgacagtgcagaaccccggcgcggcccttggttgagcaatgtttaaagcgtttgaaaaacatgaatttggagggctcaattcaagacctgtttgagttgttttcttccaatgaaaatcagcccttaactaccaaagtatgtgttgtccccagtcagccagtggtggagttggtgttgatgaaggttttgggagcctgcaagttgttgctccgcttgttggactgctgctgcaaaacttttcttttgactgtgaaacatctaggtttgcaagagttcattattttaaaccttgtgatggttgggctggtgagcaggttatgggttctctataaaggtgtcttaaaaaggttgattttgttatatgagcctttgtttggattgcttcaagaggtcgctaggattcaaccaatgccttacttcaaagattttacctttccttctgatatcactgaatttttaggacagccatattttgaagcctttaagaaaaaaatgcctatagcttttgcagctaaaggaataaataaattgctaaataaactgtttttaataaatgagcagtcaccaagagccagtgaagaaaccttgcttggaatttcaaaaaaagctaaacaaatgaagatcaatgtacagaataatgtggatcttggacagccagtaaagaataagagagtcttcaaagaagagtcatcagaatttgatgtgagggctttctgcaaccagctgaaacacaaagctactcaggagaccagttttgattttaaatgttctcaatccagactaaagacaaccaagtattcttctcagaaagtgataggaactcctcatgccaaaagttttgtgcaaagattccgagaggctgagtccttccaca

SEQ ID NO: 49146 - DNA, 1997 bp, Homo sapiens
ttttttttttttttaggaataacaaatgtttattcagaaatggataagtaatacataatcacccttcatctcttaatgccccttcctctccttctgcacaggagacacagatgggtaacatagaggcatgggaagtggaggaggacacaggactagcccaccaccttctcctcccggtctcccaagatgactgcttatagagtggaggaggcaaacaggtcccctcaatgtaccagatggtcacctatagcaccagctccagatggccacgtggctgcagctggactcaatgaaactctgtgacaaccagaagatacctgctttgggatgagagggaggataaagccatgcagggaggatatttaccatccctaccctaagcacagtgcaagcagtgagcccccggctcccagtacctgaaaaaccaggtcctactgccttctggatgctctcttgggccaggaagggaaaagtgtgggaggaatgtcttccagctgctaacgagaagtctgcacccacttgaaagggttaggagaataaaaagcagcattctttaaagaactgcaagtggagcaccaccaggccccttccttggactttcccgtcctgggcagcctcagagcctgcacactgaagctgggttcaaatcctgggtccttcctgcctgacagactgacccctggaaacatgagtctctggtttttcttcactgggctagcctcaagcaaatcttgggagctcttgagtatcttcggcatgtgccttttccaggcacttgctactgattttgcagagctcccagaaccgtgctccccaactggctccagctctgccagcctggattctcttcactcccaaccagcaggggaccactcagtgacaacactggcctggtcattcagggactgcctgggctctgaagtttcgtcccaactgtctgcgcctatgctggggaaacaccttgcctggtagagctgccctgctcccttgactcctcctcctctgccaaggcaggaaaataatcctctggtcatggatggatggggtcactcacataagtgggaacaaacagtgccccttggtggcagctggatatatgcctccaggcatccctgaccactgtcctgtagacaactgaggccagaaatggagagccaggaacaaactgacctcttccattcaaataagctccaaacccaagcacttgcacaatgggaggctgagcctttcaaaggccccaaccagaagagagctggcggctacacaaaaccagggtgtggttaagtgccaggcgaggtgagaaccgggagggctcacaacacagccccctcccagcaaagacacccagaagggaaagagagctggggtggggcattcagcacaactcaaggaaaagggaaaggtgaactctggagaacttcctctgggtggagacgacacgggactccaagccaagagcttagatagactcttcccagcggtgcagcctcatcctgcccttgccactagtgaggcctggagccactggggagaggacaagaggcctgagacctgctccccacccaggcacctccactgacaagacagaggagcgggcacagctctcaggccgacctggctcccgtcaggacaccagggctctccatcccctcccattgtttgaaaagcttaatacacacaaaggaaaggcagcccctcggcccctggaaaaagcagggtccttcagacagcccccacgctgcatcccatggggccacaagaaagccacccagagaattcagtgtaccatttccagataagaaatcagcttggggctgaggctcggggaggcacacactgaaaaacacaagcctaccttggcgatgagatgaagaaacatactacaggaaacgttaacgtagagagaagagcacagggcagaacacaacacagaaaggcgggtcccatccagtgaggaagctctttatccccggcaacccttcccacaatcaggggtc

SEQ ID NO: 49147 - DNA, 1629 bp, Homo sapiens
ttttttttttaatggtttcaccatgtttatttgatatcatgatttcttagtccttacacaaagggaaataagcactcccttcccttttttgttgcatgtgtgttagcaggagtcggaagaacagaatatgagggaacaagcagagggtgcagaaaatagaaagatggggaaagaaagatgctgttgaagacacagagtgagtgtttatatgaacccttctctaaataagcatgtatcaacaaagagtacaaagctgacaacatggagtgtcttcttacagaaataatctgggaccacattcaacatacattatacagcatcagggtacaggttttccgtcagaaattatgtgtatattcttttttctcgcttttaagtttcattgatgacattgttcatatacttttagtgtattattaagcaaatattaatttaatcatataaaccaatcctggtcagcaaaaagcactgttagctgccatgtaaaggtccttctgtcaagtaaaacttcattctacacttctagcttcctatcagaggaacttcttgaaggaactctttcagttggctttacaactcatctgcaacaccaaatgtggattaaattcagatcacaccttggttgtgtatatatgtatataacagcccctggcacaattagctaatatcttgtaattgtaaacgaattgttctcttttagccatttcccccccatttcctataacggtctttatccaaatgctttggtgctccataagtaactgtgagtcagaggtgcctcagtgctggagatgcctgtcacagagaagatcagaatgtgtgaagataaccctgcattacgttcatctcatcagttctgcccaatccacaggggtaaaaaatggatgagatttgatatcttcaacaccagcaactccagcaccaagtcgttccagaggattgaactgcaagagctgttgaatgagtgagcgagcctcttcagagacacattctggcatgttcaaagtagtgtgagtatttattcctgctggatggcattcaaccagagtcttgccagtgagaagttcaaagaggacagcacccaaactccaccaatcacaggcttcagtttcttcagtgattgctccaacctctggggcacagtacattctctctatggcatcgctgtcacaggaatcttcaacctcactccacctgctaaaatacgttagctgaatgtgtcctctatcattcaataagatgttgtttgggttcaaatcgcggcacacaattccctctctatgtaaagcatcaagggctaccaccatttcagctgcccatctttgaatgcagccctctgggatgtaaaacctggaggctagtgctaattttttatcaaggtcctcaaaaatctgatgtatttccttgtctccttctagcactaaaccactttcacccttagtctcagagtctctctggaataaagaagttggttcctctttagccaaatcatcagtctgatctgtaaacagcaatacttcttctgtttttaaagtgtctgtgcttgcaatatattcattagcacctgagagtggactacaaatacggaataagctttcttctgtgttgtttgcagttactgccctcggc

SEQ ID NO: 49148 - DNA, 640 bp, Homo sapiens
agcggcttgacccccaatcgcagagagatgccaggatatcttcgcgttggaaaagggaatttttatgagactgcaaagaagcataaaatgaatagacaatccaaccaaccaaagaccgggggcagcagcaggccagcaagacggcatcttctccttcccagcctagaagccctgtgaaatcgaggatcttccccctaaaacacatacacacaagatatgtgcaatcaagctgccaccgcttggtaaaaagctcatggtgcctaaccaaaaaggatcaggaacagatccttgaatcagctgtcacttctatagaatgggatttttttttccttcctccttaacctgcgctggaaattgccgttggctttatacatctctatagagagaggctaaagagtcttgcgtgagaaagaagcaatttacaatgcaaatagaggcctgtgaagggacggatgctgctgctcactcgtaacagcttgctgcaccttaatagctggttttattttctgatattaatagatgaattgttggctaacgctgccggagattacttgctgaaaggaaaaagaaaagttcggaataaactctgaaggcaacagatctcgtttggatgttttaccgcgcacacacacaaacagaa

SEQ ID NO: 49149 - DNA, 1795 bp, Homo sapiens
ttgttttttttattaaaaaactttttaattggtttacaaaggaggctacagactacattgaaactaatctttgtacaaaaggccaaaaaaaaaaaaaaaaagtcccaaaacaccaagagacaaaaggtaggaggaaagacaagaaaggaagatacaaaaggagcaggaagaaacttacttagggacaagattagcatcatacatacctaagagtggggggtgagggggaagaacaagatgagagagcatttaaaagcatttacccacacagccctggtgataattggattggaatcaaaacaaacacagcatgagattattaagaggttttaaaaggcaacagtggtgtggactggttattgccagtgttaagagagaaataaacttgggtttttaggcaccagagattggagcaccacccatcccttccagaggatgacagacttaggaaggggaagccaggccctggggcagctgcccactggtgtgtgtaaaatgtcctccctcaggtccaatcctcagtgtatccttcccccgaagtcctttgtgcccctagactcctaggtaagggcctatgggatttcactgggagaaagggatgatcaaaaatatgaagacctgcccttgtcccacaatgttcaagagcagttaccgggaaactggagcactgggtagacagagcccatatccctggggaaaaggcacagtgtaattcctgaaggcaagatatgggaaagcacacatcccagcagaggtatcaacaaaatcctcactacttgcagccctagtctaatcccatttgttaggctttttttttttttttttttcccctgatacttagctaggacttagggcagttgagaggcagatcatcatgcctctactttcttagcagagacaaggaagactggggctgtttgataatgaggaaggggaaaatgggacaaaatactcctctttcaaatgaacactgtggagaaaatctttctgggtttggggaagtcagagtaaagacttaggggagtaataaagccagagaccccccttcttttcctttccctgccttggatctaaggcaagtgagccaaatttggaagagggagtaggaatttaagcttaaggctgcttaatgtcttccctgggggctggtgttttgggaaggcagacaaagagaaacaggtcaacctcaaagctggtctgctcatcctcttagaagaggtctggtatctgtggagtagagccaagagaggcaccacagagagcacagtctcccaaacagaagtaataaccggctcatattttatcagcagttttcaaaagcaatgttttccggggttggagaagtgccatatcttcctccctttccccaaagctactgctgcgacctttctttcatccttgtacataagttactggctctcttctaagggagataaattctgagatttcacattttccctctcaaccccaataggctacccagcttcagtgagggggaaggagagctatgcaaagggcccctcacttgaggcagctagactgtccttatttccttggtacctgatctccaaaactcttgatctgatcccaaggtccaaaaggcatcagggtacttacactgaaaacttcaagcaagtagcaccagggctccccctaagcataacaggggcctgattagcaccccagaagaacccctcaaaaagtatataaatttattgcgtcctagcaaagatctgcagcttccagtattcacacaatgtgaagatattaacaatacaaaatatattttgaaagc

SEQ ID NO: 49150 - DNA, 516 bp, Homo sapiens
ttgcaaaaggaaaaacatttaatacataaaaaagcacaattaaaaagtattaaaagcattacatagtgcaaacaccaaaaagacagagctattaacttagtggtgcttataaggaaaactaggcaagaatgcagaaaatgccttcctctttcctcatctagtgagctggacacattcaataagttgttgttattatgattattattattattattattagcgaaagactgaagttttattattactcaattcagtctcccaaaaagttattttaaattgctgctttcttcccacttgatgaaaccacatttgctgctcttgtgattctctgatcggaaatatttggaaaatttcatgttttctatatattgacagtgcattttatgccacctactcaagtgtatgtagaaagagatgttttgggccaggagcagttgctcacgcctgtaatcccagcactttgggaggccaaggcgggcagatcgcctgaggtcaggagctcaagaccagcctggc

SEQ ID NO: 49151 - DNA, 1375 bp, Homo sapiens
attgaagataagtgaaataactttggagatagcagagaagagcaagaagatgttggacgttggcagtaagccgcagcaaggcagttaggaaagtacgtgagcctgatgacgcgaaggtgatgcctccatctgtccgcttagtggttatgaaattgctgggaaagacctgcctttattttcctatcatcttttccccattactttgcattattcaggaaataattatttattcccaaatgcagttttctaagcagtgaccacaaaaatttcttattctaaggaaaataattaagaaaataaccctatctgtggcattgttttaaaatgtgggatacaaatctggtaagcagatttcaggtcattattgttttcttttaatggtttacatgaaattttcctctcaaaaaacaagtacctcttactgtataacatttgagtttttaaaattgagatagcttctgagagaaaaaaagaaagttgaatttgtagctctctcaactacaaaatcaccacacttttctcaaatctaataggaattcagtgtcattacagatacggtctctagtgaccaggtgaagacaattgaagctttggtagaacttctgcaaaagttaggtaaagaagaataaatccaatttatcagctttgttcatattctttttctgagtgatctaaatttttcttgcttgtgatcattagctaagacaaggagtgttaaaggttttctaaatgcaaacacatacgtttctgcatttcagaagtcagtcttgatagtaaatcctacaaactctcaactttctgcattgtattttaagtctatacaatgttagagcacatgggtaatgtggggacagagttgattatatggataggcatgaggaaatttgcactggttggtgttacaaaccaatgatctaaccagcatactctccaaatatgaaaaagtaaaaacatctcattaggtttggaagagcctaaggtagtccatacaggaagtttgcctgagaacagagaggagcctgttgattggcatggctcatgatgcctttcttgtatgaattatcaaaactgatactgagttgcccctagaaaacagccttccagaatatgtttgcttatttatgggtgggaagagggaagtgaggaacaaggatgaggagtttcccttaaagtgagggagaatcattattacaactttggcaactggaagtatgtttccttgtagccaaacctttgggtttattttatccgtccaaatcagagccacccttcagttttttgtatgggtgccatcaacctaaggaggacaatcatataacctattgtttgccttggattcagtatatctactaagtacacagtctcgtataccttc

SEQ ID NO: 49152 - DNA, 479 bp, Homo sapiens
  misc_feature (1)...(479): n = a,t,c or g
ttttttttttttttctgagccatggcaaaagcagtttttttaagcttagtcaagttgaagcagcgggagtggaggaggatcagagaaacctctgtagttgtgattggttccttgtcgcctccactgcgtacccgctgagctgggctttgggcaggtgagcagcacagaggcttccctcctcgtccctccccacaccccaccatcgccacagctccctccgccgccggtggggcacccagatggggaggaagctgaggaggccactgttcacccaaactggttggtccttcgggcaatgctgggaatagggtgggtgctctgggcaagcccgggaggaggagggcctgggctgagttccaggaacatctcacaccacaagggaggatctagctggtgccctccctgtacttttangaggccanagggccttttttccagttcattcagggagggaattntttttgcanggatttgggaag

SEQ ID NO: 49153 - DNA, 517 bp, Homo sapiens
ttttttttttttgcagatatgaagctttaattcaccataggcatttctccaaccattctgtacattaaactttcatgtcttcacacatatacatcttttataagacagttttcttagcaatatggtactctgtaccataccaacattccatttaactagttaagggtgtattatataacatgaaccactgattaaatataaatacagaagttgaatacataggttagaaagtttaaattttaaaaaaatttaagaaaggctaaataccatgaaagtttacatgtattctttaattctagacaccgtacaacagtgacaaccaattacaataaaatcacaattgcttttagatgacagtactttcagatttctaatacccaattactttcatttccacaatgtcaacttcatgctgcattttcatttctatagagcagacaagcttccagactgcagaccaagtttcttgtgtaataatactactatcttgatcatgaccacaggaaaccaattttat

SEQ ID NO: 49154 - DNA, 1695 bp, Homo sapiens
gtatttttttttttttatttttagaaaaacagagcaaagtttattgaaatttcaagctacatttggaaaatcaaaatccaaatcctggaaccatacatcaggataaggtgtcaaaaagtggaaagtgttcactctcacaaaacccgctacagacaagctttctgggcacacctcccaggctccattggatcaaagccatccccttgttcatccctcatccacagtaggacaccatccttctgttcacttgaaagttttccacaataattacaaaacaaaacaaaaaacgttttcaaatgacactgtgaagcccaaactgatcttctctcaaccccattctatgtaggtcagcaccagtgaatggtgggtttggcattcaaaacaggacttcacgtttccagtggacagctggggaaaagggttgcagcagcaaggcatccgtggccgcattcagaggctggcccccctccttgcctttactctcgagtcttacttaacctaaaagacaaactgggtcaacttggtaaatgaacacagtcaaagacttagccataagaggtaagggaccagtcaatactcccaaggctggttaggcccttcaacatgtaggtggatgtgtatatgtatacatcgctacactaagatacagatctagccctatgggtatatatacgcatttatggctatatagaaaaactatgccaatactaaccaaacagaactttgtaagcggtcatcccaaagctgtaatcccacactgggctgtgcacaaagccatgcattataccatattaaccaacagaaggctgacttggctcaatctctcccatctgtgtcccctgccttcacgaaacagaggagaagagagaggttgcctctgcttaaaacacaagtggcttcttcataggaacagtcgttgtcaggtgaagcttgttgaaagatgtccatggagatgagaaaacagaccccttaaaacttttctggagcaaaactggtgtcacaaccttcaaactacccttcttcctttgccagttgcagctaagttgcccaagcccctgggagcccccaggggcgcagtagcattagaggctcactggcttggtgttaactaggccccatgcaactcagcctccagagacctgctcttgtcaggggtctgtcgctggagtggacccaggtggccatgtccttaggacatctcttggcaccagctgtgctaggtgtaaagttctcctcgtgagatgatgcttggggagccaaaaacaaactggaaagaactaggtaaaacaagtttagtggctctgcccaccctgaggacagagccacttacaccgcagaaccaccaggggcctcgggcacttgtggggattcgggagctggctcttcagggctcagacaggactggaacttctccagctgctctgggcttgccagggtcttcaacagggtgttctcacgctctagctgggagttcttctccaccagctctcggatctgctccttcaggatctccacctcctctctcacagcatacatcagatgattcttcaccagatccatggcctgttcgatcttgttgtctatggccaccacgctggctccggaggcaccggctctgaagctagctaggaattccttctcggctggtaagcttccggccttctcccaagcgcgcacggcgctcggccagccccc

SEQ ID NO: 49155 - DNA, 386 bp, Homo sapiens; identical to SEQ ID NO: 10106

SEQ ID NO: 49156 - DNA, 1348 bp, Homo sapiens
tttttccgggctaggtctgctttttattggccacgcatccagccgccagcctcagggcacacacctggcagggggcaggctcgggtaggctgccctcgctgggtgggcagtgagggggcagcggctgctgggtgtcaccctgcagcccctcaggtggacctgtattgtccccagggcctgcccacgctgggcagctggcactgggaggggttttctgttgatgtgatggccaagtttcagctgcagggcagaggcctggcagtggcagcaaaggcagaccgccccccactccaacttcaggggctggacatgctggaacgggggccagaccccatgggaggggaccctggcctgccatggcactgcctgccagcttacccctgcccagggcccccaactcagccacctccaagcagtaaagacttgcaaagcattgcattttgattaaaccttgctgggctgaaagggcaggcagagctgtggtggacactggcagggttgcctttaggaagcaggtgggaggctggcacgtgcaggcggtccaggcaggcaccaggcctggcagggcactggtgcctgtcgggttcccagccacaacaccccaagaaggctccaggagggccccggctgggtaaggcacggagttttggtttccggggcccagtcccagcctggcccccagaagagcctctcttggcagaatggcagcatgtcctgtggcctgggctctctcacttggccttgggcctgggcctgaggccttactggatcacacacagtttctttgttttattatcatcagaatcagggggaacctcttcctggctcctggagggacgcttcttccttcgcttcccggtccccttttgaagcccgccccgggccctggggagtgtgcccgaccccgaggagtcggtcaccgcatcctcggagaaggacttgtccagggatgtgtccagtgcggactctggggccgtgtcctcctcgtcctcgtcctcatccccacctgggcctgctgcagggggtctggcaccacggctgtggacagcgtcctccagcccctcacttgtgctgttgcctcggcctggaggacgcccagcaaggacgtgggatccttggcatcttgccttgaacttccggctgcagggggctggttgctggagaacttgaggggcttcagggcctgagcatctcccagagtcaccggccaggccccctccaagggctgggggcactggggatcctcagtggttaggacatcgctggcatccacataccaggaagaacgcctctccaggggccgtggaccaccctcctcccactgctccagggtgggctgagggccggg

SEQ ID NO: 49157 - DNA, 586 bp, Homo sapiens
gcaacagtcaggacaacagcatgcaacctgagacaagcagccagcagcagctcctgagccccacgctgtcggatagaggaggaagtcggcaagatgcagccgacgcagggaaaccccagaggaaatttgggcagtggcgtctgccatcagccccaaaaccaataagccattcagtgtcctcagtcaacttacggtttggaggaaggacaaccatgaaatctgtcgtgtgcaaaatgaaccccatgactgacgcggcttcctgcggttctgaagttaagaagtggtggacccggcagctgactgtggagagcgacgaaagtggggatgaccttctggatatttaggtggatgtcaatgtagatgaatttctagtggtggaaaccgttttctaataatgtccttgattgtccagtgagcaatctgtaattgatctataactgaattccagcttgtcacaagatgtttataaattgattttcatcctgccacagaaaggcataagctgcatgtatgatgggttactatcaatcattgctcaaaaaaatttttgtataatgacagtactgataatattagaaatgatccc

SEQ ID NO: 49158 - DNA, 683 bp, Homo sapiens
tcccccgtattattgttattatttatttttattttttacaaaacaggagaaaagagtgaatcgggttgggggaggtgacacatttctccacaaaggtacaaaattgcctatagaaagtcagcttcggaatgccgagcccaggctgctgagatgaggcgttcctgggcatccctctcccaaatgtccttcagatctggctggggtcactcccacattgagggcagccccccaaggtgagatggagtggcctccttcagcccttgcccaggaggcacaagagcaagcaactgagactgtacagagaaagagaagaggaaggggtgcagcccggggacacaggtaggggacagccaagccaggcccagggagcctctgggcagagagaagatggggaggcaggaggctctagccaaagtccctcctgttccttggagatgttcctcagaatggcagcagaggtgaccctaggaggtaagggcaactttttcgaggctgcagaagcacccccagggccacaaagccccatctgtcttggcccagctgccaggcctcaagcacgtgggtccatgtccctttcctggcagggcatctggcccagactgcttctcttttggtaaaaagtagtcctagtgatttctctactgctgagaacaggctgagcttcaagaattttgagacaatgg

SEQ ID NO: 49159 - DNA, 1438 bp, Homo sapiens
ggcagtgcgagaaagccgaagatggcggtccccgcggcgctgatcctacgggagagccccagcatgaagaaagcagtgtcactgataaatgcaatagatacaggaagatttccacggttgctcactcggattcttcaaaaacttcacctgaaggctgagagcagtttcagtgaagaagaggaagaaaaacttcaagcggcattttctctagagaaacaagatcttcacctagttcttgaaacaatatcatttattttagaacaggcagtgtatcacaatgtgaagccagcagctttgcagcagcaattagagaacattcatcttagacaagacaaagctgaagcatttgtcaatacgtggtcttctatgggtcaagaaacagttgaaaagttccggcagagaattctggctccctgtaagctagagactgttggatggcagcttaaccttcagatggctcactctgctcaagcaaaactaaaatctcctcaagctgtgttacaactcggagtgaacaatgaagattcaaagagcctggagaaagttcttgtggaattcagtcacaaggagttgtttgatttctataacaagctagagactatacaagcacagctggattcccttacatgatgttttcgaagactgtttttttcatcacgctcctgccacctcattattttgcattgaagatacattgccaggttgtgttttctgaaggattcagtgacttgctttctgtaaattatatggcttatcacttcttagacaaataacaaccaatagagatcattgttaagaatactgaggttctaatatactttctttagttctgtgagccaacagtaattattaagaacactttccctttaaaggaaacaaaagtgaataccatattgtttttactgtcatagtgttgctttcttgcctgtcctgcttagtttttacttgctggatgataccataatgtatcaaggagcgtccatggatacaagataagatgtgtaccttagtagaatacagagctttggtaattacatgaataaaattaagaaaatagccatatacaatcaaatacactatggcatttttatttgaatatgatgagtatattttgcttcggaaataatataggaaggaaatgtaaaatagtgagtagtatggtatcagttaattccagtctgagcttctctgtcaacttcagtttctctctcagtttaatgatttaataatagtccaggtttttgtgtgtttttctttatactgcaaattaataatgattcactttatagtttgggagacagaatcaggtcttgaataaaataattgtaatgagtgctaaatgggcaccattattcgaatcagataccttttatattctctttccataaatacgttgatttctgtcaataaaatttttgtgtcttagaaaaaaaaaaaa

SEQ ID NO: 49160 - DNA, 657 bp, Homo sapiens
  misc_feature (1)...(657): n = a,t,c or g
cagtccagtttgtttgaagtcaatcttttcatcagaggcagcttaaagatgctttcagttagttttgtcttactttcagatttctctacataaatctagatactcattaagtagccttatgacaaacagtatgagatacttannnnnnnnnnnnnnnnnnnnnnnnnnnnnnnnnnnnnnnnnnnnnnnacagagtgagtttgtcaaaagtatctcatacttataaacagtatgagataggaggattaaaatattattttaaagaaaccactgtttccccctaaaatgtcataagagcactgaagaacttgaaatatttttttcagagtttctcacacactttaaaagtctaacttttttgtgtgtaagcatttagcttgccagcatatttctttttggctccttaaattgcggttgtgtttgcagtattgtcacttttgctctcactgttatgttgaataataattagcatataattgtctacagaagcaagagcaatctggaaggaacaaaaatgttttctgtgattaacagtgaagaccttgtaaatgcagatgtgtgataaagcatttagtcagtcccccaaacagtcatgccaactgtgaaggaatgtcccacaaaacatttccattccctgaggaaaaacattttctttcg

SEQ ID NO: 49161 - DNA, 1087 bp, Homo sapiens
ttttttttttttttaagatctgtgcgttttatttttgtaaactatatctaaaacatacctcaatataaaaaaccagaaacaaaataacaaaaacggggtgagaacaaaaaatacagatgacaggttctgtagttatggtactgaactgagcttcctgtcagccaaaactagaagggaaacatgaccaccacctgacttgttgcagaggctttagatctgagcacttggatctgaaaacagtttctctttagatgccttcaaataagggacagtatccttgatgacaatacagtacatacattcacaattctccaagaccatctctgtgtatatcaaggttaacctggatgaatatttctgcagcaggcatggggtaggcaggcaatatgaccaaatatgtagtttggaggctcaaatgaaacaggagaaagagctcaggaaccatgaagcatggtgcaggtatcagggtcaagtattctaaccctaagatcagggtgcatgagaactggagaggcctcaatactgagacttagacgaaaggtgtggaattaacttcctagtgtgactaatccaacttagctcaaagcggctctgagatcagcccttctctcaagtcaactcataaacaaatgctttagttacaggaggtattaactgcaaaataacagccaaaagcattcctgggcacgtccattgagctccatgtaacagaagccattaactgcatctcagcaaccaaattgtctttcatcttgtagtcacagaatccctgagttttaactcagcacatgactgcccagataagaggttctatgtcccagcatctctttcagcaaagtgtggccacagtgatctgagcaatgctcagtcatatctttttttaaaaatctgctcttttctctctctctttccccagtggaatgcagatatggagctgatgagtctgctttgatcttatgggtaagaaaacatactgggaatggctgaataagacagaaggaaacaaagttcctgataaccttgtagagttaaatctgccctagaccatctgattacctctctattattaggtgagaaaaaaacaaac

SEQ ID NO: 49162 - DNA, 1100 bp, Homo sapiens
  misc_feature (1)...(1100): n = a,t,c or g
gtaaacacccgagccgggctccaaggcccgggaggtcagaaaaccgggccgcgggcggcaccgacagctggggcccgggtcagggacacgcggaggtcaggccggtgaaggcggcaggaagctggagcacgatcccaggaggaacaatcctgcaccatgactcaacagccacttcgaggagtgaccagcctgcgtttcaaccaagaccaaagctgcttttgctgcgccatggagacaggtgtgcgcatctacaacgtggagcccttgatggagaaggggcatctggaccacgagcaggtgggcagcatgggcttggtggagatgctgcaccgctccaaccttctggccttggtgggcggtggtagtagtcccaagttctcagagatctcagtgctgatctgggacgatgcccgggagggcaaggactccaaggagaagctggtgctggagttcaccttcaccaagccagtgctttctgtgcgcatgcgccatgacaagatcgtgatcgtgctgaagaaccgcatctatgtgtactccttccccgacaatccccgaaagctgtttgagtttgatacccgggacaaccccaaggggctctgtgacctctgccccagcctggagaagcaactgctagtgttcccgggacacaagtgtgggagtctgcaacttgtggacctggcgagcacaaagcctggcacctcgtctgctccattcacgatcaatgcacatcagagtgacatagcctgtgtgtctctaaaccagccaggcactgtagtggcctcagcctcccagaagggtacccttattcgcctctttgacacacaatccaaggagaaactggtgggagctgcgccgaggcactgaccctgccaccctctactgcattaacttcagccacgactcctccttcctctgcgcttccagtgataagggtactgtccatatctttgcttcttcaaggatacccgcctcaaccgccgctccgcgcttgggttcgcgtggggcaaggtgggggcntattgattggggcagttacgtgggattttcagtgggagcngggggaagctttcattgttgcntgttgagttcagtttgcatct

SEQ ID NO: 49163 - DNA, 1453 bp, Homo sapiens
  misc_feature (1)...(1453): n = a,t,c or g
gttagaagaaggaaaacctgttgatctagttcttagctgtgtggacaattttgaagctcgaatgacaataaatacagcttgtaatgaacttggacaaacatggatggaatctggggtcagtgaaaatgcagtttcagggcatatacagcttataattcctggagaatctgcttgttttgcgtgtgctccaccacttgtagttgctgcaaatattgatgaaaagactctgaaacgagaaggtgtttgtgcagccagtcttcctaccactatgggtgtggttgctgggatcttagtacaaaacgtgttaaagtttctgttaaattttggtactgttagtttttaccttggatacaatgcaatgcaggatttttttcctactatgtccatgaagccaaatcctcagtgtgatgacagaaattgcaggaagcagcaggaggaatataagaaaaaggtagcagcactgcctaaacaagaggttatacaagaagaggaagagataatccatgaagataatgaatggggtattgagctggtatctgaggtttcagaagaggaactgaaaaatttttcaggtccagttccagacttacctgaaggaattacagtggcatacacaattccaaaaaagcaagaagattctgtcactgagttaacagtggaagattctggtgaaagcttggaagacctcatggccaaaatgaagaatatgtagataatggactgggatatattgtatttctcatgttaaagcctcttcccttgaaattaaaaaaaaattttaactgataaaacttagggcaacattaattaatgtatattcttacctgaattgttatactttttgaaaatcctgtgacttgcctgtttctccccgctccaacgaaatcattaactctcctaaaatgtgtttcattctagtaagaaaacctcaaaggatattgtaggatataaatcttacttgaaaacatagctgttgaaatgttttggccttttggagtgggggaaggacaaatctgatcctgtaatctttttctttccagtaatcccttgtgtctgttgcatgaggacatggacaataaagtagtatatgatcctcagatacagggagaaggacaaggcatacagcttattgattagagctggcaagcatctgctcattatgtttggaattgctttctataagaaaattgcccactactactaacttgatcaacaatgaattcaaaatagttaacctatgaaataacatcctctcaaatgtttgctgatgaagtacaagttgaaatgtagttattggaaaagtctgtaacctgtggatcatatatattcaaagtgagacaaaggcaaataaaaagcagctattttcatgaataggacaaagttgatttcagggaagtattaaattattatttctggcacccgaacnagggaacaggaaattttttgcatctgt

SEQ ID NO: 49164 - DNA, 974 bp, Homo sapiens
ttttttttaacgtttgtttcatattttattgaatttcatttatattaaattaaaaatatatttctgacagattcatgtaacaaaaaggcagaacagttttcaaattgttcagctgggatgatcagtatggaatgaggcaaagcagttcgcattctataattgccttgtacaggtacaattctttcccaagagccaaaagaggatccttgagaactaacggaaaagcctaattacataaatgtaaaatactgtttctccctcattctcaaataacaacaggaatgagggaaaggaaggaggatgggtaaaaggttggaggagaagaaagaataagagaaagtatactaaaaatatgcctaacattaaaaaagttagtatgtgttaggtgcatgatccttcatcaataacatggaaaaaaatcaaaataacattacaccacacacaattggcatatcctattgtgtaagcgagtgcagaggttgaacacatcacaatagtgctgaacacagaatcacaagtaatgtcaaaatgataacttccaaccaaaaaagaaacaatcacaggccaattacttatatacaaatcaaccctaaagacaattatgttccaaataaagatgtccacaaaagaaaatcaaagcaacattatacttatttacaaatgcaactagccatgtctttaacaagctataaaaatactattcacattttccaaacatacagtagtattttttgtttgtttatttcaaaaaggcagctaactttgaatgcagggatttaaataaaacattgatggcttaccagcaaggtatttttgcaccccaatcctttgaagatacttcacaagagagagggcttgttttctgcttacaagttaagaaaataaggaagtgagtacaaatgtatataccttaagcctctgccttttcagtaaagtgactccctctctcacccaaactgatgtcagtaaattac

SEQ ID NO: 49165 - DNA, 417 bp, Homo sapiens
gcccagggtgcccatcatcctagtgggcaacaagtcagacctgcggtcggggagctccatggaggccgtgctccccatcatgagccagtttcccgagattgagacctgcgtggagtgttcggccaagaacctgaggaacatctcagagctgttctactacgcccagaaggccgtcctgcatcccacagcccccctctatgaccctgaggccaagcagttgaggcccgcgtgcgcccaggcgctgacgcgcatcttcaggctctcagatcaggacctggaccaggcgctcagtgacgaagagctcaacgctttccagaaatcctgctttgggcaccccctggccccgcaggccctggaggacgtgaagacggtggtgtgcaggaacgtggcgggcggcgtgcgggaggaccggctgat

SEQ ID NO: 49166 - DNA, 582 bp, Homo sapiens
actcaaaccacggaagaaaggacacaattatatcatgctgaaatagatgcactttataaagatttgacagcaaaaggaaaagtattgattctttcatcagaatttggggaggctgatgctgtctgcaacttaatcttatccttagtttattacttttataatttaatgccactctctcgaggatccagtgtaacttgcttactcggtcatcgtgggagcactgatggcaagtggaaaagaagtagcaggaaaaattcccaaagggaagttagtcgactttgaagctatgaccagcccctggttcagaggcctttagcaaagtcgccaaaagctggatgaacttgaaaagtatttcaccttcttataagactcttccatcagtatcagaaacgtttccaacgttaagatcgatgattgaggtgctaaacacagactcttctccacgttgtcttaagaaactctagttctgctgctgtatttatacaagtaaagggccggacctcttgcttcttaagttattttttaaaacatggaattataaagaaattaggtcctctattacttttgataccaattttatag

SEQ ID NO: 49167 - DNA, 1103 bp, Homo sapiens
ggacagtcagcccttgtaggtagctcctacatgagtgccctggaagttgggggccttgtaggcagcatcgcagctggctacctgtcagaccgggccatggcaaaggcgggactgtccaactacgggaaccctcgccatggcctgttgctgttcatgatggctggcatgacagtgtccatgtacctcttccgggtaacagtgaccagtgactcccccaagctctggatcctggtattgggagctgtatttggtttctcctcgtatggccccattgccctgtttggagtcatagccaacgagagtgcccctcccaacttgtgtggcacctcccacgccattgtgggactcatggccaatgtgggcggctttctggctgggctgcccttcagcaccattgccaagcactacagttggagcacagccttctgggtggctgaagtgatttgtgcggccagcacggctgccttcttcctcctacgaaacatccgcaccaagatgggccggagtgtccaagaaggctgattaaagagagtccaggttccggagcaccatcccacggtgggccttccccctgcacgctctgcggggagaaaaggaggggcctgcctggctagccctgaacctttcactttccatttctgcgccttttctctcacccgggtggcgctggaagttatcagtggctagtgaggtcccagctccctgatcctatgctctatttaaaagataacctttggccttagactccgttagctcctatttcctgccttcagacaaacaggaaacttctgcagtcaggaaggctcctgtacccttcttcttttcctaggccctgtcctgcccgcatcctaccccatccccacctgaagtgaggctatccctgcagctgcagggcactaatgacccttgacttctgctgggtcctaagtcctctcagcagtgggtgactgctgttgccaatacctcagactccagggaaagagaggaggccatcattctcactgtaccactaggcgcagttggatataggtgggaagaaaaggtgacttgttatagaagattaaaactagatttgatactgaaaaaaaaaaaaaaaaaaaaaa

SEQ ID NO: 49168 - DNA, 361 bp, Homo sapiens
ataggaacctctcctccagggcagtaaatcacctgcatttctggagttgtcggtattgtattcgaaaaggcctggagcccctcctgctcaggaaagaactcattccagggtgtggagacagtgccgtctggcaggtgaaatactgtgggaattcacgccaccaggtgtttgtgcaagtgttggcctgggaagaatgggacttcggccttgtcaggagtttgtcttcatctgcagcacgtttcttcctcctgcagtagatcttagctaccccagatatctctatggagagaagtttgtggaaaatgctttgcttcgtggcagagtctgatgctgtaggaaaaccttcgggcaatgtgacagc

SEQ ID NO: 49169 - DNA, 6855 bp, Homo sapiens
  misc_feature (1)...(6855): n = a,t,c or g
cggcggcggctgcggcttagtcggtggcggccggcggcggctgcgggctgagcggcgagtttccgatttaaagctgagctgcgaggaaaatggcggcgggaggatcaaaatacttgctggatggtggactcagagaccaataaaaataaactgcttgaacatcctttgactggttagccagttgctgatgtatattcaagatgagtggattaggagaaaacttggatccactggccagtgattcacgaaaacgcaaattgccatgtgatactccaggacaaggtcttacctgcagtggtgaaaaacggagacgggagcaggaaagtaaatatattgaagaattggctgagctgatatctgccaatcttagtgatattgacaatttcaatgtcaaaccagataaatgtgcgattttaaaggaaacagtaagacagatacgtcaaataaaagagcaaggaaaaactatttccaatgatgatgatgttcaaaaagccgatgtatcttctacagggcagggagttattgataaagactccttaggaccgcttttacttcaggcattggatggtttcctatttgtggtgaatcgagacggaaacattgtatttgtatcagaaaatgtcacacaatacctgcaatataagcaagaggacctggttaacacaagtgtttacaatatcttacatgaagaagacagaaaggattttcttaagaatttaccaaaatctacagttaatggagtttcctggacaaatgagacccaaagacaaaaaagccatacatttaattgccgtatgttgatgaaaacaccacatgatattctggaagacataaacgccagtcctgaaatgcgccagagatatgaaacaatgcagtgctttgccctgtctcagccacgagctatgatggaggaaggggaagatttgcaatcttgtatgatctgtgtggcacgccgcattactacaggagaaagaacatttccatcaaaccctgagagctttattaccagacatgatctttcaggaaaggttgtcaatatagatacaaattcactgagatcctccatgaggcctggctttgaagatataatccgaaggtgtattcagagattttttagtctaaatgatgggcagtcatggtcccagaaacgtcactatcaagaagcttatcttaatggccatgcagaaaccccagtatatcgattctcgttggctgatggaactatagtgactgcacagacaaaaagcaaactcttccgaaatcctgtaacaaatgatcgacatggctttgtctcaacccacttccttcagagagaacagaatggatatagaccaaacccaaatcctgttggacaagggattagaccacctatggctggatgcaacagttcggtaggcggcatgagtatgtcgccaaaccaaggcttacagatgccgagcagcagggcctatggcttggcagaccctagcaccacagggcagatgagtggagctaggtatgggggttccagtaacatagcttcattgacccctgggccaggcatgcaatcaccatcttcctaccagaacaacaactatgggctcaacatgagtagccccccacatgggagtcctggtcttgccccaaaccagcagaatatcatgatttctcctcgtaatcgtgggagtccaaagatagcctcacatcagttttctcctgttgcaggtgtgcactctcccatggcatcttctggcaatactgggaaccacagcttttccagcagctctctcagtgccctgcaagccatcagtgaaggtgtggggacttcccttttatctactctgtcatcaccaggccccaaattggataactctcccaatatgaatattacccaaccaagtaaagtaagcaatcaggattccaagagtcctctgggcttttattgcgaccaaaatccagtggagagttcaatgtgtcagtcaaatagcagagatcacctcagtgacaaagaaagtaaggagagcagtgttgagggggcagagaatcaaaggggtcctttggaaagcaaaggtcataaaaaattactgcagttacttacctgttcttctgatgaccggggtcattcctccttgaccaactcccccctagattcaagttgtaaagaatcttctgttagtgtcaccagcccctctggagtctcctcctctacatctggaggagtatcctctacatccaatatgcatgggtcactgttacaagagaagcaccggattttgcacaagttgctgcagaatgggaattcaccagctgaggtagccaagattactgcagaagccactgggaaagacaccagcagtataacttcttgtggggacggaaatgttgtcaagcaggagcagctaagtcctaagaagaaggagaataatgcacttcttagatacctgctggacagggatgatcctagtgatgcactctctaaagaactacagccccaagtggaaggagtggataataaaatgagtcagtgcaccagctccaccattcctagctcaagtcaagagaaagaccctaaaattaagacagagacaagtgaagagggatctggagacttggataatctagatgctattcttggtgatctgactagttctgacttttacaataattccatatcctcaaatggtagtcatctggggactaagcaacaggtgtttcaaggaactaattctctgggtttgaaaagttcacagtctgtgcagtctattcgtcctccatataaccgagcagtgtctctggatagccctgtttctgttggctcaagtcctccagtaaaaaatatcagtgctttccccatgttaccaaagcaacccatgttgggtgggaatccaagaatgatggatagtcaggaaaattatggctcaagtatgggtgggccaaaccgaaatgtgactgtgactcagactccttcctcaggagactggggcttaccaaactcaaaggccggcagaatggaacctatgaattcaaactccatgggaagaccaggaggagattataatacttctttacccagacctgcactgggtggctctattcccacattgcctcttcggtctaatagcataccaggtgcgagaccagtattgcaacagcagcagcagatgcttcaaatgaggcctggtgaaatccccatgggaatgggggctaatccctatggccaagcagcagcatctaaccaactgggttcctggcccgatggcatgttgtccatggaacaagtttctcatggcactcaaaataggcctcttcttaggaattccctggatgatcttgttgggccaccttccaacctggaaggccagagtgacgaaagagcattattggaccagctgcacactcttctcagcaacacagatgccacaggcctggaagaaattgacagagctttgggcattcctgaacttgtcaatcagggacaggcattagagcccaaacaggatgctttccaaggccaagaagcagcagtaatgatggatcagaaggcaggattatatggacagacatacccagcacaggggcctccaatgcaaggaggctttcatcttcagggacaatcaccatcttttaactctatgatgaatcagatgaaccagcaaggcaattttcctctccaaggaatgcacccacgagccaacatcatgagaccccggacaaacacccccaagcaacttagaatgcagcttcagcagaggctgcagggccagcagtttttgaatcagagccgacaggcacttgaattgaaaatggaaaaccctactgctggtggtgctgcggtgatgaggcctatgatgcagccccaggtgagctcccagcagggttttcttaatgctcaaatggtcgcccaacgcagcagagagctgctaagtcatcacttccgacaacagagggtggctatgatgatgcagcagcagcagcagcagcaacagcagcagcagcagcagcagcagcagcaacagcaacagcaacagcaacagcagcaacagcagcaaacccaggccttcagcccacctcctaatgtgactgcttcccccagcatggatgggcttttggcaggacccacaatgccacaagctcctccgcaacagtttccatatcaaccaaattatggaatgggacaacaaccagatccagcctttggtcgagtgtctagtcctcccaatgcaatgatgtcgtcaagaatgggtccctcccagaatcccatgatgcaacacccgcaggctgcatccatctatcagtcctcagaaatgaagggctggccatcaggaaatttggccaggaacagctccttttcccagcagcagtttgcccaccaggggaatcctgcagtgtatagtatggtgcacatgaatggcagcagtggtcacatgggacagatgaacatgaaccccatgcccatgtctggcatgcctatgggtcctgatcagaaatactgctgacatctctgcaccaggacctcttaaggaaaccactgtacaaatgacactgcactaggattattgggaaggaatcattgttccaggcatccatcttggaagaaaggaccagctttgagctccatcaagggtattttaagtgatgtcatttgagcaggactggattttaagccgaagggcaatatctacgtgtttttcccccctccttctgctgtgtatcatggtgttcaaaacagaaatgttttttggcattccacctcctagggatataattctggagacatggagtgttactgatcataaaacttttgtgtcacttttttctgccttgctagccaaaatctcttaaatacacgtaggtgggccagagaacattggaagaatcaagagagattagaatatctggtttctctagttgcagtattggacaaagagcatagtcccagccttcaggtgtagtagttctgtgttgaccctttgtccagtggaattggtgattctgaattgtcctttactaatggtgttgagttgctctgtccctattatttgccctaggctttctcctaatgaaggttttcatttgccattcatgtcctgtaatacttcacctccaggaactgtcatggatgtccaaatggctttgcagaaaggaaatgagatgacagtatttaatcgcagcagtagcaaacttttcacatgctaatgtgcagctgagtgcactttatttaaaaagaatggataaatgcaatattcttgaggtcttgagggaatagtgaaacacattcctggtttttgcctacacttacgtgttagacaagaactatgatttttttttttaaagtactggtgtcaccctttgcctatatggtagagcaataatgctttttaaaaataaacttctgaaaacccaaggccaggtactgcattctgaatcagaatctcgcagtgtttctgtgaatagatttttttgtaaatatgacctttaagatattgtattatgtaaaatatgtatatacctttttttgtaggtcacaacaactcatttttacagagtttgtgaagctaaatatttaacattgttgatttcagtaagctgtgtggtgaggctaccagtggaagagacatcccttgacttttgtggcctgggggaggggtagtgctccacagcttttccttccccaccccccagccttagatgcctcgctcttttcaatctcttaatctaaatgctttttaaagagattatttgtttagatgtaggcattttaattttttaaaaattcctctaccagaactaagcactttgttaatttggggggaaagaatagatatggggaaataaacttaaaaaaaaatcaggaatttaaaaaaacgagcaatttgaagagaatcttttggattttaagcagtccgaaataatagcaattcatgggnnnnnnnnnnnnnnnnnnnnnnnnnnnnnnnnnntgtgtatgtttaattatgttaccttttcatcccctttaggagcgttttcagattttggttgctaagacctgaatcccatattgagatctcgagtagaatccttggtgtggtttctggtgtctgctcagctgtcccctcattctactaatgtgatgctttcattatgtccctgtggattagaatagtgtcagttatttcttaagtaactcagtacccagaacagccagttttactgtgattcagagccacagtctaactgagcaccttttaaacccctccctcttctgccccctaccacttttctgctgttgcctctctttgacacctgttttagtcagttgggaggaagggaaaaatcaagtttaattccctttatctgggttaattcatttggttcaaatagttgacggaattgggtttctgaatgtctgtgaatttcagaggtctctgctagccttggtatcattttctagcaataactgagagccagttaattttaagaatttcacacatttagccaatctttctagatgtctctgaaggtaagatcatttaatatctttgatatgcttacgagtaagtgaatcctgattatttccagacccaccaccagagtggatcttattttcaaagcagtatagacaattatgagtttgccctctttcccctaccaagttcaaaatatatctaagaaagattgtaaatccgaaaacttccattgtagtggcctgtgcttttcagatagtatactctcctgtttggagacagaggaagaaccaggtcagtctgtctctttttcagctcaattgtatctgacccttctttaagttatgtgtgtggggagaaatagaatggtgctcttatctttcttgactttaaaaaaattattaaaaacaaaaaaaaaaaaagtcgcacc

SEQ ID NO: 49170 - DNA, 1360 bp, Homo sapiens
ttttttttaagtgagagatgactggaatggacccacgcgggggtggtgggggaatgattggaagacttatggcagaactgagtgaggggttagatttttggtgcgtggaggcttaactggtcggagtggcaggattgggattcgggcttttcctgatggtggattccaggcaagaccaagtgggaagtgaggactgcccggagtgataaaagaatgaggctgaaaagctagttcttctggagctcaacttcttgccaaccacagggaccaagctgaccaaacagcagctaattctggcccgtgacatactggagatcggggcccaatggagcatcctacgcaaggacatcccctccttcgagcgctacatggcccagctcaaatgctactactttgattacaaggagcagctccccgagtcagcctatatgcaccagctcttgggcctcaacctcctcttcctgctgtcccagaaccgggtggctgagttccacacggagttggagcggctgcctgccaaggacatacagaccaatgtctacatcaagcacccagtgtccctggagcaatacctgatggagggcagctacaacaaagtgttcctggccaagggtaacatccccgccgagagctacaccttcttcattgacatcctgctcgacactatcagggatgagatcgctgggtgcatcgagaaggcctacgagaaaatccttttcactgaggccacccggatcctcttcttcaacacacccaaaaagatgacagactacgccaagaagcgagggtgggtcctgggccccaacaactactacagttttgccagccagcagcagaagccggaagacaccaccattccctccacagaactggccaaacaggtcatcgagtatgcccggcagctggagatgatcgtctgagccccccgggcactgggtggggcagggcacgagttatttaaaacagttacactgcagggtttcgcccaataaaggtggactgacattccctcttccaggcccttgtctccccagttgggacggcagagagacaagttcttatatctgaagaacttggaggttttggggcattcaggagttggagatagcctccaactgggtcagcctctgtctggtgggcattgctcagggtctcaaacatggacgcccactgtggggccccagcagcactgtggcctgcaggagggcatggccccaggtagggggactgttctagccagctgtggacacataggaatgctggaccagggtaccagattttttcaacaaagggggtgaagtgtcctactaaaaagaataaatgttggcagtgaattaaacaatttttcaaatgacatgtg

SEQ ID NO: 49171 - DNA, 439 bp, Homo sapiens
  misc_feature (1)...(439): n = a,t,c or g
ttttttttttttaaaatctcagatgctgctttatttaccaaaggtgctggcttggggctggttctgctggccaagccaggnantggctgtgggggtcccagctcagtcttccaagggcgagactgtacagccttgctgtgggtaccagcactgccatctcaggaaggcactttcagcttcggggtccccaggaagaactgcaggacgcggtcggccaggagcgccaggcagaagtccaggagcaggacctgggcaatgaccagcttgaactccacagggatgtccacgaggccaaactggctgttgaagtcgggcgaggagcgagggagcaggccaatgatggccagggagtgaaactgccagactccacaccaggggcttgttctcgggcaggcttttccatgaagggcgggctttgtaattnatggcnaaagtnggc

SEQ ID NO: 49172 - DNA, 1377 bp, Homo sapiens
gcaatctttttctctcctggttaaatggggctgttgatcattttctctacgtaagggaatttattgattaagtttaattaatttgatatagactgtcatgtagtgatgtagtgctatactgtagtcggaagtttttcttaaaagcaaagagcaaaaatgcaaagttttatttgtaaaagctgaggacccttggggattggattaggtttgccgatgatcctaaaagtaagcaaactgtatgacaagactactattgcaaatgaaggatatttatagctaaactgcgcagcacaaagaagttttatattgtgagttatagttggttcagaaaacagtttgtactctccctgggcccgggaaggcacacagacaaaaatgtcggccacttttacttcaaatacagcccaagcacaggacagttcaggtttcgtgatcatcaccaacatctgataaaatctcattgaagggcaatgccatcacagctttgctcaattactacgaggaagagacaacaagcatctttcgtgttgtctcgtctgattggaggctgaatagtagatggaatggggggacagtgtgcctggtgtgaggaagacgtaagatccccaatttggaaagcatgcccccctcccttttagtagaagcccatggttgccctttgccaaactggggaggaggcaatgagccttggtggaaggaacctctctgttgatatttaaagaagtgagggctgtgggtattcattgttagaaatgccaatttcactttgaaaccatagtccaagtctctaggttggtagaagggaaaggaaggaagtggtcccagtgattctagatctggttgggaaacttctgcctcatgactctgtcctttgagtcctttggacagcagcacaaaacataacaatttttatttttaaacagacccattctttttgatcccacaggagctgtggttgggtcggccgtagccccgggatgtggtttaagtggattactgcctagctgagccaaaatgtttgcttgtacctgttggaccactacagcaaaccgctgcttacagtgcattgtgtatttctgtagtactgttttgcattttccatagagacagaaaactttgcaagtcaatcactgttgttcccatggtactgtaagaaaaaaaaaaaggaaaaagaaaaaaaaaaagaaaaccagccaatcattgcgtgtacagagctaaaaattgtaattaatagagcctgttgggaaaaaaaagaaaacaactgttgcctttttttcttgtataaaagagaatttatgacaaaatttagctgtgaggaatgtgatacgtggtttatatttctggaatatgggaccaaattgattcatggggggtatt

SEQ ID NO: 49173 - DNA, 2010 bp, Homo sapiens
gttttttttttttttttttttgaggcaattattgcatttattattcaccataaaagtgattaatatcattgtgctcattagtctttccaaggggaagataacttttatcccacagttgttattaaaacattatctatattggacggagtatatagaaacacaatagcaacacaccaagtcagtcacgactaacagtttatgcacacaggtgcaagatagtttctgcaccacattttgtctttgtaataagcatattctttcctcagtggctcactaaaacaagttatattttgtcttcaccactaatttactcagaatttattagtgaaccaaaagtttcactgttcttattgaactaaatctgagatatcatattgctgttttggcctgcaacaatttcagttactcttttgaaaagcaccttaggttttttcttccaaattgctcgtaattgaaaactttaaaacttctttttttcataatgaagtcataattcttcctttattactatcctacagccaggatgagttttcgtagctttaatgtactaagttgtattataacacatacattgctattaataatcttggtaagctaatcaactttttgctacaatataatccaaaaaagtatgtgattgataaccacattcattactgtgctatggaaaaaaaaacaagatcttttattttgtgaagttttctaagaaaatcatttgcatatctagaattttattttcaaactaagtggcatgaagaactgcttcaaactgcccccaaaggcattttaaactacaccagaatgtggagctacaataaaacaattttagcaacaatgcaggaaatacttggtactatgcctgtgtcaggttttataataaagtggcatgtcctgtggaatatctttttgtgttttgttttggttttatttttaaatcactcaccaagtatttgcttttttatactatcttaaaaactgggaacaaatactccctcaccctgggtctctgtgtgcataaagaggcaaaggcacgtactgtttctctacatacggggtcaacattccactaataatagcaaatctccctttattatagatattagaactctattgccacttgggcaagtcaatcaagagggcttagacgacagctgggcaaattttaatgtgtttatttctacaatttctttttattaaaagtcttgtgaaaaaacggaatcctataaatagtaaaaagggagaaacagtgctccatggcctgaagcaaatggtgtcaatacatgtgtaaacaaggtaagactgctcggactattaaaagcacaaaaataaaactagtcacagatagcaagacttcatttcaggagttgggagtgggaagtaggaagtgtttaatcccaagttttggtgccctaaaatggctagtagtatagttaattctcaattctctagctgtgatcttctgtgccttctatctcttcctaaggaaaaccacattagatgaacccagggctcagtcattttagggagagggttgagacaacactgccagcaacacagctggaatcacccgagtcgggaacattaaagttcctgagagaatatgaaacaactatcaacataatatttctccctacttttacagtaaaatattggaagtaaataaatatagggaatgcaacaactggctaggagtgttttacattcagttgtttggaagcataacacattcagctcctttgaatcttcccgttagaaaatacagaattactctatcaccttttaaggtacagtaagacaagaaaaaaagtcatgtgaggataatacagtctttgcattaaaggtgaatctgcaacatgaaatctgctcgactcacagatctggagattcatagggaagataagctctaagtgaccatgtcacagagatatgcaggtgctgaatttcttagtagatgctgcctgagtaaaccagatgtggctactgggcaaagggagaaaatgaaaataaatg

SEQ ID NO: 49174 - DNA, 413 bp, Homo sapiens
aaaaaattccatcagttttactttgaatattacgagggatttaggagagcaaaagttgattactttggaaatgtaaacagcttaaacccggattgtaaaatcagaagcctggtatgattacaggtacatgaaaagagttggttatttatatcatttgttaatgctgggagtgaattttgagaatgaagatttagtgtcatgttagagttccagcacagtaaatttattgttgctggtcagtgagtgaatgtgccattttgctaagacatggaaacttaaggtaactgctggaaatccagatattgaaactcttctagcatatccacccttgaaagcaggttagtatgaagagccaactgtaatgacatggagtttagccagagtagtacacatgaaccttttgaggattaaaa

SEQ ID NO: 49175 - DNA, 1410 bp, Homo sapiens
  misc_feature (1)...(1410): n = a,t,c or g
gccagaaaaggaactaaaactcagcagttcataggggtagagggaaataacctgagaaagccgagttaaatcttaaaatttttactataaggatagagatgatacaagtgaactctgcaaaatagttttgtgaaattaaacaaaaaaatctactcttaatgtatattatttcatatttgtttaacaaaagcagcttgatgcctttgttctggattatacattaagaacaagcattattttaattatgtagtaacatttactatgactttgaagccagatttcaaaatctggctttgttaaattaattggaaacactcttctattaagttaggtattaaaaaaagccaaatatcaataaagatatttttattaattttttatagaaacaaaatagctactataactctattatagtatattaacagcacttagtattatattgacttaaacatagtagctaataaaactagtttatgacatctattgaaattctcagtctgacagttttaaaatagcttaaaactaagcaccaggtatatgaaaaaggaactggaaattttaattgtccagaaatcataggaatactgggaacctgtagttatgggaaatggctgtttttctgaagttgaaaccagtttcatttaccaaaaccctctgaaattttgctaagcctatagttatctccctaagaacccataaaaaaagatcattttattgttaatttcattccagtttagcttcctcattttacatgttgggagtcatgccctttaatatgcctggcactgcacggtggcagtagcagacttgggcttacccagaaccctaagtctctgacgctataggatagcgaaagaggtaggcaatcgtaacagacactgtataggataaatagggaagagaatgagagaaccaaaataaaaataatttaagaaacaattgttttactgtacatgtgaataacaagaaatggtacggggaatgtgaataacacgaaatggtatggggaatgtgtgactagtgaagcatattttaacttttttattactggaggaacagagctaaaggcctaaagaaggccttacagtatataacagtaaatagaagagtaacatctttatacaataaactgttagaaatgataagtgtaaagttgtgcgtctctgcggctcctgaacttgaagattattatgaatagattggaccagcattatatattaaaaactttgatacttaggaactttccaactttaaaattcagaatcataaatgggtgaccaccagtagtagtattggaccaaaaatagtcaagtaaataatgtcccgtanagcaaagcattanctctcaatccaaaaatccaaattcattctttcctgacctgaaatccngttcccaatccctggaaaagg

SEQ ID NO: 49176 - DNA, 3043 bp, Homo sapiens
  misc_feature (1)...(3043): n = a,t,c or g
ttttttttttttttttttaccaacgggagatgcagtttatttacaccagcagccatgggggcagagggaatacacagcgtttacaaagttagctacctgtacagaatggattacatatgcaaaaataaaaatctcaagaccacaggacagcgtgagccccacccccctcccccaatgaccccagcatgcggtaatgccaggcgggtggcccctgggcatgcgggggggagtgatgcatggaaggaaaagccaccggccatggaaattagtacagaacccccccacacacactcagacacaggatacagggtggacgacacctagccggggtgggaaggatgggaattgaaacccacacagcctgctgttagagggaggggagtggggagctcctagcccctgttcaactacatggtaggggggggcactctctccccagaaggaaaagggtttgttccctcagggtccctgctggaccaagcccatctcttacccagcctgggcagggggctctgccctgagggcgggccaaggaacaatggggaagtttatgtggacaaaccagttcccaagctacttcccacttctccctcctccaaccagaaggggggaaaagggagaggccacagggcaaagagtgtattagggcctgagctgcagctgcctctcagaagggagagtggcccacagccttcctcccttcaccttcagcccactccccagactgcatctggaagcggctagaggcctgctgagatcctcctctccctctggcctcctctcggagggagactacggagggccaagaatagagaagcccaggccccgggatttattctaactcctgccaaaatctgtttggctttttaaaaaataatcacaatttgtgggttaaaaaccaatttgcaaccaggcatgagccacaatcagaaccaccccagcgggagagcggagttccagacagggcattgcagccccatctctgttgttcccttaaccctctagggtccctaacccgatcagtccaaccagtcctgggtactaactacccaaatgtgggatggctcctcttgggaagagggtaggggacatgtccagcaagtgccagagaacttggctcagggtcacctccacccatgtcagtcagctctgctcccagcccagnnngnggtcctccagattggctacctgggagtggtggtgcccgcatggaggggggacggtacatctctttaggatgtagaccaggcaggtgggcacactggcatgacagtcccacagaggggcagtgacaccccttcccctccactgacaacctggggcacagaggccaccctctcttcccacccaactcctagcaaagggggagaggcacaagattaggattttcctcagagccccaaaccacaagtacagaataaataacttaaaagcgctaaggaagggaaacagggcacgctttggaggcaggagcgctgagaggaactgaagccagtcaaggtgaagggggtggaagcagcagttgggaacctgggctgccccggtagggcagtggggcagggtgggcaggaggaacacggggccaccccaggagggtgaggctgggtcccttcctggggcagggaatgaggtaagaaaacatttcaaataaagcagcaccgttccctctcaccttggggccccactcctcaccagccctgggtcagggaggagaggcagggggaggaattctgacacttctccctcttcctaccctccctttcccattccttgaagctgtagaggctggaggccctttcctggcacccaacaaaaggacagctcctgctgccaaggaggcccatggggactgaggggaaagggctgcccctgtgaggggcagggaaggtggcggcagttctggacgcccacctcagcagacagcactctgtgcctgcctacccctgggactgggggcatttgataagattctgcacacagacaggacatgcccagccttgcccctcagctccaagcaccggacccattcacattgctgagggcggccgaggcaggccccctccaggctcagcttccaacccacagcctcccgggtcgccacattggcccctcagcagggcttagtccagntcctggggtggggggcaggcagtgccctggcacagtgcccaggtcagcccctggcctagctggacatccagtaacctcacagaataaatatgggaaacccgcctccccaccaaacttatgtccaaggcataatatgtccaggtctgagtcctgcacgcgcgaggagtcgtgctccattgcagaggactttgacaccccccaggggcgcataatcggatcctctgcctgcctggcccaccaagcttcccaagccccaacccccagcagccgtccatttgccaggctatgccacctgggtgggggtcaggagagagggctctgctcanccaaaggctatcccttgcacccaagtcagttgatgtcatcatagatgctgggcgtcgggggtgccggtggctttggcttcttcttcttgttggaacctaggccggaggcagtccctaccaggctcagatgggatttctttttctcggttttccgtgactcagagctgttggtacctagaccccatccctgattttcactcgtcttggaggagcctgaatcagagggtgagaggtcagaggacgccgtccccactgaagccggctgatcagggcctggcctgtcagtcatgtcaaagctgtcattatccagggagctctcgacctctggaaggacagccgagggcccgagaaaataaatccgtacggttcgcctctgctcatctgtgtgctgtgggcagcgcagggaccttgtgcacatcttcttggtgtgttcagaaatcaccccacattgctggaagaggaatataagcgtggttagcaggctgcgaagctcctccggccccagggtctcatagctgatcccagttgaattgttatacttaaaaggatccgaattgctaagttccccatttttgtgttttaatgac

SEQ ID NO: 49177 - DNA, 771 bp, Homo sapiens
gaattctttgcatattttatttttctttttttgatttccaactcacacacatctggcatattttacatctttgcaataaaacatggttacaatagcttaaggaatttatatatccaaaatatttcaccatgatctcaagatgaaatgaacttgtcttccagatgttaagtatcctcccaattctaagctacaaactcaagatattgcttacagcctggtgatgaataacttaatcattacgctgattccccataatttcagaatttcataaatacaaacaacagtgaagaaggaattcagtgctaaaacttactagtacaaggtggataacaaataagtaatcacatcaataaataatgatatgtttctggtgcaaagtgccaatacaaagaacccattatcttgttttatctttttaaataaatgactgcgagtgagtgtaaattctgagaaaattacattcctgtaacatgcctcatagccctaccgacacaatatgtacatctatgacgatacagtcaccaaatatacaaagaagaaacatgaagaaagtgtatatacccctgggtgtataacttgatcagtacaatgtatggaaaatcatttgatagccatcattttatatcataaaagatgaaatgccttaggctaagaatgtggctttcagtgagaatttcacgagaccctaaaagaatagcttagtttctttaatagcaagtcaaactttattacaacaataactgaagttattctttcacgagaacctaaaag

SEQ ID NO: 49178 - DNA, 522 bp, Homo sapiens
tgatttatttctgcaaattgaataaattcttaattttctgcatgcacataatacaaaaggtattttcatagttttggatttataccaaatgaaaaggattctcttgatgagcacctttaactgatttttctgttaaagttttaacaatttgttcttggaagtcagttcgtgaaggcaagtttgtcagtattttcacaaaactattcagctgaatccagaaagtgaaacagcaagaatttgcattgtaaaattgtgttataaaattggactttgaaatttcaaaaataagaaaaattttcatgtgtatttatactaaataccgttttaggaaactaggatcagggtgtttctgttggcgttggcattaactagctggatgtaaatttgaaaagccactcaagcagcttcctagtctagaaagtcagaggtttagattagatttccgacatcccttccatttctgacctgtagttcttgtctggaattctgctttgttataaactattgttctaaggagtttgt

SEQ ID NO: 49179 - DNA, 1258 bp, Homo sapiens
cttttttttcccggtagtaaaacatttactagagagcaagcagaaaggaatgcacatcttaaagaaaccttcacaaagtcacaaaagtcaaagtttgtatatttcttttcctttttataaacgataaacaaaaatcatcaaaatcatttcagcaaaagacttttctatcattggggcaagttaaaaaaaatacaatgaaatagaagacactttaaaagctgttgttgggtctcttgtttaattttaaatttagcaataccatctcaaacctggagcaatcctggaacagttaccaggatcaccttttcccttcaatccttgtggcttctgggaatcttcagagcctgggtctgaaaggtgtttcctacatgtctcagggctggatgcaaacctggctggggacctgagcatcaactcccatttagaatcagacatctcccttccctgcaaatgtctacaactaccaaattgctccccaacagttagctcaatggattgaatttgcagaagccaactcctaaaatggggactgcctggccatacaactaagaaaaagaactcaatttatagatgcttataaggtgacaccttagtaaaaaatataagctacatacaatataaacctagagtgagttttgtgccctagaagaccctttatcccaagataacctcaacttacccgcatgacaactcacctagagccaaaagaagcttcccagctctcactgcttccaaggaccaaaacagcttcccaagaaaacatccgaaaattccttctgatgaaggggtaatgtctccaagctccagctctccactaagggcagggggtccttacactttggaccccaacccagccctgagacacctagttaccaaaatctttctaaaaattaaggacaactgatttcacgctttagcacatcccctctaactgtcccatcgacttttcttgcgtttaggcggctctgggacagcaaagccgtcagctgtcttatctgtcttgctgtccaccttgtccatcttgctgctgtccactttgggttccatcttgggctccatcttgctctcacgattaaaagcttctttcctgctttccccattccgaccatcatttgcaccccggttctccccatgccggcctgcgcttcctccatgtctgttctccccgtgccgatggccatcagtatgacggctgctgctttctggatggcggtatccatctccatggcgaccaccatctccgtgacgtggactatcg

SEQ ID NO: 49180 - DNA, 1353 bp, Homo sapiens
  misc_feature (1)...(1353): n = a,t,c or g
aaaaaactcattgagatagctacagttctataggttaatttaaagcctcctttttctactcatttttgaaagcaaaattacattttactattttacataaccagtgaaaagacgttgaaagcctacagctcactgtttttggtgctctggaaatgttgagggtgggtttttaaccagtgatttttaacgtgcagtgaatttgttagacttttaaacaccagctaaggtagtcaaacttgatccccattaaaaatcaaggaattaggggtcgggggagggtttaggagtgatccagaatgacctcccagaattactgtgcgtacaactttatttttcagagttttcattggaatggtaagagttttatgaaagacagttttaaaacttattctgagttaaatattaatactttaaaaaattattgtactagacttatcgcagccttttgaaagtagcagagtttcatcataccacatatataacagagcataaattttctataatcaggcaccttttgctgcttttgagtaagactgttttcctgtttaagtgttaagcatcgccagacataaaaatctattctctcctctcgattgtagcatagcctgacagctctagatacagcatttctatgatgaaaaatgagtatccatcaggaaatctagaagactagccgtgttttctcagactccacctttgtttgcactctgttgcctgtgaggagctttctggcatgtgattatttacttcaaaactagagttccaagcacctacattaattattttatattgtgtgcagaatagtatatcttttaatgtcagatatgatacactgcacatattgcttttgcactcttaaaatttttgtactaaataatagaaaatatttatattctttgagtgtgagctttgaatagatggcattatcactttattgtttttttaacaaaaactttttctcaattattctattgcaatgttattctgagcaagtcctatgccaaatatcttgtataatgtttgtatggaagattaaattttactcttgtgtggtaagactatttcagttactgattttatagttggaatttgatattccagcacaaagtccacagtgtattcagaaatagtcttaccacacaagagtaaaatttaatcttccatacaaacattatacaagatatttggcataggacttgctcagaataacattgcaatagaataattgagaaaaagtttttgttaaaaaaacaataaagtgataatgccatctattcaaagctcacactcaaagaatataaatattttctattatttagtacaaaaattttgtcgacgcggccgcanatttag

SEQ ID NO: 49181 - DNA, 544 bp, Homo sapiens
tttttatagaggggtgtcccttacatttagaaaatgaaataattttgtatttgtgaaaagttacattccatccattttctggaaaaaaaaatgggtattgttctttaaaatgttcatgagctgggaggatgattattctggtttccaggggaaactctcaagcagtacatatgtgatactcagttttgtagactgcagaccataaccagcaattgccagttgcaaaaatgtgaaaaagaaataacttattttaaccactttgtacagcatattatttcccactagaaaaaaatctgcaaataatgaatttacaattataaataatcagacatgacatcataaatcaatcttcctccctactagcaagaggaaattccaatggctttttttccatcctaacacaaattacttttattgtaaacaaatgcttgcaacaaaatgcttttgttgtaaaatgattgatgttggggtaaagtctacttagcttccccacaagggccttctggctagtctgcaggtagtagatgatgggttccatctcggc

SEQ ID NO: 49182 - DNA, 1049 bp, Homo sapiens
ctttttatacttaaaacctcagtaaactggcaaagaattgaaggtaatgtgatttgatttgagaataaaacattgtagcattgggtgaaaaatgagtatttgagttaagcttacatatttatttctgatggttatcttattaaaagcaataatccttaatactgtacttgccattagactaggtactcagtaatggaagtttgtgtgaagggttaaatgttccatttttgaaagttttaaaaaacctgtttgggtggtttattttgaaaacaaaagtaacctattagattcattttgcctaactcatatgagagatgcagagtatcaacagtgggagccatccataaaatgaattttccaagtggagagggtttttccagtggaagagtaggaagcagccatatgatagtattgactctggacagaattgatgtctttcgtttccaaagtgcagagtagggaactacatttcctaatgtggcattgtaaatatacatctttatattactcttccagcctacgttcctaaatcattgataatttaaatattttttaaagccaccttaatttaggtagctcttggaatcgatgtttgaattcactagccacattttcttcatgatatgcctcgtggcaaacaaagatgtttccttaagatgaatcttacatttcccatagaaaataacccatttcctttggcactgcagttgccctcaaactgcttgcagttgtattcattttagtacaacaaaggttttcataatatgggaggccaagtctatgatactgcctcaaagagaccctattgtgtagatgcatcatcttctctcatttgatccatagagcataggcaaagatgtcaacctcaggccttagagaaaagtggaaatgttattatgacagccgtccatgagttatcgctttgtatgaagttaaatacagtcatgcgttgcttaacagcagggattccattctgagaaaatgcattgttaggcaattccgttgtgcgaacatcctagtgtacttacacaaacctaggtggcatagcc

SEQ ID NO: 49183 - DNA, 1517 bp, Homo sapiens
cccaaagtgctgcagttacaggcgtgagcacttgcacctggcctcatgttttttaaataattgccttttatatttaccctttttgtcatcactttagaatgaaaattcccatttaaatctgaaagttaccttaatagtcctcttgtgttattaggacagtattattatagtacttatttattttattttagatttaaagttatcttctctttttcttttttcttctgctgcttttagggacaattaaaactgggaaactatgaaacatggaacattttatcctacctgaaagtaaacgagtaattgtgaagcataagacactgaggctaatacaactctgtcttcatgtgttgactgcctggcacatagtattcattctcttccctttaacatagaagtgtccagctgcgtacagtctagtaaccagcaactgtaaacgaacctgtgcctctaacaagcgattctaaaccacctatgagtatttcttttagggctcacttaaatacatgtttgtatatactgtattctagccagaataattttagatctgatcaggtagtagctaaaattagaaaaaaacaaaatagatgcttaaagaatttgcatccatttttgagtctaaatcttttaaaatatactgagatccacatctagtgaaatgtcagtgtcaaaatattatagattatagctaaaatccagattaatactcatttggggttttttatagtggaacttcatagtaatacaaaaagcagattgtcttcctgtctccgctgctcccacagtaggtattgaaactggtaaaatcagttttttgatagtgtgtgtatataagaaaaaatagatacacacattcttttttctcagtcaacacattgattgaacactctggcaaagatgctgtggtggatgaggttggagttcgaaagaagaggcaagcgctggcctggccttgaaagaaccgaagtctttcccattcacttctctagaaagctgccaagacagaggcagaaagaaatggatgatagttctgtcaagcacacttctgttctcttagaacttagaagtgtttctaagagaacagaagtaataagagaaacagttacgtgtggaattcaacatctttggttggaacgcattggctttttttttcttgttttgatagaaatggaattaagcaaaagtagtttttgtcttttctgttgtcttcaaattttatgccttttatttttaatttaatcccgttcaattatttaattgttatacattgacattaactgctgtattttgactttgttcaataattttgttctttcagggctagaaataaactttttaaaaaaagtgtgcatttttccctttcctaaacttttattctttcttttgatcagcgtaaaagaatattttaatgtcttttgatagcataaaagaatatttaaatgtcttaataggttttcaaagaacatttagtatttttagtgataaatgttttaaaccttttaaaaaaaaaaaaaaaa

SEQ ID NO: 49184 - DNA, 1912 bp, Homo sapiens
aaattaatacaacgcaatctaaatgcaccataaatttatatttgttaatcttgatattagaacatttttacatttcaaactacataaaaatataacaatataaaatagaaatttgttgacaacttacgtccaaaacatcactatttcttatattgcaactaagcaacaagacagcttacacagctctccagaaaacatagtgttttttgtgttatcaacaaaaatcagcacaatcccacacaataatgtcttcaatttattatcttttccacagtacacatttttcacaaaccgtaaatcctttgcagttattcaaagtgtgtaaacaactgcctgaatccccatatccccccacctcggcttaaggttgtgaatgttttaagtccttcaatcaagtttcaactcttccacttgcataaggaatcaagagccttctctctttaaattatgtgtgttttatcatacagcctgcaatgcagtaaatcacagtgaaagccctggggaaaacaaaacaacatgatctttacagcgggacttgaaacttcacaatagtaaatgcagttcaagaagcttcccataataaaagcgcgggttttcatttccagaaatcaagtcaattagaaaccctaggttctacttaaaaacccattttgatctaaaagtgaaaacagtcccctatccatagtcattttataaactctatacagtttcacttgcagagattttttttttttccagtctggaaaacagtagtgcaattacgttttacttcttttaagttatatagtccaggatgtaaatagctctgtggaaagataagaagatgctctggtaaacaagaaatttttgcaagcccatgctggcttacgagtccattaaagcttgtaagtccatcgtggctttcaacaaaatgttgcatatacatcactgagaacaaagcagaaataaataggcagaaatgactgtaaactgtctcatttcaatgatttttcagtaataactggcttgatgaattgattatatatagtcacttaaataagcagacagtagacagttgcccttctgggatgttccactatggcatccggcctggaaagccccaatggagttacattcctaaaattaaaccaaaaaaaaggtggggagtggagggtgggggataatagtttacagatgccacttgaacatgattccatcaagtcagccagttcacttagatttcttcttaaaaaggcttttgatttttgatggctttttgcttttctctccattatgacaaaggtcatgtgggatgctgcttattctggcaacacttggggcttccctgaactggtttactgtcgttgcccagctgaggaacatgatgtgtggcgaggtttaggcaccgggatgccactggaaagctggttcatgctacaggatttctccaaaatgccattgtacactttgcttgcaggactgaagatcatactcttagtttctgtcagacctacacagtcgggagaaccccaagacacatcccacagttaaccaggcgaaatcccctcgggaggaatcctctagggacaccctcatctcttgatatctttcgcggagataatgtttggtatatcctcgaggccttaaaggaggagactgtttcccttcccaatggaagaatttaaggagtcacattctgaagctgtgtctggcacttccctgaatgaaacacaaacaaaggtacaaattttaaatcagtatgttcttaagagtactagcagacattctaactaaaacaactttcattgctttttgaaatttaaaagagggaaatgatatgattctatatacatttcagcaaaattagaacattacttctttaaataatatggcttctcaaaactcaatgctggatttttaacataaaccataa

SEQ ID NO: 49185 - DNA, 1102 bp, Homo sapiens
  misc_feature (1)...(1102): n = a,t,c or g
gttattttggggtttatagattatagagggaaaagttagatcacttggaaaaacctaactctcatgttcagtaacttgagtatagaatttataccacaatttatcttcaataaggaacctacatgaacttaatcagttatctgtagtttttgcaaggcattagaaaaaatttcacaattacagaggactgaaaatgtgatttcaaccggctagtctagttgttgaatgtccagtcacattacacatagtcctttgtgaacttatttgtgaagggagttcactttttatggacatacgtgtatatttccttgtgtaatataaagcagatggttattaagtattttagttctttcaagtttaaattattcaattgctagacatcacagaaattagtatatttaagaatttattataaagctcctctacaacttttaaaggtgagagggtctattatgatttttttataaaatcaaacagcatgatttagaacgtcagtctttctacttaaaatgtgtctatattcatggtatttccattcagtgtagatggtaaggaaaacatctagtcattaaagatttacttatagcagactccagaacactacctacaatggggtttcagtgactagaaatcttgaaggtttatgattgcatcaaattgagcctgtactaatatctaaatatctgctcttatgttctgctttatcccttgggattaccttctaaggtttggtcacaccagcaaactggaaacagatcttaatgtacataaaaaatttatactaatattactccatctgtgttacagtattttggaaaaatggtttccaggtgtcatcctagtcggcctttccatggggtgtggataggttacaaatgttatgcttatgtttttcatacttaatatcaagctttcctttggtaccttacaagatagtatttttgggttctaaaaaaaacaagcaaacttcatttttgtagtatccagaaattacctggagtcagtatttttantcgccttcnagaacntgtggtccanacatcancccatttataattagnggggaaantatctgccgaaaatcnaattgtaagaaaaggct

SEQ ID NO: 49186 - DNA, 1650 bp, Homo sapiens
ttttttttttttttaaaacattgctttaagttttaatgtttatttccccaagacagcctagcctgcactctacttggataaattttacaagctagttttctgctgcttctagttttaaactttaaccatgtttctgatgacaaggaatgctgcaaaaatactctagttcaacaaagagttatgatcacaaaataatttttatccattctacagtgtttcagaattaccagttgatttttaaacacaaagtagatatagatgctaatggtggctaatctggtatgtttcttatagcaaactgttgttcatgcaacacttgtgctcaaaggggaaggcacaggatttcctacaatgagccaccttataaagagttctttttgtacaaattaatttatgtcacatttaatttagtgtgcataacctcaaaactgaggtattattccaatttataaaaaccacttgcataacttttatgcaagttttaaaaatacaaagttttctccctaaagtggctcaaaatagattgttcatggctgcctacatcctaagataaaaagattcctaaaacaattgaacagattaggcatattattaaaggtgttcaaaccattacttgatttgtacatctactcaaacctcttcatcggtctttattcagcagtacatatgcaccaaattccattttagaagtttccatatcattttcatagaaaacaaagtttgaaaacaagtaacatttaaacacagcacggtattctaccacaactgaaacttttttcttcttcttctttacaggactcaacaaaatctaaaaatgaactatgctgtagatttacctcatgcaaagatctttatgttatctctgaaaatgaaaaggatggccttttaagcacattttactgttttatactattatggcaacttgtgtactgcaacacagtctattttgagggaaatttatgatttttttcatgcaaaaatctacacaaattagttttgatgatatggaaagcttttcatagcatcaaacattcatctggtgcaaatgcacaggggaaaccttcctgaaaagttttctgacttgagaagcaactaaaaaaaggcatactaggtaaagtaaataaaaactaaaaaaaaagaaaagaaaagcaaaaaagaaaaaaaaaaggattgggtggggggaaggaggtgggaaagggggaaacagaaaacacaggctgcagagtaaaccaatgtctgctgctaaaccagtctttgttttcatgtccagtgtacattaacacttatgatctcattttgatgatttactaggttatcagccccctgaaggtgaatcaagcttgcatgcgttcacatacagcaccacaaccacgctctcgtacacagtcactccaggactaggagtctgcttcatgagtgaagagccctagatttcaaagatgaacctggctctccatcactgagccagacattcattcaacattgtccattcacacactgcttcatagcaaggcctgggctcattttcctttgacttatatgggcagcctattctcttttatgcttacaaggcttgaagatgacggtactgcactttcccctcaattgatatagagtaagtcaatgttctttctcaggcactgacgatct

SEQ ID NO: 49187 - DNA, 316 bp, Homo sapiens; identical to SEQ ID NO: 10240

SEQ ID NO: 49188 - DNA, 1021 bp, Homo sapiens
actgccaggtgaacattaccacacttggctaatttttagtagaagacagggtttcacccatgttggccctggctgggagattctttataccattttgttagtggtagggtggtatttcttaggaattttttgtttcattaaatttaaacaaaagtacagtagaaaatgttgccaggcccatcatcgcaccaggatatttgtacggtaaaatgctttgcatgagtcatacttctggtacgcacttctgttgcaggtgacagcacactgccatttgcaacttcatcattttttctttcttgcggctgtacttaataggaattaaatgtgtgaaaataaataataacaataaagttatctataaagtttgaacattctttagcattctttgtttagcaaccacattcttcagcatctaccaaaaaaaaactcgcatgatacactaaatttaaaatgctatgaaattatacattactctctaaaaataattgatgtccaatgattaagaaacattacaaatcacaccagaagtagcaatagtagcatactatgctatagtagactatatgttacgtataaaatagtgatgaattcttcacacaaatcaaatgggtaaataaaaactataattatttctttgcaaaatagcaacaggtataacttaactggttgcatctaatttacattaatatccttcatttaatttcacatcagaggaatattttaatgagcgactgcataaaataacagtcaaagataagtaatgtttaataaaacaaggagaggttaggagctgtcactcgtgctttcatgacgcttctaaatccaaagcatttgcagacaagcagaagaattttccttttccaggactctcaaatatcatacatctccattatgtaggctttaggcaccaagccaatggcccccttcatttctcctacccaccagccatatctattgtattccttgctaagaatgtaaatcacatcaccacgcttaaatgacaactcatcagaaaaagctc

SEQ ID NO: 49189 - DNA, 3838 bp, Homo sapiens
ggccggagggagcccgcgctcggggcggcggctggaggcagcgcaccgagttcccgcgaggatccatgacctgacggggccccggagccgcgctgcctctcgggtgtcctgggtcggtggggagcccagtgctcgcaggccggcgggcgggccggagggctgcagtctccctcgcggtgagaggaaggcggaggagcgggaaccgcggcggcgctcgcgcggcgcctgcggggggaagggcagttccgggccgggccgcgcctcagcagggcggcggctcccagcgcagtctcagggcccgggtggcggcggcgactggagaaatcaagttgtgcggtcggtgatgcccgagtgagcggggggcctgggcctctgcccttaggaggcaactcccacgcaggccgcaaagggctctcgcggccgagaggcttcgtttcggtttcgcggcggcggcggcgttgttggctgaggggacccgggacacctgaatgcccccggccccggctcctccgacgcgatggggaaggtgctatccaaaatcttcgggaacaaggaaatgcggatcctcatgttgggcctggacgcggccggcaagacaacaatcctgtacaagttgaagctgggccagtcggtgaccaccattcccactgtgggtttcaacgtggagacggtgacttacaaaaatgtcaagttcaacgtatgggatgtgggcggccaggacaagatccggccgctctggcggcattactacactgggacccaaggtctcatcttcgtagtggactgcgccgaccgcgaccgcatcgatgaggctcgccaggagctgcaccgcattatcaatgaccgggagatgagggacgccataatcctcatcttcgccaacaagcaggacctgcccgatgccatgaaaccccacgagatccaggagaaactgggcctgacccggattcgggacaggaactggtatgtgcagccctcctgtgccacctcaggggacggactctatgaggggctcacatggttaacctctaactacaaatcttaatgagcattctccacccatcccctggaaggagagaaatcaaaaacccattcataggattatcgccaccatcacctctttcaattgccactttctcttcttttgaatttgaactctggagttactgttctacagtttggcggggacggggcttgggggttttctcttttgtttgtttccctttctttttccttttttttttttttttttttgttggctttgcgttaggatgctctgatctgacatttgacatgaacacaaagttgctagatgctcttgttgacttccagcagatgggatgggggaaacacagcagttcttggtaaagtcctttgtaataatagtttgatttttttatttcgagagaatctttcattttcctatgtatgcttttttccttttttgcccagtttccttatcacttgctgtagatggcttattttgcattcatgcagactatgttgcaagtctgtttcatctagtaaactgaaaattattgcttaatcaaactgccgtttgtcttttatatttaaggccttccccccccttccttatgagttctaacttagtaatttcaaatgtgaccttttatatctaagaccagtatagtaaacttagcccacagtggcaaataatgagtaatattgtaatatgttccagttgcacctcagtatgttaaacaggtaatgtaagaagttctctgaaatgtcagcaagtaagttctgaaacacatcatgcatgagtaggaataaaacccaagttccccataacgtagataacttaatgctgcataaaaatatgaaagtgtaacccatgaaggacactttttctttccactgcaaagttagccactttgctgtttttcctcttttttaaactttgaaaatagactctttccagaaattggagcaataatgggtgttaccacacacagattaaataatttgtagatattttaagtgacttttgggcaaaactggaatgtatacttttaccttgtttcaaacacctaagaccagtaatttaaaaattactaaaaggtttactttgttcattaataaaacatttaacaattcaaattatatgcaccttttacctagttgaaaaaaatacacattcctgttttcacattatagcaactgattaagctgaagctgtaagtcattttttatagatgagtgatccgcatctccatcaattagaacactggaaaagatgttttataaaagaggtatttaattttgtttgtaggattaactcatgcaaataataaaaaagatatcctgttggttcaatagtacactgtctcctttaaggaaggaagcgtgatgaatgaatgatgtgtagacttgagggatgactattaaaggggacgtaggatgaagagaaagaacctacagatgacaatgaatgtaaacttatttctcttcatgtgtaagcagtgtgctcgctggtgatatccagatcctaacaagattacttggttagctggttaggaccagtaactggattgcgaccactatgataatattttgaaccaaatgttaatgcttgatgcagaattgtaaagcagcatctggttcctatatagccttaaggattaattttagtgatcctcaaggaattaaatagggaatttcagaaatgtagactgcaaaggcagtatacaggaaaaggtggagtgggttttgtttatgagggtgtctgaaaactaaaattgagcgggatatcatggtatagttggacagtattggtccttcacactttggccatattgtataatggagcttttaccaaagatgtatgagaagtgtaagactataaaaaaatgaactattcaaagtaaaactcttaacaaacattttacttaaagcagatgccaaaagggtattctcatgtaggctcctgttggtgcagagggatttttttgatttcaggatacaactaaagtacgaagttctcagtttcactttagtagaaagagctctagaaatgaggctgataaacacatctaagaacactggttgctttctaaaatttccaaagctccaccataaatgtaatttttagtgtttcaaatgattgcattttaaagtatataaatatgggttatccaatatcaatgctatagtaacatcctgaaacaaaacaagcacaaaggtataaatgcctaaactggaggaaacttgaaaccctcatgttaaatcttaaatgtagtatttctaacttgtgaagacagattggtaggcagccatttttttgtgtcttaaaataactgggggcatagttaaaattttatacatcaagtgattgctattattgaatgttgcaggtgagatgtggttatttttagtttatttgaaatgtttgactggaaaggggggagggggaagcaaatatttgaaatttggaaaaccctaaaccttttggtaagaaattgtaattttcacttaaaattttctttaaggatataagaggtttaataattgatgtagttaaattgaacaataaccattggtgactggagcaggtaattatagcctgcagaaaaaattatcctaagaattttaaaaataagatcctgaagttgtttaattgcatccatttctgtatttatgtgaatttataaactgcagtaagttttgaatgaggttaatcttgtttaatataagtaaatgagtctgtagactgtgatctccccaaactaaaaagtacagtacttggaattgtgttctttatggttgtagtgttggtaaagcactaatatgcagaaaataaaggaattacacagtgcaa

SEQ ID NO: 49190 - DNA, 543 bp, Homo sapiens
ccgccatgttaggagcgcagtggcggcgcaaccagccttctagggcggcggaggagtggagtcaacatatcaatggagcaagtcacagtcgtcgatgccagcttcttcttgaaatctacccagaatggaatcctgacaatgatacaggacacacaatgggtgatccattcatgttgcagcagtctacaaatccagcaccaggaattctgggacctccacctccctcatttcatcttgggggaccagcagttggaccaagaggaaatctgggtgctggaaatggaaacctgcaaggacctagacacatgcagaaaggcagagtggaaactagcagagttgtttcacatcatggattttcaacgagggaaaaacttgagataccagctattacagctggtagaaccatttggagtcatttcaaatcatctgattctaaataaaattaatgaggcatttattgaaatggcaaccacagagggattgcttcaaggccgcagtggattattacacaaccacaccagcggttagtattttggcaagcca

SEQ ID NO: 49191 - DNA, 675 bp, Homo sapiens
agtgcaatagtatatttatttttttacagtaattttggttgccatacaagagatttaaggattgggagaaagtgcaaattacaggagctttttttttttttttataaagtctaaaaagaataaaagcacaaaagtaacagcaacatagataatgcgaacacgtgttgttacacaaactatagtgtgaaacatattagtatttaaaaaaaaaaaaaaaattgttaatgggaaaatcaatattgtggcccacacacaaaaagtcattgccagatcaactggataatgcttgcttgttcaataactgagaaaaaaatttaccattttattaactaaagtatcacaaataattcactttgtgatatgtaaagttcagcaaatcaacagtcacattgagtaatttttatattatgtgaattaacttaaaatgtgcgcagacaccctggaaaaggtatcttggcaggtatacataatttacattttgagagatttgggttttgtatacacaatattacagaaactaggcatgtaaatgcagtttatttaaattacagtatgtaacaaaagttgatcttaaaacctggaataatatcaactgctcatctaaagatcatgttgatattattccaggttttaagatcaacatgatctttagatgagcagtttaacatttgttcc

SEQ ID NO: 49192 - DNA, 2728 bp, Homo sapiens
gacatagcttttctcattcaccctcccacttggggctaatgcacagacatgaacatctattgaggaaaaccacaaaaaacttcaaaacagctacaacgggaaaaagagagttttgtcccacagtcagcaggccactagtttattaacttccagtcaccttgatttttgctaaaatgaagactctgcagtctacacttctcctgttactgcttgtgcctctgataaagccaggcaccaccaacccagcaggactcacgcattatctatgattatggaacagataattttgaagaatccatatttagccaagattatgaggataaatacctggatggaaaaaatattaaggaaaaagaaactgtgataatacccaatgagaaaagtcttcaattacaaaaagatgaggcaataacaccattacctcccaagaaagaaaatgatgaaatgcccacgtgtctgctgtgtgtttgtttaagtggctctgtatactgtgaagaagttgacattgatgctgtaccacccttaccaaaggaatcagcctatctttacgcaccgattcaacaaaattaaaaagctgactgccaaagattttgcagacatacctaacttaagaagactcgattttacaggaaatttgatagaagatatagaagatggtactttttcaaaactttctctgttagaagaactttcacttggctgaaaatcaactactaaaacttccagttcttcctcccaagctcactttatttaatgcaaaatacaacaaaatcaagagtaggggaatcaaagcaaatgcattcaaaaaactgaataacctcaccttcctctacttggaccataatgccctggaatccgtgcctcttaatttaccagaaagtctacgtgtaattcatcttcagttcaacaacatagcttcaattacagatgacacattctgcaaggctaatgacaccagttacatccgggaccgcattgaagagatacgcctggagggcaatccaatcgtcctgggaaagcatccaaacagttttatttgcttaaaaagattaccgatagggtcatacttttaacctctattggtacaacatataaatgaaagtacacctacactaatagtctgtctcaacaatgagtaaaggaacttaagtattggtttaatattaaccttgtatctcattttgaaggaatttaatattttaagcaaggatgttcaaaatcttacatataataagtaaaaagtaagactgaatgtctacgttcgaaacaaagtaatatgaaaatatttaaacagcattacaaaatcctagtttatactagactaccatttaaaaatcatgtttttatataaatgcccaaatttgagatgcattattcctattactaatgatgtaagtacgaggataaatccaagaaactttcaactctttgcctttcctggcctttactggatcccaaaagcatttaaggtacatgttccaaaaactttgaaaagctaaatgtttcccatgatcgctcattcttcttttatgattcatacgttattccttataaagtaagaactttgttttcctcctatcaaggcagctattttattaaatttttcacttagtctgagaaatagcagatagtctcatatttaggaaaactttccaaataaaataaatgttattctctgataaagagctaatacagaaatgttcaagttattttactttctggtaatgtcttcagtaaaatattttctttatctaaatattaacattctaagtctaccaaaaaaagttttaaactcaagcaggccaaaaccaatatgcttataagaaataatgaaaagttcatccatttctgataaagttctctatggcaaagtctttcaaatacgagataactgcaaaatattttccttttatactacagaaatgagaatctcatcaataaattagttcaagcataagatgaaaacagaatattctgtggtgccagtgcacactaccttcccacccatacacatccatgttcactgtaacaaactgaatattcacaataaagcttctggagtaacactttctgattactcatgataaactgacatggctaactgcaagaattaaatcttctatctgagagtaataatttatgatgactcagtggtgccagagtaaagtttctaaaataacattcctctcacttgtaccccactaaaagtattagactacacattacattgaagttaaacacaaaattatcagtgttttagaaacatgagtccggactgtgtaagtaaaagtacaaacattatttccaccataaagtatgtattgaaatcaagttgtctctgtgtacagaatacatacttattcccatttttaagcatttgcttctgttttccctacctagaatgtcagatgtttttcagttatctccccatttgtcaaagttgacctcaagataacatttttcattaaagcatctgagatctaagaacacaattattattctaacaatgattattagctcattcacttattttgataactaatgatcacagctattatactactttctcgttattttgtgtgcatgcctcatttccctgacttaaacctcactgagagcgcaaaatgcagctttatactttttactttcaattgcctagcacaatagtgagtacatttgaattgaatatataataaatattgcaaaataaaatccatctaaatagaaa

SEQ ID NO: 49193 - DNA, 1150 bp, Homo sapiens
  misc_feature (1)...(1150): n = a,t,c or g
cttcctgtgggacgtggtggtagccgttgggttgggaaagtgagggatttttggcctcgtttctcctgcttcttttctcctcccttttactttgccggtagaacacagttatgggtcgcaagaagaagaagcagctgaagccgtggtgctggtattgtaatagagattttgatgatgagaagatccttattcagcaccaaaaagcaaagcattttaaatgccatatatgtcacaagaaattgtatacaggacctgggcttagctattcattgcatgcaggtacataaagaaacaatagatgccgtaccaaatgcaatacctggaaggaacagacatagagttggaaatatatggtatggaaggtattccagaaaaagacatggatgaaagacgacgacttcttgaacagaaaacacaagaaagtcaaaaaaagaagcaacaagatgattctgatgaatatgatgatgacgactctgcagcctcaaccttcatttcagccacagcctgttcaacctcagcaaggttatattcctccaatggcacagcaggactgccaccagtaccaggagcaccaggaatgcctccagnataccgtccattaatgccaggtgttcctcctctgatgccaggaatgccaccagttatgccaggcatgccacctggattgcatcatcagagaaaatacacccagtcattttgcggtgaaaacataatgatgccaatgggtggaatgatgccacctggaccaggaataccacctctgatgcctggaatgccaccaggtatgcccccacctgttccacgtcctggaattcctccaatgactcaagcacaggctgtttcagcgccaggtattcttaatagaccacctgcaccaacagcaactgtacctgccccacagcctccagttactaagcctcttttccccagtgctggacaggctcaggcagctgtccaaggacctgttggtacagatttcaaacccttaaatagtacccctgcaacaactacagaacccccaaagcctacattccctgcttatacacagtctacagcttcaacaactagtacaacaaatagtactgcagctaaaccagcggcttcaataacaagtaagcctgctacacttacaacaactagtgcaaccagc

SEQ ID NO: 49194 - DNA, 843 bp, Homo sapiens
ctcaaaggacaatcggatacatatcttcctgaaaagaagtagttaaagttcccttgggaactagctacttggtagttacaattcccaaatgcagaacttgggcttttcatgttaaaagccttaatctcatttgggtactcaaaagagaaatcagagtttattctggttaacttgagaagccaagaaagatcatttttagcaagtatgccttccatccttggcagaggcttcccagcatcctaggctcagcttaccgggtgataggccccataagacacacacatgagcagggtgagaaatgcttgctttatagctgctccaccctcatctccagagattttagtgtctatggttgtgggtctggaaacctggcaggaaccacttctagagtacctttgcctaaactcttttagaattgaggccccaactttgatggcacatttaatacccaatttcttccataatagatatttttaatagcaggacagatggcactgattagatcaagaactatttggaagtgcctcttatgtttttttcctgcattctgtacataaagttttaagtgggcaggtccagatatgtaaaatcatttctctctattttcccagctggttttgttaatgattctctaggacagcaggtaaatgagttaagttgttggcttggggcaagtgaagtttgtgactatgcttgatttaataagctgagagtctcttgttttgtctgtcaaggtgccttcctctgctgaagccttacctccttctcacccagtaacggttaactcttctcttgtgtatatgcaaataaacctattattcacttctcaaaaaaaaaaaaaaa

SEQ ID NO: 49195 - DNA, 1662 bp, Homo sapiens
cagtgagtgtcttcaagtgaattgttcacctaaacaattttattttcatattatccacataactttttctatgttatatttaaatatgaatggcaaattttggtttttagcttttacattttattatcttaattttataaatgctaatatttcttttgtgataagttatagcatctcataaagtttgttctatttgaagttttttagagtacttgagaaatgaatttagtctgcaggtagtaagtatgctactaaaatacgttagatctaaatccttttatttggtataaaaatgcaatattgagaatcaaaacttgtttttaagagaactatagattctacacaacctgatttcaagtaattattcatagtatttatagttgtcttggcaaagtgattgtaaaattctgtaggacctattcacacttcttccttcttccatatacttctctggttttccccatagttcccctataatttcaagtttgttgaaacctgttaattttagtgggggattagaagaaaaacttggtggtttcttagcatgatggtgtatgtatgtggtaatggaaagtctgtaaaagtaaatatagtgtagcaaaaaagatttcactgagtattttagatactagtgcaaataaagatagaaaatcttgatcataatgtcttaagtttgggaactgtgatattaagaaaagaaattcccttctagaggtgctggccaaaaagccttttgggctaacttaagtattaaatttatatatttaaataattatattttaagttgtagaggattttcccaaggattttatgcttacttgaatgttctttgaatgttcagatgcatatcctaactggatgcttctcaaggccttactgcatatttgtgttgcatatttatgttagttgcaccagggccatttgtagtttgggcaaccgaatgccttaattggaaaaaaggcattgtggtttcccctatgatctaaattgttacattttaccatttcattccgaagttggttttactttattaaatgaagatttagttttcatatcgtatacatagctgtatagatttcaaaattaggttgttaatttgtgtcacttactatttttgtgttggtaatgctttaaatgcatacttaaaaatgaagtactgttatctaagctactgtgtttagaaaatgttaagaatgagcagaaatttttatagaaaagtataaacggaagaagagataagatactgcgaataggccctcaaacttaaaaaagaaaaaactttgccagttttaaggacatattttgattctttcagtattcttaacacctttttaaacaaagttcttgatagtacccactattattgggtttgttttatgccattattgattcttgatattcaagcatttacaatgtagcatatttgattttcttttttctttctttttttggcatcattaacatttcatttgaaatgcatattgttcttgaagtactttgtttttagcataaatgttgtgcattttatcttagtgtttggatgaaaacatttgtgttgtttagctttcatttgctttgtatatttaataatgtacctttattttccagtatgcctacattttgtattgcacaataaatttattttaagctgaaaaaaaaaaa

SEQ ID NO: 49196 - DNA, 576 bp, Homo sapiens; identical to SEQ ID NO: 10265

SEQ ID NO: 49197 - DNA, 1548 bp, Homo sapiens
tttttttttgcattggtaactatgaattttattatgtggacatctactgtggcatgcatctgtacaaacctttcaggcagtggtccacagctgggttatgaataaaaaggcataaatttttctctcattttattacaatgaagtttaacagtacagaaaagtcacatgaccttggtgggtcagatttcttaaaccctgcaacatgaggaactctaaatacattaaatattgttacacattcagacttccaatgtacaagtacttggaaacagttacagccctcaccaagctaggttggggacatgaagtccaacagcatctgaaatgctgtgaaggcaaactttacaaatagcaatgtaagcttacagaacttgcctttactagggtggtatgttcatgtaattccagcgccttcacaatttaacgaaccaaatttactatacttcacttctaaaaacctagatgaaacatgaaaaagaagccatacagtataaattgcaacttcaggaaaagttcctgctttattattccaaataatttttcccatgtaaaataaatgtccaatagttcctggtatgtgggaagataatgtttgttaaagtcacaatgaagccttattgacggaagcttggctatataaacagcacaagttgagaaaaggtttaatctccaaacctattagactggatgaagtaagatcagtaacggccaccttgcgacattacaggaggtctcattcccatcggaggtcgaggaggcccaccctggtaagggggcaccattggcggtccctgcccatacgggggcatagcaccaggaaggtatcctggcatgccttgatgatgaccaccatactgaccatgaggtggcattgggggtctcattccttgttgctgtgggatgcctggctgtggtggcatcatacctccaattggtccaactggtggattaccgatgggggcctgtcctggccgaggaagattacgttgatacttaggtaactgtgcccttctctcttccagggatatatcctcatctggatggatcaacttactggttgcactagttgttgtaagtgtagcaggcttacttgttattgaagccgctggtttagctgcagtactatttgttgtactagttgttgaagctgtagactgtgtataagcagggaatgtaggctttgggggttctgtagttgttgcaggggtactatttaagggtttgaaatctgtaccaacaggtccttggacagctgcctgagcttgtgctgtgctaggaaacagagctttagaagatgcagacagactttctgaattggatgaagctgtacttgagcttgtgacaggtgtccccatctgtccagcactggggaaaagaggcttagtaactggaggctgtggggcaggtacagttgctgttggtgcaggtggtctattaagaatacctggcgctgaaacagcctgtgcttgagtcattggaggaattccaggacgtggaacaggtgggggcatacctggtggcattccaggcatcagaggtggtattccc

SEQ ID NO: 49198 - DNA, 886 bp, Homo sapiens
cggacgcgtgggttaaaagcagattttttacaaacaaaatggcgaaagcactgattgtcatttttagcagtcacttaaggcctatagaacttttttcaagtcggaaggtcctgttcttactatctcaaaaatgggcatcgaacaatcaatctaggagcgtggcagtgggtaaaatggtggacaggcaccaaagctattttctcatctgtcctgtggatgagtggaactgtggaacaagtgatgtggaattaatgggtgcaacagctgtacagacaatcaataacacacacagttctggaaagaacacatcacttgtgcttgtttgatgagcttgtcacattctaatccctctccccatcctgtttcaattttgggaaacttgtatctgctggtgtcagcaattctgattctgaaataggatcaggcttttactacaacagccttctctttcttatttattgtgtcgactcgtggcttatgaataaaggcaggcaaagtttgcagaactgtcttaaggacatttattttttttccctttttaagtaattttacactttagtatctatttcagagtcatatttaaaactatttattagtgactacagtacatgagacaacaaggttactgagattacaattcttcaaaggttaatgataatgtggtttatactgtgccttaatagtaatgctatttaagatatttatttttaagttttactatgctgcactctaaagaaaggaactttagatgtgacactgtaaaattatgtattcatctcatggcataaattatttagtaagtctagatgtagcgtattaaatattaacctattcaactaaagatgttgacttgggtttatttaaattcatatgtcactgtataaga

SEQ ID NO: 49199 - DNA, 1699 bp, Homo sapiens
ctgcagccaaaccaaagcgatcatttatagagtcaaatgtgtgaaccttaagaaagccccatttgtggaatttggaaacgtgtgttgactcctggtggtaaattaaatagtttttttcatcagaaaaattattttttagccattttttttctttggggtggatctgatgccattgatatatctaaaatgtgggataaaacttctttaatagctagaaatcaccataaataagaatgctaaacagaattgaaaattatatcaacttaaaattttaagacagcccagaagacattaatgactctcacttatgaaattgtttggcttttgccactttcctccttggcctttgctatatggtagaatcacagaacttacttagagaataaatatgtctattgttcaagagtaacaggtttaactcatgaccaagtgatgtacatccaagtgatgtattctggaaacgatggaattttacagttacagttccattgagtcaaatcccattttatatatacataaaaattaagttctgagtgagttctagctaaatataagtgcgactgtaaacgcagccaatttttttaagcagaatatgagaacacctaagtattctcttcatagcagttcctataaagggattaaacacttatttctgtgttatggttcttattcatatatttttatagcacctttttttggaacctatatttgtgcttgaaggtgtttttgatatttggaaacagtataagccatttggagtcatgattggtggtcaagtggattcaagctaaaatactaagaccagcattcttagtggcgcttataaattagctctcacctggtttccaaactgcttttaacaatggtagtgctcctggaacaatccttccaagctcctctaaggacaatatttaattcagatactaaaggtaagactggttgttacttttgttttgttgtacaattagtactttatagtcacatgttgtatatattaaatagcccagttttattcagacttgtaaatagaactatttcaatgtagttaatctaaaaacaaaaaagaaaaccccagtcacgatttgcatgttctctgtaagcttcatccatgctggttattgcactgaatgatgtattattagggcatgttaacagtataccagtaacagcactttatctcatttatatgaacacctttgaggtgctacttaagtccaagctctgatgtattattcatttgtaaagataaggtacaggaatgaaccttggtttaaaggtatttttatatgaaaatggtgtgttattggaagatgttaaaatgctaatttgagagaagtaggagtgtatctgttttatatgttgggatgtgaaatttattttctaaaattgaggagaaggaagttatatatttgcagaatgttttaaagtgaattgttgtaatgaagttcctgtgaacatcattatggttttgtacaaataggaacctctgatgtcattcttcaacgtttgttcctgtgtgtacaattgtactttgtatgaacagctttatcatttttataggctttccatgagttttgctgtaactactatggcttatttattttctttaatatttgtgaaagtcttactcctttgttagttttgtttctgcacaactactgtacttttccatatggaataaagactattaatagaaaaa

SEQ ID NO: 49200 - DNA, 426 bp, Homo sapiens
  misc_feature (1)...(426): n = a,t,c or g
cagctgctggtataaaaacagttgatcctctgcctttgcgggaagattctgaagacaatatccacaaatttgctgaggcaactcttccagtttcaaaaattccaaaatacccaacaaatccccctggacagttgccttctccaccacatgttccatcctactggcatccctctcgacgaattcagggctctcttagagatccagagtttcagcacaatgtgggaaaagcaaggatgaacaatttgcagttacctcaacatgaagcctttaatgatgaagatgaggacagattgtctgagatttctgctcgctctgcagcttctagtctccgggcttttcaaactctgggcacgagctaagaaaaggaaggagaatttctgggggtaaaacntaaacctagctgagttggccttatctaaaggaaac

SEQ ID NO: 49201 - DNA, 946 bp, Homo sapiens
actgaaagctatgacatgattacgaatttaatacgactcactatagggaatttggccctcgaggccaagaattcggcacgagggcgctggccatgctggtcttggtggtttcgccgtggtctgcggcccggggagtgcttcgaaactactgggagcgactgctacggaagcttccgcagagccggccgggctttcccagtcctccgtggggaccagcattagcagtacagggcccagccatgtttacagagccagcaaatgataccagtggaagtaaagagaattccagccttttggacagtatcttttggatggcagctcccaaaaatagacgcaccattgaagttaaccggtgtaggagaagaaatccgcagaagcttattaaagttaagaacaacatagacgtttgtcctgaatgtggtcacctgaaacagaaacatgtcctttgtgcctactgctatgaaaaggtgtgcaaggagactgcagaaatcagacgacagatagggaagcaagaagggggcccttttaaggctcccaccatagagactgtggtgctgtacacaggagagacaccgtctgaacaagatcagggcaagaggatcattgaacgagacagaaagcgaccatcctggttcacccagaattgacaccaaagatgttaaaaggataacttcacagtaaatcatttctcctgaaatagaggaagattctttacgttgttgtgcttgtttttaaatcatcagtatagtttaacacattctttctaagcagttttgtgtgggataatttgaagaatatattatgagtaaactccgaaaattttgtttatccaaaggctcaatggattatgtttctattatatacaaggttttaagtaaacataaaatttccagaacaaaaataaaaaatttaaaattcatagcaaaaaaaaaaaaaaaagtcgacg

SEQ ID NO: 49202 - DNA, 752 bp, Homo sapiens
gcgaaggcagttcttctgatctcagtatctcctcccaactcctctaaaaataggtagagtggcagagaattggggtgcctcttctatagcacaacccatgatgcatccagtcatgcctgaccccactatgcctttcccacaaattgggaggagttggggcagtgagcattttgctagctctgtctgtttcttgcttcttgtgccatttatagtccttggccatggagcaacaaaagtagaatggtgccagtgccttaactaaatttttctcaacctagattttcacctgagacaatatggtaatattattaaattactgtaaagatagcaaattttctgggatactttaaaatcaaagttgtatcaaagatcaagaagcacccataaaagctttataaactttcacaaaaaataagtgaaaattctttgtttttatggccgtgtaaaatgtcatttttataatggaaatgtcttaattttcaaacttaacatatactttaagcaattttagtatttaaacctttgcaaaattgtatttttgaatgtgaagttcaactttggcagtaggttgttgcaatagtgatctggcactatggtgccagtatagccacatagggttatttaaattaattaaataaatgaaaaattttattttttcagttgcattagccacatcttaagtgttcagtagccacatgtgactggtggctaccatattagtgcagatatagaaagaacatttccatcatcac

SEQ ID NO: 49203 - DNA, 3972 bp, Homo sapiens
  misc_feature (1)...(3972): n = a,t,c or g
ggtcgactttttttttttttttttttccctcagtaagtattttattgagatttaaagcacaaaataggtgaacaaatcgggaggaaggtggtaacacaggaatgggaacgtaaaagtcaaagtaggcaggactcaaactggccataaaggcactacggcatgttcataaacaccatcaagtaaaagaaaggggaatcaagatgttctcacttcttttctgctccaccttaatactccatctagccactggtatggagcatgtcatcaactcattcttctcacaagctagcaagggaattaaacattttatcagtcaaccctatgctcaccaagtgagccaatgttacacagtgattttgtgcatccagtgactgagaactacaggcaaggataggccctgactgttaataaattggtcgtggctattactagaaaattatgggtgcaggcatttacctatacaatgacctgcttactgtggcagctaacaatatagtcaaaccagtctattaccatatgatgtcctattaacaagagagcccagttgaaggatgtttcatacttttagaaagcctaatttcttactgtaatatcctcccatccctcttttaaaaaggctgtagttcaaaaagcttttatgttctttccctgaaaacaagagaactttggtcaaagccaatttttaagagtcatcacttctgctgagtaggcaaaacaatgaactataacaacagacatcattttctttccttaaattctgaggtttatgctggaaaaataaacccatttctttataaacatctaattaaataaagtatcaaagaaaataagataatggaagaagcatccgccttttggggcactatattcctaaggttgggctttaagattttttaacaggaaacccaggaatttctgaaaaacaaggcctttttcacattaccaagaactcacagctactctgtgaatgccctagatatttgactcaaatttttcactcaatcttattaggtatatttctggattatttgaatctacaaaccaaccctagaatatcatgctttccagtcacacctgtggcacaatgagcagtgtacgaccatgccccatcacaatccaacccttggtaccctacattgtgacacctcctagaaaggtattaaagctgagccaattaatctatattttgatttcagactaagattaataaatgcttttaaataaagtaacttttaaggtatctgaacaaagggatgtaaggttaattcacttctcaaactgcaatttcaactcatcaggcttatgggatggtatgggaccaaattggctaaccctagtaactccctacaaatttggcagtattccaaatttgggtttcccacagtactcattacactttactccgtaataaagtacaaaagttttgcgtttaccccatttcactgtttttcaaaccaattacacaaagcattaaaatttacaagtatgatctaaccaattatcaaataatcccactaactacaaaggggactgactactgggtggaacttaactggcaactgactttactgagattaagtgcctgttaaacataatgatctttcagcagaaaatgcagtatgtgcttttacactttgaataaactcaatttcagaacaaaaagaggctacttccatttccacatgacaaacattaaagacaactgaaccactctcaacactaattatgctgagaacttccagaaagtggattctctaaacaagatcccaagtattaggagctatttcttaaatagtttaaatttgcctttgaaaaaagttccattacttaaaagtattaatttaagcaaaatcatggaacacattgactaaaaaataccttttatttttactcaacttgttaaaggggcagataaagactttggcaaatttgattaactgcacaaaataatgttatccaaactgagtaatttattgctggtctgaggcttgccttgtttacacttaagtagaatttacgttgtttccacaaatggcagatatcaacatttaaaggaatttaatagtgacctattcaataaggcaatcatcttggtagcaaacttttatttaaatcttacataactcaagctttataaaaagccaacataattgaaaattgggttctccctctaaagccttaagtattcaaagctcaaaacagttaatttaaaaataagcaaacaaataaaacaaaaaaaccctgccagcagatcctgctgnnnnnnnnnnnnnnnnnnnnnnnnnnnnnnnnnnnctaaatgagcttaatctttacaaaagttacgttagctcaaaagctataaaatcaaagttatcttaattctacaaagaagggagagggtcttcatgccaccatttccttagagcctcatctttttcatccaatttggccacaaatcaaatttctgtgtgcccctgttttcaagagattcctcttgcagaagaggccaagtataaacatggaagagtaactgcctaagtaggaaagtgttccataataatgtgcaaacaaggagttctgagttaatctctggaactcgacctggaccttgatcttgactttgagcgagatctagaacgggatcttgaagtagctctttttggtggaggggacacagaacgggcctttgagggtggaacaggtagcggcgaattggaacgggactggctccttgatctggattttgactttatatcaccctttccattttctttgggggatcgggaccgagacctgcttcgagatttctcatactcatccttagatctgcttcgagaatgtgaatgggagccccgatcagacttgggcttagatttgctctttgatctagatttcctgccttttgatcgagaacgtgatcgacctttgctccgcgacctggaacgggagcgactttttgagatacttcgagatctactgcggctgctcctgcgactcctacttcgtgaccgtcttctagatcgagacctggatctgcttccagagtaagatcgcctatggcttgtgcgtggcttatcttcaataagcctaatatttctgccatttatttctgtgccatccagtttgtccaaagcacgcttcatgtcagagtaggagcgaaactcaattacaccctcatttgttcgttccttgtgggcatccgcataggttacttcacctgcttgtcgcataaaatcctttaaatcttgccaactgcaccgactagaaagattttctacaataagcctgtattctgtacgaacaggtggtccgtatttgtctctgccagatgttctccgactgctgtatccacctccaccacatcacagtgtgaggtttttggtggtggtttggccacaaaacacgcaaggtaacagtcacctagttcagattaaccagttttgtctaacccttggaatcctcaccatcaccctgcgtctaatggcaaaaggctgctgtcgtcatggcttccggtaaggtcagccaaagggtcatagggcaagggtcacacaatgtatggaaaagccaaggccaatcaggaaaggcagtcatcttagcctcagtggacacagcctcagccccattggtcatgcggcttccgtagctgtagccgtcgcgatcgcgacgcgggccccgggcgtgctctacgatcacgtgctcgccgcagagctccttgccgttcagctcgtaaacggcgtcgtcggcgtcgcgggagtcctcgaactccacgaagccgtacccatttttgaggtctacttcgaggaggcggccatagccactgaaaaagcgctggatgtccttctcccggacgttgtagctcaggcgtcctatgtagacgcgcggcatgtccgtggcgggcggggacccaagggctggttgtcgaacggcggaccgcaagccagtaacgcggtgcgggtgcggggacggcaagagcccgaacacgcgcctcac

SEQ ID NO: 49204 - DNA, 574 bp, Homo sapiens
tttgtgggagacccatttaatgtggacactcaaggcctgggcagagtggggagcgcccaggagttgggtgggcaggcaagtgggtgggttgcaggcccactcttggccccaggagggcatgccaggtggtgggggctggcccaggtaggccaaggggaggcccaggcaggaagggtggcccaggcaggcagacccaccaggggtccctgaaggccagcccttgagaaggtgtctaagccagggggtgagtgcccaggccagagcctagcccagggaggcagggttgggtcccggttgggggctcttggagcctaggggctggcatcactgggggcctccccgagctgctgctggaactccaggcgtgtctgccggttggactccagcagctcctggaggcgggccgtggaggtggtcattcttctcctccaggtggtccagacaggagttgatctggtccagcatggagttgatggcagcgtattctgcttccccgaagccgtcctcctcgccttccgctcccgcctccaccggcatccccaggtctccgttggggcccgacattgcgggctcg

SEQ ID NO: 49205 - DNA, 1184 bp, Homo sapiens
gtgtggccagggcagtgacgggcaatgcggtggagtggtgcctcatggaaagcgaccccggggtcttcaccgagctcattaaaggattcggttgccgaggagcccaagtagaagaaatatggagtttagagcctgagaattttgaaaaattaaagccagttcatgggttaatttttcttttcaagtggcagccaggagaagaaccagcaggctctgtggttcaggactcccgacttgacacgatattttttgctaagcaggtaattaataatgcttgtgctactcaagccatagtgagtgtgttactgaactgtacccaccaggatgtccatttaggcgagacattatcagagtttaaagaattttcacaaagttttgatgcagctatgaaaggcttggcactgagcaattcagatgtgattcgacaagtacacaacagtttcgccagacagcaaatgtttgaatttgatacgaagacatcagcaaaagaagaagatgcttttcactttgtcagttatgttcctgttaatgggagactgtatgaattagatggattaagagaaggaccgattgatttaggtgcatgcaatcaagatgattggttcagtgcagtaaggcctgtcatagaaaaaaggatacaaaagtacagtgaaggtgaaattcgatttaatttaatggccattgtgtctgacagaaaaatgatatatgagcagaagatagcagagttacaaagacaacttgcagaggaacccatggatacagatcaaggtaatagtatgttaagtgctattcagtcagaagttgccaaaaatcagatgcttattgaagaagaagtacagaaattaaaaagatacaagattgagaatatcagaaggaagcataattatctgcctttcattatggaattgttaaagactttagcagaacaccagcagttaataccactagtagaaaagggaaaataggataaaagaacaaggtgtgagaaggaatagaaggaaacaaacaggaaagatatggctgcaccatgcagtgctactatatgctgagattctacaggatgagatttttgaatagctgaggcagttgcctataatctgtgatgacataaaagtatttgacctaaaatctttttatttgcaaaataataaataaaaagtgattctccctcaaaaaaaaaaaaa

SEQ ID NO: 49206 - DNA, 1280 bp, Homo sapiens
ggctgcgcagaggagccgctctcgccgccgccacctcggctgggagcccacgaggctgccgcatcctgccctcggaacaatgggactcggcgcgcgaggtgcttgggccgcgctgctcctggggacgctgcaggtgctagcgctgctgggggccgcccatgaaagcgcagccatggcggcatctgcaaacatagagaattctgggcttccacacaactccagtgctaactcaacagagactctccaacatgtgccttctgaccatacaaatgaaacttccaacagtactgtgaaaccaccaacttcagttgcctcagactccagtaatacaacggtcaccaccatgaaacctacagcggcatctaatacaacaacaccagggatggtctcaacaaatatgacttctaccaccttaaagtctacacccaaaacaacaagtgtttcacagaacacatctcagatatcaacatccacaatgaccgtaacccacaatagttcagtgacatctgctgcttcatcagtaacaatcacaacaactatgcattctgaagcaaagaaaggatcaaaatttgatactgggagctttgttggtggtattgtattaacgctgggagttttatctattctttacattggatgcaaaatgtattactcaagaagaggcattcggtatcgaaccatagatgaacatgatgccatcatttaaggaaatccatggaccaaggatggaatacagattgatgctgccctatcaattaattttggtttattaatagtttaaaacaatattctctttttgaaaatagtataaacaggccatgcatataatgtacagtgtattacgtaaatatgtaaagattcttcaaggtaacaagggtttgggttttgaaataaacatctggatcttatagaccgttcatacaatggttttagcaagttcatagtaagacaaacaagtcctatctttttttttttggctggggtgggggcattggtcacatatgaccagtaattgaaagacgtcatcactgaaagacagaatgccatctgggcatacaaataagaagtttgtcacagcactcaggattttgggtatcttttgtagctcacataaagaacttcagtgcttttcagagctggatatatcttaattactaatgccacacagaaattatacaatcaaactagatctgaagcataatttaagaaaaacatcaacattttttgtgctttaaactgtagtagttggtctagaaacaaaatactccaagaaaaaaaaa

SEQ ID NO: 49207 - DNA, 2065 bp, Homo sapiens
  misc_feature (1)...(2065): n = a,t,c or g
ttttttttttttttttatgatcacaaagaggccacattttttttaattgacaactcaatctctacatacatacagtgttgcacgaattataagtggatcaacaattatattattgatacaaactcatgagcatttacataaaactaccgctctaggttttggtgtgttttgtgtcagctactttagtgaataaacgaaacataaaggaactcagctacttgaattcatgagaatcagctttcaaaaaaagcatatatatcatctcatagaatacttatgtcaaacccaggaaaatcagtaactaagtgacaaaaggaacacttttaaagaaaagttggtgataaatatgttaggctaaaatactaagaactttagcaactggaccgaggaaccagaaaatgtatgcacactgggaattttaacaaaagattacacattctcctgtacagtgaggaccacattccaaaagcataattctgggttgctacaatgtcatctctgctacaaaccattgtttcaaaggtgaaagaaacaagatggtaattgacataaaaaggttttaaaattcttcccactcaaaataaaataaaaataatataatctctatcaaattataaagaaattctatcaaaatgttgaccacataaagaagtcagaccattttgccttcgctgactgccctcagagggcagagcatgtgtcaccctacaaggggagaggggggtagagtccctactctcccccggcctgtggtgtcagggtggaacaggaagccctttggcttcccctggggttttgcttcctcacatagggaattgatggaggtgggctagatggctttaagagacttctcaactaaaagaatcaaagtcagcttgagagcccatctctgaacagacatatagggtggcaaaagaaatggattaaaaaaaggcggatgacgtctttctcaccttttgataccatcactcagaactaatctgtactatagttgaagaaaatctttgcctggtactattaaaagagtatgcagtgaggcagctgacaatgaaatttttcataaaaatgtataaaaaggctatgttaagtttgggtggaaaaaacaatgcaccaccatattactaccagcagtccacgatgtcctgtctcagattttaggagtcaccgatctggttgggagaaatgctgagggatgatcaagccatcaatagcgatctaaggagtgcacacagttcaggaaatggataaacaggtgcccaggaaggcaactttaatgaaactggttctaaaacaaaggatacaagagacctaaatgatccaaaaagagtgatggcttctcattttctgtcccctatagagaatataaatatcatttcttctggaatccaacacactggattcattttcaagatgtatcactttattttccagcatgtgacagtcacatgatttctgcagtgagccccaaagcttccacgagctttcctggaacctacggccagaagagtcctgagatttcaaatattaaagctttctccacagccacaagtccctttgatgtttgggttattgaacacaaactcactggataatttgtcttcaacatagtccatttctgttcctaaaagtgttagctgtgctttcttttcgatgaatactctgactccatcttgaataacttcttcatcagaatctccttttgtctttgtatattctagagtataagaaaggccattacagcccctggttcggacaccaacttttacacctacatgctcaggcttatctttaagaagttgttttatcttgtttactgctgaaggtgtcagggtgagggctgcccgggtgggctgcagcttcctcttgctcacagcccggacagttgcccggactaaggaagccgacatcttcgccgtcccggcgccccggtgcctcgggccgaaggtcggccgcctcagcttctctccctcgtgccgctcgtgccgaattcttggcctcgagggccaaattccctatagtgagtcgtattaaattcgtaatcatgtcatagctgntgggngggcaa

SEQ ID NO: 49208 - DNA, 2269 bp, Homo sapiens
ggactgaaaacatttcaagggtaatgtaaaccacaagaataaagctgtgggtctattacttagtgatgtggttttataatgctacatacgtagacctctctttataccaatgaatatggacagtgctgcaataaaaactgatgacacgtcaaattgttcacctgaagaaaaaccctattatagttcagaaaataatgcaaccaattttaatttaatctagatacaggtactttatttacaaatatttagattaatagcattttgttacatcaaatgaagagtacagcagtctgaataaatccttcagtcacaaaaacaataaaacccactgtaactaactttgggagtcagggtattgcacctcaacaagccgcagtctttagtttgtgattgctaccttatatcccaatgggtggtttgtttgttttgtttttgtaaatatacacacacaccagcaggtcatggtccctgggtgagtcccttgtgatgcaacagtgtaagcaaaatggatcactgtaagtctttaacagaatataccaatctactccagaaatcttattttttaaaaagttaaacaaagacaaaaataaaaatgaatccacaaattaaccaaagcctactttctgcacattccagttttggcttttatttaacattgactatacaatactctggtactaccacatgtttacaacccagaaagatgtacttttatgttagtgtctgtaaagagggatttaaaatgtgtattttaaacacagcagttgagctgagtgcattttctatagtacgctgaggtgttacctattctatttcaaataaattctcaattcccagccactggaatcataaatgcaataaaaaaaatcaacagaaatgaagaacttaataaaacatgttgtccaaaaaaataagattgtttctcttgctatacagtattaattcagtggccaaaccacctggtgcaaagtaataacttactttgtatcagcacaagcgctgaaacacctttagaaacactttcccttttacaaaacaatttatgccaacatgacataaaacagcccctcacactgtgaacacagggatatcttaagttatttcactgtagggttaaaaatgcacaatttaaaatcccttaacagcagacctgtggttctgactgtccagttcagaatctgaccattccaagaagataaaggtataaaagcttaaaatgtgcaatagtaaacccagccttttttctttttctatacagtaaggcaagaatgcagcctgtaatgcaaaaacgtttacaaaaagagaaaagcaggttagcacattgtcgattgcacaagaacagttaagaaaatcagcaggtaagcaacagtgcaaagatggaacagaatctgctagtgttaatcctctgatgctaggagctctttccagcataatgtcccccaaacactgcccagcaccaaggggtggagcccagtacctacttgtgaaactgcagttgtgtctatttctttgtgtgaaatggaagggagtaacatggtcacatataggtcatactgtacaaactggtattttatactgttccaatgccagtaatcaatttattttcttcattaaaataatatacacagaatgtattgttagttcgattccttcaaattttatacatatttactttctgttaaagagaaaaggataaaatggtataaaaaaagataaagctattaattaagcacgagagagaagataaatggatattttccctgtgtgaggctaagacagaagcaaatctcgttaagaaaaatgccacccacacaacaggaaatttatccaaaacaaaacaaaagcagttatagaaccccttctctaccatcagaagtaatttcacagcaataaacttattggttacaacagacatacttgaacagttaaggatgggaagaaaggcttaagatatcaccaaattaaaccgtacagtgagacaaagccttggccaaagggagggtaaaaatcatgaagtccagcatcagtgctcggtttaaatcatatattggtgacatacttatcacgaggacaagggggaaaaaaagtctagatttaccatgcaggagagatttattactctacttgcctttgataacctgattacatctagttgtttagcagtttagtattgtgttaaactgtttttacaacagagttttttctttttttttaattaaacccagtaagatgtacagaagacaatgaggcagtaaaaagtactgcttcc

SEQ ID NO: 49209 - DNA, 556 bp, Homo sapiens
tttttttttttgaattcaaatagtctttaatgtcaaagggaattcagtcataaacctctaaattcccatcattactattctcttcaagggcacagctatgtttgcaatggccctgaaactcctcactcccatacatacaagtcccccatacacacaaagtctcaagcaaatgaggctggagctggagtttgatcttcatttatctgacccaaacacccaggctctttccattgttccacactgcaacatttcagagtagccaaaaaaatggacaacattatcataatacttaaaaaataattattgatgagaaaaaatatttaggactcactggtctatactactgaaatagcccttcaaagtttcttagtaaacttgggaagccgataaacacattcagccaagcatatgatgcagaagctgagtgataaagagacgccctataacattacaatattttgcaaagctatgatcattaataatatgaatattagcaggtaagttattgctgaattgctggtcccacatgagctgtaaagtgagtcctttgtgtacc

SEQ ID NO: 49210 - DNA, 183 bp, Homo sapiens; identical to SEQ ID NO: 10340

SEQ ID NO: 49211 - DNA, 1534 bp, Homo sapiens
ttttttttttttttgagatgtatgattcctttatttttgacctcaacttactgagcaatgccgtagctatggaatagaagcatttgttgcactctttttgtgagccaggccctgtaggagggattgtggatggcaaaacctcaggttctgcccaaatcctccccttgggggctggagggtctctagttaattggcattccggtgcttaaggccacttttgggtagaggtttggcaaggatggagtgtccagacctatgatcctctaagaactttactttttaaaaacagccacccaaatggtggtggcgtggggagcaggtggtggtgaagggactggggtgtctggccatggccacgtacagaggagactctgtgagccctctccctgcctgagggacacttaactttatagcagctacatagggtcaacgggaggcccaccaagtccctgaaatccagggacagggaaggaagtggtggaggggaggctgacccacctctaaaaggttgtgccactatgagtagagcccccaggggagaggcctcagtagagcccccaggtcccctcaggtaagcagtggctcatcctctgcctcagctacccacacccccggctcagccagtggcaccagtagcacatcgtcctcatcttccagggccaggactgctgtgtggggtccaggggggctccgggttggtcctgggggccccaggctgggcaacaggcggcctcgcagggcctgcaccactccagacaatagtgatggctctaggggcagtgagggcagtggccctggggcttcagggacagtagtgggggctggagacgtgctagcagatgggaggggagccttgatgggcagtgggggtgcctgctccccatcttgcccacccactgccccgccctcacgggctggacctgtgccaccatctagggcctcaaggggagcagcagaaggtgtgacctgggatctggcctcagaggcccgagccggggtgttggttcgagggagcaagccccagcggcggagacggcgtacccaggcgtcgcatcaagcgggccccgctgacgacggcgggcacctgggccacctcctggagtcatatcctggcgtaagatctgtagcagagaacgcaggttgcccagcactgagttatcattaggattctctgtaggaaagtcttctacaggtgggatggcaccctgggcaatgagctgcccgtaggaagggggtgcctgctgctgcacaatctcagcctccatccgggagaggggggcaaagatgctgtactcctgggtgcgaatggcatagagcttgcaggtgcagcccagggcgatgaccaggagcaggccgcacactaggctgccaatgactgcagctgtaatgaccttgcggggcagaacataggagcagtcccactcatcactgccgtccgcacagtctggctgcccatcgcacacccacgtctcatacacgcacttctcgtcccggcatcggaaattgccaggctggcaatgccgacagcgtctct

SEQ ID NO: 49212 - DNA, 2908 bp, Homo sapiens
atgaccaccaccctcgtgtctgccaccatcttcgacttgagcgaagttttatgcaagggtaacaagatgctcaactatagtgctcccagtgcagggggttgcctgctggacagaaaggcagtgggcacccctgctggtgggggcttccctcggaggcactcagtcaccctgcccagctccaagttccgccagaaccagctcctcagcagcctcaagggtgagccagcccccgctctgagctcgcgagacagccgcttccgagaccgctccttctcggaagggggcgagcggctgctgcccacccagaagcagcccgggggcggccaggtcaactccagccgctacaagacggagctgtgccgcccctttgaggaaaacggtgcctgtaagtacggggacaagtgccagttcgcacacggcatccacgagctccgcagcctgacccgccaccccaagtacaagacggagctgtgccgcaccttccacaccatcggcttttgcccctacgggccccgctgccacttcatccacaacgctgaagagcgccgtgccctggccggggcccgggacctctccgctgaccgtccccgcctccagcatagctttagctttgctgggtttcccagtgccgctgccaccgccgctgccaccgggctgctggacagccccacgtccatcaccccaccccctattctgagcgccgatgacctcctgggctcacctaccctgcccgatggcaccaataacccttttgccttctccagccaggagctggcaagcctctttgcccctagcatggggctgcccgggggtggctccccgaccaccttcctcttccggcccatgtccgagtcccctcacatgtttgactctccccccagccctcaggattctctctcggaccaggagggctacctgagcagctccagcagcagccacagtggctcagactccccgaccttggacaactcaagacgcctgcccatcttcagcagactttccatctcagatgactaagccagggtagggagggacctcctgcctactccagcccctaccctgcacccacatcccataccctcttctccctacccatcccattccccacaggccctacattaacaaggttaagctcaacccctttcccccagcacctcagaatgtgccctccctctccccctcataaccccacctaacataaggacaagtcaatttgtcagtagcttcttctggcttgaaaccccctccctggattttatagcccacttaccatgcataacagacaagtcccatattttgtcagtagatgcctttttttttccggcttaagccttaagtgccaaatcacaagagaaaaagcagtaacagtttacagaagcaacttagtgccttgtaatctaactttgtcactgtgactacattacctcttcagcgccagagggcacccgtgggcctcccggagcctctgcccatggcggggtggagacccggaaccagcagccccctccactggcgacacaactgcaccttccctcatttcagtctcccgcacacttattcctcctcccctcttcccggtggcacctctccacctgtacccgcccccgccccaccaccccggccccttggaagagttgttgccagaccagggttttgggggaaacctgtcttgacattcaaaacctttttcttcccgatctgaacccctgttgactaatcttgcctgggtttgtgtaggtctgcaggaaggaaggctgaaaaagcggacgaagattttgacttaagtgggactttgtgatttaattttttcttttttttaagtggggaggaaggggaagctagatggactaggagagacttgattttggtgctaaagttccccagttcatatgtgacatctttttaaaaaaaataacaacaaaaaaaaaatgagagaaaagctaaaaaaaaaaaaagtaaggggtgagcagttaatggtattcattccacatacaatatctgtgtaaaacgatttcctgtagaagtagctttaatggtttttgctctagaataccgtaggtctatccttagagcactcacgccatgctttcttccctgggttttaaacttcatataactttcagaaattggagagcaaaaattttgcttgtcactgcacatcaatataaaaaagcttatttaacttatcaaaacgtatttattgccaaactatgcttttttttgttaattttgttcatatttatcgggatgacaaatccatagaatatattcttttatgttaaattatgatcttcatattaatcttaaaattttgtgacgtgtctttttcctttttttccacagttttaatatattattcttcaacgacattttttgtaactttacacttttttggttattttattttaaaaaaatgaaaaattaatttaaaaaaatgcaaaaaactgttggattatttattttagaaattcccccctttgtgttggactgcaaattgagtttctttctctttaggcctttcacaactaggactgagaatgtatgtaaaagttctgtgacagtacagaaggaaaacaactttttatgtatagcttctaaaaggggaaaaaaaaaaaaaagagaaaccctttgacttccacgtgcccatctcaagacattccactcacagatttgaggttctggattccaggtctggagttttccaatgttaatgtaaacagaactggcacacacacattaagatgaatgtaattattattcctcttgctggtcactaccgtcgctttctatttctctttctttgtgtgaatttatttaaaagaaaaaaaaactttttgtaacgactatttgcagtttaaaaatcaataaaccccgttttttcaagaaaaaaaaaaaaaaagtcgacgcg

SEQ ID NO: 49213 - DNA, 1649 bp, Homo sapiens
ggaaataaacaagctttattttcagtttcaacaggtaaggcgatttttttttttttttttttatggtcaacaaatatttattgggcatttattgtaaggccagggcaagtcagcagaaacgggcctgagcagtgcccaagagcactcactcactctccctagcaaacaggctcagaactctctcacacatgtcatcctctttcccactcaaaactcccaccccaaccttcctggaaggcagggctaacaggacctcctgcctgcctgctcacgactggattactttcaatcccagctgcaatgcaaactggaaactcattctgtatatcaccactctacaggagaggtctatttctggggcacccagaagtcagcacacatactgctgggaccaggactcgtaattcgccttggtccaactccttctatgggtttagctgccctcattcctgtgggtaatacaagatcaaacagtccacaactttgcctgtcttctctgctcccctaaggtccctctcccttcgccgtaagatgtgactgaccagtacagtttctcctgaattgacaaactgaactactccttctaccggctaaaccctgacatcagtagaatcaaaccaaaaacaaggtagagtgtttcacagagaagtggtggattgaataaggcagcagaaacacataccatccagcccctgaacctgaattttgccaaaacagagatactttaagtccatttcttttcaaaggggttaatgctcaaagtgggaatagtgactagggtattcctagtggttgggaataataatttcctagaaaaggttcattgctgaggtacccaaaacagacatcatgctaaggaattcttttactgtgcgcttccctgaatagatacgccgtcaaacaaggcagaagctacaaataaagcttacttctactgaactcatgaagctgttcctagtgtcagttttgagtttcaagtgaagactgaatgtcaactgcaggctttccgaattcctcgaccatgtccatccatggattctcttcttgtctagatttccaagcatgaagatgctaactaaagcatttctcaatggggaacacgaaaagatttctattattgtgggttctccggtgttcctaaaggctgagttataactaaaggatttcaacctatttgtgagtttgatggtaacgctggaaaaatgcttgaagttgttactttgctcattataggagtatggtttccctccaggaaggtttctctaaaattaagagctattctacaacagagacccctctacacttaaggtatttatgggatctgtcctctcatggcttctcaggtgtttaaagaggctacaactccagctgaaattcattccacattctttacattgaaaaggtttctcaccagtatggattctctgatgttgattaagatgtgacttcagagtgaagcctctgccacattcatgacattgatgggattttgtgctggagtagattttttgatgttgtttggtgtgggaacactggccaacattttctctacatatatcacattgatagggcttctctgctgtatgagttctgtaatgctgaatgaggtctgagctataaccaaaggcttttccacagatatcacactg

SEQ ID NO: 49214 - DNA, 623 bp, Homo sapiens; identical to SEQ ID NO: 10347

SEQ ID NO: 49215 - DNA, 520 bp, Homo sapiens
ctagtgtgctatctaaggtctagcagtcacttcactagtgggcagagacaagttctaattgtattacagcacaaacaaaactgactagtttttaaattgcacaattttttttttttaaagcaagaatcattttctgggtatgtaagtgtaaatgtagatgcaaatttggctgcacctctttatcatgcctgtattggcctataggtctgcactttagtgttttttaattgttttatttctgtgtatttacgaacagagaaataacccaaatattatttctgcttagtgtctttatttataaagcccatgagtagtttgtatgcatctttcctacttgtaaagatgagtaaaagtatgcagttttaaatttataatattattggatgttctttgctttggtagtctttccagaaaggataaacagtggtttttgttttgttttgttttattgtttaagtgggaccacttagcttcccgtttccttactagttaaagaacagacattaattttcagttgaat

SEQ ID NO: 49216 - DNA, 884 bp, Homo sapiens
tttttttttcctctgttatccaagtagaaattctgggggtttttaaatacagcatatttctcctctttctccaaaaatagtattttattttctgtgtctcttgtccagtctgataagacttcaacaacattttcatggtcttcaaaaaacctctcaatttgtagttccgggtagatttcataaagacaccagtctacattgcagtcacaatgagttttctcgaaaaggttgtccagaacatctcgggccagctgccgctcatccaccatcagtgactttgtgctgttatcattcatgtgcaccttgacgacgagcttcttaaccttggcctccttcagtttttccagcgccacgttaattttatcagccttggcttgggcttcttcctcttcctgagagagaggttcaggaggtggtggtggcagtggaaggtctaacacaggatcggctggtggaggtggtaagtcatcctcatattggctgataccagtggcagcaacatttgttccataaccaagagaggctgcaccactgaaaattgatgcttgtagagatgctgaatgatgttgattctgcaaggactctttctgtgcctggattgtcctctgctcagcctcacttatgtctgctaccagatctgccatgagagcatctaaatcttggtcttccagtgcatttaaggactcatttaaatctttaaaccccacactgtagttaaattcagctctgggtggattagggtcaggaggagggagagtgtcaactcctaaactctgagtcagaagatccatctctcccagcaaagtgctgaacatttggtctatgtcttcacttgactcacccatctcgactgctctgcgggcgctcggggcgcgggaaggcgg

SEQ ID NO: 49217 - DNA, 1020 bp, Homo sapiens
cttttttttttttttttttgacaaattaatatattttattgcataattctgatgggaaaaacatagctaaaatagtgcctttggtatcttatttacagtcttctagtccgtcatctccctccttcattttatatcaagtttcaaaattggtttcatggtaataaaatcaaagttgtagacctctggcatgccctgatgtagagttttgttgaaacggtcccagcgaaaaacagggaggccaccttgtactgtgggaccacttatggcataggatgtgtactgagatgctaggtagatatctgccacctttgtgtcataacaacctccaggacttgggttaggtgagttcaggtcctcacggcagcagatggtattacaggggtcacctctactgtaaggatccttcttataattgttgtatcgcatgatatatttcatggatgccgtatcagtcactttcccttggtcacgccggaaaattttggctcgtggagctaaatcataagagtagtccaagcccagcttctgaactaacagtggatagccactccagttgtagattttttcatggaaaggaacattgtaggagggccaatatcctttccgtagaacatcagtttgttcagaatattcctacatatgtaggaatttgctccacaatgtacagagtgcctttgtcaagactgtggttcagctttactttcttcaggtccagaaccatgtattgattgttataggtgccagagttgtattttgaaaagatgtctgcccacctcttgccactatctgccatcatattggccacacggactctttgccaggacaggagagtctcgggtattacctgctttagcagggttttattaaacacactgtttgtggtctgcagcaatatcaatccactgctaagaatgtaaaaatcatccagagactccaaaaaccctgggtaactgctgaaagagaggcgactactgctggtatctttatctatgatgttgaagtcccagtgtttatatatcc

SEQ ID NO: 49218 - DNA, 1239 bp, Homo sapiens
ttttatatatatgcatgtattaccgatacctctcttttttatctgcaggaaatggacaggctactagcatggtcccactgccaggtgggagattcctgatgggaacaaattctccagatgacagagatggtgaagggcctgtgcgggaggcgacagtgaaaccctttgccatcgacatatttcctgtcaccaacaaagatttcaggtcaagtttacccatgggggaactggttccagccaaaccgcaccaacctgtggcagggaaagttccccaagggagacaaagctgaggatggcttccatggagtctccccagtgaatgctttccccgcccagaacaactacgggctctatgacctcctggggaacgtgtgggagtggacagcatcaccgtaccaggctgctgagcaggacatgcgcgtcctccggggggcatcctggatcgacacagctgatggctctgccaatcaccgggcccgggtcaccaccaggatgggcaacactccagattcagcctcagacaacctcggtttccgctgtgctgcagacgcaaggccggccgccaggggagctgtaagcagccgggtggtgacaaggagaaaagccttctagggtcactgtcattccctggccatgttgcaaacagcgcaattccaagctcgagagcttcagcctcaggaaagaacttccccttccctgtctcccatccctctgtggcaggcgcctctcaccagggcaggagaggactcagcctcctgtgttttggagaaggggcccaatgtgtgttgacgatggctgggggccaggtgtttctgttagaggccaagtattattgacacaggattgcaaacacacaaacaattggaacagagcactctgaaaggccattttttaagcattttaaaatctattctctccccctttctccctggatgattcaggaagctgacattgtttcctcaaggcagaattttcctggttctgttttctcagccagttgctgtggaaggagaatgctttctttgtggcctcatctgtggtttcgtgtccctctgaaggaaactagtttccactgtgtaacaggcagacatgtaactatttaaagcacagttcagtcctaaaagggtctgggagaaccagatgatgtactaggtgaagcattgcattgtgggaatcacaaagcaaatagtactccagaaagacaaatatcagaagcttcctattctttttttttttttt

SEQ ID NO: 49219 - DNA, 1537 bp, Homo sapiens
aacattgtcacacatcagtttattgagaaaatcatgatgctatatgttaattctcttcaagtgattacttttcattatgtcagatgagactccaaaaggccatagccatgaagttagacactttcccatattttgttcaggaacacaaaaaccaaatgcaaagaaatgtttaagagaacatgaaattggcctcttccttcccccaaccaaaggtagtcattaacagtcaggaaggacaaactgaaacatgtaaaaagcaaatatttttgctagattttattttcaaagtttcaaacctttccaattttttttttattttttaccccaaaaaaggtatcaatacttttcattccactcttgtcaactttagccaaagccttctgagctgcagtcattttgctatttttcttttcagtcttcaaatctttagtattaaacttagtgtaatcttcttttgcttctacaggctcatctgataactttattttctttgatggaggatttggcaatgaggctgaaggttctggaagctttaagtatttagataagtcatcacttaattctttagggatgtagtcagatatcagaccatgggcataacgaatataatcctcttccttgtcagtggaagcttggtcaccagagaaaaatgcagttgactgtacccgggaactgacattcacattattggtttttaatgctgccacagtttgattaacctttttttccagccactttaatgtcttctctttgctgtacttgtaatatttcttgttgtctatttctggattacctttttcctctgtcacatgatgaagtaacttctcaagtccaggaagtttcagcaacaagatgcaatttggaaacacgttatccaccacaacttgatcaaggggctgaaacttcccctccttatcagcctttatgaggtagtggagaagcagaaatagaggatccacaggtgtggcaaaatggagaagacctcctgattgaactgattgatttataaaccaagaatggtgtttttccttgaaaacttttacttcaaacagctgctgtagacacatattgaacaagtaaatggctccttctcctgaacaggggttaaccagttttacaaacattagcccatttttcatcttctttgaagcatcttttaaatattctgaaaccaggaacacgtgctgccgggcgccaaccccgtccccgcagtccacgccagcggccatgccgcccgcctcttccggggcgccgcaggctcagcgccgcgggcctcagtctcccagccccgccgaaaatggcgggagaagggtctgttccgggtggcgcggcgcgctgagggaccggcagcgcccgggaggaggcccagggaccgaatttcgtttcgtttccgagaccagcctgctgctcgtgttacgtttttaaatttagcgccaggcgaggggctttgaatgccggccggtggccgcaggcaacgggaaggggccgcggcctctccctcgcggctccgctagtggtaggtgctcatcgcgcgccc

SEQ ID NO: 49220 - DNA, 672 bp, Homo sapiens
gagaaagatggtataaatattagtagtggctgacactgagtccagatagtcttgattcctagaaataaacaaaaggtaaacaatgtcaattttgtgtgtgtgtatggcgtgtgtgtagtcatgtatatatgcggggaaaatgttaaggtattcagtcaggaaacaaaaggtttaaaactcatctttcttaaaacttgttataagcacagggaaagcaaagttgaggtaactaaactgaaccaaaaattctgtataaataaggatataaagtaattaacgttttaaaaaacatgtggaccttaaacaaactgtatattaaattcctcttaaatgcccattttaaatatttaagataaatacatttatgaataacaaatctgtgggtgatttaaccatggcaccatatccaagggattaaccttaatgcaattttcctgttaattgtcctaagctttttactaatccattttccctgtgggttagtaatggcaacatgctgcttacagatattcccggggaaaaacatccagacaccagcaaacaaagaaatgttgatttctcttttgtttgctctgaaagtaaaataattatttactttaattaacatggaaaatattgtttaaattctgtacgaacctaaacaagataccgttgcagggcttgatttcacag

SEQ ID NO: 49221 - DNA, 816 bp, Homo sapiens
  misc_feature (1)...(816): n = a,t,c or g
gattattcttacctgagaaaggaagaaatttaattctaccagtgatgaatacttgaaattaattgaactcataccaaaagatgtaatccagtttctcagtttgaaggagaacgtttgactcactttcattgttcatgctagctgaatataatcaagacttttgatttgatttgcttttattattcaatgcagatagagcctgataagttttagaacatttaaagaagattgaaatctcagtcagtaactaaatgataaaatgagattgattggcttatactaggtacatttatttttgaaagaattaatgtaaaataatagttatttttaaagcagctaatattacactgataatttgttgctaaatttagtgctgtccacatcataggtgcttaaatatgtactggttaactagaggggggtaggaaagcaagcggttttatcttgttcttacctttttgcaggaaaagtggctttaaaaaaatttatataataaaactattttggaaattcattcttttagaaagagaccttgagataaatattttttgctctggatatttctatagttctgaacacagattttaaacccactatcaaaatgaaaacaatataaagctatattagtgagtctccatgtagcagtttgtttttatagttactgtttcatgcttaaaacttcattcttactttcattaatgttacccntcactggtatagccactcactaaataagtatatttaaaacatcaaaattttgaactaaagtttgtngattctcttattcagcaatccttatcttatgctggctgcatg

SEQ ID NO: 49222 - DNA, 1139 bp, Homo sapiens; identical to SEQ ID NO: 10394

SEQ ID NO: 49223 - DNA, 756 bp, Homo sapiens
ttttttttttttttacacagcaattatttttatgtaacaactctaaaaagttcttgacaagttattatgagaaacatttcatctaggagtgatttctaaggcagcatttgagtttccataaaaacagaaccttctgtctcagaaggtatatcaataagaggaccagaatcttctatttccaagtgcattggtttctcctgttcacaactcaggtttgaactgtcgttcatttgaatctcttcctcttccaattccaaagatttatctggggctgaagctaccacttcttcgtcttcattttcatgtagaaagttacaaatcatgttgggtcgataggagaaatcattatcctttatttgcagccattccaccccacctatgttttcttctccttccttcttctctgtcaggagagttcttggtcatgctgagcttcttcattggatgggcatttatattttagcactgttttattattgccttctgtatcagcatgttcaacattttcttcaaatataacacaggtccctagagtgtcttcatactccccagcaaagacacagctgtccacttgcagaatgggcctctcagtgtcaatgcccaaaaccttgcatttattttcacattttgagaggaagtctgaatcaataattcctgataattccaccagaaccaactgctcctcctcttcctcgtcttctccgtcctctggactccgctcgtccgccgccgccgccatggtcccgcggcgcctcc

SEQ ID NO: 49224 - DNA, 870 bp, Homo sapiens
tctatgactgattacgaatttaatacgactcactatagggaatttggccctcgaggccaagaattcggcacgaggagcccgcttgcacctcggcgatccccgactcccttctttatggcgtcgctcctgtgctgtgggccgaagctggccgcctgcggcatcgtcctcagcgcctggggagtgatcatgttgtaatccacccaccgccacttcaagaagaaatgatatgaagaagtgccggttctccctcccctcttccgcactgtcccgtgatgatgacgcctccagagaggacgataatctgggttcctgggagagatggcttggtcactattcccacccttgcctcgaccacttgtctcaatgtcaccacctcacgccctgttccagataatgctcggaatatttttcaatgtccattccgctgtgttgattgaggacgttcccttcacggagaaagattttgagaatggcccccagaacatatacaacctttacgagcaagtcagctacaactgtttcatcgctgcaggccttttacctcctcctcggaggcttctctttctgccaagttcggctcaataagcgcaaggaatacatggtgcgctagggccccggcgcgtttccccgctccagcccctcctctatttaaagactccctgcaccgtgtcacccaggtcgcgtcccacccttgccggcgccctctgtgggactgggtttcccgggcgagagactgaatcccttctcccatctctggcatccggcccccgtggagagggctgaggctggggggctgttccgtctctccacccttcgctgtgtcccgtatctcaataaagagaatctgctctcttcaaaaaaaaaaaaaaa

SEQ ID NO: 49225 - DNA, 1306 bp, Homo sapiens
tttgaaaaccccaacttttattcttgaaagacagctggattaactggcaaaagccagttgtgttgaaatttcaagatggtataaaaatgcttccaggatatagtcagcatattcacgttcacttcagttccattcacagatggatttcagcttccaccgggtgcactgcttgaatcactcatccatcatttgccaactctgattgtgaggtactgatacaatggatcaaagttcttaaaaattttaaaaagaataaatgatgctgggaattctgggacctgagggatctttaggtatttgaacaaatccacaggattaaactgaagggtaaattaaggacttcagttttggttatttccaacttttctggtgaggggtggtatatccattaaagcttcaggcttatagccacactgttacttttgtaggtaatcttcaagttttatggtttaaaatccagccaaccagtggctgtaacagccgaattagccataattcactggctcacacagtggagatctggctctcattcatacccaaggcatttcttgggtaatgacctccatatttagagatcaggggaacaactttagtgagcagcaaccaatccactcaaacagtctgccttgtgctttatgcctgactttttcttgtgcctacctcagcaacccccaatgtaaaactgcttttatctttgaaaattttttgtcaactttgaaactattttagtaacggattctactccaagcattgctatctgaatccactggcatcctggaaaacaattctgcgaagaaaagacatttgccttggtccaggttccatgcaaaaccatttttttaaaaaaatggatccaatttggttctgtattcttagatggcttcttgaaatcttatctttaacctgttcatgattatcccaagttgcaccttccttttggtgaccttgacccttcagaactgggtaattgtaaaggcctctcttctcaaggattccatgaagacctagatccaaaatgctgatttcaatggaggtgaagggatagacaccgcaacagtgaggcctagagagatcttttatgccagattacccaggtgcaacctaaatgcaactgttatcaatggtctgggtaacttggacatgtttcttgccctggatgtgcaaggatctattccctccagggattatcctgatgggtttacgaacctcagttgagaaacaacagaagctgagacaattttacgcaaggtgaggagatgctgttttcctctttgcaaggttgctgtcaagttccttggaacttgac

SEQ ID NO: 49226 - DNA, 524 bp, Homo sapiens
cgtgatggtcagataattcactcaagaataaaacatgacacgtgcctcaggaggatctctttcccaaagtgacagcaaggagggcagggcatcggccaccaagcggggactagcaagtgaggaaggggagggcagtccaccgtggtgaggagagagtggctccacgaccccaagggatggccttctcctcccacccggtgaggggaaagactcaccagagggtgatggagacagtatgccggctcaccttggtgaccagccaagatgtctcaagtgacggtgctaggtgttcacccagcctgtccttcagataggagtgccttcacgaaagcgtctcatggaccacaaagcaattatgcactgagtcatcttcagtatttaatgcaaaaatgaagcatcatggaatgaaattcccactgtctgtcatgacaagcttagctgtccattgttttaaattgtgtatttatttttttgaccacttggttctagttgggcctgactccttcagagtgctgcaccccgat

SEQ ID NO: 49227 - DNA, 909 bp, Homo sapiens
  misc_feature (1)...(909): n = a,t,c or g
tggatgttaaaaaggaaatgtttattttcatgttataaggtgattacaaactcctctaaaaaaagcaaagatgaatttaaaatattgatatacatatttatctaaaaagcaaaagagaaaaaaacccctgcaaaatacagggaatcatatcataaaacatttatacacaaaagcttgtatactgcaagactgaactacacaccaaggatcttgttcaaatacaaatgttcctcctcagaaaagtctcttgttggttgattttttttttataaaagtttaaaatatcttaaaaatattttgaagttttaaaaaaatgtcctgatgagccagacatatttctggaaggaggcaagacccacattctcagctttctcttgtgctaaatacagagtcacagttgctagggattgggagattaattgggtaaaaaaaaaaaatgaagccaacatctcaatttgaagtcaaatatataacaggatgctccatccctcggagaacacgccagaacatgtctgtagtgacacccacaagagaacaatgcaaaaatgcttcctattacaacaatatatattctgaggatcagggagagaaggaaagggggagggctgccccctgctttctggactgcccacctctacaagtttggctctctgggtttgttttgttagtcttgtggttttgtacttcgatttttgcacacagtggtatttaccgtgtcccaggcagcctggcctgggaccacatgggtctgagggagggatgggacctcaggccaccttgaaggattttctcttgggtcctttcctggcttgtgtctgaatcttgggtggggtgggctgcggggagcagttaggtgcctctgcctttagactggctacccacagcatttccccaggganaggggcttta

SEQ ID NO: 49228 - DNA, 973 bp, Homo sapiens
ggaggctcggcgctcaggaagcatggcactctggcgggcataccagggggccctggccgctcacccgtggaaagtacaggtcctgacagctgggtccctgatgggcctgggtgacattatctcacagcagctggtggagaggcggggtctgcaggaacaccagagaggccggactctgaccatggtgtccctgggctgtggctttgtgggccctgtggtaggaggctggtacaaggttttggatcggttcatccctggcacccaccaaagtggatgcactgaagaagatgttgttggatcaggggggctttgccccgtgttttctaggctgctttctcccactggtaggggcacttaatggactgtcagcccaggacaactgggccaaactacagcgggattatcctgatgcccttatcaccaactactatctatggcctgctgtgcagttagccaacttctacctggtcccccttcattacaggttggccgttgtccaatgtgttgctgttatctggaactcctacctgtcctggaaggcacatcggctctaagcctgcctcactccatcgtttccaccttgcagtgatgcagcttgaccctggaacggtcagacaacctcctcaaagtgggcataccagtttccacggggttgggttgccggtcagagcttaagaggactagcaccctgcaatgcccctcttcactctaaaatgtacactgactgctttagagcccttgataatagtcttattcccaccacatactaggcactccataaatatctgttgaaccttcatgaccttatcaactttacacccatatcccagcaaatgccactcatccccactcttcatagacacatttgttactctaaccctgcctaggcttcttgtagctccagctctttagagactcccggaaccctttatatggtgcctcagtaaatatgttattaaatatgtaatccgga

SEQ ID NO: 49229 - DNA, 1975 bp, Homo sapiens
tttttttaaagtcagatgagtgtttattgtttgccaggctttttgcatacattagtccatttaattctcagaaacgaccttcatatgaaacaggtactgattttattcctattttataatgagagaaccgagttactgagaggttaaacatctcacatttcttatccactatgttatgctgactcttataaaatgattgtggaaggtgtgttaatacatttcaactggaaaaaaaaggtcagatcccccgaaaatgttgttaggagttgggttaactgctttggaaaaacaatggaaatatttaaattccagttgtactgaaataccttttaacatccagcaggtggcagcactaagtaacaattccatactaggtcatctaacagaaacattaatccattctgcacaaatcaagacttctgtacactccatgccttgatgatttcttcagcagcatccagtgtgctgtcttttttaatgaagcaaaaacgcacaaacttctcaaactgtgatttagtctctgagttacagaatgctgaaacgggggatggctgatagtttcttatgtttagtcatccatttcacaaacttatagtcataaggctcattattcttcatatcagagaggtctggatctagcaaagacacatcagcgatgatgaagtatcctccatcaggaactatgggttttaggccaacactttcaagtaaacgtaccatccgatctctttttacttctaactcttttggcaaagaattaaagtaacattctgggtcatccatgcgcttgatgtcaatccagaaagcttgagccaaggcttcctgtaaaggagtttgcacaagtataaatcgtgttttgttgaactgtctgtaaatgttttatcaaatgatttggaccaatggaccagccaagcttccagccagttacactgaaagtctttccagcacttcctattgttattgttctctcccacatacctggaaaagtagctatttttaagtgcttatttccagaatatacaagccattcataaacctcatcgctgatgcagagtgtgtcatatttgatgcaaaggtcagcaattacttgcagttcctctctgttatacaccttgccaagtgggttatgtggagtatttagtataatagctttggttttggaattaaatttactttccagttcttgaggatctaatgtccagtcagaactagaccatctttttccataaacaggtttagatctcaggggaataaaaacaggtgttgctccagccattctcaccatgggctcatagcagtcatagaaaggcactattagtatgacttcatctccctcatcaattaatgcttgaatggtgttaaaaagagatccatatgctcctactgtcacaaggatttctttatttgaatcaatttgcttttgataaagcttttcatacagataggacagagctttcacaagtgatggatggccaaagccctcgtgtatactgattcaggctatcgattgctgcaatctttgataattcttcttttacatatgtaggaggggatatatctggaaagccttggccaagattcacaacagaagggtctgcagccaatttggtaaattcaatccacacattactatcaagtccttcaatccgttttgcatttgtgaatttcagtgacattttagcagaagtagagaatccgaggattttggaagaagaaattgtcttcaggaattttgctctaccgctaagagagcagaggctcctctgggccaaaaacatgctatccggtgcgggaacctcgcctccctaggctcgagtcccgactgggcttgagggcccggctgggcgggattcggacgcggggggcggagccgggacagggattgactctggggtttgcactcagtgcgcgctttggcggaggggtaggccaggatctctaggctggaagagactggatgaggggtgtttttttg

SEQ ID NO: 49230 - DNA, 1374 bp, Homo sapiens
tcattggggaattgtgtgtattttctagcacttgtgtattggaaaacctgtatggcagtgatttattcatatattcctgtccaaagccacactgaaaacagaggcagagacatgtactctggtgtgatctcttgtcctcagtgtctcttctcgggctcctgtccctcttgctttatagctagctgcccggggaccaaggtacaggtgaaagcaaggtagcagcttgcgggaggaggcctgtctggcttaccagtctatacactgtggcctcaacctcccagacagggcagagaactgtgggcagctcgtttgctttctaggctggctggagaggtgggagctcattgatagactcatgatggaaactatttttgaaacaggcttcctccttcaggagagatcatgcggactaaactgtagcaattccagtgcacctggcagtgatccttttctttgcaaagtactgtctctttggttccagtaagttggaccaccacatgacatcattttccctggaacctggtcactgactaacacagacaattgggactccagagcctcaagagccaggagagggcacagtacatacagagggagtcaaatgggatctcattttgagtcctgccttccgcacactcagaacggcagccccaaggcccggagtgtccaggggcttctggcctgaggtgaatctgccaggcccaagaaggcacaaaggtaggagcacagagagccccattcccacaggcgggcggcccagcagcaccagtggaagctcagctgtcctccagctgctctcggcagacagttcagtgcacagtttatgccctagctgaaaaagatctcccggacgtatttcagcacatcctcttcctcctcctcctcagggctcctgctacaggcagagctggaaccccccggcctctgggaagggctgaggcctggagccagtgcctgtttcccactgtcctcttcctcactgctgctcccagaacttgtgtgaggcgacacggagcagggaggggagtgctctgggttatcagcccccgccagggccggctgctcgcaggccttttcctgtttgcggctctcaatcaggattcccagagcaacatcaactatctcagcctcattcatgcagtacacagtccttgtcgcagggagtctgttttttaattcaggaaggtaaatctcgttctctcgtcacacccggaattacaggtccatttgtcctcagtgggagttgatctttgattcctgtgggaggcccagagcggggtgagtgcggagcggagaggcgcgggcgaagcaccgcaggggcctcgctgaccccgccacacgccgggcagggctgcaacggctccttccgactgg

SEQ ID NO: 49231 - DNA, 608 bp, Homo sapiens
cttgagcataggaatttgaggccagcctgggcaacacagtgagactctcccatctgtttaccaaaaataaataaataaataaataaagaagcagtgtaacccagaaaagggaaaggaactttgcactgctggagaaaaacaaataggaaaatgctgttctcagaacaggaaccaaggctttctgacgaagaagaaaccttggactctgggatgaccgccacaaataccaacaggtttgaggcagcctgggatgtgatccagaggaaagccaccacagtgaatactatgaaaatgactgtgtttccctgcatggctaactggaaactcaggatatttgctggaaaaaacaaaagactctgttgatccttttcattcctgctgactgtgcaacttgtaatctgcagtttgaatgataacagcataagacctgggaaccgcctataataaagcagtgtgccagaaaggggaagaatttgggacataaattggtgtttccgtcattcccaacttgacgctaagaattttaaagagaaaaaaagaatgcagaaagcaagtgggcagccaaatgatgtgtcccaaagaatgtgaaagttctttttttttttttt

SEQ ID NO: 49232 - DNA, 1680 bp, Homo sapiens
gcgaggcagaaaaaggatctgttgcagagtgagaggaagcatagggggaaactccattggaacagattttcacacaacgttttaaattgatataagtttaggcagttgtagttcataacttatgttgctcatgttgtgctgtgtcaggatgggataggaagcaagtcccatgcttagaggcatgggatgtgttggaacgggatttacacacactggaggagcagggcaagttggaattctaagatccatgaacccccaactgtatttcctccctgcatattttaccaatatattaaaaaacaatgtaacttttaaaaggcatcattcctgagggttggtcttaatttctgattaagtaatcagaatattttctgctatttttgccaggaatcacaaagatgattaaagggttggaaaaaaagatctatgatggaaaattaaaggaactgggattattgagcctggagaagagaagactgaggggcaaaccattgatggttttcaagtatatgaagggttggcacagagagggtggcgaccagctgttctccatatgcactaagaatagaacaagaggaaactggcttagactagagtataagggagcatttccttggcaggggccattgttagaatacttcataaaaaaagaagtgtgaaaatctcagtatctctctctctttctaaaaaattagataaaaatttgtctatttaagatggttaaagatgttcttacccaaggaaaagtaacaaattatagaatttcccaaaagatgttttgatcctactagtagtatgcagtgaaaatctttagaactaaataatttggacaaggcttaatttaggcatttccctcttgacctcctaatggagagggattgaaaggggaagagcccaccaaatgctgagctcactgaaatatctctcccttatggcaatcctagcagtattaaagaaaaaaggaaactatttattccaaatgagagtatgatggacagatattttagtatctcagtaatgtcctagtgtggcggtggttttcaatgtttcttcatggtaaaggtataagcctttcatttgttcaatggatgatgtttcagattttttttttttaagagatccttcaaggaacacagttcagagagattttcatcgggtgcattctctctgcttcgtgtgtgacaagttatcttggctgctgagaaagagtgccctgccccacaccggcagacctttccttcacctcatcagtatgattcagtttctcttatcaattggactctcccaggttccacagaacagtaatattttttgaacaataggtacaatagaaggtcttctgtcatttaacctggtaaaggcagggctggagggggaaaataaatcattaagcctttgagtaacggcagaatatatggctgtagatccatttttaatggttcatttcctttatggtcatataactgcacagctgaagatgaaaggggaaaataaatgaaaattttacttttcgatgccaatgatacattgcactaaactgatggaagaagttatccaaagtactgtataacatcttgtttattatttaatgttttctaaaataaaaaatgttagtggttttccaaatggcctaataaaaacaattatttgtaaataaaaacactgttagtaaaaaaaaaa

SEQ ID NO: 49233 - DNA, 481 bp, Homo sapiens
  misc_feature (1)...(481): n = a,t,c or g
ttttttttaagaattttaagtacattttattaacaatgtatccctttgataagattatgcttcaggaggcttttaatgcccttgacataaactatacacattatacaaaaacaagaaaatcacaacaaaaaaaatcaaggtgagcaaaaccatttggggacaaatcttatttaaattatacacaactcaatgaaatattcttacagaaaaaatataaatactttttctttctatgttacagttatacaatataaatcagatttcaatgtctgttcagtgacctacaaacaccagaacctccaaatatgtagcagcgtattactaaataaaaaaggaaggaaactcatgtgggttaggagaggcattaaggtctgaggatttttttcaccaattcccttaccccttttcaaaactaggtttacaccctttgttttaccatgcggccttnggggttccggncggggntttttggtaaccattt

SEQ ID NO: 49234 - DNA, 505 bp, Homo sapiens
gtagggaagtgagagcaaagaaagggagtagaactgcaatcagtacatattgtttgagaagttctacaaagttttgtcatttaaatggttgaaagtaatagctccaggagaattttagagtaccattttctttcaggctgccatattatccctgtttccatttgccatggataattggagggtcatggtatagaagcaagagttaataacagaacttgcctaaatgtgttaaagttcatgggggaggggtggcaaataccgtattttaagttatgcaattgcccttttaagaaagtcaattctattcacttgttaactagaaacattgcttagattgaatttattgaagcaaaaagaaaaggcaatgagagagaacttttatcttccttcctgtcacattctgtaaagttgattatgacttctgccagacttagagcaacaactttagttcattttaacatttttttttaatgaagagcatcaaagaatggagagccttatttaa

SEQ ID NO: 49235 - DNA, 342 bp, Homo sapiens
  misc_feature (1)...(342): n = a,t,c or g
ctattaacacatatttggtatgtcatgtgtattatatatactgtactcttataatcaagtaagctagagaaaataaaatcttattaagaacatcataaggaagagaaaatatctttcctgttcattaagtggaagtggattatcatgaaggtcatctatgtcatcttcacattgtgtaggctgaggaggaggaggaagaggaggggttggtcttgctatttcatgggtagcagaggcagaagaaaattcatatgttaagcggacctatgaagttcaaacccatattgttcaagggtcaactgtatactgatagcattcagtaaaaagctgaaaatccnaatt

SEQ ID NO: 49236 - DNA, 685 bp, Homo sapiens; identical to SEQ ID NO: 10454

SEQ ID NO: 49237 - DNA, 2547 bp, Homo sapiens
tttttttttttttttttttcaaatattcagggaactttatttttaaagaataaatcaagtaagacacagctttcgtttacctaaacatgcataatccaacctgaatataaactgcacttaattggtgaattacacatgaaatacaaagggaatgcaattttttacatatgtaaaatgattgctagctatagcaatttaacagtcaaatttatcagaacattgtacattaaaaaacacaaacaacaacttaaagccaaatatctatagtaaaccaaggaaaattctgatatggaatggtttgactaaaagcaaagaataaggcacctgctatgaatttagcacaaccataaaacagaattagttaaccaagacacttggtttcaaaaagggaaacaagtacagagactgattaactggggtgagaaaggcaagtaacaatttagttaaaaacctgctggcccaaggtcagttggattcattccttattccagaatagttaagttcctgaaagtccttaaccactctgctcccttactgttctccatgtttgagggtatcagaagccccctgtgaggttcacgctgtgtatagactaggtagcagatttcccttctgttcctcttaaaacagcttattttaaaagaaatatcctgaggcaattaacaaagcaaacacaagcagctttctttccaacgcattaatacatagacactgctcaggttttttttcaccaagttatggctaagtatacaaatagccaatacttgcagttttcaacagtactagaaaacccaaaacctgccctatgaccctcacccttaccattagtaaaacgtaaatttgatcaatcataacctataaagtcatataacaaagggaagactaaagactgatcattatcagtaaatccattcaattccagatgccactttaggctgatgtgtctagtaccctaatgattgaaaaatcattaatctagaaaaagcatttgcaaactaaggataacttcgcagttgatgtgcctttttttgctattaaaagtgctatttaacatgctaaaatgtcttatggcacattggactcaacagcatgttctgatgaggcatccatttttagcagtatttttccctagaattttgtttggcatagtaaacccctttgatatattaaaatagttctggtgaaataaatgtaacataaacaaaccttccctgactgacttcactcccaccacggtagcttttagtgaaacccacagtaactgattaagtcagaaaacgatcaagttttttttttatggcatcttgggttacctatactcactcatgcaaaatccaaggtagtgtaatggaaacaatattggtaaaatagatgttgtggctataagcatctccctttatattagacatttagaagcttttaaaactttttagatgctaaaggttgtggcaaaactaggctgtgtagttgttcccatttataagcacctttattaccaggaccagttacatgaacctataagggagtgtgctttcagttcaaaagagtaataaagtgccttagcttatattaaaaaccacaagacttcaaattgtaatttaagctaactgcagttatacatttgggttaacaaaatctagaccctgtctatgcagagttagactaattgttcatactgttttaataaccacataaaaaaacttactcttaattgactgaataagtagggtccactactgtatcttaacaatcaaattttattgctttattcatgtggtgttttttgcaaggcactgtggtatggactagaaaacttggaatgactcatgaagaaaccttggaatgacacatgaagcatgataggaaagtcattctgaggcaggatgctttactgaattgttttcaaccagggtatcaaacatcaggaatgagttcaagttaaaattcacaggagaatggaaacatcttaaggtcagtcacttcacatgcccatcctgatactttgaataatctggaaaattgcagaaccacagacaacaaaaatgaagagagccaataaccagggtcctacagacgccttctcttcgggggcatttctcgaggtcttggcgacgttgccgcgctgggtgatgttcttgctgtgcttctcgttggccatacggatcctttgcttggcgaccatcttcgcggcgccaccacctgccccggccacccctcggactcgctcactcgcctgcctcctctgggggccgctgcgaagctccgctcgtgggtgcccgcgccgccggagcgccgaggttctcaggccagacgctagctacggccgctgggcctgggcgcgcaagcgcgaggtctgagcacaagccgggcgccggccgccgactgactgaccgagcagggcaggtgcgcaggaggaagagaactggccgccgggtcgttctcgcgccgccgtcgccgccgctttggccgccgccgtgagcgcggagtgaaagaggaaggaaacgcaacgcaacaacgggaatgtgcagcccgccgcctcgatctact

SEQ ID NO: 49238 - DNA, 1070 bp, Homo sapiens
caggcgctcagcccagccgcgtgccttggccatggcgcctactcttaccgccccggccctggggcacgactgggcctgcgtgcaggcgcggcgctgcggatccagagcttcctgtggaacgttttccagagggtcgataaagacaggagtggagtgatatcagacaccgagcttcagcaagctctctccaacggcacgtggactccctttaatccagtgactgtcaggtcgatcatatccatgtttgaccgtgagaacaaggccggcgtgaacttcagcgagttcacgggtgtgtggaagtacatcacggactggcagaacgtcttccgcacgtacgaccgggacaactccgggatgatcgataagaacgagctgaagcaggccctctcaggtttcggctaccggctctctgaccagttccacgacatcctcattcgaaagtttgacaggcagggacgggggcagatcgccttcgacgacttcatccagggctgcatcgtcctgcagaggttgacggatatattcagacgttacgacacggatcaggacggctggattcaggtgtcgtacgaacagtacctgtccatggtcttcagtatcgtatgaccctggcctctcgtgaagagcagcacaacatggaaagagccaaaatgtcacagttcctatctgtgagggaatggagcacaggtgcagttagatgctgttcttcctttagattttgtcacgtggggacccagctgtacatatgtggataagctgattaatggttttgcaactgtaatagtagctgtatcgttctaatgcagacattggatttggtgactgtctcattgtgccatgaggtaaatgtaatgtttcaggcattctgcttgcaaaaaaatctatcatgtgcttttctagatgtctctggctctatagtgcaaatgcttttattagccaataggaattttaaaataacatggaacttacacaaaaggcttttcatgtgccttacttttttaaaaaggagtttattgtattcattggaatatgtgacgtaagcaataaagggaatgttagacgtgtaaaaa

SEQ ID NO: 49239 - DNA, 2446 bp, Homo sapiens
tttttttttttttttttgtgtattcacctgaatagtcagggaactttcacctattttatttaggttttctttttctttttttctttttttttcaaattccaaccagaagctaaatacaattggaaactggtaagcactagttttactccaaaggagtaggatcattcagatttactccaataaaagtatgcaacccttaagcaaagcttttcttcatttaaaaggagaaaaaaaaaaaaacctatacagtagtctttccttatgttcattgcacaaaatgagttctgcttttagaactttgacactcaatggttaattttacaatttaagattccaactttataaccttttttctactccaaaacacccttgtaaagtttttctttaggatggtgtaaaaaccagcatttctgcacaattcactggaatttttttctttgtaataaaaatctcttctctgtaaagccaaacacaatacaagacaaaacaaaacaaaaccaaaagaaaagtcctctacctatcatggtttctgcagctatgcatgtatttctgttttatagctgctttatagctacttcagactccagatctgctttaatgtgtataactgcatccacacgcagcagaatactcttacaatagcaacttggggaaagagatctggaaaaaaaaaatacatgagtaccaggaaacaaacatggcccagtaaaatatgaggcaaaaatgccctacaatgagatgcgtttttcatttaagatttctttcccatggttgtattttctttttttaaaccagttctggtcattagaatgtatctgacagtgctctggaacaactgtgattatagcaaagttattgtttttaaaaatgttatttatacctgttacattcacttctcaccctctaaatactgatgacagatgtcaaagaggcaaaaaccagcacaaatgggaagaccataaaaatgagtatcaccttgtgctttcagatacatttaagcatttcagtgtacaatagtcctttcatttcacatttttagtaagatactgatgcagtgcagcaaatatgcaaagcatcttctttcacacagtccgtgcacgacatctaatttttgtttaagttctgagataaaaatgatttaaaaaaatccaggatgaacaagtttcaaaatgcatagtgttctgtgcatgagtccattttctttaaactctgaaagaataaagtggtaagaaaacaagaaaaaaaactgctgctgcattctctgatcttctccattttgctggtcagtactctactctggcatataaggacggaggtgatcctctatggtgccaactgcccagtgggtgagctgttcctgtggcaggtagaggcagatgctgcataacttgaagattgtagctttgttttttggagtctggaagtgctgtctgtcaatgaagagaaacactgactggttaggattgttgacaacgattccagtcttgtccttgcggctcagtacatgcagaaactgtttttcatagtcaccatgatgaaactcaaatttggcctgaacaggcctaaaaggctcatcagattctttccacctagaaaacaggagacagacgattttttcaatatcattccgaggccaaagaatgaaatccatctcctgagtacagccaattacatcccttctcatagactgatatcgaggagcatggagctgtaccacatccttctgtaaaagctctagggaactttccaaggaatagctggaatctcgcacacctttcaggatattttcttcataattatttgtcatgactggtataacctcagacacttcaaaaagtgctgactttttcttcttctccttgaatacaaaggcaatatacatcttgaagtcaaactggtcagctagagattcttttttctttctaagctgagcacgtagtctgttcagagcttgtttcttccgggagtttgggtcccccattttgaaatacaggtggtactaaagcctttggaaattgtcactaaactatgggcactttttcttaagactcaagtacaacagaaacaagtcattttttttcctgctaatatgattgattagcgaaaatcacgactataacccaaaaactgcaccttctgtcaatattagcagactgtcatattacagggtcaagaaacaaaagctgctgtccagtcatgtttggacaataacgtttggggtcagacgggaaaaagggaggaaagaaaggaaagaaagaggagaaaataactaactttctggaaaacacatttggcttaactgccaaaataaaggctttgcggagaaatgaaaagcctataatcaggatttaggtgtgcaataaaacacagctgacaccagaccaatccctaaaatccatccggattttcccccctttttagaaaagggattaaggaacagggaggg

SEQ ID NO: 49240 - DNA, 620 bp, Homo sapiens
aggcaaccctctggtcacaaattatttatagttctcccacatgcaaaataaacttaccccttctaaggccccaaagtcttatcccattatagcatcaattcaaagttcagaatcttatcctctacgtaagtccagggaagatgagacttcttgggtgtaattccttaaatacagctactcaagtacatgcttttcaatctgaagttctgcgaacaaaaagaaaaaggtcatatgctcctttccccacagcaaccaatgtaaaacagcaggggcagggagataactgctatagacactcctgttccaacaggtggaaaccaaggtgcacagaagtcactggttcatagcaattctgaaatccatttgagtacaggtttgcagttctacactcaaagcctgggaataactccctatggcttttggttccaccttctgggctcttggttttatcctctaagtcatccttttttgtgtgaaagggagatgtgtttggacctaaatagttttcttagcctgcttcctgttttgtagaaatgcgtttgtagaaagggtccaaaggcccctttcccttttttggtactctttttcagctcaagctgaccagtaatttctgacaatac

SEQ ID NO: 49241 - DNA, 446 bp, Homo sapiens; identical to SEQ ID NO: 5011

SEQ ID NO: 49242 - DNA, 921 bp, Homo sapiens
cccgtccccaagcctccgccccttagcccccgcccccagctgccagtccccagcagctcagtcctgcagtgagagtcttgggagtccatagctaagcaccaggagctgagcactgcccgctgtgcctgcctgcaagtctgacatggctcaggagaaaatggagctggaccttgagcctgacacatcttatgggggaaccctgaggagatccagcagcgctcccctaatccatgggctcagtgacctttcacaggttttccaaccttacacacttagaactcggaggaatagtacaacaattatgagccgtcacagcctggaagaaggcctggatatggtggaacagagaaactgcacatgaaagggaaatgcaaacggcaatgcagataagccaatcatgggatgagagcttgagcctgagtgacagtgattttgacaagccggagaaattatattctcctaagagaattgacttcactccagtttctccagcaccttcacccaccaggggattcggaaagatgttcgtgagcagcagtggattgccaccaagtccagttcccagtccaagacgattttcaagcaggagaagtcagagtccagtcaagtgcattagacccagtgttcttggtcctcttaaaaagaaaaaggtgaaatggagaccagaaagtcagccccaagagactcttccaaggcactaccaatatgttatctccagatgccgcgcaactgtctgatctcagttcatgttcagatattttggatggcagtagtagcagcagtggcttatcctcagacccgctggctaaaggcagcgctaccgcagagtctccagtagcatgctccaattcatgctcttcgttcatcttgatggatgatctctcacccaagtgacttaaccatttctgattcaacgtttta

SEQ ID NO: 49243 - DNA, 1293 bp, Homo sapiens
gtgtaaatgtgacatcctcacacttcccatatctttaactttgaaaaatcttcttgtaaacttaaagcctagaagtattccaaagcaagggttacagcagtctttattctcaggctcactgaattaaacccaggactaattccacagcacaggcacaagaagcctgttgtgtagtgtactctgccagtaccttggatttaggagctccatggggaactgactaaaccaggagagagaggatttggagctagtcagtcctggtaatctatgaaatgctcatttatacccaggtttcataagcttccaattctatagcaaacccaggctctgagtgttttagaatttcctaattcatgaagtgtttcttgtcttgatcccgtgaccaacagttgaaggttggtaaggacttttctacagtctgaacacaacctaaagccctctttcattgttcacacactaactcctactgccgacgaaccgaaaaataattaatgcagaggagatttatgtcttagccataactccagttgtacaactcaatcgccccattctcttttacggttcaaaatgtactgctgaccttgggtttgtttttgttttgttttgtttttcctgttaggatttatttggggacttttggtagtttaaactctttaaccttttccttgccgtgtatgaggaaagctaaagctgttatcaacttcttattctacgatactaacacgggttttcagtgtttgtttgtttttattattattattaattttgcgtgatgtgaataccctctcccatcaatatttgtattatggtgctatatattggtaatgatcctttaatattgggaagggattttaaaaatactgtgattaaactgggtttcttcctttgattttcatattttaaataaagccacagtcatttatacaaaagaaaagcatctgtccctgggcaaatcttttgaggacagaggtcaaagtaaactgcataaggtttttacatcatttctgtatgtatttgatatatagatcaatatctgtacaaatttaatcttttattttcttggtaactcgtgatcattgagaaagtgtttgaaactttctcatgaagtgtatatataatggcgtgaaaaattcctttggaaaaatttatgttcctttcatttttaccaaattgcaaattttcagcatggatgtgaaaagcattaaaattataactttgtgtacaagatgaaaataattcactaaatttgcccttttttacacaaaataaaatgttaaagttaaaaaaaaaaaa

SEQ ID NO: 49244 - DNA, 2378 bp, Homo sapiens
  misc_feature (1)...(2378): n = a,t,c or g
tttttttttcacagttctgacatttttattcactgatcataaatatagtctcatgagcattaaggtgatcatgaatgatgtactagcacctggaacatgaccatcatggagcactcactgattccccatcactggccaaagaagtcggggcatcttcctttcaccaagtgttcaactttggagggaccctccttctggtgcagcaattttattcttggcttgttctcaacaattaaaaaatcataaaagactgagtgtttgcaataaaatatcaaagaggataagaagattttctgttcttcttaaagtctaaaagtaaaaaggggaggtagggaagaaggaaaggaaaggggaaagatgtcagggatctgccacgtttcttccttcctccagagcattttacaaaaacaaaaccggggaggtatttattaatgctgtttggagatgggttgcgtctctctgatgagccactcgagagcttcctggcggccctgtttctgcaattccttcccaatcacatccctgcaggtcaggtggtaattgttgagccagtcgcactctttgtctgtaagagaatccacatctatcattttggtctgaattggaaccaatgttagaggttcaaaggtcaggcttccccggttattaaaattatacttggtcttcacaggaaccacaaggacaacattctcaatgcgaattccaaaagccccatcttcatagtacccgggctcatcagtgacaatcatgcctgcctcccaagggctcatcaagagaatgttttgtaactgatgccgcaaggaccctcatggacattcaaaaaagacccaacaccatgtccagtcccgtgcaagtaatctaggcctgaatcccataaagctgaacgggcaaaggagtcaagaaggtgacctttggttccagtcgggaaaacggctgcactcacagctatgtggcccttgaggacatatgtgaagcattccttctcgtaggctgtaggggtcccaaaatgcattgtccgcgtcacatctgtggtgccatccttgtattgagcacccgagtcaataaggtacacctcatccagggacaaggtcctattcgtctcagggactggcgcgtagtgaatgatggcgccgttgggtcccgtactggaaattgttgggaagctcaggtccacaaagtctgcctgttgcctgcgaaactcctcagctttgtcagcagctgagatctctgtcacaccacctttgggaacctctttctccagccagttaaagagttcacagagagcaacagcatctttaatgtgagcccgcctcatgccttctgactcagctgaattcttcacagctttggcgatgcagatgggggtgtaaggcatacagcagcggtggtccttggggatggtctcgctcacagcatagctggccttgtcactgacccacaccttctcccttggggagaggtcagcacacagggccttgagctcgctcaggatggacttgtagggatgcacctggatcctgtattcggcttccagacccaagtcaagaagcaggtgctccttcacactgggggcgtctatgcggtcaccatcaatgaagagcatgatcgtctctagtcctatgattgcgtaggagaaaaatactggattgtgctccacatctgatcctcggagattaaatagccacgcaatctcatccaaggcagtgaccacaaaccacatgacgttcctctcagccattttcaaccgaagggtctgcaaccttgtccttccaggagatgcctgtgtaatccaggcccagtgtgaggagaggcttgcaagggcgctcaggacggtctgtccagattttgtcaacgaggttctccttgacaggaatgaggtgatggccggcacttctcagaactttggccattttcttccaataatctgtaggaatgatcaaggggtccacaccaaccctggatccttcaggaagcacactcaccagccagtcttcctgagttggtgtgtccttcagacccatcttcataagtgtccagttgctgtccatttgcttggcagcctggagaaagtagcgcccgtcagtccacatggctgcatgctcttctgtgatgatggctgtgcccgcagagccatcgaatccagagacaaaagcccgccgacagtcacatggagcaatatactcactctgatgagcatctcccgatgggatgatgtaggcctggatcggttcggtcacatactcagagttcctcatggcttgtctcagctgccgaagcagctctgaagtcacctttggagcattctgccgtctgtttccacacctgtgtctcctgagtgtgtcacctcgttaggttcaatctgaagtgggagcggncgc

SEQ ID NO: 49245 - DNA, 1271 bp, Homo sapiens
agaagatggtggccaggaagaacacggaaggggccctggaccttctgaagaagctgcacagctgccagaatgtccatccagctactacagacaaccaggattggagttgctgttaatggggtccgcaagcactgctcagacaaggaggtggtgtccttggccaaagtccttatcaaaaactggaagcggctgctagactcccctgggacccccaaaaggagaaaaaggagaggaaagagaaaaggcaaagaagaaggaaaaagggcttgagtgttcagactggaagccagaagcaggcctttctccaccaaggaaaaaaaccgagaagaccccaaaaccaggagagactctgtggactccaagtcttctgcctcctcctctccaaaaagaccatcggtggaaagatcaaacagcagcaaatcaaaagcggagagccccaaaacacctagcagccccttgacccccacgtttgcctcttccatgtgtctcctggccccctgctatctcacaggggactctgtccgggacaagtgtgtggagatgctgtcagcagccctgaaggcggacgatgattacaaggactatggagtcaactgtgacaagatggcatcagaaatcgaagatcatatctaccaagagctcaagagcacggacatgaagtaccggaaccgcgtgcgcagccgcataagcaacctcaaggaccccaggaaccccggcctgcggcggaacgtgctcagtggggccatctccgcagggcttatagccaagatgacggcagaggaaatggccagtgatgaactgagggagttgaggaatgccatgacccaggaggccatccgtgagcaccagatggccaagactggcggcaccaccactgacctcttccagtgcagcaaatgcaagaagaagaactgcacctataaccaggtgcagacacgcagtgctgatgagcccatgactacctttgtcttatgcaatgaatgtggcaatcgctggaagttctgctgatggaacagccagccatgaacaaggtgaggaagaagaaagaggaagcgctgaattatctgaactggagaagcaataaaaattaaagtgaaggaaaatactgaactctgtctgagtgggatggtatgagttagaggaagaattctcttgcaaattaataatcggtcattagaaacaattggttaatgggggagcctaattggagaatgatgctgagaatttgtattgatgaacctcttttagaaactgcagagggctgggcacgg

SEQ ID NO: 49246 - DNA, 862 bp, Homo sapiens
gagttttggtttctagtacctgcttatctagagttaataataatcacccgttcaacaattacagaagaaaaacttttaaagttaagttctaaatttgaagtatataaagaatattcctttaagaatataaagtagtcaagatttccttttactcaaaaaaaatcacttcagaggtgacctccatgtacaaaaggcaagatcaatcacatttatcactggacacaaaggatatttcaaaggtatttaaaaatggtaatttcaaaaagaaaaattaattttaatttttctaatgcattatcaagaccatacttgcttaacaagttaattatgctattgatacaaaacatacaatatttacacttaactgtacaaaataatttaatgtttacaaaaatattagaatgtttagttgactgacacagtcttaagtaatctcttctagagaagtatatagtaagaccactgattcccatttcatttcttttttaataagtcaaagaaaggatgctgcaatgcttcatccaaggtaattctttgagttggatcatattctaacattcttcgaaccaggtcaaacagtttctcatgttcttcatcatgacaaagcataaattccttcaacggtttgcagcgtctcctaacatatctaccagcagaactgtgttcatcccaatctaggctgggttatgggtgaaaatacttgcgttttcttgttttctggaatcatgtgttgtgggtatggggtcctaatattcgttccatcattgccaggtgctctttactatcatgagtctgaagactgtgaaaccaaggtaatattcattaagatgccacctatgctccaaacatcacaaggctgagg

SEQ ID NO: 49247 - DNA, 3182 bp, Homo sapiens
ttttttttttttttttcccttgaaaaaactaggcatttttaatatataggagtggcacagcaaaggataaaaaataaactaatgtcatcaagacaaagaattagaaaaataagcatactagaagttatttatgtttaatgcttaaaagtctgaattcacaaacaatctaccattatagaagtactggtggtcaatacaatgcattagaactatgtacaacgcacagtttagtatcaaaatctttctacactgtagagttttacgaaactgttaatgacatcaaacactaagcacttaagacaccatttttttttttctgctaccacattaggaacgtcaatggacagtccatttcaacttgcagcatccatccatttctagtatgaaattaagtaattttctacttatacaataaagtatatctacacggttcttttgattttgatccatagcagcaaaggcactgtacatcagcagatccacagacttaaaagatttttaaagcattcaaacaaaaaataataaaaaaagaagtcacatattatagtttaacagcaacaacaacaacataaaagataacacaatgtttctggcacaatggcacagcctgtgtccatttcagggacatccaactaagacatggaaggaccggagaaagaagcagtcctcatcccaggagagagtccattctttgtgtttttcagagggaggtctctgcaaaccctcctctgctgtccttgttttgtaaaagacttaacttgcacagcagtgggagtcctccccataactgtgcagctcccaaagagcatgccacaaaataacccataatttctcataacaacaaaactgactaaagatatatatatctccttttgcaaagaaatgtggcaaaaatatccagaagggagtaagttctctctttgaggccaaatttaatttgttcatctgcctataatacaacaaaaaaagggaactaaaaacatattacaaagacacttgtcaacgagtcaaaaaaagaaaaaaagtccaattacttttatcgaatataatctaaagctatagatatattggttaacgttgtctaaatagatccaaatgagtatgagttggcctgttgtgttctaattgttcagccaaatttccaaaagtctttaaaagatgtagaaaacaaaaacaaaaaaacctaataacaacacagcaacatattgcttccatgtgtaattatacatttcacatctctatacagtcatcagtctatacttagtgacattttaaattaattattttaaaccttcctttcccctcctttgccaaaaaaagggggggaggggtatcaaatacaacgcaccttcattatcaatgcaggagcagacagctttatttagtcagtcattgttagaaagccttctttaaacaaaataaatatattacagatataatacataattaaagattcttttcactgttaagtatgcttattccatgttcttccaagtagacagctgaagatttggtatcacaggtttttaatgactattcacaattcaatagcaagtgggaagtgaggttaagaaaggggattaaactccacaactgcaatgagtatctgaaatccttggttttagatgcggggatgggggtgaacaaaaaggatgacagagcaaagtgctaccaggaggagaagtccagtctgcatgaagatttgtctttaataaataacttcataaactgtggccttcttatccccagagccagtgacaatgtatttgtcgtccacggagatgtcacagctaagcaccgatgaggattctttggactggaatatactggcccccataaggtgttctccaggcattcagaaggttgtcctttccagtgcttacaaaccatttgccacaatgggcaaacttgagcgacagcacacagctctcatgaagatgtagttggtatttgtctggcttggtgacatgcaaaacttccacattgctgttctccatccccactgcaagccactctccagttgggcagtagcccagagaaaagatctgggaggtgaagtcgtgctgctgcagctgccgcccctcgcgcaggtccccaggacctgaccgtgttgtccaaaccacctgtccagagcttggtgccatcattagaaatgtcaatacagctggctccatctgtgtggccctggaattgcctcaccaaggtctggttgtgcagatcccacacagcgatgttgccgtcgctgcagcatgagaagcagaccttggaatcggggctgatggccagggcatagcaggcgggggccgaggatgtcagctctgccttgatgcgtggggttggagccgccaggtcccaaatggacaaagtactggcttcccctccaacaattagggtgcgaccatcagggagcaatctgcaggaacggatgtagttatccctgttcagacagtcgagctgggagacaggactcttattgcctgggtggctgatgtcccagaccttgaccgcgcccttcccacccgtgtacacgtgtctcgtggggttgctgatggtcaccgcgcacaccacctccccgtggttgagggtgttgatctggcgagcatgccgggggattccaggtccgatgagggggtcgggtggaaaagggacaggctgcatctgaccatctgcgctaacatggaaggagtatgctggttttcctcctggaatgcctgtcaggtttggaggtattgctggcacacgcatgtgatggtgtggatcaaatccccaccactggtgatctcccataggcagcagcagcagcggcggcggcagcagctgcgctcatctgaggggagatgttgtggagcccagcgtaggccgctccggggctggtcagctctccgttcattccagcatggggcacaatcccaaatggagttggatatggacaaggtactgccattggggtccttaggcttgaggccaaagggtcaactcctggtggttttccaggtacaggcctcaatccgggagtagagttactgcctggggtgggcgcatcagttcgtggagtagggggtattggactttgagacgggagtagtagatttttcattaaggctaagttctttggatttggaggagggagtactgctggaagatgcaatagaggctggactaatcggggcatctttcttgag

SEQ ID NO: 49248 - DNA, 685 bp, Homo sapiens
tttttttttatagatgaaagagggtttatttattaatatatgatagccttggctcaaaaaagacaaatgagggctcaaaaaggaattacagtaactttaaaaaatatattaaacatatccaagatcctaaatatattattctccccaaaagctagctgcttccaaacttgatttgatattttgcatgttttccctacgttgcttggtaaatatatttgcttctcctttctgcaatcgacgtctgacagctgatttttgctgttttgtcaactgacgtttcaccttctgtttcaccagttctggaggaattgttgaacagcttacagcactgcctgaagaagtgatactcagagttcttgttctatactgattcatagctcccacattttcttcatctctgaaaggcctgaattctctatttaatgacgacaaggcaattagatgagggcattcatcttcatactcgtcagagccagcagggactcctccttgaactctctgaccatcttgcctgttgtaattttcagttctgtttttctcctcagaaaattcagttacagagttgttttcaacaacctgcccttttatttcttctaaagcttgattgaattcagtcatttcaaaactccgtgcatcagcactctcttttgataaactgtcttcctttatttgttcagggtctcca

SEQ ID NO: 49249 - DNA, 546 bp, Homo sapiens
  misc_feature (1)...(546): n = a,t,c or g
attggaaanccctttgaaacnttgactgattacgaatttaatacgactcactatagggaatttggccctcgaggccaagaattcggcacgagcagatatactttctctcaagatgtctctccagcaaaacttttccccatgtccaaggccttggctttcctcatcatttccagcgtatatgagcaagacacagtgctatcatacatccccctgcagctttaaaaagcagcagaagcaagcacttctagccagaccctcaagcaccatcacttacctaactgacagcccaaagccagcattatgtgtaactctggcaggactaatccccttcgttgctccaccactggtcatgctgatgacaaaaacttatattcccatattagcttttactcagatggcttatggagccagtttcctatctttcttgggtgggatcagatggggttttgctctaccagaaggtagtccagccaaaccagactaccttaatttagctagcagtgcagctcctcttttcttttcatggtttgccttccttatttctga

SEQ ID NO: 49250 - DNA, 636 bp, Homo sapiens
catttgtatcatattcatttattctcaatacctgggacatttaaggcattcaataatgaattaaagctgtgccttattttggtctgcattaaaggagtggtctaaattttacaagatatattttgcatcagaaaatcaaacttcagcagtttaacatgctggcatccatcaccaaggcatgaagcaacacatttgctaatgattcctaatcactacagtgctacatcatttacttaataaatactgattcagtacttatatatacagatagtctgatggatgagtaaccacagtgatgttgttcaggacatgatgtaaagttgaaaggtgcatattgctatgttttaaaggctgcctttacagtagaagcagcaaagtgtgcttaatggactgctgtcctctgatgaccaagcaaatgcaacaaatgaaatatgcacaaggctgtccttggacagtacttgtttgctttgctcacaaaggagaaaaggaaagaaacaattgaaaatatgtatatggtgaaagtatgtgagtccgagcagaaataacaaaggcaaaaggatgaggagagatggagtaagtctagagaagaaaataaatggatgagatagagagctgtttaagcaaaaaaggtgtcag

SEQ ID NO: 49251 - DNA, 1028 bp, Homo sapiens
atggcataattgaaccaattactggattcaactatattaagactatttccttaaatcctacttcagactaaattattttacctacattcttttccatattttggaacttctgagtcattattttccatcttgcacattaaaataatttaaaattacatgtatcccttctcaataagtttaatcagctaaccctaagctagaggtcaaaatctacttcctctaatatcaaaacgaaaatttaaagttttccaaatattaattcaatattaattgaatattcaatgaattaattcatttaatgttagattaattcattgaatattaattcgatgaatgactaattaataggtattttaacaggattttgggtatatttaacaacattttgggtaattaaggacaataatttgagagtgtgtggaagtccccctaatagaagccaactatctaatcaatgccaaaagtgtgaacaaaatagagaaaggaagcagtgaaaaagaatgcaactttttcttaccattcaaagtacaggatcacagcataaaagaatcataagataaaacatcaaactacccagcaacctgagaagcacagagtgttaaagcctccaccgtgtggagaaactaaattagggtaactagctattgagtatattgagtaccttcaaagcactcaactgacaggttttacagactggaaattataatacttatgacatttctaccttttatataaccaataatctaccatagaatgtagtattcttaaagctattaacaagcaatatattaaaataataatgtattatatctgtttctgacccagtctatgtacaatattgctggtgagccctctcccttcagtgtgtcactgttcactttggagggttactttaggaagaggataagtgttaccacaggggaaaaaaatgcagaagaggatgcatcagaagaaatgggcatgacaatgttttctcttagtgtcttttaaattactaggttagtgcgaaagtggattttctggccatt

SEQ ID NO: 49252 - DNA, 627 bp, Homo sapiens
tgacaatcacacagaaccacttttattcaacatagataaaatgtgatgagtgttaacattttaaataagcaatctgcttaatggacattggtatgaaggggaagtgtcattctttacctcactcctcaaacacttttctatccaaaggttggtttgagtcagtattggcatcatacaaccacttactgtaaaataagtttattagtggtaacgtgatagaatttattcccgatatctgatgttacaaactttagggtccttgagatatgcaggatccttgtatgtaactggcataaaccccattatttgagctctcttaattgcttttgtgatttctttctgtttcttcccacaaagacctgtaatgtgccttccataaatgcatccagtaaatggagaaacaaactgggacaaaagcaggtcctcattgctggatacctgttgtgaacaacctcttctccaaagcaccgtgtgagtcccgggatgtgtaaggctgacagcagccgttaccaagtgtgtcaacttcttcctccctagaccaccgcaaacagcaaccacagcggccatggttccgcgtttcttccacttcctttcattccaaatcgttccgaaaggccccttccgctg

SEQ ID NO: 49253 - DNA, 892 bp, Homo sapiens
gatctgaagtggaagaaacgcggaaccatggccgctgtggttgctgtttgcggtggtctagggaggaagaagttgacacacttggtaacggctgctgtcagccttacacatcccgggactcacacggtgctttggagaagaggttgttcacaacaggtatccagcaatgaggacctgcccatttcaatggaaaatccttataaagaacctcttaagaaatgtatcttgtgtggaaagcatgtagattataagaatgtacagcttttgtcccagtttgtttctccatttactggatgcatttatggaaggcacattacaggtctttgtgggaagaaacagaaagaaatcacaaaagcaattaagagagctcaaataatggggtttatgccagttacatacaaggatcctgcatatctcaaggaccctaaagtttgtaacatcagatatcgggaataaattctatcacgttaccactaataaacttattttacagtaagtggttgtatgatgccaatactgactcaaaccaacctttggatagaaaagtgtttgaggagtgaggtaaagaatgacacttccccttcataccaatgtccattaagcagattgcttatttaaaatgttaacactcatcacattttatctatgttgaataaaagtggttctgtgtgattgtcatttatatctgatccccaaatagctcatacaataatccattcaatagaatggaattaaaactgttcagaatgattttccaactagcaaatataagtatgcctggttaagatatcttccctttgtagaaatgttacattgggatggatagtggtgctgtcacagaaggacaaaatattcctagacgagtctaccctcaaaccagtagtgtctttta

SEQ ID NO: 49254 - DNA, 2747 bp, Homo sapiens
  misc_feature (1)...(2747): n = a,t,c or g
ccgccgaccgagcctgctgctttcttgctactgcttcggcttcccggctaccccccggacggtgaaggcggcccagctgtggatggtcagatagcccttgtctcccgccgccaatctctggcccctagcagcacggagcagacggcggcagcagcagcagcaggcgacggaggaagatggcgggacggctgccggcctgtgtggtggactgtggcacggggtatacaaaactaggatatgctggaaatacagaaccacagtttatcatcccttcctgtattgctattaaggagtcagcaaaagtgggtgatcaagctcaaaggagggtgatgaaaggtgttgatgacctagacttcttcattggtgatgaagcaatagaaaaacctacatatgcaacaaagtggccaatccgccatggtatagttgaagattgggacttaatggaaaggtttatggagcaagtgatctttaaatatttaagggcagaacctgaagaccattattttcttttgactgaacctccattgaatactccagaaaacagggaatatactgctgaaataatgtttgagtccttcaatgttccaggcttgtacattgctgtgcaggctgttcttgccttagctgcatcttggacctcaagacaagtaggagaacggacgttgaccggtacgtagatagacagtggagatggtgtcactcatgtcattcctgtggctgaagggtatgtgattggcagctgtattaaacacattccaatcgcaggacgagatataacatattttattcagcaactgctgagagaccgagaagtaggaatccctccagaacaatccttggaaactgctaaggcagtaaaggagcgctatagttatgtctgcccagatttagtaaaagaatttaacaagtatgatacagatgggtcaaaatggattaaacagtatactggaatcaatgctatctcaaagaaagagttttctatccgatgttggttatgagagatttttgggacctgaaatcttttttcatccagagtttgctaatccagactttacacaacctatctcagaagttgtagatgaagtaattcagaattgtcctattgatgtcagacgtcctctctacaagaatattgtcctctctggaggttcaaccatgttcagggactttggacgtcgcttgcaaagagatttgaaaagaactgtagatgcccggctgaaattaagtgaggaattgagtggtggtagattgaagccaaaacctattgatgtacaagtcattacacaccacatgcagcgatatgcagtttggtttggaggatcaatgctggcttccacgcctgagttctaccaagtatgccacaccaaaaaggattatgaagaaattggacctagcatttgtcgtcacaatccagtgtttggagtcatgtcgtaaaattggcttcatagttattggggttagggaggtggggaagagataatctttctgattacctgttttgtctggatggctggttttgaggttttaaacctgacttgaaatagtaacaccaaacatgattatacaggaatattttaataagtgtatcaccatgcagatgtagaagagagcgaaagtgattgtgtttttctttagattgaatatttgaatcttatgtgtaacaaaaagaagtgggttttagttctttctgtgccctgatattttgtatattaatgaattatccaagattcgatggggatttatcagtgtgtagatagctctataatgcttgaattgtacacttctaagtgtgcagtgcaagagcttgtttatatttcatactttttatactttgaggaaaaaaagtcaaagaaaaattgtatttgagggaaaaaaccatgaccaagtaaaggataaattcaaaaaatagcctcatgagacttggcatacacactcgtgggattccagttattatggagtgcttccatccctctccaccccttccccccaaaaggttttctttgcaagtgcttttggaactaagagctagtatcttggattaactgatgcctgctagtgctttctgattactcgcattctgtttcttgctttaaaagaagagtaaagacaagagtgttggaccagtattgcagttctgtagtgtcatttcttataaaaaacaaaacaacaacaataatttatcaaaattggcatatttaaagcctaacattctaataaaggcacaaatttctttttaatacttgtttcagcctctttaatctctttataagttaactaataaatctattttcttcagacttctgcaatagttctttaaaatcacaacagttagcaagctgacttttgtaatgtgctcaatacaaatacttgtgaacttttaatatgttgagtgctttcattttgataactggatctccatttgatattttcatttgtataactcatttgcagtctgaaaattttttttagtgccagtccctgaacatatcattgaaagttaattttctttgcattttaaaatatctggattatgaagaaaaagtgatgaaaataaattaaaactgaattaccttttctaatgtttttttttttaaggtaatgtaattctattttgtttttatggtatggtggatatctgtttctgttggaggnttggggggagttattggaaatctccggtaatgtgtaggggngggggaaattcctgtggacccctaaaatttacccccgttatttataggggaggg

SEQ ID NO: 49255 - DNA, 708 bp, Homo sapiens
ttttgcatgtgtttataacaggttttactttttttcttaaaatagagatttcttactaaataccattttatttcatttcttcacagatcttctggttcttgatcatcttaattatcaagtgtcgtatatagggaacaagtattgatgttcactatgattcaaactattactgttccatagtcagtggagctttttcaatgtccagaaagaatactttcaatctttatgaacagcctaggattttgcagttgtttctgaaggctcaaattgtcctgcttcaaatttttctttgaattttaagtagtctcttcttttatcaaaatattttatccactgttggggacaacttgattcgaaagagcttcttaacttcttgcattgagaagcatcctctaagttctcatctaaacacttccagtactcatcccgggccccccagcagacctgtctttccttcatagatggggctgccattcctactgcgatgaagctctctgcccgcccacgtccggcttcctttcgatgtcgacgggaggaaactgtcacgcaggccaccaaccggcggtggagggcgcggtgccgagtcctgccaactgcagggtcgccccgctggctcaagctctagaagcgtagacctccccagccgcaaaaagcaactcacgcggcgaaaccgcggactcttttgacccttccgagctaccatttact

SEQ ID NO: 49256 - DNA, 320 bp, Homo sapiens
  misc_feature (1)...(320): n = a,t,c or g
caggaaggttcaaggatatggccgaggtcacagagcctttctcttcttttaaagaaacaatgatacactttagatattcttatcttactgtgaattaatttttttttctaattaagctttttgggtgaccttgagcaaatgaaaagcttgactttttcctctgctttaccgtattgtgatttccttggggttggcagagatttggaaagggatgtattccagaactggaaaaataatttggccaaattaagcaaaatctccatgggatgttggtgccacttaccccagtttttttttttttctttccattntaanaaact

SEQ ID NO: 49257 - DNA, 982 bp, Homo sapiens
ttttttttttttttttttcgggtaccagttttatttataattaaccacatacaaatcacttttctacaaaataatggttaacatctattccttaattcacagaaatatcacaaaaccaaaatccttcccacgatatattactatttagtctaagttttaattcaaaggttgagaatgacgaattcaagaatttctttcatacataaattgctttccttagttctgcagatgggtaatctgtttgagataagcactgtcatgtttcaaccttagagaacaaaaagctatcaacaagatagtggtaaagaaaatgctagccaaaaaataacactattgagaaataggtgcgtattaagtgcaatacttacaacatctctgatgtcaaatgaccaaaatttagccttagggcactaaagcacatttgcccttttgaagcacatactagtatggcacattttatttcactaaaagtgatgttaaacgtgaatgtcttgtagactatttaaagagccagtcaaatggctaaaaaaaccattgtttttttgttataactctttgtgtctccctctttccattctcatcttatgatatttcactcaaaaatttagttacccaccccaaaacacatttctctcccttctgccagggtgtaagaaatgttagcattctgtcactagaaaataaacactgaagaggaattagcatgttaatgaacaaagattaaggaaggtaatactaacaggataaaggaaaatgtagaccataagcatctggtcattcatcatgtacatgtatcatgtcaaccattatatattaaatcttcaagaggtaagtacttctgttttagtgtgtttaacaatgtcagtttcgtgggatttagtctctgttccaggaccttctcttacattatggtaacagaaaaacaaagactggagcatggtttacagagaaatacaaaacacatacaaacatcataataaaa

SEQ ID NO: 49258 - DNA, 436 bp, Homo sapiens
  misc_feature (1)...(436): n = a,t,c or g
tatatatataaactgaagatataaaacaagtatgatcttgcctttgaaatcataaatgtttggggtacctgttctttgccagttaagatacatatcttattatctttgtttttttcaagtctatgctcctgtttgaagcttttcctgtaatttaggttgtctgtgaaatacctataacatataattcctatagagtatgccacattttttttctaactcatttcaaatgaaattctctcagattctagtttttgagcttgtccactagatctgaaaataaagcatcctttcctgagtccacttgaactaattgtgaatttgttacttaatttactggcatcttgggaaacaagttttgctgtggcaggaaggctgtttgagagtgagccgttgagctacccngggtttgtggtgacatgcatagggttattcccgt

SEQ ID NO: 49259 - DNA, 923 bp, Homo sapiens
  misc_feature (1)...(923): n = a,t,c or g
tttttttttttaatgttaattaactttattcacatttttccaagtaaatacaatattaactataagctaaaaacaatacatagttcttagaaaatacaaccccgaattattgtgtggcctgggctttgtgattatgtgcccagcctttgttcctccagaattttaaagtgaatgcagtgctcaaaacaaacttacgatagcacagggaaaccttccctaaataaagttttgttattagaagagaaatccaaaaagaggcctctactgccttcattcaagtgtcgagaatttcaaaatggaaataatattaaaagagcaatcgatttttttccatctcacactagtaggcttgaaggaggcaaatttggaccaaaaatctagacatagctccttgcatagggtttgatattaagcacacacttgcactgaataactccatatccaccctatagtaccaaaattcatttcaaatggcaaacgttgtgcaatggaccagggtcatatttttaaagatcactcccttaaaatatccatttttactgatcacaaaattatataataaggatcttatatgggttaggtattaagtttgataccaaagcaactatagcatcaagctacataaatattagcaccattttttatctagtccagtgaaatgtaaaactatccatcaaactgttttttaccaaagcagtcaacaagaaaaattgttttacttctgatatatgctttgctcctcctcctctttgctagtaatacttttgaacactttaaagaaagtacantcggnccccccngtacccgtgagtcctgcacccaggnatccaacccaaatacaaattgaaaatatttgggggcaaaaaggatggtttcacttgtgctgaacatgtacagcccttttttttcccttgtcattattc

SEQ ID NO: 49260 - DNA, 314 bp, Homo sapiens
ttttttttttttttaaaattggcttctttatttcaaggacagaaaataaaactatcatttgggcagctgctccagttttgtccaaaataatttatttaccagccttacaaaaaacatgtcggcaagagaagaatcagtcccgtaggagccaggcaaacctctccttccttccggtggctcccctaggacctgccggagagtggagagtccggtgggggggtccccaagcccagggtggacgaggaaaaggtcaggaaatagaggattgtcctgagccctcctggccatgggggccgacccagtgggcactgagg

SEQ ID NO: 49261 - DNA, 1021 bp, Homo sapiens
  misc_feature (1)...(1021): n = a,t,c or g
gcgcattttgagtggaacaaagtgcctcttgcatccataacatcttaagtgggcagaggtggattgagcactatggagagattgtcatcaagaacctgcatgatgattcctgctactgcaaagtgaattttataaaggcaaaatactggagcactaatgcccatgagattgaaggcacagtgtttgacaggagtggaaaagcggttcatcggctgtttgggaaatggcatgaaagcatctactgtggcggcggctcctcttctgcctgtgtatggagagcaaatcctatgccgaaaggctacgagcaatactatagcttcacacagtttgcgctggaattaaatgaaatggatccatcatcaaagtctttattgccacctactgacactcgatttaggccagaccagaggtttctagaggaagggaacttagaagaagctgaaatacaaaagcagaggattgaacaactgcagagagaaaggcggcgggtcttagaagaaaatcatgtggagcaccagcctcggtttttcaggaaatccgacgatgactcttgggtgagcaacggcacctatttggaacttagaaaagatcttggtttttccaaactggaccatcctgtcttatggtgaaaaagtaaagaagaaagataacattagtgtatttctcctgtgcttgccttctgaagtggcacaaacctgtgtttatatatttaaaagatactctaggatgatcacttgtgcttagcttagcattgtaactctttaagtctatattttcctcagtgcgtttctttacaatttcaaatgttaccctgattgtttatatgaatgtagaacaccttgacatttctttttatatataaactatttaataaaaatggaaagattggaatgttcatgtgtggggttaaaaaaaggaaggctttaacactaattttcccaaaggttagggggaggattcccaattaaatttatggccntataaaatnttggttgtaggggnaaaaaatccaccctttccc

SEQ ID NO: 49262 - DNA, 475 bp, Homo sapiens
gctttcttttgtccctaacttgtgtattgatggcagtccactctgttttctaaaaatgtattttactgtggtgcttaacttcttattaattaaatcccgtatcagaaaccttgcctgtgactttagaaagggcttttgattattgttttttcttcttgctcttgaaagtaatctggtcccagggaattactggtttaactgaacatctccagaattatttaaggtgtcaaaatatataaccttcacattgaaagataattttaatttatgggcataataaaaatttgaatcattcaggtaattttcacaaaatggagaccatttgtctttacctgaaggtatatgtttaagatcatagtctcccctagtatggtgctttgccacacagtgatttctgaggaatggttctctttaagataatgacttcatatgatcattgtttcatgttacttgccacaaatacctttaatttagg

SEQ ID NO: 49263 - DNA, 1116 bp, Homo sapiens
ttttttttttttaaagtttttaataaacttttattttatattcaagataaagcatatacacaattcaatgtggaaataaattactagaaatactctggaaacttttccatttccctctcaaactcacttttttttaagctcataagtctttttacttgattttaagaaacatgggcaactataatactaagaaagaactacagctttgtacagaaacatagagccttgtcttgactataaggtttagttggtgttttaataacaacaaaaaagcacaaaagacacaaacactcttcaacaggtttactcaaacagcttcgctcaagaagaaaaaggcacagatttaaagggatgacaataatcattaagaatgaagtaaatggagactcagtcaaaaaatgatacttcatgaattaagtcaagaaaaacaaaagtctttcaaattatctgtcttccttaaaatgaatttttaaattaaattgtataaacatatgatataaagttggtactttaggaagcgtctttgtatattttttatgtacaaatctttgtatacaatttcggatgttccttatatattccctatatagcaaaccgagccaggacctcccaactgcatgcctcaagtccctgtggagcactctggcagctggatggccctacttgctttctgacaaaatagctggaaaggaggagggaccaatttaaatgtagtcatcttcaactgggctctccattgacatcacaatagtggataaaaattgccactactcgctgaaatacacccttcttcatctgacgcatctctgaaatttcctctcctattgtttccatacagatgtctgcagacagctgtcctttccttctaggagcatagatagtgctttcttcatcgtcttcaaagtcgtatcgagcgaagctgttgggctctgcagctcgtaatgacctcagccaagggaagtcagaaatcatggaatatggagctccatccacaacaccttctaaagtatagatttctctcccccaggggtacttggggtatttctttaagtcttcttcacttcgagtggcttcaggaaagaattcatatttaatgagctcttgattgatgttggc

SEQ ID NO: 49264 - DNA, 1022 bp, Homo sapiens
gcacgagggcggctctcgctgtggctgtttcccggcttcatttctcccgactcagcttcccaccctgggctttccgaggtgctgtcgccgctgtccccaccactgcagccatgatctccttaacggacacgcagaaaattggaatgggattaacaggatttggagtgtttttcctgttctttggaatgattctcttttttgacaaagcactactggctattggaaatgttttatttgtagccggcttggcttttgtaattggtttagaaagaacattcagattcttcttccaaaaacataaaatgaaagctacaggtttttttctgggtggtgtatttgtagtccttattggttggcctttgataggcatgatcttcgaaatttatggattttttctcttgttcaggggcttctttcctgtcgttgttggctttattagaagagtgccagtccttggatccctcctaaatttacctggaattagatcatttgtagataaagttggagaaagcaacaatatggtataacaacaagtgaatttgaagactcatttaaaatattgtgttatttataaagtcatttgaagaatattcagcacaaaattaaattacatgaaatagcttgtaatgttctttacaggagtttaaaacgtatagcctacaaagtaccagcagcaaattagcaaagaagcagtgaaaacaggcttctactcaagtgaactaagaagaagtcagcaagcaaactgagagaggtgaaatccatgttaatgatgcttaagaaactcttgaaggctatttgtgttgtttttccacaatgtgcgaaactcagccatccttagagaactgtggtgcctgtttcttttctttttattttgaaggctcaggagcatccataggcatttgctttttagaagtgtccactgcaatggcaaaaatatttccagttgcactgtatctctggaagtgatgcatgaattcgattggattgtgtcattttaaagtattaaaaccaaggaaacccca

SEQ ID NO: 49265 - DNA, 1423 bp, Homo sapiens
tttgaacataaaaattctttatttaacctaatccagccagtattgagatagtttgctatattaaaaacaagacgtttaaaaaaattacagcaaagttagcaaggcagtgactaattaagtcactaagtttaattttatattcttcacagtcatttcataatcatgtaatggtaaacaatattttcagccactttggagataagttaacttttgaaaagaatagaattctagtagtcgtcattgaattttataaaagaggtttaaaacattaaagtttccagaaataacacagtaaagaaatatgaaaataaactggaaaataaaatatacccacccatccgaaaaatctacatcatctctttcatttgtccccaatgcctttcttttacctctccatttacttttcctagagtgcaaacagattacttagcaattaagaaacaactactgctttgtaggggcgattttgaggcctaagtgcctgcctgttccctttaatctctcagttaatcctagaaatagtcttcctgagataaacattatttgcatttcaaagattaagaaaactgcagttgaagagaaagtcaaatcctttagcccaaaatccatacatacagttattgaaagctgaactatgatttgaaccccaggtctatccaactttaagtctgcctatgctcttttgttgcttcatggtcaggcaggtcaccttcctgggaagactggcatgtggtatttctcgagctaataataataaggctctttaggtttaaaagtgttcaattcggggctagaggccactctggtcctcaggcacttgcagttccctccccgcaaccctaaaaaaaccctccctcctgccccaaaaggattagagttgttccccggccttcatgagccctaatacctataaaaccaagcagctactccctgtcaagggcattaatgtagtaaatggggaactgtgtgtttgcataactttagtaaaggctgcctaaaaactgttctatacaacaaaattttgcaagatatgtgtccatttaatgtatctttcacattgaaaacaaaagccaatatattttataattacagcctataatctaagtttttaaaatatataaccatagatgttatatttccccttcaggaactgtagtagtgttcttaataagggctcactgttagtcaaatcttcatctccaaataatacaaatttgaatgttcaacaggtcattcaaataaacatcatataactcaaaattaagacattcatactatagaaaccagtctttaattactaaagttaacatatattattgcaaactaacatagctcaatctatatttgctacactcctaaagtggccgcttatcagtaatggggaaacatttattattgacatgcattactgtgaacaagaaaa

SEQ ID NO: 49266 - DNA, 450 bp, Homo sapiens
ttttttttctttatttttaaaaaatatattttcacaggggtacaagcgatccatgattatacccactatgtttgtttcttctccactcaaagttactcattccctgtagctgaagattgaggacctgatatcatttggacatttctgctggatcaaatggtatcttctcaaaatgaaagtccttccacttcgagtacagtgtctgaactccagttgcaatatcctccaccacaaaactttcaatttttataactggaatctcaaatgtcttgtacttcacatggattccccagtcatggctgcagttctgtcgggcacagaatatctttgctcttttttcaaaacttgaaaactgctttggcttgggatgtggtctactcacaaagcattccttaaaagcatctccaagcacagtgtaatggcattcctctatcactcttacgtcagctg

SEQ ID NO: 49267 - DNA, 549 bp, Homo sapiens; identical to SEQ ID NO: 10586
  misc_feature (1)...(549): n = a,t,c or g

SEQ ID NO: 49268 - DNA, 1243 bp, Homo sapiens
tcgtgcgcaagcaccagccttcagggacaagaaacagggggtctcagccaagaatcaaggtgcccatgacccagactatgagaatatcaccttggccttcaaaaatcaggaccatgcaaagggtggtcattcacgacccacgagccaagtcccagcccagtgcaggccgccctcagactccacccaggtcccctgctggttgtacagagccatcctgagcctgtacatcctcctggccctggcctttgtcctctgcatcatcctgtcagccttcatcatggtgaagaatgctgagatgtccaaggagctgctgggctttaaaagggagctttggaatgtctcaaactccgtacaagcatgcgaagagagacagaagagaggctgggattccgttcagcagagcatcaccatggtcaggagcaagattgatagattagagacgacattagcaggcataaaaaacattgacacaaaggtacagaaaatcttggaggtgctgcagaaaatgccacagtcctcacctcaataaatgagaggacattgtggcagccaaagccacaacttggaagatggggctgcacctgccaacgaagacgggaaatgacccccccccccagcctagtgtgaacctgcccctcgtcccacgtatagaaaaacctcgagtcatggtgaatgagtgtctcggagttgctcgtgtgtgtgtacacctgcgtgcgtgtgtgtgcgtgtgtgcgcgtgtgttcgtgtatgtgcgtgtgtgcgtgcgcgtgtgtgtgcattttgcaaagggtggacatttcagtgtatctcccagaaaggtgatgaatgaataggactgagagtcacagtgaatgtgggcatgcatgcctgtgtcatgtgacatatgtgagtctcggcatgtcacggtgggtggctgtgtctggagcacctccagcagatgtcactctgagtgtgggtgttggtgacatgcattgcacgggcctgtctccctgtttgtgtaaacatactagagtatactgcggcgtgttttctgtctacccatgtcatggtgggggagatttatctccgtacatgtgggtgtcgccatgtgtgccctgtcactatctgtggctgggtgaacggctgtgtcattatgagtgtgccgagttatgccaccctgtgtgctcagggcacatgcacacagacatttatctctgcactcacattttgtgacttatgaagataaataaagtcaagggaaaac

SEQ ID NO: 49269 - DNA, 502 bp, Homo sapiens
ctctgtcacccaggctgaagtgcagtggtgcgatctcggctcactgcagcctctgcctcccgggttcaagtgattcttctgcctcagcctcccaagtagctggaactataggcacgtgccaccatgccctgctaattttttgtatttttagtagagacgggtttcaccgtgttggctaggatggtctcaatctcctgatctcgtggtccacccacctcggcttcccagggtgctgggattgcaggcgtgaaccaccatgcccagccaagatctacactattatgtcaccccagaaagtgaactctcagtcttcccagccagtctctttcttatcataggttagcttgcttattctggaatttcgcgtatacagatgcatgccatgccataggtactcttttgtgtctgctttgttctgctcaacaccatgtttctgaaatcattaccattgttgtatggttctctaacttcatcatttccatttcagactcagcatatgctg

SEQ ID NO: 49270 - DNA, 946 bp, Homo sapiens
caaccacccccacggccctgatgcctctgccgagggcctcaacccctacggcctcgttgccccccgtttccagcgaaagttcaaggccaagcagctcaccccacggatcctggaagcccaccagaatgtggcccagttgtcgctggcagaggcccagctgcgcttcatccaggcctggcagtccctgcccgacttcggcatctcctatgtcatggtcaggttcaagggcagcaggaaagacgagatcctgggcatcgccaacaaccgactgatccgcatcgacttggccgtgggcgacgtggtcaagacctggcgtttcagcaacatgcgccagtggaatgtcaactgggacatccggcaggtggccatcgagtttgatgaacacatcaatgtggccttcagctgcgtgtctgccagctgccgaattgtacacgagtatatcgggggctacattttcctgtcgacgcgggagcgggcccgtggggaggagctggatgaagacctcttcctgcagctcaccgggggccatgaggccttctgagggctgtctgattgcccctgccctgctcaccaccctgtcacagccactcccaagcccacacccacaggggctcactgccccacacccgctccaggcaggcacccagctgggcatttcacctgctgtcactgactttgtgcaggccaaggacctggcagggccagacgctgtaccatcacccaggccagggatgggggtgggggtccctgagctcatgtggtgccccctttccttgtctgagtggctgaggctgatacccctgacctatctgcagtcccccagcacacaaggaagaccagatgtagctacaggatgatgaaacatggtttcaaacgagttctttcttgttactttttaaaatttcttttttataaattaatattttattgttggatcctcctcctt

SEQ ID NO: 49271 - DNA, 990 bp, Homo sapiens
tatataccgcacttttttgaagagctctttccagaagaagtgccagaagagacagtagtctgcatacatcgctgcaggccacagagcagcttgggttggaaaagagaagatgaagggacatccttggggctgtgccgtgagttttgctggcataggtgacagggtgtgtctctgacagtggtaaatcgggtttccagagtttggtcaccaaaaatacaaaatacacacaatgaattggacgcagcaatctgaaatcatctctagtcttgctttcacttgtgagcagttgtcttctatgatcccaaagaagttttctaagtgaaaggaaatactagtgaatcacccacaaggaaaagccactgccacagaggaggcgggtccccttgtgcggcttagggccctgtcaggaaacacacggggacctctctctctagctccagcaggtggcacctcggtacccagcgggtagggcgataatttatatattttccacagtcagggaaggactctcacttatttgtttcaaattgcagtttttataaaacatttttaaaacacaaatggcatgtatgctaatgagatttacccgtgtgctatctgtatttcccttgtacagaacttttacatttttgaatattcctattacttttgattgtgtctgatgggaactgagttgttggcctttgtgaaatgaaatttttggctcttgagaaagaattcttatgaattgttatgcgaattttatatatttaaagagggagatctgcggctgttatttttaaacactttttttcataatacatattccgagtagatatttataaaatatatgtttctttcattatgtgtttgtaaaattagggtttaaataaatatgctttgatgcatagttttgaactaatgtaacatgatttttcttttttaaaacagcctgaaaatgtactagtgtttaaaaataaagatttccattttctccaaaaaaaaaaaaaa

SEQ ID NO: 49272 - DNA, 1027 bp, Homo sapiens
acacaaagcgaaaaacaaaacaggttttaatggttaaaacagatgaattaataggtttataataaccattaactaagggaagccctagaacaagaaataaggatttttaattgcatgcaaaacctagttaccataaaaaccaatgcaataccaaaatatctcagcttcctagcatagactccaggtcttttcatttccaatacttggcagtcataatatgtacactttcatatgcacctggttgtggagggataagctcattcacataggactacaaatatctctcacaggtaggagggcacaaaagaacaatatcttcctccacttttttgggtccatcttgaaaaacaaaaaaggcactcccaaaggttccttggtaacacctttgttaggtttcttaattactaacataatctttacatgtaaggttaatggtccactcatttcatagatctgggaaccatcaggcattggaactgcctttaactcacatgccaaacaactggctttcttaaacaatgacaaaaactgtatacttgttttaaaaacatttgggctttgtttccttgacaacttatatatgcttaatcactggactttggcatgcagagccaaacatatcatggaactgaaagaaccacaatatgacatggtgacagaagactctttgaatcattattctgttttccactatcagctgctccagctcccttatactaatccaactttgtccctcagagcacccatgctctgaacctaggtttaatctctctgctgaaagatttattaaagatacttagataaattaccaagtctttctctacgatcatcaaagagtaagggaagtcaaatgctcatgggcagttgtccactattcacagaatctttagaaactatttgcctgaggccaaggagaatttgctttatcactaaatctgacccatgttgagccatactaaaactgcacttgggtactagtctcaaatcaaattgagcttatgtattgctctacatttattgcatccaa

SEQ ID NO: 49273 - DNA, 1604 bp, Homo sapiens
ccctgtaggcttggcgctgggctctcggtttgttcttcatttttaaagaaggaagggtcatatgtttattgctaaactgtcaaaaaggaatatattctgattaaattattactcctcactttgagggtgtgagaattttagaagatttaaatgttctatataacacttagatttctgatattttggaagaagttagaagttaatgaaagcaaactcagttaccaattttctggaaaatatccatgtggtaatggtagactttttaggtggcaatttctaggtctgaaatatagcagaggaaagggcgctgagggcagttgcagggcagggcagccctgtacttaccctgtactcacctcatccgacagacgctgtggatgaggaggggcttggcggaggcgtgagcaccgatgtccctttgataacctgcactcaccaagatgaactatttgccgccctgtcttttcctgggttggggggtggcatctgatggtggcagagtgcctgttggttcgcccgtgggtctcatggttcagacagagggaggtggacggcagggatcagggagccaggagcgcgcctcagacttgcagcaaccattgtgatttgggttgttcggaatatttaaattactgatcagaagatgaaagtagcttttctcttgggaagtcttgcagcccgtgggagtgataccaggagcaacacagagctcagcagcggcgccaaggtgttccctgtttcctcagcacgtgagccttcaccgcctgcttcattcaggagccagtgcagcagtaatacagtctatacattgttctgttttcaaatttatcctgaggctttgttgagcataaatgattatacgataaaggtatccgttattttggaactcatttcagttgggatctcctgtatgcagagtgttgcatttagaggtttgagtcccatcttggtttcttgccgtgctgactgtagccttcaccttgacttgaatgaaggtctgtggttggaatgtgtgaggagccgctgaggtgttcaggaggtgctgcctggaggtcggtttcttcctgggtgttacgggcaactgctcacacagttgtttctctgtgaacatttccagtgtttaatccaaaatgaaaacccaccaatgcttttgctaacttcagtgccttttataaatcatttttaaatttcctgaacttgctttttgaggatatacagggatattaagtagacgcaggattgtttttgtttgtaaaaattctgaattgaaactttgttttaaaaaaaggcttctttctttcatatgacaagagataggtcaggaatattggaatcaagatttaaatgttaaaattcgattttgttacacagggtgtgttcatttgttttgtagcagacaagatctagatcccagacagaaacaacacatgctattctaaaaagccgcattttaaaaggcaccttggttctcaaaagaaatcagaatatggatattcgtagtgatgatctgttttctctaaaatcttaccatattgtctgtatatggttgtaaattcaaatggaaagtaaaacgttttggccctgataaaaaaaaaaaaaaaaaa

SEQ ID NO: 49274 - DNA, 1377 bp, Homo sapiens
aagtggatgaaaagactcagggtcccttttctcttccccgtcttctctcagccacatctctcttatcctatcttggtgaagaagcttgcttggctaggagagaggtcagggacgagaagatagtgacgagaaagttccatgagactctcagaagtcccagcctgaacatcaaacctgaataaccaggagagacgtaacctcggcatactttcagtggtttacctcctgcccacgctgcaggtttttcaggtccttgctcgagtgtgtgctcatagggcgtaaataaacgtgctattcagcagcctgcgttcagcaggcccagctatttaaagcaggctgggcatcagcaaacacagctttccaaacccaggggctttgcgctttgccttttgcctctttcccacccgcgcaggggaccatgtcggcgggagacccggaggcggcccccacagaagaccaggtggaaattcctgggagtacaactttcaacaaggttcgacaagcacccggattccaccacgctgtgcctcatcgcggccgaggcaggcctttccgaggaggagacccagaaatggtttaagcagcgcctggcaaagtggcggcgctcagaaggcctgccctcagagtgcagatccgtcacagactaaggagatggcaggcattgacagcttcactccatgaaggccatctctgtttctctcctccgcttaaccaagctgttgtggtttttcagcatagtgttgtatgtttccattgctagctgtcctgcttgtttaacacagtgttgtattttttttctaaatgtacataattagaaaagaaaataacaatagggaagctatgtgtatcttctgtgtaaagcagtggcttcactggaaaaatggtgtggctagcatttccctttgagtcatgatgacagatggtgtgaaaaccatctaagtttgcttttgaccatcacctcccagtagcaatttgctttcataatccatttagcaatccaggcctctggttgaaaagataatatgagggagaagggaacacatttccttctgaacttacttccctaagtcactttccttatgtatcatctaatacaatgatggttgagtgaaaatacagaaggggtgtttgagtattcagatttcataaaacacttccttggaatatagctgcattaacttggaaagaagcctgttgggccagaagacagaaactccaactggcaaaaaagcaagcatctaagaaaaaaaaccaccaaagttcttgaatttactatatttaaatgcattggttaagtttattttgctaaataaagtgaactgctttttgtctctaaaatgatattctaaataaaaccttaactttttgttgaagatg

SEQ ID NO: 49275 - DNA, 1163 bp, Homo sapiens
tttttttttctcatttaattaaacgtttattcaatgaaaggatgtataaaaacttacaaatttgagaactcaactatacatgaaataggatgatgggatattcagtttttaacatatacatatactatagctattagctattctccccttctccttcagtccttacttctggctcctgttttgtcttgtgaggcccttcttttattggcctaacggaagattaatgaacaatttttactgctttcgggccaatgggaggaaaatttcaggcattaagaaagaagaaagaaaaaaaacaaccaaaaacctggagaataaacatcaaaatcaagttttttcccaaacagcaattagattttttgtcctgatttctctttgccatttatttttgatgcttcaattaatgttgccagtaaactatcagcattgactttcagtcattgaagttactacatcttctggtcacaaattcccctgtaagatgagtattcctatatccttttccctgcagtacacacactgatttaaaagttagtgtaaaacaaattatcactggcagctgctagaaaatggcatgtcatgttctattcagaaaggcaatttatagaatagtacattcaaatttgatttttaaaacaaatttgtcagaaactcaaatacagcattttgttgttgctcaacttggaaagaagccagcaatgagataaggatgtgcattaaatccaccctgtttaattagccaagtaccccacacattttccccttacaaaacacacaaactcacagcttgtaatgttgtaccccaaaaattaagattgccatcacattattactttttctcctttttgttttgttaaagtagatttcttaactgatgatttctcttaagtggacataatctcaaaggatgcattctgaagtaagacacctggaggatgaatactaagaacgttttcttgggtttaaagtttccccacactttctagattttgcatagtacagagcccagccgtatttctaagcagcacgctgttattttctgacattgtttttctgagaagactttttacccagggaaagtcataattttagcttaccaaattggattccagttgttttattatatacccttcattagttccaagtatgcttctgaataatct

SEQ ID NO: 49276 - DNA, 819 bp, Homo sapiens
caaaaatatattctgcttttcaactgtaggtgctccagacttgctctccgtcactaacactaaatgtgctgttttccttgtttttcatcaaacatttaagacaaacttagacctttctgtaaattatcttttaatttctcagcaaaatctaaaaggggaagaaaaaagtccatgaaaactaaaacttttcatgtttttagccagtgagaagataataaaccctgactgtagaaggtgtgttttcatgcaaactatacttctgagcttgttagcttctaattatatcttaataaatatattttattactagagcaagatgggtttttaaggaaaataatgtgaaattctggaaattttctttggggcagagaagagcattagccctgtcttatcctttacattgccatcctgttggcactgcagcttgtgtatagcatgctaaaataaatttttgtgtgtgtgtgcagaaattaagggtccaattgagattgggtgatgttagtaacataataacaagttgtctggcctgacacagcatcacatcacacacacagaaattagtatatccatgtatgtcaaatacaggttaaaatatcagggcatttatataaagagttgtagtcttctgataaaagtagactggatcccctggggtatttggggagaaagtaactactttggctctacccctagaaatgtccagttttgagtgactgtagtatggatgggttttcttgttttgttgattatttgaggcttttaaaacaagtaagttcatgaaagaagctgttggactcaacatagagtagagtaactatt

SEQ ID NO: 49277 - DNA, 1889 bp, Homo sapiens
ggtcgtggcagccggagtcgtcttcgggacgcgcctgctcttcgcctttcgctgcagtccgtcgatttctttctccaggaagaaaaatggcatccgttgcagttgatccacaaccgagtgtggtgactcgggtggtcaacctacccttggtgagctccacgtatgacctcatgtcctcagcctatctcagtacaaaggaccagtatccctacctgaagtctgtgtgtgagatggcagagaacggtgtgaagaccatcacctccgtggccatgaccagtgctctgcccatcatccagaagctagagccgcaaattgcagttgccaatacctatgcctgtaaggggctagacaggattgaggagagactgcctattctgaatcagccatcaactcagattgttgccaatgccaaaggcgctgtgactggggcaaaagatgctgtgacgactactgtgactggggccaaggattctgtggccagcacgatcacaggggtgatggacaagaccaaaggggcagtgactggcagtgtggagaagaccaagtctgtggtcagtggcagcattaacacagtcttggggagtcggatgatgcagctcgtgagcagtggcgtagaaaatgcactcaccaaatcagagctgttggtagaacagtacctccctctcactgaggaagaactagaaaaagaagcaaaaaaagttgaaggatttgatctggttcagaagccaagttattatgttagactgggatccctgtctaccaagcttcactcccgtgcctaccagcaggctctcagcagggttaaagaagctaagcaaaaaagccaacagaccatttctcagctccattctactgttcacctgattgaatttgccaggaagaatgtgtatagtgccaatcagaaaattcaggatgctcaggataagctctacctctcatgggtagagtggaaaaggagcattggatatgatgatactgatgagtcccactgtgctgagcacattgagtcacgtactcttgcaattgcccgcaacctgactcagcagctccagaccacgtgccacaccctcctgtccaacatccaaggtgtaccacagaacatccaagatcaagccaagcacatgggggtgatggcaggcgacatctactcagtgttccgcaatgctgcctcctttaaagaagtgtctgacagcctcctcacttctagcaaggggcagctgcagaaaatgaaggaatctttagatgacgtgatggattatcttgttaacaacacgcccctcaactggctggtaggtcccttttatcctcagctgactgagtctcagaatgctcaggaccaaggtgcagagatggacaagagcagccaggagacccagcgatctgagcataaaactcattaaacctgcccctatcactagtgcatgctgtggccagacagatgacaccttttgttatgttgaaattaacttgctaggcaaccctaaattgggaagcaagtagctagtataaaggccctcaattgtagttgtttccagctgaattaagagctttaaagtttctggcattagcagatgatttctgttcacctggtaagaaaagaatgataggcttgtcagagcctatagccagaactcagaaaaaattcaaatgcacttatgttctcattctatggccattgtgttgcctctgttactgtttgtattgaataaaaacatcttcatgtgggctggggtagaaactggtgtctgctctggtgtgatctgaaaaggcgtcttcactgctttatctcatgatgcttgcttgtaaaacttgattttagtttttcatttctcaaataggaatactacctttgaattcaataaaattcactgcaggatagaccagttaaa

SEQ ID NO: 49278 - DNA, 1043 bp, Homo sapiens; identical to SEQ ID NO: 10660

SEQ ID NO: 49279 - DNA, 1395 bp, Homo sapiens
  misc_feature (1)...(1395): n = a,t,c or g
ggacaaagacaaagataaaagaattttaaaaaaatgaacaatgcctccaagaaatttgagattatgttaaacatccaaaccggagaataattcatgttcctgaggagaaagagaattcaaaagtttggaaaacttattggagggaataattgaggaaaacttccctggcattgctagagatctagacatccaaatataagaagcacaaagaacacccaggaaattcattgcagaagaattcatcacctaggcacatagtcatcaggttatccaaagtcaagacaaaggaaagaattttaagagctgtgaggcaaaagcatcaggtaacctataaaggaaaacctatcagattaacagcagatttctcagcagaaaccctacaagctagaaggaattggagtcctacctttagactcctcaaacaaaacaattatcagccaagaattttgtatccagtgaaactaagcctcataaatgaaggaaagatacagcctttttcagacaaacaaatgctgagagaattcaccattaccaagccagcactacaagaactgctaaaaggagctctaaatcttgaaacaaatcctggaaacacatcaaaacagaacttctttaaagcataaatcacacaggacctataaaacaaaaatacaagttaaaaagcaaaagcaaaaaccaaaaaaaatgtatacaggtaacaatcaacatgatgaatggaatagtacctcacatctcaatacccacattgaatgtaaatggcctaaatgctccacttaaaagatacagaatagcagaatgaataaaaattcaccaaccaagtatctgctgccttcaggagactcacctaacacataaggactcacataaacttaaggtaaaggggtgggaatagatattccatgcaaatggacacatcaaaagcgagcaggagtagctattcttatatcagacaaaaagactttaaagcaacaacagtggaaaaaaaaaaagacaaagagggacattatataatgataaaaggactagtccaacaggaaaatatcacaattctaaatatatatgcacctaacactggagctcccaaatttataaaacaattactactagacctaagaaatgagatagacagcaacacaataatagcgggggacttcaatactccactgacagcactagacaggtcatcaagacagaaagtcaacaaagaaggaatgaacttaaactataccctacaacaaatggacttaacaggtatttacagagcattctacccaacaactgcagaatatacattctattcatcagcacatggaacattctctaagatggaccatatgataggccacaaaacaagtctcaggaaatttaaaaaaatctaaatttggagcttgnagt

SEQ ID NO: 49280 - DNA, 2131 bp, Homo sapiens
gcggagtcgagccgagctgatttgatcgaggagcgcggttaccggacgggctgggtctatggtcgctccggggccgctccgccggctgagtgcttttttatcagggcaagctgtgttccatggcagggaacttttggcagagctcccacatatttgcaatggattttggataaacaagatctgttgaaggagcgccaaaaggatttaaagtttctctcagaggaagaatattggaagttacaaatattttttacaaatgttatccaagcattaggtgaacatcttaaattaagacaacaagttattgccactgctacggtatatttcaagagattctatgccaggtattctctgaaaagtatagatcctgtattaatggctcctacatgtgtgtttttggcatccaaagtagaggaatttggagtagtttcaaatacaagattgattgctgctgctacttctgtattaaaaactagattttcatatggccttccaaaggaatttccttataggatgaatcatatattagaatgtgagttctatctggtagaacctatggattggtggcttgatagtgtatcatccttatagacctttgctccagtatgtgcaggacatgggccaagaagacatgttgcttccccttgcatggaggatagtgaatgatacctacagaacggatctttgcctactgtatcctcctttcatgatagctttagcttgcctacatgtagcctgtgttgtacagcagaaagatgccaggcaatggtttgctgagctttctgtggatatggaaaagattttggaaataatcagggttattttaaaactatatgagcagtggaagaatttcgatgagagaaaagagatggcaaccattcttagtaagatgccaaaaccaaaaccacctccaaacagtgaaggagagcagggtccaaatggaagtcagaactctagctacagccaatcttaaaacattccgaagaattccatagtggaccacttggaaataaaccattggacagatttcagtaatgtcttcagtggaacacaaatgaaaatgaatagcttgtttctgtcaagcatattggaaagtgattttatttttgcaaaataagtttttctttaatatgattctagtacataattgattaaaatctcttgattataaatgtttggaaaggttctaaggggacctacagacagacatacatagacatttcaaaattaatagcttttgattagtataatatttcttaatttggataataaaaattgtagctttttattaagccaggaaacatgaagcataatttgtttaaaattctctttggtcattgagggaccaaaaaaggacgtaaaatttacagtcaatctatgagggtttttttccctccataagtttaactttaaaactgtatttaaggaatcaaatcttacaaaatcctggaagattttggtaatgatgttgataatttcagggaaattaatcaagtacctatattgatttaaaagtgtattttattcagtagtttgaggatctggcccatggaagatactagcccagccctagcagaaaagtgcaatatgtatagcatactttgacattttaaacatgatagtccataaccattttgaaatgctgggcaaactacatgaagttatttataattaattcacagctaatcaggcattttgaaagcttaattggattcaaaaaccataatgttggaatttggtaaaattttaatgttgatttttactgtgaaaaggtttttataagatatacacaccctagtttaatgttgtgtcttggtgtggatttacagatttactacaggtattctgaaccaggaacacaatcaggtttcaggccagtttgatactggctgtccttaattctaatatgagagtaggacatcatactaaatgttatgtcagtgggactgtactgtctgtggaacttagcaaattaatcattttcttcagacttgaaggagagtgataaataaaatttggagtcataggatattgatgcacaatttaaggattaaacatttttaatcaattgtggatgatggcttattaaatgttgacttcctagtataaaactgcaagaataaaagtaact

SEQ ID NO: 49281 - DNA, 891 bp, Homo sapiens
tttttttttggattttacataggaagttttaattaagtagaaatgaaaatttatccagatcaatttatttgaacttacatccaagaagaaacattcaacttaaggattagaaataaaagtggcaattgtctacttcttttgtggtaaggaatagatcatacaagcctgactgatgagagtaatagctttgtgaaaactgtatattcgagtacatgtgaactcatacttggcttatacagaatttatccaattctagcaaagtcagcataatttaaataaacctccttgagttttacaccatggctctcaagtctgaaagcttagatttgattataaccatggcaaaagtgattatctttattttctgaaaacgtaatcaacttttaaaataagttaagcaaacatcagttttacacagaccatatgaagggtaggaggaaactgcaattgttcctctaattgcagagcctaaaccataaattcaaattgtactgctatctctactgttaaaacaagtcaagaaagtcttttacagtctaagagaagtgaatgtaattatgcagcatccactacaaagatattttgaaaacctatcatcatgttagtactcaatggctgtacagcaattattttaaagtacgctcccagggtcacctcttgctgaagaattaactccaggaagtcgagttacaagtatcacctacattttataggaaataaaggcaaagatttaggactgagtcatctgttcaaaattagaaagtaaataaaaaaatagactttggttttatttgaaaatccctttctattgggttatatccattaatctacatttcaacttccaagccaatctattttaaaaagttacctccattttgtgtccaatatctt

SEQ ID NO: 49282 - DNA, 431 bp, Homo sapiens
catcacacctggcctaacagaatatttaaaaatggccactcaccaatcaaagtctcaaatctaaaatgtaatggatgtgagaaaattactatgcttgtcataattagaaccatgttattctcatttagactcaatggatccaatccagataagaaaactgtcttaactcataatataggttccttggggaggtagattaagtctttgacttgattatttccttatccaacctttatcctactggcctgaaaagggttagctgccttctcagctggccaaagtttccactacacagtgagtagggcacttgctcagtaattcagaggaatggctcaatgaaacttaacgttttgttgttttgtttatcatcactcgacctgctctccccaccctgccctttaggacatcattcctttttctggtatgaaaac

SEQ ID NO: 49283 - DNA, 307 bp, Homo sapiens
gttttttattttttaatctggtttattaatcattggctaaactattttctcctagaaattcaaaaaatactcagtaacatcatttagacgagtcggaaaagcaggccaacatatgtttatataacatagcacttttccccagggcctaccttgccccataaattgttgtactggtgtgaaaaaatacaagtcaggtctgaaaaaaaggtcgacagcggccgcgaattccagatctatgaatcgtagatactgaaaaaccccgcaagttcacttcaactgtgcatcgtgcaccatctcaatttctttc

SEQ ID NO: 49284 - DNA, 963 bp, Homo sapiens
atttttgtttgcattaaactttatgaaatgtcagaaatgattttactctaatgaaactcaaattttgcccaaagtagcaatattcttaaagatgttgaattttgactggttgaattttatatagtaacacacaagtcgtgatcatcaatattattgcagaccaggactctgcttatatgccttgctaacaaagatttctttcacagaggcttttctcctctcaagacttaaagtaagaattacattttattaagtcagttaaatgcaccatggcttcatatagtaatataaaaaaactctttgaagtgagaaatattatatcctaaaacctctaaaccacaaacattcaattgaaagagttctgttgaaggataatgacatactgactgcttacagaccaagttgcttgcattttgtatgtttagccctcctttgccactgcttttagagccttggaaggctaagtgtgatagtaatgctagctctaatgcatatttaaaggagactgcctcgcttttagaagacatctggtctgctctctgcatgaggcacagcagtaaagctctttgattcccagaatcaagaactctccccttcagactattaccgaatgcaaggtggttaattgaaggccacttaattgatgctcaaatagaaggatattgactatattgggaacaggtgggagtctcttacttaccaaaagtctttgggggtatttgtttccttacatagaaaatgctaacatgaatagaaagatactggtgcaagaccattcccgggaaagtagacatacttacatttttttccttttctgctcatttgaatgaactcaattttatgttaaattgttatatcagattactatcctatttaccaaagtttgtgatatgtattttgaatatatgtgaagagcttcacttctatcaagccatagcacttatttgtcactctgagtcgccc

SEQ ID NO: 49285 - DNA, 1822 bp, Homo sapiens
acttggtttttcttttctttttaattttgcattgtttttcatttttatataattaatgcattattttcccttttgattggttcttttactattgcacttgaaaaggctttctccaccttgaagctcagataaatcctacctgtgtttccacagtgctttgaattatttcatattttacattcattcttcatctggaatttactttgatgcacatgatatcttcagctttgttctcttttctttcaaagatcctggaagttttaacttcgcgccccgcctgttcatcctcagcagctcctctggggattttgcagccacagagtttgtgtaccctgcccgagccccctctgtggtcagttccatgcccttcctgcaggaagatctgtacagcgcgccccagccagcacttttccttgttgacaatcaccacgaggtgtacctctggcaaggctggtggcccatcgagaacaagatcactggttccgcccgcatccgctgggcctccgaccggaagagtgcgatggagactgtgctccagtactgcaaaggaaaaaatctcaagaaaccagcccccaagtcttaccttatccacgctggtctggagcccctgacattcaccaatatgtttcccagctgggagcacagagaggacatcgctgagatcacagagatggacacggaagtttccaatcagatcaccctcgtggaagacgtcttagccaagctctgtaaaaccatttacccgctggccgacctcctggccaggccactcccggagggggtcgatcctctgaagcttgagatctatctcaccgacgaagacttcgagtttgcactagacatgacgagggatgaatacaacgccctgcccgcctggaagcaggtgaacctgaagaaagcaaaaggcctgttctgagtggggagacgccagaggagcctcacggtcacgtccaacaacaccactgcaccagggaaatggatatatatttttggactggtgtttttcacaaagtatttttcaatcagagttttcagaacctgacattgttaaagatactgcttgtcccggagttgtgtattttgtaaatgttcaagggaactgtttggaaacttctttccaccattcaggaggttatcagaattaataaaagtatctgttatgtgcacttaagccgcagctgctatagatagcactgccttcttgttccagctaggcaatgccttttttttttttttttttgaagcagttctctttataaagtgttattttgatagtttgtggattctaaaatatatatatatttatataaacaccatataagtcaaatatgtatttaacaaagcaatatgtattcattcactttcaagatttgttttggtgtcaaaataacatgaaaaggtagatggagttgcttctgttgaattagctctgccaccaatatgtatcttcatacacgtttggaaatgtttcctgcagcattaggtatgacttgttctgagtactgcttccggtgctaaaatgaacaaagaatttgtacttaatggcatggactctggagaatctatgcgaatcaacctttctaccttaatatctccccaaaaatgtatagtgccttgtttttatgtacagtttatatacagaaaagtttgctctgcatttttgatgatggtttggaacattatctacaattttactctcaaatagtcaaaataaaaacatctcaatttctaataccggttgtaaacaaacagtacacatgtcattttgtgatataggactcccaaataaaagtatcagaataaacacaacaattaactggtt

SEQ ID NO: 49286 - DNA, 536 bp, Homo sapiens
  misc_feature (1)...(536): n = a,t,c or g
ttaaggaatgaattttatttttgtgtttccagttccagtaactatgtgcctagtacatagcatgtgctcagtgtttgttgaaaggaaaaggtctgaagttgattctatcgtcaaagaaaatatttcagtataaagcatgtagtttataccaagaagcctttttaaacttaaggtctcttttttcataacatgtacatataaattttaaaagaaaacttaaaaatacagtagctgcttctaaatgcagatattgtaacttagctattattttcagaattccacaaggcatatgcccagttggtcgatcttggcactcactaacaccagtttcttcagatcatctttttctctttggaggatttaccactgataaacagccactaagtaagtccttgaaaaatatgataatgaaatcatcatatatcatccatatctaatagctgaaaatgagtctattagagactgatgagacggcttatagggttggttggaaggnttgaaattaattttgatcctgtaacatagctgtaattgta

SEQ ID NO: 49287 - DNA, 1211 bp, Homo sapiens
atttttgaacaactgtgtacagctatctttgcattttaaatgcccctagtttgagactcgggagggtcaagtgtccccacccctggaaagggctcggataggagggtgcttgcttctaaatcctgatcttctctatggggttggctggaagagaagtaggatcttgtctgaaacctcatcccccagcattgtgtttggatgttcgtgggatccgagggctggccgggcagacagaagggaagtgcggggtccttggctggcagctgggagcagaggaagggagagcgttgggaggtcgtgatgtgcgtgctctgcctccagtaggtctgaggtgcccactgttgttatgcttagttttattagattctctgtaacaacatgagcttaccaaccagccttgattttgagattaaataattgaacagattaactgggcactgaagtaaaattctacctactttattctcttagtaaaaactatacacacaataaacaactgtcaaggttgccatcatatttgagttttgtcacctaggaaaacattgtttatactttgtttttgaaaaaattcatatgaatttcccctgggaataacttgttttatttcagtttttattttctattgaaacacttgttttctagtctaggattttagccaaatagaaaagctatcatttaatttgggggaaaaaaatctattgtcctgtgaagaatttatagcaattattaaactatgttgcttaaatataaaaaaaaggatgattaatggaatatttagataatgtttccattcactgaagaagccgtgatcctttattggcaggaagacttgcaggacatatcagaagcctctgtcagaggtttacaggaggtgagatggaggggaagccctctatgggaagagtcccatggtgtgtgacatgttagggtaatcggatgtatttaagctgcgtcctcattctaaaagttattagaactgagctcttctagatttaataacatgctttgcctttggtagtgaagaacattgagataaaatctagtattaccgagttagagataattttagatcatcccttatactgttacgtgaattcctgtgaacatgaatattactgattctcaagttccagtatacagaagaataacttgtcattgcctgtcctggtgtacccagatgttccatgatggacgttttatcccataagacg

SEQ ID NO: 49288 - DNA, 576 bp, Homo sapiens
ttttttttttttttctgggaaaatcatttcttttaatgacagagaaagcacaccaaatgataacagaagcctcattgggagttaccactgtacaaatcaatgcctggaggccctgaactagcattagacattcacagggaagtcagctgaggttaaggaaacatccacgcagcatctctgaggatacagaagtgggaggaggaaggtgacagacgcaatgcacacgctgtgtatctgtaggcttgggactcttcttcagggcagttcttgttttccttccacattgggatgggtaggggctgggggaggtttgcaaatgatcatgtgggaggagaggccttgtgtatcagcctcgcagaaggagccaatactgtagacagatatcacccagatgctccatgggccatgccctggaagcgatgtgacattggtcctctgaacaatggttcagggagctcgtacaacagaagaacagtgggtccttcacaatctagggtctggcacaacttcctgaaggcatgctaggaaataggtttatcaacaaaacttggctgtccccaaggtaaaagtcattct

SEQ ID NO: 49289 - DNA, 985 bp, Homo sapiens
gaagtaacagaaatggtcacactgatcatgaaatgcagcaagttttgtgcaaattaacatagtctcttatttattgcttttgtaaattgaataaagatggacttctatgtaaatagactggctgaatcctgtattaccacggctactaaaaattaagtgtgtaaaagaatggattccttcattgtaaacttaaagtattttatgtacttctagaaatgacttaaatttgttttcatacattatgaaaacaactgcatactccttaattgctttaaacacccatccactgtatgtaattctaattaccttataacagtattaagacagcttgtttgtactgtgcaatttgaacaaggaatgcaatgttattttttacaaaaaacaaacttgtttatttttataataacgatgtatttgatgtggaccaaattcgtaccactatctaaaatagcctcttttctcatagtgcagttgtagtttagaaacaaaacttggtcctctctccttgctttttaaagtaaatggctagatttagttgtcttagccaggtttcctttgaagagaaactcaaaaccattttgaaactgcttagttcagaatacatcgaagtatttaaaattactgagttgggtaatttactatcatttactttttacattacaagtgcaataatatttcacaaaatgaaactcccgaatgggtggagtatgtgattattggtacctggtccttctggtgctatttttatttaagtctttgtttcaaaccacctttccctgaatcttaaagataatgttttgcatgtgagtacatgcagcccagcaagaaactaaactgaactctcttctcctatcctagtccattaaggagaagaaccagcattgcttttgtgtttggtgtgaatattcagtcaataaaaatgatttaccattataaagagctgtgatcttttcaagtatctgaaataaaacactgtgcctcgtgc

SEQ ID NO: 49290 - DNA, 1064 bp, Homo sapiens
cttcttgaaaaaggtcactttggggtccagaaaacacttactaaaaagggggaaagtttagtaggaacttttctgcttcccaccacggcagagttcatgctttgggctggctggctgctgggaagagataaacacttagcactcactaagtgagcgcctggtcagccacctgcacagagaagattccgaagaggccttcctcccacacacagacctcagctagaggggaccgcggacctcagtgggaaaagctgcacaaggcttctaggagatgatggagaaggggcttctccagctcccaggccaggggagatttctcaaccacgacctaagaagcatcaaagggaatgtggcaagtgtgactccattcaaatcaagagctcccacttaccgaaggacactaagggaaccaaaggaaggccagaggggcagaatcaacgtgcggcacacaaatctttagttttctactattgccgcaaccagtcaccacaaatggagtggcttgaaacaacaagaactcgccacctcctggctcagtagatctggagtccctgggccttactgggccagcaggcaggactcagcagtggtggctccttccagggttctaggggagaacctgcttccttgccttttccagccccaggggtcactggcattcattggcccggactccttcccccaaccccaaagccagcagcaccacatctctctgacccttcatccgttgtcccctctccccccaagccccatgggacagggtctccactcctgagactcatgggattagactaggcctacctggatgatctgggatcctctcccatgtccaggtctctatccctaaccacatcagcaaagtctcttttgccatggaaggtatttgcaggctctgactttgtgtgtattagggcaggacatttttggcggggcagtggtgggggcagggaattattctgcctaccatgccttatacaaaaataaataaatcacaggcttatacctgaaagaattcctgcaaataataaaagaattagagcagctcagttaaataaaaaaaggtt

SEQ ID NO: 49291 - DNA, 1579 bp, Homo sapiens
aaaaacacagatgttcacagcaccactgtttttttttttttttttttgagataataaattccatgagaaatctgggtttgaatatttgtttactttgtctcctaattgaacaccactccaggccttctgtctgtctcccctttacccccaaaatactcacaaaaaaattttaagacaacaagtaaccatatataggtgtttgaatgattttctcatttttatctaatttcatttcataagtcccgagtaatttacctaccataggctactatactgataatataaatgaaaccgaacattttttgctactaactctccccaatttaatgtgttttcgaaataaaaatttaaatttttttccttttaattaaaaagtcatctttgaagtccttattggctgtacattttacatgtttgctggtactattattttgtcagtcagttaaagctggcatgtacagctcttggctttaatgaaaagcacattgacataatgttagtaaattccaaaccccggcacaggaatgtgagttaaaattaagtcttgctggggttagtgtacaataaactatacctacagacttttttttaatagaaagaagacaaagctgctggtataggatttgttcctttgaagaaaaaatgagggaaacaaacacaaaaacctcaatgcagtgtataaataacattttgttcaactacctcttaatgtggaattatctactttaatagtttcctgacagtaatgttaaatagtaactgccaaatttgttattttcccatctctcttaaaaaagtctttatgattattttatatagttttgagaactttaaagccacttttttttaaccttacatttgcataaaaatgtttagcttttaagtagagagcaaattatgatcatatattttgatattcatgacctgtttgactataggagtttttttaaaaaaatgcactttggctataaaaccatggatgatttgatccataagatttaaatgtgccaccattatagtattcctagacatgagcttgatgaatggtattctgtaattataacgtgccacacattattgtgtcttaattgcccttagcctgaattttaatgatcaatttgttattgttgcagatgtgaatattgtgcataaacttactaaatttatgtaaaattgtataaaatagaattagaagtcactaagttctttctgtgtagaagtaataaatttattgtaacacaatgcagttgtgtatatgacattctgtaattccttgaactggatcatatattcataagttctgtagatacttatgcatgaacattttctcatttagttcttgggttcattatttgtattgtgtttactacttgtgatcatgtagttgtgccttactttgtgagaaaggttagctcagtaaatactgcaatttctaaactcagtgattggaaggttattaattataaatgtaactgataaagtacgtgacagcatttaaatctgtataaagaacaatggaaggatccttattgaattgttgcttttttttaatatgtttaaatattatattaaaaacatt

SEQ ID NO: 49292 - DNA, 5454 bp, Homo sapiens
tttttttttaataaacatttgaaatttttattgatttttaaatttaaaatccagttttaaccacaaaattgtttgaatcacaagtggtaatacaatgtcttcaatatttttctaaagttatttttctatataataataagacaacagcatagcatataggaagttttcattccagtggcttttttatatatttatccttcttaggaaggacaaattaaattttttaaattaaacttttaaaatataacaacatctaacagaactgtacaaaacaaagagacattttttaaacaacttgccaaacttacttatgagtgtgttttaaaaacaactttgtaaatgtctgggcaaagaagcaagctgtcctccctttaccttcatagtgagtttgtaaggctttgtctttgtaagcagaaagagtagactgtgttgttttttgccaaaaactgtttatacttaatctcactgaagtattgctacatggagaacccatactctgatcaacttgattttttgtgtgtaatgcttgatctaccaggtaacttcccaactgctcctaatgctagcgggctaatcccacattattattccactatcatccctgcagaaaggtcttggttttgatgaaaatcagccctttccttacctgctactgcctcaaaaagggaccaggaagattctagctggctaattcactgttccctttgagcaagaaaacggcacagggagaaaaggacttatctggtgagagatttggcatataccttcaatgtgtgccctataacacaacattgtctccgatctcatctttctatcaaatgacttccaacactcttaagtctcaggtattcttaaatctgtatcatcaaacatgaagcttctcttgtttgttagagtaattaatctttctttggattaaagtttccctttgaaataaaaccacctacctaatctgactgctaaatttctagcttctttgttttaaatatgctcaggagtcaacccaaattctgcagcaaataagtttgcttattaacaaaaaagtaaaaaaaaaagaaaagaaaaaagatgactaattctacagatagctgtaaggatgaattactcaagttcaaaatcaaattctgattctaaacacataacaattgtttacattcaggattaagatgtctttaagagttgaaacgactttggagatcatccagcccaacttccatccagatatcacgcctctcacatatagtagtcttctgaattataaaaatttataaagttacttccaaaaaaagctacataaataaaaattatctatttatagaaatatctatttagcaggttccataatttaaaatattcaaatcaaattgggtaggactggtttgctctcactcccacagactatatttatacctcagacacgagcagttacatttaaacaatgtgtgtgtagtactactttactaaaatggaaaaaatagtactcttaacataatccctaattttttcatgaacataaaactcccaagtcatttatgtgaactatatctcaatgtagctgtaggaaaaataaaaacctgtgctaacctggactttggtctcatttaagatttggttctggaatgcaaatatggtttttgaaagcccaataaaattaattcttgtatagtctgtatatattgtttacaaggactacaaacactgcatcacaaatcggaggctttggtaaataactaagtgtccaacatagaaattaactatttggtcaaaagtataaaaggtctgaccttatttgaaatacgaaaaagctgagtacttggaagatacgtgaaaatactcagcatagatattatgaaaagctgaataacaaagtaaccttttttctcaaattatttcaggccacagtatataacggaacttattgctatttgaagtttcattaaaaataggttcatatatagaagaaattgtgtcagtaatacctcttcactaatataaaatatgccccttttagaagacgtgttctctagatctcatttctaaaactctgtatttttctcatttctaaaacttaagtatccaatcaaactgaccttactaaaatcccacaaattataagtcaattaatgttctgatttcattaattttggcttgtttcatttcgtcagcatttggttttttagttccaaaggctcctgctgcaagttctctctttttgttttgtattttcagcatattttcttcaacagagtcctttacaatgaattttgtgatgataacttcttgcttctgaccaagtctatggcatctgtcaaagcactgatcttcagcagcaggattcccaggctggatccattaaaaacactcgagaagctgcagacagattcaaaccaactccacctgcttttaaggacagaagcattatagttggagatcctgcttcagtgttttgaaaacactgaattgattcaactcttttcttttgggccatggaaccatccaaacgagtaaacacaaatccagaggctttaagtggtatttctattaaagacaggaatgttgtaaactgagaaacaaccaaactttttatgttgggattcttctttcttaagtcagtcaatgcgtgcattagcgcattaatctttgaactggatgtccattccatatcagactttttctcactgtcacgtgctaattcttctggaggacattctaataaattatcttcatgtatatcatttctgcataaagggcatttagcatgtggctgctcattctgaatgacttggcaaatacagggtttacaaaatacatgtgcacaatgtgttatcacaggaactgttaaagaatccaggcaaattgcacattcctcatctgaacctgagctcagaattaacttcatcttccttattaacttctttctcagttcttcaggtgtatcatttcctgaggggccattggaagacactgcatttgtaagaaggtaagtatggcaacaaatttgccgcagtctaagcaaaagacccaggacatctgcataatgtgccaggacagtcccttcattaaaataccttccaatagtggctctgccttcatttttcacagactgataaatctttctctcttcatctgaaagtgtaatgtgctgaataaatactttacgttctggtaactccaaaacaggttttcctttaattttgcttgtctttgttcttctaagtgtaatatttttaattagggactgtaaacgcctaagtcctccttcatctcccattgtgacaggacgctgtattgttctatgccaccattctctatcaataaatggtttaagttttaaaaaggaaagaagagaccacaagtcctttaaagaattctggattggagtacctgtcaaaacccatcttctttctgattctaagtcaagtacagcttttgtctgctgagcatttggatttcgtatggcatgtccttcatccaggatcactcttagccaccttatgctatgtaatggactatctcctttagttccatagtcatgagttaaaatattatacgtagtcaaaacaatatcctgttttgaaagtaaggccggttctctaatacgatcaggaccataataaacataaaaattcaagtgtacatctgattttatatgttgtccaaactggtcaatccagttgcttaacacagaaagcggacagatgatcagtgttgttcttggtctctcctcaacatcagttttctttgacccctccactgcacaagctccctttttcaacattttcttttttgttgtaggaacagatgaagttaatgcacatgcaaatgccacatcttctataaccttagaagatcctgctttcgccctgcctttagtttcagactgtacatttttcagtttgcctttcattttctgcggcaattcacttgtttcaatttcctctgaatcactgctttctatgtactggacagcagtttttcttcttttgggggcgggagcttagacaattctgacatgcgaaacttactcttctccttgatatctgaaatactgggttgttcactacatctagatgcgtctttgcttagtccatctgccttttcactggtattgtttcctccaagtttcatagagccatcgttaacattatattccttcttcagtagattctttttaactctttcaataggaagaggtctgccatcatggaagttggtaaggattactgcaatggccgtaagagttttacccaaacccatatcatcagctaaaattcctccatggacattttctggtcggtccttctcagaaaaatttgttattgtgttatagtataagtcatttcgctgttcccagaatggtggaagttctttgctattttcccgtgacaccatccaagctagagcttgtttttgatgtggaagcagtggtgtttcaatagcctcagctggttccatttcatgggttttatcatcttcttttaaatcttcaaacaatttgtcaaattctgttttaagctgttcagttgtcatctgtactgcagcatgcactggcatactatagcttggtccagctcttccagagccccaaccactttccaaattgaatcctaaagtttttggtgcaggacccaatttaaatccatgtttcttcaactgatctgaaaccgcttttctattttcttcttttccccaaaaagtcatatgcagaggcatggtaaaagcattgtttgcaccaaaaggaactaccccttcaatttgtgccaatttgttgtccatgatataggccaaagcacctgcaagctctttctttaaatggccaacttgatttccattcacattgtttactttaattgcattcttatcataagggttattaggatctcgttgtaatgcaaccatttcattattattaactactcccgtgtaatagcgtagtccaaccacatgacctctcaaacttccaaataaaacggaatctacttcttcatcactagttagaaagtcatctggagggataacatcttggaattcaaaacgtggaaagaaagttggatatgagaggcgtggaaaatttccatgaactccatactggacagtctgcaagtacttccaaactggatccctcttgaacatccaggacatggcgctgagtgggatgacaagaggagcgcctcggctcccctggatcgttttcgagccgcctcgatacgcctccttccaggccccgcagccctgaagccggggacaaattccgagcgccggatcaggagcgcacgactgaaaggtaagtcgccgcgagtccagtcagacgtcgacgccgtctccttctgcaacaaatccttcaggaaatgaggaagagaacaccccttcacaatgacaacagctggatccgacagcgcagtgccagtgtcacaaagagcctgttagtcttcctgggatcatgagagaggcgaa

SEQ ID NO: 49293 - DNA, 1189 bp, Homo sapiens
tttttttttttttacgaagtttcaaaatatttgtaattgaaagacattttcaattgtaaaatgtctcttgagcatctataaagtagaaattattttggcttaaacttcatactgctttcctaaacaaattatgttgatagaggcatggtataagagtcaccttagagagagaacctattaaattccaatgtcttcactgtgttcagtttacaccaactataataaaactcaagccactttttttgttgatatgcaaaacattctggtaagttcatttgaagttgaattatttcattaacatgtaaactcacatgtacaattttactttttgtcatatatttaaatattttcttatctgcagagctatctcaggatatgaaatcataacatgctagcaactagtaatttaacattaaaacacttccctaaattattccatggaaaagtgcatttacaatataaacatgtcatatatgaagctacaaatcataatctcactggagtggatataaaatttcaaattcagtccaaatgagtcaaagaaaaaagtgctaacagagcaaatctgaaacaagttcatggggattgggtaatgagtcatcgaaacgaaatcttttggaaaccatgctgctatcctctgggatattctctttgtcttctctatcaccacaggttccattacaggaggatttagaagtcttgtcttcagaggaccttacagaatgatcctgagtttgagaggaactggaagtttcttcagggtgaaacaagttttcaaagtcccactgctgtagccaagaatgagaaaggcatatctctgctgttggtcttttctctggattttttactaaaaggctctgaataaagtctgtggccagctgtgaaactgatgaaaaagtttcttccgaataatctacattaacttgagagatattgaggtatgtttcttgattatcttctcccacaaatggtgatgtgtgagttaacaacatatatgctattataccaatattccacatatctgttgctgtggtaatgggatcatagttcaggatttctggagctaaatattctggtgttcccatgatttcccgaagttcacacgcatgccctatttttcgagacattccaaaatctactattttaatgtccccgagagggtatatgctgctcagtaatatattctgtg

SEQ ID NO: 49294 - DNA, 937 bp, Homo sapiens
gagcgaggcccggtccctgcagcgggcgaaaggagcccgggcctggaggtttgcgtaccggtcgcctggtcccggcaccagcgccgcccagtgtggtttcccataaggaagctcttcttcctgcttggcttccacctttaacccttccacctgggagcgtcctctaacacattcagactacaagtccagacccaggagagcaaggcccagaaagaggtcaaaatggggtttatattttcaaaatctatgaatgaaagcatgaaaaatcaaaaggagttcatgcttatgaatgctcgacttcagctggaaaggcagctcatcatgcagagtgaaatgagggaaagacaaatgggccatgcagattgcgtggtctcgggaattcctcaaatattttggaactttttttggcccttgcagccatctctttaacagctggagcgattaaaaaaaagaagccagccttcctggtcccgattgttccattaagctttatcctcacctaccagtatgacttgggctatggaacccttttagaaagaatgaaaggtgaagctgaggacatactggaaacagaaaagagtaaattgcagctgccaagaggaatgatcacttttgaaagcattgaaaaagccagaaaggaacagagtagattcttcatagacaaatgaaatcatgcttaccaatcaaatctcaaagcacagaattattgacttgaatcatggtttttacagttttttaaatgctcaagattttgatattatagattttattttaaaatattaaaatgcaagatagttttgagctattttaaaataaaatttataacattcaacacaaaatcatggaggtgctctaaataacttttagatttcctctctctgtgtgcattaccaatatctaagtgtaaaattaataaattgttttgaattcctggaag

SEQ ID NO: 49295 - DNA, 453 bp, Homo sapiens
cccatctacagcaagaagacggaaatccaaaggcagacagtacgggctcccttcgccaaactcttcattttctctgcacttcaggtggcaagacagctccttcttcagcagcaacagcagcagcaagttagtggattaaaatctcccaagaggaatgacaaacaaccagctcttcaggttcccgtgtcagtggctatgatgacacctcaagttatcactccccagcaaatgcagcagatcctccagcaacaagtgctgagccctcagcagctccaggttctcctccagcagcagcaggccctcatgcttcaacagcagcagcttcaagagttttataaaaaacaacaggaacagttgcagcttcaacttttacaacaacaacatgctggaaaacagcctaaagagcaacagcaggtggctacccagcagttggcttttcagcagcagctttta

SEQ ID NO: 49296 - DNA, 1343 bp, Homo sapiens
ttttttttttccaatcttcattctcggggttggcccgccccgatagtcactccatgtcctcgtttactggttcatcttcgtaatctctgtcatggtcaaaatctggactgtggttggctgttgtcactaaggacaggggcccttcagcttcctctggatcgaggggctcttctttgacgtgtacaggatgcacggcttgcataggagatctgcctggactgctgtcactctcgttgctgttggtatgctccattgccccgttcagctcttcccgtattgcgctggctaagttgcccagagtgggatttcccatggaagcggtagtgtatagaggtatactattctcagccattgaagcctgtaaagctgcattgagaggtgtgcagtaggcgtggctgctctgcatgtttttaataagggaagggttaccactgatcttttgtggccttcgtttttggaattctacttcatccactgtccatactgcccctttaacgttttctactcgcacaaaacacttgtgaagactaagattatgacgcactgcattcttccacgtggcgcgttgcgtcggaagtaagcaaacattcgtgtgaaccagttatagatctcatttagtgttagctgcttttctggagattcgagaatggcctgcctaattaaagatgcatatgtaaatggtggtctaacttctgcgttcttataaaattcttggttctgcgcaatatctgctgacgaaatgggcacgttgtatttgtctgagtaccgctgcggatgggtcccaccggtgtgcatgctggtggttgtgatgacagaggggccttgggtgacgggagtcaggggggcggttggggtcgttggagtatgaggtaagctctgtggagaagcctccgatgcggacttggagagagtgacacttgataccagattcaagggctgaggggcggctttgggttctgtagacttcacatgcaggtgggtcatcatggcttgcaggcgttctttgtcttttgcaagctgtagctctaactgctgtacaacctgcatttgtactctacattgggctgtacttctatcgtccagcgcatgcctcactgttgagatgttttagaaatgattggaaatcttcgcacactgcttcacagcctggccacttgcatacaccatgtccatagagaggatggctatgggggtgctcctcatgggacaaactttcccttttgggagtgtggactgagagctgtccattggtagaggcatgtgggttcattattaaggaggtcttggaaggtgcagaggaggagacacatgtcgtggtcagatccaaactgctgtgattgttg

SEQ ID NO: 49297 - DNA, 1886 bp, Homo sapiens
tttttttttttttttactttttatcaaagaagtttatttgcatgtaaataaacaggttattttgtaatgtttcgggaaaaaaatcccacaacagatttcatctactttcaaaaaaatgaaaaaccccaaagtatttacaaaacggccatatgcacagaaaaccaaatttgaaagatttttttaaaaaaagaccctccccagctgctcctgatgtacatttttaaactcaaaatttaaagctcagttcttatagctgagcatgtttcccaatctagcttctgagatgttaagtacttcctgcccctccaaaactaactcaaggatagaaatgtatggggggcaggggaggaggggagaaggaaaaaaaaatgagattgcccaaggattgtgaataatgtttcgtatactgacatctttaagtgactcaactgtggatactgtatgactcactggctccctgaaagggcttctgagaattcatgatattgctgcacttaattttctgatctaggcctgaagaaagaaaatctttcaagagtcaccaacctcaagcctggttttggcaattatatcctgcgttgtttgtccccaccaccccaccccccacccgctaaaatacttctgttttaagacacattgatattgaacctgaaatctttatgtacatcagagcaggttatgaccaagaacccctaatgttaagtcaaaagacagaagaggaatcaggtcaaactgagaatacataagacaccagcagcagaagataggtagaagttgacttcatgtccttgccttcttttgaaacagaagaatgagtacacctagacaggagggaggtgtcccaggcttggtttattctgcctcttctcctccaccctgtggagaaatgcagtgctccctggttctcaggcagggtgaagcagtttagccccggctccctgttaagcaagttcagatgctgggtcagtgtgggggtgagcccatcgacaattcaggggcttatccttcatccagatcctaactcgggattctttgatctgggatgaagacagaaagagagaaaagcttcccagtttactcattttggtatttgttggccctgcatgggggagctgagcccatgatactattcagtacattccccctaagattctccccactcagaacaaattttaaaaaccacataaatttttttttttttcctgcagaaaccaacgggataggattcaaaactaggtgacaaactcatgagaaatccaacctggctgaatgtctgagaggctgctactgtatcaacatcacaagataaagcactctggtatcacctgcccatatcctccttagtgtcacccaagacatttgactctgatgtggttaattgataacttttcttgctccactttacaatgttttgtttcctacatcttattaccttgggacacaaaagtggcagagttgttgagagctgatgacaataaaaaggagaacactagaggaaatgagacaggaaagaaagccaaagctgattttccaactctatgctgactccaacctgcagaaaaagctgaatatagaaatcttcttccatatatgatgaagtcactccacttacgacataacacacaaaggaatcacctggctttttttttttaacccagaagagttgtgctgggaccatgccccatcccgctgatacagatcctgaatggaataatcaggaatggcacagtgcaggtgtcaatatcaaagtaaggccgcagaatttttgagaggaccctccaaatactgagaacttctgttgcactcgaaacagtctcctggatttctatatttttatgtgaagggctcttattgatgtcccccagaatccagactcagacctatat

SEQ ID NO: 49298 - DNA, 1762 bp, Homo sapiens
  misc_feature (1)...(1762): n = a,t,c or g
agaagccaggacggcccgagaactgacagacggagtgacagacggactgaccatggccgaccagccaaaacccatcagcccgctcaagaacctgctggccggcggctttggcggcgtgtgcctggtgttcgtcggtcaccctctggacacggtcaaggtccgactgcagacacagccaccgagtttgcctggacaacctcccatgtactctgggacctttgactgtttccggaagactctttttagagagggcatcacggggctatatcggggaatggctgcccctatcatcggggtcactcccatgtttgccgtgtgcttctttgggtttggtttggggaagaaactacaacagaaacacccagaagatgtgctcagctatccccagctttttgcagctgggatgttatctggcgtattcaccacaggaatcatgantcctggagaacggntcaagtgcttattacagattcaggcttcttcaggagaaagcaagtacactggtaccttggactgtgcaaagaagctgtaccaggagtttgggatccgaggcatctacaaagggactgtgcttacccttatgcgagatgtcccagctagtggaatgtatttcatgacatatgaatggctgaaaaatatcttcactccggagggaaagagggtcagtgagctcagtgcccctcggatcttggtggctgggggcattgcagggatcttcaactgggctgtggcaatccccccagatgtgctcaagtctcgattccagactgcacctcctgggaaatatcctaatggtttcagagatgtgctgagggagctgatccgggatgaaggagtcacatccttgtacaaagggttcaatgcagtgatgatccgagccttcccagccaatgcggcctgtttccttggctttgaagttgccatgaagttccttaattgggccacccccaacttgtgaggctgaaggctgctcaagttcacttctggatgctggaagctgtcgttgaggagaaggagtagtaagcagaactaagcagtcttggagggcaaggggaggggaatggtgagatccgagccctgtgcatggacttggtgagactgttgccttaatgacatcctgcaccgtgtataacttagtgtgtcattttgaaacttgaattcattcttatcaatttaagggatcttaaaaggatttggaaatggaacaagtagcttccagaccagatactacctgtggcaagaatgctgcctaccagttaactgctggtcctaccacagtcaaagtattcctcattaaagagagaatctcaggttctcactggaggcactgtgcatattttcaaccagatcaccaggagctgagatcttcttcagtccctagccaggaatacccatttgatttccagggtgccatctaatcctgggctgtacatgtggatatggacttgaggcccacctctgtgtccaagtggattgagcatatatgcctaggaggagatagactgttaatcgttggattttgatttttttttttttatgcctgcaaataatcaaaagtaaaactggagtagcctaattttctgggagcaggtggagaactttccctcctacacagtgaggacagtcccagtctgctgggataagtgagaaagcccagggtgtaggaaggccctttttacatactcttttctcatgagagctcactattttaacaataaacaataaacgttgtttctaatttttataaaaaaaaaaaaaaaaa

SEQ ID NO: 49299 - DNA, 476 bp, Homo sapiens; identical to SEQ ID NO: 10737

SEQ ID NO: 49300 - DNA, 362 bp, Homo sapiens
tctgctctcgggggcaccttccggggttcctaagccgcggggcccctcgctgcccctcgaggccctttccctgacctaggctttggcctgggctactcgttccggagccgccatgtcgtccgacttcgaaggttacgagcaggacttcgcggtgctcactgcagagatcaccagcaagattgcgagggtcccacgactcccgcctgatgaaaagaaacagatggttgcaaatgtggagaaacagcttgaagaagcgaaagaactgcttgaacagatggatttggaagtccgagagataccaccccaaagttcgaggggatgttacagcaacagattgaggaagctacaaacaagaaatggga

SEQ ID NO: 49301 - DNA, 662 bp, Homo sapiens
ggtcgacgttattttcttccttatttggatgataaaatttccttttatgtaatgaaggtaaaagtagagggcaatatttttgctttttgaaatgctcttggttgcaaaacaaaatgttggttgctgtttgtcagccccagaatttcttcttaagttcgcctgtctctgaaatcccaaagtcacggaaccgcagtctagctgtggtgcatgtttacgtattggtgagaaattcctcttgggttcttgaacagcctgtacgctggcaggcagcactgcagcatttctgctgctcatggccaagaacgagtctggagatcgctgcgtgcggttttaggaagtgccaacacccgtggtgatggggcctctggccacccctgggatccatgggacacactcacaggaagctgatgtggccttctcggtgaggactgcaccttaacctgggcactgggagcctgtggcccccctgtatgttggtgatgacactagtgtgggtcttctggctctggggctacagcttctgcctcctcacctggccgtcggtactcggcaagcaggcctggcctcccggggcctggatccctaccggctgggattggcctcctggaagtacctgtttgggccatgtgacctcctttctcacttatgcctcactcccctcc

SEQ ID NO: 49302 - DNA, 140 bp, Homo sapiens
aaaaaaaaaaaaaaggcttagggtgacaattttgacatggggacgggaaattaacattacactgaggttattcataataaaggatcttctgaggaatcggaaataaacaatgttgtatggaaacaaaaccccaaaacccc

SEQ ID NO: 49303 - DNA, 790 bp, Homo sapiens
gagcaaactgaaagtaatgcaaacagatgaatccaataaagaaacagctaacctacaagaaagaagtataagcaatgatgatggtgaagaaaaaatagtaacaagtgtgcgtcggagaggaagaaaacccaaacgttctctcactgtatcagatgatgctgaatcctcagagccagaaagaaaacgccagaaatcagtttctgatccagtggaggacaagaaagagcaggagtctgatgaggaagaggaagaagaggaagaggacgagccttcaggagccaccacaagatccaccaccagatcagaggctcagagatcaaagacacagctctccccttctatcaagcgcaagagagaagtcagccctcctggggcccgaacaagaggccagcaaagggtggaggaagcccctgtgaaaaaagcgaagcgataatcctgaccactgctgccctaggcttatggaggaacacggtggagaggaaagagacatgccttggtggccataggcttctctttaaccaggaaaaagatatgcatgtgctgtaagtccctagggtgcaagctttttcttgttatgttttaaacagctttataaactattgttcatagaagatattatgtacatttatttcagataaaggacaataagtttactttgtatctgaactcaaaacaaagtagttgtatattttaacattcaaaattgggatttcccaatgtgacacatcatgaatgcaaacccctccagcccatcagacgccaggctgcctactggtaatctgtgtatagt

SEQ ID NO: 49304 - DNA, 1801 bp, Homo sapiens
  misc_feature (1)...(1801): n = a,t,c or g
gtttgaggctgagccgctgagaggctgagtggagttcactcacatggattgaggcccagttcctgggagaagagatgctgggcaggaaggtgtctgcatgtgggactctgtacagcccggtcctctcccacatctgggaggggccagagtcagacaactgctgggttcgtccctaagagaggtcatctgactggctgttcagcctaggctgcacacacccccactttcctctaccaggccacaccggaggcagtgctcacacaggcaatctaccaggccacaacaacgacacccacctcacctctggcacctctgagcatccacgtacttgcaagaacttcttgctcacatcagctaagagattgcacctgctgacctagagatttccggcctgtgctcctgttgctgctgagcagggcaaccagttagcaccatgtctgtgactggcgggaagatggcaccgtccctcacccaggagatcctcagccacctgggcctggccagcaagactgcagcgtgggggaccctgggcaccctcaggaccttcttgaacttcagcgtggacaaggatgcgcagaggctactgagggccattactggccaaggcgtggaccgcagtgccattgtggacgtgctgaccaaccggagcagagagcaaaggcagctcatctcacgaaacttccaggagcgcacccaacaggacctgatgaagtctctacaggcagcactttccggcaacctggagaggattgtgatggctctgctgcagcccacagcccagtttgacgcccaggaattgaggacagctctgaaggcctcagattctgctgtggacgtggccattgaaattcttgccacttcgaaccccaccccagctggcaggagtgcctgggcagtctacaaacacaattttccagggttggaggctgtggatggcatcacatctgagaccagtggcatcttgcaggacctgctgttggccctggccaaggggggccgtgacagctactctggaatcattgactataatctggcagaacaagatgtccaggccctgcagcgggcagaaggacctagcagagaggaaacatgggtcccagtcttcacccagcgaaatcctgaacacctcatccgagtgtttgatcagtaccagcggagcactgggcaagagctggaggaggctgtccagaaccgtttccatggagatgctcaggtggctctgctcggcctagcttcggtgatcaagaacacaccgctgtactttgctgacaaacttcatcaagccctccaggaaactgagcccaattaccaagtcctgattcgcatccttatctctcgatgtgagactgaccttctgagtatcagagctgagttcaggaagaaatttgggaagtccctctactcttctctccaggatgcagtgaaaggggattgccagtcagccctcctggccttgtgcagggctgaagacatgtgagacttccctgccccaccccacatgacatccgaggatctgagatttccgtgtttggctgaacctgggagaccagctgggcctccaagtaggataacccctcactgagcaccacattctctagcttcttgttgaggctggaactgtttctttaaaatcccttaattttcccatctcaaaattatatctgtacctgggtcatccagctccttcttgggtgtggggaaatgagttttctttgatagtttctgcctcactcatccctcctgtaccctggccagaacatctcactgatactcgaattcttttggcaaaaannaannacca

SEQ ID NO: 49305 - DNA, 1020 bp, Homo sapiens
ttttcatatccacaaatcatattttattagctgtgcaataccaccttccattcatggcctgtgttttaattaaatttcataaactaccagtacaaatcaatacaatgcattttttaacacaccaacagcttgaatgttcttgaagcttttaaacaatgagtttactgtgagcaaacagaagcaaggactcaaagagataattagctcatgcatctggtgctggctaataattttcacatgaatgaagaaaccactctatgttaactgtatttatttttaaaaaatagtttgaaatggtaataaaatgcaattttcagaagcatcttggtgatcgagtagaactgcttaatttaaaaaataattcagttacttccacctggcctggggtggataacatgtagcaaaaacttccatcccactagattctggcagatggattgatctttcacaatatatatatatatatatatatttttctccatttcttcttatggaagccagaagccaggaggagcaccctgttttgaaaagagattgtttgggttcacacggtatactttggtttatttaaacaggtaagaaagcggtccctacttctgaggagaaaatgtggtttctgacttttaggtacatcacgatatcaccagtctgaatgagtttccttttctgtaaagcagaaagtgtcattttcttttcctccagtgttcagttgctcctcttcgaaaatactcttcagagaaagtatctgtacgtctgtattagtacaaaccattccttccctatgtctcaatgcctgacattcagtgcctgacagaatcagcatttggcatgtccttggatatggcatcaatttgatgctttgaactgaaagttctcataatgcatctcaaagtatcttcttaaaaaatataaaaatgtaggccaacttgtgctctcttgtaaggcttgcaaagtggtaattaaataagcagactataactcacaagggaaaaaaagtgcatttttaaataaaagaaaaag

SEQ ID NO: 49306 - DNA, 332 bp, Homo sapiens
  misc_feature (1)...(332): n = a,t,c or g
ctttactctcaccagcaatgtcctatctgactcctgtacgggatgaggaagcagagtctttacggaaagcacgctccagacaagctcggcagacacgaaggtctactcaacctatctgtcatcgcctgaggtgcccagctcagccagacaaacccaccacgccagcatctccttctacgtcaagaccctcactctacaccagttcccacctgctatggacaaatagattttcagtccctgattctgagagttcagagactaccacaaacactacaactgcaaaggaaatggacaaaaatgagaatgaagaagcagatttggatgancagtcc

SEQ ID NO: 49307 - DNA, 315 bp, Homo sapiens
tgcatcccccggtgctgcaggaggcttctcacatgctttgggatatcttcagggaaatacgctcttaatagaaactgagaatttaagaaagtctgcctgggcggaggacacctgcacttgttaccctgagttgattcctgaaacttcgggacccctgggtattaacagaggactcagtgggagctcctggtcagaggacttggatgttgtcattacattctaagtgagactgtccacatcatctaggaaaatggtggccctgtccttaaagatttgtgtgcgccactgcaacgtggtgaagaccatgcagtttga

SEQ ID NO: 49308 - DNA, 1108 bp, Homo sapiens
ttttttttttttttaaaaagttgcacttacaaagcagttggggcatttattgacatttaaacaagggaggagatcctgaacactagtctcgctcagtttataaaaacttgaggccaaactctccatcatctgtacacagcttaaccacggccaggagcaagaattcgagttaaacgaattgaaccagtccaaccacaagacgataaagggaaacagggcgtggggatttccagtttttccttttacattacaaagtttccaacacaagaagccaacaataccccagtgctgcaccaagttacttcccactgtttcccaaggcacagtcaattaataatcagtagtccaagttctaagaacatttcctggaaaacaaggacgcacctcccgtggctctatgcatggcctgccactgatgaatcaaattcttaagaacctacgaccgtctgatacccttgaggagagcaccctcatagaatctccagcatcaggcctcagttttcccatctgtaaaagacagccatgcaaagtgggagatccgctaggcttccagatcgaagtcatcgcgctcctcattgtactctagcacgtgccgcttgatcttggacgagtccacccaagtgacaaagtcctccatgctgcgcgtgacaaggaaggcggggtcggtaaccacgtcagggcccacgcgtacgtgcccttgctcccacaaaaggccacggcagcctgaagtgtctcgccatgcgcaagcttgaaggagcacggtggggaggcggcggcggcagaaggacgaggccgtgacgaaagtgcagagctccagcgaaccgcgcgtgggcaccaagccgagagcatacagcttgtccagcagcgcggcccgaagcgcgcacgcggaactggtcgcgttcgggcaggtcgcgccaggcgccgcgccagctcacgcacggcacggctcagctggttgtagcgcgtgtagtcctcgccgccgctgcagccggtaagcgccgcagcacgcgcagctcgtgcaggttgtggtcggtgacctcccagttcaggaagtccacctgcttcagcagcttctgctcgtggaacttaagcttccgcaccatgaatg

SEQ ID NO: 49309 - DNA, 1129 bp, Homo sapiens
tttttttttttttttttttgaatgataagacttttaatttggtagacttaataggcaaagtccctatgagtaggcaaatctgcatgttgagttttattccaggttcagttttaggttcactgtctctctctttgatgaacactgcacaaagttatttgtattacagctccttaaagaaagagtacaaattgtttacgactagttttttcatatacacgaaaaagcacaattataatttctgtcccactcagaaattaatggcaaacccatagtaacctaataaagctattttaacatgtgctaaataattcttttatctatactgttgtattgatcaaattatttatatgctctttaaaaatcttttatgaattgaaagctataactctctctcttgaagtctgtctgcatcacataagtattgatcagtcttggatgattcattcatagccgactgtcttcgttgagtggtcttcacaaatctcagcagattgatgatggcggcaggtgttactccgggtatgcgactagcagccccgatcgtctgtggacgactaaaatgtagtttctctcgaacttcatgggacaaagacacatccctgatagtcaaataatctaggtcttttggcagttggagagcttcatcttgctgaactccctttatttcttgtagttgatggaacaacactgattcataagtggcttctattttcagtctttcagccagctctctacatttagtatacttcttcaagggctctggaacagccttggctaatgaatccatgtcaacttcctcatacttcagaacatcgagagctctgacaggcagacttctactagtacttatagaagcctctgggattaattttttccatttagagctcaaaaactcaatagatttcaacacagaaatgccttcttctaaagaagacttcatccaacaagctctttcatatcgttgttgggacacacagccagcgtctttataccctcgcagtgtgagccggctgtcagcattatcagggcgcagtgacaaacggaactctactcggctggtaaacatgcggtatggttcactggtgcccagagtagtgaggtcatcaatcaagacttcttatgtaaccct

SEQ ID NO: 49310 - DNA, 450 bp, Homo sapiens
gctgcgcccgcgagctcccgggctcggcaaccgtggcatgcttaggattggccatatttaaaagttctgaagtagaacctgcgcctcctctctgcttctccctcctcctcagtaatttatttcgagcttccaggcaagggccacggaagaagggaaagcaagaaattagatgcctgtgtggtaactcctcgcggagctaaggtggactctcttgcagccaacttcccatcagatcaccctgctggacttgcagaccggaatggggctcgcctaaggagccgagcgctgcggaggctgctgcgtgttggatgggagtgggagggggctggagcgagatttccagggcgcagtcctccggggcgttacgctgggcataatggaattgcagaggacgtctagtatctccgggccgctgtcgccggcgtacacggggcaggtgcttacaactac

SEQ ID NO: 49311 - DNA, 2080 bp, Homo sapiens
agatagagactcatctttttgcctttgagatttactttaggaaagaaaagtttcttttgatgctacaatcagtaaagagggcatttgctattgattctagtcatccctggcttcatgagtgtatgattcgtctctttaatactgcagtgtgtgaaagtaaagatttatctgatacagttagaacagtattaaaacaagaaatgaatcgtctttttggagcaacgaatccaaagaattttaatgaaacttttctgaaaaggaattctgattcattgccacacagattatcagctgccaaaatggtatattacttagatccttctagtcagaagcgagctatagagttggcaacaacacttgatgaatctctcactaacagaaacctccagacatgtatggaggtattggaagccttgtatgatggtagcctaggagactgtaaagaagctgctgaaatttatagagcaaattgtcataagcttttcccttatgctttggcctttcatgcctcctggatatgaagaggatatgaagatcacagttaatggagatagttctgcagaagctgaagaactggccaatgaaatttgaacatcactaaacaagcaaatggaatgactttggaccatatctagtatataatatttttgtcacgcacctgctgcattgctctaacttacacagaatgagaggagtaaatgttcttgccttcaaatagtgttttacgttttttatcctgctgaaaaagtatatataaaatatctaacattacaggatagaggttcagtttcttaaaaaattaaagctgctaaaattgagtggttaaaaaagataccttatcctattcctccccacccacccatgtttttaaacctaatttatataaaatctggaggctgttacagctaacaaagcaggtgtgtggcagaaatattactttaaatttgtcttgtgagattttactatatctcagacagcataaatgctgttttagcactgggattctttcactggagcacaaagagttgttggggctttaccatctgactggatttggtacggggttgattctgaccataggaagtatgcaatgtgaatcactatttacagagaaacctacaacagatgcttgatgttgtagaaactgggacatatagataccaagcaaaattataagaaacctataaggtgttcaatacgcttgtgtttccaaaattcactgtacatgatcagtttggtgtcttgtaccacagtttttaactgaaggaaccagttgtaacagctcaattttaactaaaacttgaagaactaaaacaacaatgcaaacctttcagcattgtttggccaaacttgttaaaactgtaatgcaagaaccaaatgcactgtgatgtggcaccaactaattagcaagcatgaatttttcacccaagagtgaaaaaaggaaaatctaccatggcttgaagttaaagagcagaactcctgactaccattctatgactgatcaaaagactaatagttaaaaacctcagcaggccttgttcacgatatgcagaaaaaaaagtgctgcagtttagatacctctggaatttttccacagtgtcacaggtttgtaatacttgaagccctacatttctaagaatatatttcttgctcagttgtttcaggcaagcccaagactttgtaatttttaaagggcccagattttttttttttttttttttttcaaataacagaccagcttctttttcttgcagttacagatgtaatttcctttttgttgtcaaacataaggtaccaaatatgatgcaataaattgttttgaaaaacagttgtgtgaatatttcaactaatctgtgttgggcttctgtgaaatacacaggtggaaacagaggtgcaagccagaggcaatgtaatatgctgtaaggctagtgcagatgggagctttttagaaggggctaagtgctggtgtcagggaaattccataatgaagtagaatgctgctcctgcattaagatttcattgagggcaaggctggtggcaggtactatgaatgtaattcataatttaaaaggaaaactaa

SEQ ID NO: 49312 - DNA, 569 bp, Homo sapiens
  misc_feature (1)...(569): n = a,t,c or g
cagcagaaactgcttattacctcctaatcattttatgaagaaatacctatataaaaacaaacactaaagagaacaaatagatttaactaaagtgacaagcataattataaataaataccagattatcagattttaaacaataatctataacagttttactatctaaggattttcactccaagaagaaaaaatacatagtaacgccaagcttgcaggacgatgacttaacagatacattttctcttaatggaaacttatctagcttcagtaatatttctggatgtagcatcaagttgctgttgcacatttttaaaagactggtccagcagtgtttcctcttcatttaaagtattggcaatagcatcattacatggattgtccagaatgtcttcgtttaatccatttgactcctccttttgatcctcatcagtattaacctcttcaaccgtgtgtgccctgggtgtaattcattaaccatatccatttcccaagggtctgactattactcagcagctttgcctgccttctttccaaggccagttggtttattncccccaattccttnggtg

SEQ ID NO: 49313 - DNA, 2319 bp, Homo sapiens
gagtttagttgtagcagaggggccacagacagaagctgtggtggtttttactttgtgcaaaaaggcagtgagtttcgtgaagcctggaagttggccatgtgtcttaagagtggctggactttgacatgtggctgtttgaataagagaaggacaaagggaggagaaagcacatgtgctccagtgagtcttcgtcactctgtctgccaagcaattgatatataaccgtgattgtctctgcttttcttctgaaatgtagataactgctttttgacaaagagagccttccctctcccccacccctgtgttcttgggtaggaatgggaaaaggggcaacctacaaagattgttggggcaagggaagtcacaagctttcggatggggcggtggcttttcacaaaacatttagctcatcttattctctctttgtcctctctcccctcctgcccgcccgcaccctggaattgccactcagttcctctgggtgtgcacatatgtttggagaaatagaggagagaaaagagggccacgtaactgagagcttacagtgccaatgcccgtttgtgttctggccagagtggagtgcgcagccctgactcccaggcgctgagattgttgcctggttacccaggaagctgctgttccggctgcccagcctttctctgagccagcggatgcacagtccgtggccttcttcaggcttattgatgatgctttttgcaaatgttgaatcatggttctgtttctaagttggatcttttttgttttctccttgccaccctaatttgacatcaaaattctctcttgtgcattgggccctgggtcattcaaacccaggtcacctcattccccttctctgttcacacctaatgtcttgaagagtaggtagcagcagtgtgggctgaacctaggccagcttgcttagcgggtcaccctgctgtgaagtcctggcaggtgttggtaatgtgtggaaatgcagtcagcaagtttgctggggagtttgataaaagtataaaacaaaacaaaaaaagcctcggtataattttgttccacgacttcttctgtagctttacacccagaaggaaggaatgggctacagcaggtagtggaggaagaggggggtgagcaggtgtattaaaatagcttacgggtaaggcctaaaaggtcacccctcggccccctctccaaaagaagggcatgggcacccccaggagaggatggccccaaaaaccttatttttatacatgagagtaaataaacatattttttttacaaaaataacttctgaatttatcagtgttttgccgttaaaaatattcctctatagtaaattatttattggaagatgacttttttaaagctgccgtttgccttggcttggtttcatacactgatttatttttctatgccaggcagtagagtctctctgcctctgaggagcaggctacccgcatcccactcagcccctccctacccctcaagatttgatgaaaattccaaccatgaggatgggtgcatcggggaagggtgagaaggagagcctgcctgctcagggatccaggctcgtagagtcactccctgcccgtctcccagagatgcttcaccagcacctgcctctgagacctcgctctctgttccagcaaccctggttggggggtcagacttgatacactttcaggttgggagtggacccaccccagggcctgctgaggacagagcagccaggccgtcctggctcactttgcagttggcactgggttggggaggaagagagctgatgagtgtggcttccctgagctggggtttccctgcttgtccagttgtgagctgtcctcggtgttaccgaggctgtgcctagagagtggagatttttgatgaaaggtgtgctcgctctctgcgttctatcttctctctcctccttgttcctgcaaaccacaagataaaggtagtggtgtgtctcgaccccatcagcctctcacccactcccagacacacacaagtcctcaaaagtttcagctccgtgtgtgagatgtgcaggttttttctagggggtagggggagactaaaatcgaatataacttaaaatgaaagtatactttttataatttttctttttaaaacttggtgaaattatttcagatacatattttagtgtcaaggcagattagttatttagccaccaaaaaaaagtattgtgtacaatttggggcctcaaatttgactctgcctcaaaaaaaagaaatatatcctatgcagagttacagtcacaaagttgtgtattttatgttacaataaagccttcctctgaagggaaaaaaaaaa

SEQ ID NO: 49314 - DNA, 719 bp, Homo sapiens
gtattgaaaatattttataatcaattctctagaatcctagccatccagtacaggaaaaaattatattggaacacttccgtatttttaaacaatgaaaaaaaatttgactagaggatggcataagaaatttacaaatacaaacttaggcttcctcacatttcccacagagcaactaaacgagaaaaagatttcaagaaatgacagtatacctcgaatgcaaaattccaaagtcaaatagctacttacattaagagatttaccaaaacagtttgtaaattaaacattaacagcaaaaggcacaaaaagcctatttcttttatggtgtctcggctgattctttaagaagcagataaacaaggtactgtatggaacgatcaaaacttggcctgagctgtcttctgataattaatcctagtatatccagatttgttgtccaaggacacaagctccatgccaccttctgctgtcactttccaagaagaggctgtttttttttttgtttccagttttcactatgatctgagtagacagagaatgtcataaaataaatgagagtattccattatccgatcagaaatgccacctcttttcccaactcattgctctgacttgaaagatgaacgtatatatgaattctcattttattctcctgagaaattatgcatgatccattataaaacatacaggtaatacaaagtccaaaagcctgtcatgtttat

SEQ ID NO: 49315 - DNA, 1847 bp, Homo sapiens
gggcggtgtcccaacttcggaggacctgggcgcggagggctgtggcgtgaagaccgctctaaaaccgagatgactagaggttccgtttaaccgattcctgccggggtagcgtccgagcgtaggggatctcggggcagcatgcattccagctctacctgggattgtcgccgtgcacatggctggaggagcgtctctccgccactgcgcacattttgcagcctgcaccggccaacgcaaagaatggccgagtggattctgaggaccggaggagccgccactgcccgtacctggacaccattaacaggagtgtgctggactttgactttgagaaactgtgttctatctccctctcacacatcaatgcttatgcctgtctggtgtgtggcaagtactttcaaggccggggtttgaagtctcacgcctacattcacagtgtccagtttagccaccatgttttcctcaacctccacaccctcaagttttactgccttccagacaactatgagatcatcgattcctcattggaggatatcacgtatgtgtttgaagcccactttcacaaagcagcaaattgcaaacttgggacaagcaaggccaaattgtcccgggcatatggatggtaccactttacctgccgggtattgtgggactgaataacataaaggccaatgattatggccaacgctgtccttcaggctctatctaatgttcctcctctccggaactactttctggaagaagacaattataagaacatcaaacgtcctccaggggatatcatgttcttgttggtccagcgttttggagagctgatgagaaagctctggaaccctcgaaatttcaaggcacaaagaagaaaaagaagactattgtgactgatgttttccaggggtccatgaggatcttcactaaaaagcttccccatcctgatctgccagcagaagaaaaagagcagttgctccataatgacgagtaccaggagacaatggtggagtccacttttatgtacctgacgctggaccttcctactgcccccctctacaaggacgagaaggagcagctcatcattccccaagtgccactcttcaacatcctggctaagttcaatggcatcacttgagaaggaatataagacttacaaggagaactttctgaagcgcttccagcttaccaagttgcctccatatctaatcttttgtatcaagagattcactaagaacaacttctttgttgagaagaatccaactattgtcaatttccctattacaaatgtggatctgagagaatacttgtctgaagaagtacaagcagtacacaagaataccacctatgacctcattgccaacatcgtgcatgaacggcaagccctccgagggctctaccggatccacgtgcttcatcatgggacaggcaaatggtatgaattacaagacctccaggtgactgacatccttccccagatgatcacactgtcagaggcttacattcagatttggaagaggcgagataatgatgaaaccaaccagcagggggcttgaaggaggcgtctagggctttgctcccaagggctgtggctgatgatgattgatgctcctttctcccatgcattgagctcccatctagcttcagcagggcagaacccttctccagatgtgtgtaacttatgtcttgagtatctgggagtagttgaagaacagataattccttccaaacatcaagccttgggattcttggagcaagcagaaagccagtaacttcgctctgttagaggtggaggattttcctatggttccccccatttcctgatttgtatttttagatggattaaatagtctcctgtttttaaa

SEQ ID NO: 49316 - DNA, 412 bp, Homo sapiens
gtggggccttatgaagaccaggattctgcgggtgtcaggggattgcccctcttgacagagactagggttttagactgaggcttcctgcagggtgttcgcattgcccttctccgttccccttcagacctttctggggagaagaggtgggaggaggggagaaagactgttcatcttattctgaatcctggagcagctgaaggttttctcttgagtcaggatgcagtggtaatgcattaaccagcaagtgtggccaaggataatgaaaaagtgggaaaggaaggtcctcctcctccctgattgtagcatccagcagtctctgtagccaggttactcaagaaccacatttgatttcctggccctttgccttggcagtgatggcatttttatttcactgtgttttaaagtcttcatt

SEQ ID NO: 49317 - DNA, 1289 bp, Homo sapiens
ccggtcacagcagctcagtcctccaaagctgctggaccccagggagagctgaccactgcccgagcagccggctgaatccacctccacaatgccgctctcaggaaccccggcccctaataagaagaggaaatccagcaagctgatcatggaactcactggaggtggacaggagagctcaggcttgaacctgggcaaaaagatcagtgtcccaagggatgtgatgttggaggaactgtcgctgcttaccaaccggggctccaagatgttcaaactgcggcagatgagggtggagaagtttatttatgagaaccaccctgatgttttctctgacagctcaatggatcacttccagaagttccttccaacagtggggggacagctgggcacagctgggtcagggattctcatacagcaagagcaacggcagaaggcggcagccaggccaagggggcagtggctctgccggaccagtatggctctgatcagcagcaccatctgggctctgggtctggagctgggggtacaggtggtcccgcgggccaggctggcagaggaggagctgcctggcacagcaggggttggtgagacaggatcaggagaccaggcaggcggagaaggaaaacatatcactgtgttcaagacctatatttccccatgggagccgagcccatggggggttgacccccagcaaaaaatggaacttggcattgacctgctggctatggggccaaagctgaacttcccaaatataagtccttcaacaggacggcaatgccctatggtggatatgagaaggcctccaaacgcatgaccttccagatgcccaagtttgacctggggcccttgctgagtgaacccctggtcctctacaaccaaaacctctccaacaggccttctttcaatcgaacccctattccctggctgagctctggggagcctgtagactacaacgtggatattggcatccccttggatggagaaacagaggagctgtgaggtgtttcctcctctgatttgcatcatttcccctctctggctccaatttggagagggaatgctgagcagatagcccccattgttaatccagtatccttatgggaatggagggaaaaaggagagatctacctttccatcctttactccaagtccccactccacgcatccttcctcaccaactcagagctccccttctacttgctccatatggaacctgctcgtttatggaatttgctctgccaccagtaacagtcaataaacttcaaggaaaatgaaaaaaaaaaaaaaaaaaa

SEQ ID NO: 49318 - DNA, 630 bp, Homo sapiens
  misc_feature (1)...(630): n = a,t,c or g
ctcacactggggaaaggccctacaaatgtaataagtgtgagaaaagttacccgacaccgttcagccttcattgtacataaaagagttcatactggggagaagccctataagtgtggtgcctgtgaaaaatgctttggccagaaatcagaccttatcgtgcaccagagagtccacacaggtgagaagccgtataaatgcctggaatgtatgagaagttttactcggagtgccaacctaattaggcaccaggcaactcacactcacacttttaaatgccttgaatatgaaaaaagctttaactgtagctcagatcttattgtacatcagagaattcacatggaagagaaaccacatcagtggtctgcgtgtgagagtggcttcctcctaggaatggactttgttgcccaacagaaaatgagaactcaaacagaggagctacacttataaatacactgtatgtgataaaagcttccaccagagttcagcccttcttcaacatcagacagtacacattggtgaaaaaccgtttgtctgtaatgtgagtgaaaaaggtcttgagcttagccctccccatgcgtcagaagcctcacagatgtcttgaccaggcgangaagctgtaataccaatatt

SEQ ID NO: 49319 - DNA, 2606 bp, Homo sapiens
agagagccgcggcgcctcgttccgaggagccatcgccgaagcccgaggccgggtcccgggttggggactgcaggggaaggcagcggcggcggtggcgggacccaccgggtctgggactggggaactgcctccggttcacgatgccagtatggacagaatagcttatgatgcttatccccacccaccacttccgaaacattgagcggaaaccagaatacctccagccagagaagtgtgtcccacccccctaccctggtcctgtgggaaccatgtggtttatccgtgacggctgtggcatcgcctgtgccatcgttacctggtttctggtcctctatgcggagttcgtggtcctctttgtcatgctgattccatctcgagactacgtgtatagcatcatcaacggaattgtgttcaacctgctggccttcttggccctggcctcccactgccgggccatgctgacggaccccggggcagtgcccaaaggaaatgccacccaaagaattcatcgagagtttacagttgaagcctgggcaggtggtgtacaagtgccccaaatgctgcagcatcaagcccgaccgagcccaccactgcagtgtttgtaagcggtgcattcggaagatggaccaccactgtccctgggtcaacaactgtgtaggcgagaacaaccagaagtacttcgtcctgtttacaatgtacatagctctcatttccttgcacgccctcatcatggtgggattccacttcctgcattgctttgaagaagattggaacaaagtgcagctccttctctccacccaccacagtgattctccttatcctgctgtgctttgagggcctgctcttcctcattttcacatcagtgatgtttgggacccaggtgcactccatctgcacagatgagacgggaatagaacaattgaaaaaggaagagagaagatgggctaaaaaaaacaaaatggatgaacatgaaagccgtttttggccaccccttctctctaggctgggccagcccctttgccacgccagaccaagggaaggcagacccgtaccagtatgtggtctgaaggaccccgaccggcatggccactcagacacaagtccacaccacagcactaccgtcccatccgttctcatgaatgtttaaatcgaaaaagcaaaacaactactcttaaaactttttttatgtctcaagtaaaatggctgagcattgcagagaaaaaaaaaagtccccacattttattttttaaaaaccatcctttcgatttcttttggtgaccgaagctgctctcttttccttttaaaatcacttctctggcctctggtttctctctgctgtctgtctggcatgactaatgtagagggcgctgtctcgcgctggtgcccattctactaactgagtgagacatgacgctgtgcgtggatggaatagtctggacaccctggtgggggatgcatgggaaagccaggagggccctgaccttccccattgcccaggaggcagtggcgggcttccccgatgggacataaaacctcaccgaagatggatgcttaccccttgaggcctgagaagggcaggatcagaagggaccttggcacagcgacctcatcccccaagtggacacggtttgcctgctaactcgcaaagcaattgcctgccttgtactttatgggcttggggtgtgtagaatgattttgcgggggagtggggagaaagatgaaagaggtcttatttgtattctgaatcagcaattatattccctgtgattatttggaagagtgtgtaggaaagacgtttttccagttcaaaatgccttatacaatcaagaggaaaaaaaattacacaatttcaggcaagctacgttttcctttgtttcatctgcttcctctctcaccaccccatctccctctcttccccagcaagatgtcaattaagcagtgtgaattctgactgcaataggcaccagtgccccaacacatacagccccaccatcatccccttctcattttataaaacctcaaagtgggatttcactttctgatagttaacccccataaatgtgcacgtacctgtgtcttatctatattttaacctgggagactgttgtcctggcatggagatgacccatgatgctgggggttacctcacagtccccaccctttcaaagttgacatatggccatcccattggcccagaatccacagacacacctaagcctgtggcacctgggacagaatagattttccatttgagaggcacttcctgtgtcagtcttgtttgaaggaggtggtgatggtggatagaggtgaaggaggtagggagtgccctccaagtgcaaaaataacaaatatgattattgaccatcggggaattctcacacattgatttgttttttaagcaattgccagaaacccccttttttagcttttgcttggggtgggggtaggagttaaggtttattcaatcctgtcctgggtagggcgaaagttaatctagccatgtgatttttcagaaaagtaagtggaacatgctgccacttttcaattctgtcagtgcttccacatggaaacaaaatgcaataaaatttttccaaaacctgaaaaaa

SEQ ID NO: 49320 - DNA, 1756 bp, Homo sapiens
gcgtccgcccaggtgcccgcgcccgtcgtgatggaggcggcgctgctggggctgtgtaactggagcacgctgggcttgcgcgcgctgaagctgccgcagatctccgctgtgctagcgcgcgcgcagcggcgcctcagctcttccgagtttacttctggagctggcaggattcctggtgtttctgcggtaccagtgttactatgggtatccgccgctgacctacctggagtaccccatcctcatcgcgcaagatgtcatcctcctgctctgtatctttcattttaacgggaacgttaaacagggcacttcttacatcagctgtattggtgtcttcttggttcatccttgccctgcagaagtggatcataagacctggccatgaatctatgtactttcatcagcgcggccagtaagtttgcacagctccagtgtctgtggaagacgagagactcaggaactgtgagtgcgctgacttggagcctctcttcctatacctgtgcaaggtctcgctctctctcacaggctggagtgcagtgatacgatcttcactcactgcgggtttccaagtagctgggacaagaataatcacaaccttaatgaccaccaatgattttacaattcttctacgttttgtgatcatgctggctttaaatatatgggtaacagtgacagtacttcgctaccggaagaccgctataaaggctgaatgatggatacattattccttcacacagtggattttgagtaactgaaccaaaggaaaaagaagctctttgctaaattaaggtcttttataaatttagtaaatcagtttataatctttaaagccaaaggtttttttagacttgaaagaaagagccacttaaattcttgtttaaaaataccaatttgcctcctccttcctcacttcgttaggttatggtagtgctcagacatctgcagtgttgagaaggccagtcactgttggaagtcatccaagaagcccattttgaggccattttgagccttactcttaagttctctatgaagaactacattgatttgttggctttcagaatcttttaggaaataaatcctctccaggacaaaaatgaacatgaatggagtggcattttgttccaagtcagaggtgggcacctataataaatgactagggttcactttctgggactgatgtttaattgtaacacagatacaacagggtggccttgttgtgtataatacggtattatacccgcatgtgctctagcaaggataccaaggcaagcatacatgtagctggcttgagtttgtaccaaaacagtccttcaactttgcactgtgccttaagtaattactaacaaaaggtactaggattagctgcaatctctactttcgatgagggaaatcccagtaagctttctgattcaagtacaatgctgcccattttttaaagggccacaactatagaattaccccactgtgggaatttgggtacaaaatatgttttgtctattgaaaacatacaccggtaaatggtgttgttaggtaggttctgtccagttcttagggactttttttcacattatagcatttttaccctaaacatgatgttgagattattatatactgtattttcttctaaattaaccctaatgtttaaaaactcactttccccctttaattgaaggcattgttttgttagatgcagtaatgatgtttaccagagattattgtttcctatgcaaaataaattttcatattttgaattctgctg

SEQ ID NO: 49321 - DNA, 330 bp, Homo sapiens
tttttttttttttatgtgaataaatacaaaagattttattttttcctcttaatttctttaaaatacatatcattatttaaagcagaaattgtaacttatgacaggacttacaatatttaaatatgtagatttaatatgtatgacaactacagcataaaagacaggtatgataaatggatgtacatacttacaagatttctacattttatgtgaagtgtcgacgcggccgcgaattccagatctatgaatcgtagatactgaaaaaccccgcaagttcacttcaactgtgcatcgtgcaccatctcaatttctttcatttatacatcgttt

SEQ ID NO: 49322 - DNA, 672 bp, Homo sapiens
gcagcagcgaaggtggcggcggcagcagcggcagcggctatggtgtggtcgctcgattctcccagtgcctggctgagtttcggacgtggttaagaaccaactggttgaggttcaatgcagacaagacggatgtgatgctgtagaaaatgtgcatcagatgtttatgtttaattggtttacagactgtctgtggactcttttcctgtcaaattaccagccatctgttgaatcttcaagtccaggaggttcagcaacatcagatgaccatgaatttgatccatcagctgacatgctggttcatgattttgatgatgaacgaacattagaagaggaagaaatgatggaaggagaaacaaacttcagctctgaaatagaagatcttgcaagggaaggcgacatgccaattcatgaacttctcagcctttatggttatggtagtactgttcgactacctgaagaagatgaggaagaggaagaagaggaagaagaaggtgaagatgatgaagatgctgataatgatgacaacagtggctgtagtggggaaaataaagaggagaatataaaggattcatcaggtcaggaggatgaaactcagtcttccaatgatgatccatcacaatctgttgcttctcaagatgcccaggagataatccgcccacgtcgatgtaaata

SEQ ID NO: 49323 - DNA, 1463 bp, Homo sapiens
gttgtttgtcctacttgttccataacccctatgctcaagatactgaagctatctgtggtatttcatgtaacatttctaagaataagagctggcaaatgggaaacttggggtggagagagcatacttattgggctgtgaaggcatacggatgtacatgttttagagcttatctcagatttaaatagccaaaggaagacctcattgccttccaggtgaaggtgcaaagtcatacatattaatgacctgacagttaacattctgttgtttattattgcctttctccaccttagagagccataaataactctctggtgaagtgatttgctataatgggggtgaggagtggggagacttctctggtcattacactgctatttatttctagaactcactatcagtgagcagtgccagagtgttttctctttgacctagaggtttcacatcatagcaaggagggaaaagtctccccatctccttacaactgtgtgctaagtaagtaacttggccaagggtagttttcagctcaatttatagaatagtccaaagagactttgagaaacatggtgataggcaggggcctttcctaccatgtttcaatacctacaaacctattgaaagagaacagtaggtaaaacatttcctaaagttgaagcaatagcttcgtagattcttggttactttattttttttaatgctttacatttgatacaactattgaagatcaattttaaaaatagctttccagtaatatattttaagtaatatatattttaatatctgtaaaaagtgacagtggaagactttgaatttctcatatatgggtatgtttgatgtaggacctcactgttaaggcacaaattatttcaaaggaagttactctaaagacactcagattatttcagaaaaatgcaataaggggaatagttttggggtttattttttattttaaaagaaaattgacttatttaccacaagctatttttttcccttctggctgtaaggtttgtacagactggtttggtaaatgctaaacttttgtgtcttttgcctttttaaaggaattgttaacattggaattgagggtatgtacagagaagttggtgtcaacaccatttaaaaagtcatattttttcacaaatatagaaaatcattttacataagaattttaagtatttgcaataaatatatgtatatagattgtatgtattcctatattcttatttttcattttattattaagtaaaagatcattaaaagtgaaaataaaaaccttggagttttttggtgaatcttgaggtttaacatacatctgagagtggcgtgggtaagagtcctcagttactgccttatactcctatgggatggttcccacagattgtatggaagagagtaaaatgaggaacttggtgataaatcagggtagtgtatttcttttggaatttaagtataactgattaaatttt

SEQ ID NO: 49324 - DNA, 333 bp, Homo sapiens; identical to SEQ ID NO: 10878

SEQ ID NO: 49325 - DNA, 1529 bp, Homo sapiens
actgctttccttccccctgcttgctatacattgtctggaactggctaagaaatggggaacatttgtgaaaaccaagaaatgtaatggttttggatgaataaaatagaccaaagttaaggtaagtgcacaaatatcagtgtcaggctatggaagaaagataaagagatacttttttttttttttttttagaggggagatgctgaggtcagggcacttatgtgcatcaagtgatggagacagagtaaagagaatttatggatatatatgcatatcttgctaataagtttggtttatcatcacatcaagataaattgcctttagcatagaacttgagataagtagacgttcactagcaagtgctaacatttggatcagggcaaaggcgtttccaggagtgtttttataccagacccctgcttagtccatggggctgaggcatgtcacataactcagagcaagagccttctatttgtgtaagacccaaccctgggaaggatgcccgagacaatagctatgcctctgccccagcctgatgccatgtgatctagagcctgggcagcaacaaccctgtggtcaaagacatggaagaaacactctgcaaatcccacagtctgttcgacggcttggaaaggaagcaagtggcattgggacaattgctctacatgcctacagcttacctgtcaactacagggggctgccaaggtgtgcaagacgacctgggggcagagccatgctcagggcacagatagatggggatgggagtcgagatggggcatgggaagtgatgagggctctgagaacacatgaagcaggtattggacatcagcagatagatgagactccttggcaccacagtccgagcctggggttgggggatagctggggagttgtcaggcaggaacattgatgtagtcatctgaatcactgtcctccatcatggcggcaggctggtggtagaggctcacgtattcacagctggtcttcagagatggggcatggagccagggagattcagacacctgcagcggggcggggggcaacggcgctccggggccgggaacgggggcctcccctgtgcctgcagcgtccgctccacgagcgcgccgcgggcaggcgctgtagatgttgttttgggagcgcggtcgcggcgacccgcggggcctctgggagctctccagggcgcgcatcctcacggccagtcggcgggcccgcctggagagggctttcctcctttcaacggcccttttcaccaccagccccagaagtgccagcaggaaaaggcccaggatggtcgggatcaggatgtgaaatccttggccttccctcccagactgtgagccatagtccagtgctctctgcctgtgcagcctggtgtggtggttgtagctgggcgtctggggcttgagcagcccctccagagctgagatttttgaggctgtagtggatggcaggaaggttcggggcttgtcacctgctactgaagatgctctggacactcgagggcggtgggtgatttgggtggtggggga

SEQ ID NO: 49326 - DNA, 587 bp, Homo sapiens
cctgatacttcctacactagataatggaacttcaacattagcctattgattgcccaagaacaaacatttttttctaaatgtcaggtgttatggggaggattgatgctgacagcagaggtctagttaaaaactgatgcagaggttcaaatacgttgtgcagtaatcactagaactcaccttctaaagtgtcatgagagctctgattctgcaattagagattttttaatgtgtttttgaaattaccttgtaaaccacaaatctgtgtctctgcattgccccttattgtttcctaccacaaattctacatcaagaagaaagttttaaagttagactggatttatttgtgattttatggagcacaataaggtacattgagatagcatactaaaggaggccaaatacaggaagcatcatcttttcttattctcttactgcctggattttcccactgacctggaattgtgcacagttctacaaaggacaattgacattgttttccttttactaagtagtgggttttccttaaggtccagactgaattttgagacctgtaccaggattgccttctgtgtgactttttcttgcag

SEQ ID NO: 49327 - DNA, 1513 bp, Homo sapiens
ttttttttttttttattttatgaaaatgtttaattcaactgtttctttggaatgtagtagtcatagtttggaatttaagttacagttcagttctatgtggtttttatgctactcagtgtctgagaatacaaatgtcatttaaagttaaggcttcgctgttcattttgaaacaacaatttacaagtgtcatattgtcatagaaaataataatttctgtaaaaaaaatctgcacaaaatcttatgatggtacaaaacatgaagcaataatataccagtaaaatgaaaacattttactacagaaagttttatagatttccataaagaaaaaatatgttattttacacctttaaaaattacaaaacaatctaaaacaatataaactgaacattttgtaacactgcctttacaaattaataactttataaacatataatttttaaatatatttatcagtgcaagatactttaaattttaaagttgcagtatcatttttccttggctgaggacaactttaagtctgttgcctttaaaaacaacaaacgagtgtttcttagtgctttccttctggtaggattatatcaactaaatgaatgtctctggggacaaaaaactattcttctttcatggtgatcaatattttcctgggaaacaaaaggcattctcaatccaatttaactaagatgaatggactgtctcatctatgatgcaaatgtgactcccaacaaatgtctttgagtgagacgtctagcaatgtgggaaggaagatctaaaaaatctcatgtccaacatggcatgataaaaatccaccaaaaccaaccaaagcttctttgggttaattcataggctgcctggtaagatatttgcttccctgtgctgttagaggcttagatgttgccagccctaaggcagtcttattctttgtgagccgctggaagtttctagaagcattcatttaagtctattttttcaaggttgctgttatgaatttttaaaacatttgttttgactttatgtgtttttccccctcttatcttaaaatacttgacccccaggcatcaggatttatagtttcattcttaaattaactgttcttccttccacttcccttgtgtgactcagtagcaaaataagaaagttcctcttgggtccatttttgccatatttggataagaaaaatcctccatgcttttggatttggaagattttatccagttcttcctttgggtctcacttgaaagccaatttgtattatttctttcctcaacttatcactatttctactaaatgccaacatttctatcaaaggtcattttgaatagaatagataaggaaaaaagatactgtcactttaaccagttaacaagaaaaccaaagttagactttggagggcaaagttaggaatttcccttatttatttatttttaaacataaagtctagtaaaatcgtttgccattcccagcaggttaaagctgcaagtttctttcctggacaatggcaaatcctccaattcta

SEQ ID NO: 49328 - DNA, 594 bp, Homo sapiens
ttttttttttcatttccactaaaatatttatttaattgatatcttacagaaataaataaaaacaatttttgtctaatacagataggtttttttatatatatgtaatttgattttacaaaattgaagcatatcaaattgttttctctaaaacatagctcagaaaggaatagtagaaaacaaacacaaagaaatactgaaatagtctcatttttaaattataagcatgggccttctgaatctcagcatgacatgttattagtaaaagaatgtaagatatggagtcaggggacctgggctccactgtttacttgctacatgtcctaagaaagtttcaatatatctgaacttcagttctctaccttttaaaacagtaaagatattaattatatcaacttcacaagattgttgggtaaattaaacacgtaaatgtacatgaaagctctttttaatatgtgaagagctataaaaataacagtttgatttaatttcatataaaagaatcaatggatacctccttttaactgaagaataagcaccaaaagcatgtgtgtgttttcttcagttgaattacatcactctataaacctagagtaa

SEQ ID NO: 49329 - DNA, 1500 bp, Homo sapiens
tcatgcaaataaaagaaagcttaagaaattcttgttgtaggtggattaggcaaggctgccattcagctggtataagctaaaagtaaaaaatcaaaacgctcaagaaaacggacacaattttggaatgattaaagatgtctttataaagtttttttcaagacttcattctaaatacacagaataaaaaatggtgtcagctcacttgtaagacaccaaccagattttccttatactgtctcaaaatttaaagatcaatttccccagagggtgtgcaatgcatcataaaatggcccttttttgaggatgggagaggaagggttgggcaggatggaatattaaattgtaacatgataaacatgcaagactgttatccaatctagataatttatatacattttgatgacttaggaaaacaaagcaatcatttgtgacaagcctaaaaagcttgacatatttaacatacttaggaactttttttgtgcggtgggaattctctaattgtatcatgtgggccttttgaaagtaacaaacagaaggccagtctgttgcaagtttgctgctgaacatcacattccaccctaagaaaaacacaaggtggattgcatcgagggtggataccttaccttagcacagaaggaaaaagtatgtcagtgcaaagtatggactaaactgctttcaggaaaaaagttgtaaaaattgatacaggttggaaaagggaattttccttcccggcttggagtcctcccaatttaaggcagaacccatccactccaatttctgcagtttaaaactttctctacttatttagttttctcctctgagttcaaccgctgctggattcgtttggcataactttgtgccatggagttaatgatagataggatgaagtaacacaccatgacaacgaccaacttttcaaacatccaggacaaccagttttctccctgtggtgtgcccatttcgcttttgtggtgaagcttctgccgttgagcctccaggtactcctgaaatggcttctgcagagatggacctatgccggggacagcactggaagccagggtacagtagcccaaagaaaaagacacatttgggaagaaaagcaggaaaaacgttaaagaaaatgtacttaccacctggactcaaaaggcagggattggataggaagaggaataaaatataaaaatcagagaactgctgaaattctgtgacccctttttagttaaaaaaaaaaaaaaaaaaagaaaatttactccatctaacaaccccttaaaaaccaaaatctctcccaccaacatgtctgggagaaaccaagagctgtaaatcagaaaccgcttccagcaaaagagttagtcctcagagtaaggtcagctcagctgatactgtactctggtatggcacaaagaataaaatgaatgacttctcagaagtcccacatttatcaccactagttcctgtaagaactggtttgaaccaattaataaggaaatgacttatgcttgt

SEQ ID NO: 49330 - DNA, 1231 bp, Homo sapiens
taccgggcgggggcggccatcttagatgcgtgcaattaagggctttggcgggattggctccgcgtttgggctggtccgctgctccccacctaccagggtcggatccggagcccttccccgcggggcggggacctccaaacaaccgactcctttccaggtgaagggtgacttggctgaagaaacacttaaattctggaaatagcgactcagtatcatggccagcagccttaatgaagatccagaaggaagcagaatcacttatgtgaaaggagacctttttgcatgcccgaaaacagactctttagcccactgtatcagtgaggattgtcgcatgggccgctgggatagctgtcctctttaagaagaaatttggaggggtgcaagaacttttaaatcaacaaaagaaatctggagaagtggctgttctgaagagagatgggcgatatatatattacttgattacaaagaaaagggcttcgcacaagccaacttatgaaaacttacagaagagtttagaggcaatgaagtctcattgtctgaagaatggagtcactgacctctccatgcccaggattggatgtggtcttgatcgtctgcaatgggaaaatgtatctgcgatgatcgaggaggtatttgaggcaacagacatcaaaattactgtgtacacactctgaaccagtgaacattttggatgtttccgtgttctcctgtgtcatctctactgggccataggaccgggcaaacctaccttaaaataggcagaggaaagtttcatgagaagtagtgtgtttaacaagacagactttggttgctgtattcaagtatttggattatgactgtggaggagggcttgcttaagatatgtggttgtgtttttttgtggaaaagtaaggagttaggtggcttgataataggcagggaaaccagattgtcgggactatgacctttttctccagtatgctacctgatttgtttggctggccactaggtggcagcattggttctacttctctgctttttaagagaaatttcaggaaggatgatcattccagttagtttggcattttttgtcgtttgtgcacataacttggtgttatccttatgtcatcagattcctcctaggggagagtttttgttttaattacaaaattaaattctacattgttaccaagaaatttgtggtgataaaaatggaaaaataaaaatttggggagttagtgaaaaaaaaaaa

SEQ ID NO: 49331 - DNA, 996 bp, Homo sapiens
ttttttttttatctctgtcattctttattaaaaatactgctgtacacatagagactgaaaacaggattaaagatgaataacacaaattgggtcatgacattagaacctaacacactggtgctttttagggaagttgttgacatccaaatcacagaaccaaggtcaaaagcaaaatacaaaggtaccctcaaaaatatttacaatgaagtaaatacactaacagaatttaaaacaggtacaaaatattgaaatgaccaacgttacatgatttcaagggttgtcctttctgtgcttttatctgtcacgacaggaaggtgtggaaagtttatatcgtttatatccttaatttgactactcttggatattaaaatctttctattaattaaaaagacttttagacaacctcttaaatggaattacactatggaaaacagggctcccccaaaaacacctaggcagaactgagagttctttgaaaaccattcccaataaaaactaaatgaaaaataaatataaaacaaagcttaaaaaaatatgcattacctgacaccaaccttttctggctgacaatatttattcatgaaaacatatcagctgtctaccttttatatgcaaaccaagtcctgaggttaactaggggctgaagcaaactagcatttaggatgcaaacattcttggatttgtgatgtaaacttgccctgccacaggggaagtttgccgggcctatacagaatgagaaattcaagcccctattttaacccctgccctctttagctttcacaaaacattggtccacaaattaaattttcaaaaagttcccagaccccaaaactaaaatagatgatcccctttcattttcaaagaaaacaatattggaaaaaatctccagcccgcttataaattaagcatttcatatttcttctagaatacaagtagttcttttttgtacaaaagaatacaatatgatttgtcaaaaaacattataataagacagct

SEQ ID NO: 49332 - DNA, 524 bp, Homo sapiens
ttttttttttttttcaaattcagagcatttttattaaaagaacaaaatattaaggcacaaaatacatcaatttttcaaatgaaaacccttcaaacggttatgtcctacattcaacgaaacttcttccaaattacggaataatttaactttttaaaatagaaaaatacaagttcttaaatgcctaaaatttctccccaaataaatgttttcttagttttaatgaagtctcttcatgcagtactgagctccaatattataatgtacacttccttaaaaatctaggttttgccacttatatacattcaatatgtttaaccagtatattaaccagtatattaaccaatatgttaaacttcttttaagtataaggcttggtattttgtattgcttattgcatgctttgatcatacaaagacacaagtaccagaactagtgattataaatctagcatagcatctgtcaactttagtcatgtacagcctagtgcaacagactcgaacttttttttaaaaaaaggatacata

SEQ ID NO: 49333 - DNA, 2199 bp, Homo sapiens
  misc_feature (1)...(2199): n = a,t,c or g
ttcggcacagtggcagtggctggacagcaggcatgggacagagacacccggacttctcccccaggacctaccaccctctgtccttgcagtggaactagaggaggatggaagagcccgacctctggtcctgcacatgtccaccctcctgcggatgatcccaaccatggcagaggacaaagagagagtcagcactggaaccaagtttgccctcaagctctggctgcaacatctgggcagaacacccccaccgtgtaaaagtgcagcttacctggacccagggccagcaaaggaagaatggaacatggaccctcttcccccaaaccaggggtctggaaagtgaagtgtaaaatcccctccctagcccatctccatgacactcacagaacattcacaacctttattatgggtgagagcttcactacaactttagaaataaaaagtaaaattacaacataggtcctaggccttggcgagcctgaaaaagaagattgggaaggagggcacagggtccttccacctccctggaaaggtgcagaatgagccaggcctaactacagggccatgagcctctagaagcttaggggggaataagaaacactgtgaacttagatatataaatagagagagacccaagcaataggccgggcctgactcccagacccctgcagatcatggctaaggccttacatcctcctctgtcatactggagtaggaggcaggggaagtcatctttggagtattttggtttttcttatttatgtacaaaaaagtccacatccacaatccaaaataaagttctctgtccatctctgaaactgcctgtctcagtttttccacctgtctgtttggccgaagggaatggaatagacatgaagagacaatggatgtgaagaagaaatagagccatgggtttgggtaataagaagagagagcatttggggttcaagagaggtgccccttccccaagaggctctagacatagtcaaggctgagggttcagcccttctcctagctcacataccatcccatttgcctcccactgcctaggttaacatacccaaaggaatgtgccaaccatctaaagaacatttccagaaacagaccccagtgtccttaaaaagaggttaaatattaaccctttgggtgctggccttgtcaggcagagatgaggccaaaagtaggcatctgtgaaggtctgntctggcccttggccagagcccccagagggatcagagtagctggggttgggactccacagcatacttgctcagtgttgggggacagcgaagtttccataatccagggaactcagtccagggaaatgatgtctgaccgacagccagtcaaagagggacctgagggcaggggtcctccatgcccctcccatcgaagcccccaggggccacaatgctgctgacacggccaggagggacgccggagtggcgctgcagtgggagctccccagcgtctgggcagtgggcccagaaagtgagaaggggtccctcggtactggaanaaantgcccaagggcatcttgttcatctagtgaggtgatgacagaggggcccataagtgctgactctctgtctgaagaaatgaaaataaatctaaaccttggatgtcggctcccagtgggaaggcaggtgggtactcatgtagtgggagactggacaggaaatccccacccaacgtgcccatagcagggctccttagcaccgaggatggctggtggccagatgtcaggactcctttgcttccaggtagggccgggatggcagctgaggtgacagaacagtgcttcttggtagggggcagatcctcctcatctgatgagctttctattgtcaagtcaataacttcgaccttcttcttattctctgatggatctcccccctggactgggctgtactggaggccatccagcccataccctggcggggggcaaacctcagatgcctccttcttgggtttcattgggcacccaggatccatcttccatgaattggatctcatcacaatctgaacaggaactaagaatctccataaataaaccatcaatgataagagattcatagggagccttcttgtcacacacaggacatgtccatgtaggcttcttctcattcatctgtagataaagggcagcatcgaagctctgcaggtgggcgcaggtgagggcacgacaagggacagtcaggc

SEQ ID NO: 49334 - DNA, 1675 bp, Homo sapiens
ccctgccctcctggcccagtatgctgatgtgacagatgaagaggattctgttccgaaacaccaatgtggaagatgtccttaatgcccgaaaactggagcgagactcacttcgggatgaatcccaaaggaagaaggaacaggacaagctgcagagggagagagacaaactagccaagcaggagcgcaaggaaaaggaaaaaaaaaggacacagagaggggagcgaaagcgataaccttggcctactctattctttccccccatgaacttatcaaagggagaactggttgtgtatttaagagaaatgagagtgcattgcaaagtagtttcccaaggcatttcccctattgtttacatggtcaaaaggaaaatcaaaatcacttctaattacaaaatgtgctgttttggtggggtgggcaatcagattattatagttgatgactgtaccaaagatctggaatgggggccacctttatattttaatactcaagtcctgtgctccttttggccactttaaaaagtcttccctcaccttggataaataggattcagaaagctaacagttttcattctgaaggagcagaaacataatcaatccctccctgagataaaatgtgggcatggcacattgctttggagtcagtattcagctgtaagtgtagtattgttttatggctgaaatagaaagctaatgaagaggcctacctggatccagattttatgttaacatggcagcaaaactaggaaaatgggaagaaattacttgcggggtgttctagatctgatccctcccaaaaaaccccgaaagtttcagcctgtgggaggaaaagaggtatcttttaaaatagagatagttacatattttcctcatctaggctgtgtcactattgggtgcaaggatatcattgttggctagattcattttgtataatcatgtatcctcttgtgtgctggtagagattttaatcctgatttttccataaaacatgagtattaagaaataattcctggtttggagaaactggagaaatcacccttttaaggaagaaacactggaaatttctgctaacaccaagatatttaagagtgtacatagtaggtgctcaacaaatttattgaatgaatgagtgaatggaaaaactgggagagtcaaaagtgagcagaagctctccatttctacttctgtcacaaaccacattaaattgtaaataaggcccttctccacttgacttcaggcagcagattgtctagaagcctaaggacagcaatttctctgacaagacaaagtagatattttataccaggggttggcaaactactgcccacgggccgaatttggccccagtctgtttttgtatggtgcaaactaaaaatgatttttacatttttaaagagttataaaagaaaaaaatatgtggtctgtgaaatctaaaatatttactacctggcctgttggaggaaaggtttgccaatctctgttttataccattaactatgagattaacaaaaacttttacctttgtgcagaaggttaaaaaaaaaaaaacatggttaaggaaaaggagacatgttacctcttcatacactcctataactgtggcattgcaaaaaataaaaataaccacctttaaaaaaataaatcttatttaaattgctaaaaaaaaaaaaaaaaaacaa

SEQ ID NO: 49335 - DNA, 1466 bp, Homo sapiens
tttttttttttttttaagctcaaatttttattaaccttggaacaaatgcaataattccttacagtcatatagcattttacaattctgaaagaattttcacatataccaattgaaccctcacaacagccctgtgaggtaggcagggtaggtgttactttcctactgctagtcgaggagaacaaggctaagaggtgaagtaaggtcacacagttgggtaaatgatggagctaggactagaacctaggccttctgacttgctgcctccctgaggaacattcaaggtaataatatcctatggctattattaatggaatatttatctcctatgatgttgatcaggtctatttttatacattttacctgtttttatattacctttccctaatactgaaaaacactaaaactgatacgagacatttgagacatttcttctctgttactggactttcttagatatatcaaacactatcctaagatgaaacttctgttttgaggatccttggctataaattctcaattatgatacgaacatttattttacaaattctacaaaagtatgttgaacttaagaaaaacaaaacaggtgtgtttatattctcaaaagctttgccatctttcccaatatgactttaatatgtgtataaatggaaaacagggaaaggtgttcagcaacattacagtattattgggaaacctatgcagagtgcacataaatgcaagttacatcacattaatttgttttctttgttggccttatagaggatgaaccattagtgtctttcaggtttgatcctgtcttatatgtgacatcctcagcaacaagctaaaatgatctgaattataccaatagcggggctcaagcagcagtgatcaaaacataatatgtatgtggtaaaaaggaacacttgttcttcagtggttttgcctaggtccagtgtaattacttatcaaaacatgttttaagctacagcatctctgttaaatttagaaatgtgaaacatggaagagttatcaacttggaatacaatactaaaactgaatataactgacccaaaactacctgtcaaaagcacagtaaagcttaacaggcataaaaactaaggggtaaaacccaactgctctgacataagagtgaaaaacagcaaatgcaaaccatcaggttaaagtgaatcacaaaacattaggcatgtagagcatgttttaaaaataggaaaatgacactgagctgtattaccaggaataatatttttaaaattccaggtatggccttctacatttaatagcaatggagagaaacaagcctatgggggaggtgcagaaaatgaatgggatctagaaagggagttgagtttggaagttaaggaagtcaaagaaacaaatacatccaaaatggatttagaatctctcctctaaatccatcctttccaaaaaatgtttcctatattgagagatttggtaaaaaaaaa

SEQ ID NO: 49336 - DNA, 1110 bp, Homo sapiens
tttttttcacatttcagataatttaaattggagcagtattagtcatttccaaccaaagagttttgaatagtaaaagaaatgcgagacttttagaaaccttgtttagtcggtaacaacattcagtagataattaagggaacacactgcacaaattcatttcccacttagcctgaataagcagtttgactacttaatggtttcttattgtaagttttcctatggccagggaaaacagctttgtaagtagtccatctttctaaaactgaggtaactttcctaaacattaaaagtctttagtaacataggggaaaaattaaggcttaattacttagaaaacaaaatatcacaattacagaagcacatttaattacaaaaattataaaattatattaactatatgtagtttttaatatctagtatcaaaataccttttctactttggtaactaaatttttgagattaagaacaaactagttcaatcattctcacatacaaaaatttcatgtttatatttattaaaaacaaaataatgcaagttctgttaaagtaacaatatatacaccaagataaatatttggaattgtggaaacagaaatagtaaaaatttcaaattttttctcaatatcttaatgacttaaataatttagcttttttcaggcattttttgttaaaaataaacttacttaattttcaacttaggtcaatgtgcttttttgctttttttaaagacaaaaattagtaaaaatgggcaggtacctagggtttgcactagcctaaaaaaataatgtttacagttgtctagatgtaacaattttaaaaacatacaaattcagtatgtagtatgaaaatacattaaaaaaacacataaggaactatgcccccataaaaaatataaatgcaacttcctattaattatatgaatatcaaaaattaaatattctgatttaaaagtagcttctataaaagtcggagtagtaggcattatttgctttcctaaatgtataaataagaagtatttctagctcaactaaacagaaatatcagtatttcttagcaaaaaatgtagtacatacatgaaaaggcaagcattgtcctgtattcaagtttttg

SEQ ID NO: 49337 - DNA, 1135 bp, Homo sapiens
tttttttttaattttacttaatttatttcactagaaatatttcataaaactgtacttaaattcatcttaagttagcttatgcagacacactgaagatcgcacactcacatttgcatattaaaaagaaacaaaaagtgagagaggaaccaagctgcacatcactcaaggaggtcatagtgcaatcgagtgcttcatcattagagtacctcaagttaattgggataaagaataaaaatggcttgtgttttcagatatattatcatcactgggtacctgtccttacagatgtttgatctccttcagattatgttgtgaaccagttccccaccccctccccacacacatgttctttagtaggatgtaaaacaatgaatttgtcaataatcaaggtacagaaactcttgagagtctgacttattatcagctattttaccatacctattaagtcagtaattattggactatatatgtgagtagttctagtaggtcatatcttcaggggaaacaatatttgttatctggtatctaaagcacagctattatttatgaagtttctgcttttctattaagaaaaaaaagagcccaatcccaaaacactgtaattatgtattcttttaatcccataatcacttctgtagtacaaatggccagggtcaaaatttaaattttgctaacactcctcaaggaccagttaactctttcatttggcttgaatgactacttgcctactctggaacatactagccctttaaaaaaatgtgaaaagaacatcttgattcaggttaacatccagtagctctaggtcttccaataatctgagagaagcaaaatatttccaactttgctttcactgaaaaaactagcttagtctcttaactttcctttaacttatatattagagatatttttactttcttgtatattttcaagaaaataataactggcaggttaagtgactacttgtttgttttgagtgttacttaaatgtaaaaataaatggaaataaatctcatttctggccaaagggattttcattacaagatttcagtacatttaacaaaactcaaatatttctggttgtatcttattcttttagggcttttccaaaaggccttacaattataatgtatgctca

SEQ ID NO: 49338 - DNA, 889 bp, Homo sapiens
  misc_feature (1)...(889): n = a,t,c or g
tgccttttgttacccaaatatatgatattcaaataatttctattttaacaactcataaaaatttaagatcaaataattgcattcttgaaacaattcttaatcattgtattttcaacacgtgtactataaagaacctaagaaatcagacaattttaataacccataaacatgttgaatccatttgcagatttaaattttgtaaaaatagctgtcactgcctccatatatcaagtgtactatgtttataatcacatttatgctaccgatactcctcagaaaaaaacagattctgcttggttctagcttcagtattatgaactccaataatgctttgaggacctccaaaggaaaaaaacagattctactaggttctagctgaaatattatcaactccaaattgaagctgaagtattatcaactccaaataatgcttcgaggacctccaaaaaaaagngattctgcttggttctagctgaagtattatgaactccaaataatgctttgaggacctccaaaggtaaaagtactaatccctttggccatttattgagagagagagagagagagagtagggtgactatagttaatgtattgaatgttcttgctacaaataaatgatannnnnnnnnnnnnnnnnnnnnnnnnnnnnnnnnnnnnnnnnnnnnnnnnnnngtgaaacagtacatacaccatatttacaattatgtatttaacatttaaaatttctaatataagtatctctcaaactgtggattaacttcttgatttatatttaaatatgaatcttaagcaaaacagtgaaaataaccatcttgatttagtgtttttctcccatatgtgaattgtatatacttaggtgaggacaataaaatcaactgaactgtaaaaa

SEQ ID NO: 49339 - DNA, 1038 bp, Homo sapiens
ttttttttacttaggaaataaaattttattgtacaaaatttacatttggtgcatatgatgaaaagcatggcaaagagacccttaatctttttttctttgatatttactgtgaaagtaatttcctaataccagatcatacaatttttttgtatagaatgtttaacagctgtgttggtagtaagtgttttgggtataaggtataaaacagaaattaggatcaggaaaagtgcagggggaagaccactgccaaagagtaatctccaagaacttggtattttccaccgtgaggcagatactgtggggtcatcgctaagtggtttgagtatctgaagccactcattaagatactcaacaagacctaatgcatctgggatgttgtccccttctgaaacaaatttcagcagaactgccatttggatttctttagaacagctttcatcatagagtgtttttgtgatacctcctcccggaatgcggatacaaaactcggaatcatctatttcaggaatgcaccggcttttttccatttcttcccagttaaggctctttattttattttgaacacttttttgcatggaaggtgtaagtaggtaccggaagggagtactacgaagctgcagatcattacgctgatatgaatgactgcttgaaagaacaatgactctggcacagccactgcttttcacccaggaaagcagtttttcacagaatggctttgatttatacttaataaaaatggatcttaactgtagagccaccagctttcttgaaggcaatgaatacacttcagcatttatgctaagttctgttgaatttccttctgtggtcgcatatggattgtttccaaccattggcacaagacaatcggtatagaagtaaccaatcttagacatattcagtgtagaaataatcagatccattgcaagctggccaacatttccaacagattctgctggcattaggagggtgaagccggcaaggtcgggggccgactccccgcagggaacgaacatggtcgcagtggggtggccagcaggg

SEQ ID NO: 49340 - DNA, 1423 bp, Homo sapiens
gcagacgcaagattttgtttctgcagactacttggcaatcaaaagtgatcataaatttaggttatcagttttcagaaagttgctttgtgagaaaattttgttagatatattctcccaagcatgctttttgtggaaggttttcagccattgccactgaatcagatgttaaaaatgaagggaaaattgagtgtgcacacacacaactgttgtacactcatgattgcagtttttagcttaagaaacttttctaccagttactgtgaatctgacttaaaatgtaaagtttcctcatgataaaataggaacaacatagaaatggattgatggggtgatctgagttattgtatataaaagtttttaaagaatagaatgaacatcaagctagataggcaaaaattgacacattcagaacagcttttttgactgcgaagccaaaagttgtcagaaacagcaaaagatcccttattattacagggtattttacgtagtctctatttttaagggagagaattaaataggagggcttcctgcctttagggggagggtgctaaaacttctcaagttcgtcaaacttacaggaatacccaccatgatcattttctctctaattatgtataccacaaaattttcatctggccataggaattcactggtgggtgtaaaattaatgactaaagaaattaagtgacaaatacataaaagaaacagacttgtggggatattgttttaaggtgtattaattactcagtgatgataccactcaatagggcatgccactacttttcttaagatgctaattatgaagcagtgctcacaggcattttttaactagcaaattagtagatggacttttggggtctgtcactttttaaaagtatttaagacttaaattctattagcaccacagtctgccttcagtaatacacctaaaatatttttcaggaccagaagcattcagtttgaaaatttgcagatgcaaaccagtattattactaacgctctgggtcaaagattaggtttttaatattaacagtagtctggtaaatatttagaagtctggcattgagaaacaaaagcttgtacctgactagtatttttatttaaaaaaattagttctgttagcttatttaaattgtgttttatttatccgtagaatttatatttatttcattcctttcatctcactgaaaactgtctgcaggccctttgatttggattagatgtgtgaagtactgtcttttgccaaaaacctcaaattacctgttcttttcaacgtagtgggtttgtgcttgtttggagatcagttcaaaaactatctgtactatctgtactgcctctgatgttaagattttatgtatagcataaggaagctagctctgactatattttcctaagaataaagacctatttttgtagcatgtct

SEQ ID NO: 49341 - DNA, 1299 bp, Homo sapiens
  misc_feature (1)...(1299): n = a,t,c or g
taaaaatccactctttttacaaaggtgtgaatttaaataacgttattgattggaatatgaaaatagaccaatcatttaagagctttttagcaaatgattcaattcttactctttttctcccaagattgaaaagcataatgtatttctctaaagtaggaatctagagagcccctgtgagtggacaaatgtcagtaacacttgaacacatgagaagataagtgttatgttgtgataatttaaagttaaatttgctttttgggtaggatccctaaatagatgggatttttaaatagatgatatatagatgacaattgcaattgtcattttaattattttccctacagtaaagaacctagctctgagcagtgaaattgtaatggcactttaaaggaagtaagccgttaactgttctctagtggagcgatctccaactgttttgggcactagggacgggtttttgtgggatgaaaatttttccacgggnctgggggtttannnnnnnnnnnnnnnnnnnnnnnnnnnnnnnnnnnnnnnnnnnnnnnnnnnnnnnnnnnnnnnnnnnnnnnnnnnnnnnnnnnnnnnnnnnnnnnnnnnnnnnnnnnnnnnnnnnnnnnnnnnnnnnnnnnnnnnnnnnnnnnnnnaactggagcttcaggccagtnaatgcttggcaccgccccccaccttctatgcagcccggtcgtggcctggggactggggacccctgctctagtcagtaataaggtacttgtgccagaatataaatcaacacattgcttcctttatcaaagaagtcttgttatttaaaaaaagtcaactgagccagtatgattagtgatgtaattgattttcattctggcacaagcctctttcattctggacagctcacaaatagttaatggaccatgctttgaatagccttcctctaagcaacatttataaatactgatattttagaactgtttacatttcttctgtttatttttgaattttcagtttgatatcttgtccttattcattgttgtataaacaactgtactttaatttcaagtagtattaaaagtatttcacttcagtttggggggattattatcaatttataattttataaaagtattttaaagaataattgtaaattttccataaattacaacttcctgccatcttttattaaataataatcttgcttaaggcatatagacagacattattatgagtattccagtaaaaaaaatctacatcaacttgaccattctggctaaaaattaaaaagcacttttttataaaaaaaaaaaaaaa

SEQ ID NO: 49342 - DNA, 1701 bp, Homo sapiens
  misc_feature (1)...(1701): n = a,t,c or g
tttttttttttttgtgttaaaattacttttattcaggatgaaaaatacaatatgtaaccagattagatgatagtctgtgattagttctttaccacatatttcaaaagaactacatacttacttcccattgttactgcaatatatttctttttatttattattacttagaaggttacaatgtagtgttttacgtagcttttctttaatagcagatagaggacattttgcatacaaatacaggcagaaaaaaaattaacacatgactttttaaagtaagaacaaggaagacaccaaatctacaacttggagttgagagctcagggaattgttttttctttaaataggtgctttcttgggtatgacatggcctgataaaagctctagactttgcagactgcagcagcataaagcagtttccaatgcaatggatgaagatgggatctgaggtagaaaggtggtcatggctttcctttttatataaaacaattttcttcttttcaaaatatctctgctgcaaatagacacccttgccccccaacccacccaacctattctaaaataatagcaatttctaactttaagcctccttctggccagatcccagctaaagagaacccaaagttaaaatgtctttatgtttttatgtctttaggtttgaatcaaaacatattattttcacctttttttggttcctctacatttgctaattaagtaacatgtttaaactgaatcaattaaatgttaaatcagaagctaaaccaaaatacataattgaatgcactcaaaaagatgtaggtggaggtaccatcacctaagcattaatttcattcttctgtagaagcagtgacatagacttttgataaacattctttccaaatatattgatcaagtgaagggtataaaaacatctgatctttcacccgaaaggtaaaataagccgtgcactaaatgtgtgtctgctttcaacaagaaaacaactaggagtttcaagaactattaaggacttgaaaatacaaaacaacaataaaattctctttgaagggaaccaaagacaatgatgtgttctggtatcacaataggtaaaggtctgctgtgccatgtaatgatgaaaatcaagacatgggaactaggaaaggttgtactaaattttgtttctgtgtcaaaatgaaaatatgctcaagtgggcaacctttggtaatatgatctttgagattattataatgtagtcttctttatcaaatagattaagacataaaataaataattaattcctacttatataaaaagggaataaaatgcaggaaaaatatcccaaaagaaatgccatttaggcttataggatttttattacggttatccaagtggtcagcaaagaagtaagtgggcaacgtcaaataaagttaaacggcatacacagggctgtagcttaaaccatatgtgtgtatatataagatatttgattgaaatttatgaatttattaatgtggccaaatcacggaaacaaatacatggatctatttgggatctagttggttatatggctgataaacatatggctgataaattataaataaccaaaacattgtggtaaaagagtcaaagaaaaaatgaagtaattgtgcaaggttaatatgaacagcagaaggaatgcanaaatgtaaagtggtcttctaattcttatgtaagctttgtcatagttgc

SEQ ID NO: 49343 - DNA, 721 bp, Homo sapiens
gttggccgcatgtgtgtcttcttttgaagtgtctgtttatgtcctttgcccactttctaatgagatttttttttcttgtaaatttgtttaagttcattatcagtgttggacattagatctttgtcacatgcattgttgcaacagttttctcctattctgtaggttgtctgttcactctgttgacagtttcttctgctgtgcagaagcttcaagaagaaaggaatccgattggttctgtgtctgtctcttttggtattctcagacttatgtagtcatccatatagaaaggtgattaggaaaacagcacaagaatagcagaaatctacataaaaatgtaggaaattaaaattagttaccagcatacaaaaaactactatatgttatagttacatactataactcacccctccttggcaaatattctctctcttttgacttcaaaatcatggcttatatgtactttctctatttcccagatgcaaatataattaattgactttatttatctaggaaatgttactcatatcttaattgtagtcattggcttgagtgacgggttttggtaattcaactactattacttgaaagtagtagatttcataggatactgttataaaatctttttaacctcttttctgatttcaggagtaattagtaattgtggtttactggaaaattcaatgaatagggtgttaaaggaagcaattcattaataatatat

SEQ ID NO: 49344 - DNA, 664 bp, Homo sapiens
gttacatatgatttaagagaaaaagaatcaaccctgtataccttagaaatgaggttacagtattgacttcaagaatataaggctcctactgagtctaaaaagacttcgtttcagttcttttggaatgcaaccctgcagtttaagaataatgggagcacaacttccacaggtaacttctacatttattttataccaaaaaagttatgtgcaacaaataaacattcttacatatttacatttggttttatttaccagttagcaaaacagtgccttaaatctctgataaagagtatttctatctagattaaaggggaaacctgcccagtgaactccattttaaatgactgtttactctggagcttaaagcactagtaagaaatatttctgatggaacatactacacagatcatatacctaataaatacttaggccatgcttaatacagttttataacaaaatatttcaccttttctgggcgaatttgtagtaaaaaatgtttaaccaagtagccggggctcccacccttgccctttttgtttgatggaagggtagttctcacaattagaaaccataagtgctgcctgaggtgtctgaaatgtttcacccatgactgtgtgttagagaaaaagacacgaggacagaaattgcatattaggtcattagg

SEQ ID NO: 49345 - DNA, 467 bp, Homo sapiens
gagacttttaggcactttcttcagagttgccttttatggccaatctttttttgaagaagaagatggaaaggagtacatctataaagaaccaaagctcactggcctctcagaaatttccttgagacttgttaaactttatggtgaaaagtttggtacggagaatgtcaaaataattcaggattcagacaaggtaaatgccaaagagcttgatccaaaatatgctcatatacaagttacttatgtgaagccttactttgatgacaaagaactcacagaaaggaagaccgagtttgaaagaaatcataatatcagcagatttgtttttgaggccccttacactttatcaggcaaaaaacagggctgtatagaagaacagtgcaaacgccgtacaatcttgacaacttcaaactcgtttccttacgtgaagaagaggattcctattaactgtgaacagcagattaatttaa

SEQ ID NO: 49346 - DNA, 1600 bp, Homo sapiens
ttttttttttttttttcctgggaatcagtccgcattttattttatagtacattcatataagttcctgcatttccaaggtaaccaggtcacattcaggttagcactgctggtaacaaaatcatacaactaccctggcttcaaaaacaagatagggtaatgcacattaatacctctttccctttaatactgcagaagacaatacatcacaaaataaaatctcaaaaatcacatgccttttacaatccagtgtgaaggcatattatttatgttaaaattagaccatgtggaacatgagaataaagagtttgaaagctctctaaaatttctcccaatgccatctttcgcttctaactgccagttggcacattcagcttcaatgccttgggaagggaggggcagaggaaagcagggggtcactgaactccaaaactcatggttttccaggctacttctatagacatcacttaacctaaaattctaaagagttaatatgcacgagggatggtaatataggaagcacctgaaaaaaattcctccagtcactgatgggaaatttaagctgtgaatttttgtgaattttcaatttcacagaaagcaaaatctgtatcacatccagtaatatgttaagttctgaagatacgttttccattttgctggattaaaaccctatgaccccatggtcctggtcttgaacctaggtcagaaaaacactgtaatctccatatgcaatatttccctataggcaaccctaaaagtgcagctgcccccaacccttgaaaagtttgagaagtcaaactgagctataataaagacacaaacaaattaggtaggagaaaattcaaataggtgagaaagcaagaagttagatttgtttgggtctttttcctagattaaaaaaaaatattataaaatgcttttggaccctagtccaacatatgcttggaatgataagttatttaaaatacaagtccccatccagaaagacagtgtgcttacgtagcacctgtctcttagaagttcaatgtgctttaggtatgattatcaattaattgcataattacattattcagaatatactcagacttactgttaactccagtgactaaagagcccctgccacttgctgccaagaaaatgagtcctgaacttacaaggttaggagtgaaactgatatgtgtatttgttgaccccaaaagaaataccaccccttttcaaggcagaaaaaaatgagagaagagggagtaagacacttctttaaaaagccacaaaacatcttatgaaaaaccacagccagtgcatattttataatacaacccctgaaaaaagccccccagcagcagggtgagcagagggagccgtgaagattttgaaaccagagtgacttgcagtaactgcctaacaataaattcacggagtaaaatgcagaatagttgacatataaccaaggtttatgttgtatctagaaatatgttttatgctttaaaaaaaattgcaatgcactccaaaaaatttttttctgataattcatgtacaacagaaggcactgttatccgcataaatccattgattctgcatggcaaaaacctgagacgtgcaagtc

SEQ ID NO: 49347 - DNA, 490 bp, Homo sapiens; identical to SEQ ID NO: 21559

SEQ ID NO: 49348 - DNA, 1078 bp, Homo sapiens
attggacagatgctgcgtactcatttcacacattctcagttcattgtggtgtcactaaaagaaggtatgttcaacaatgcaaacgttcttttcaaaaccaagtttgtggatggtgtttctacagtagccagatttactcaatgtcaaaatggaaagatttcaaaggaagcaaaatccaaggcaaaaccacccaaaggagcacatgtggaagtttaaactacaaagttatttcttcatcttgacctgtttttttaaatgtaaacttttaaggacttgagataactaatttgtttatatacaaaaattaatgttactgtgttacttaacccatgttttctctttatataatcacttatcgcttacaaatgagcatatattcctcatctcttaactagtctaattatggtccaattattgtggttgtgattttatgcatatcatcaaatgtttttttcttatgcgggtcttttatatattagggatcctgagatacccgattctatatgtaaaagctaatatacaaaaaagcagattaaattacatgataaatgtagctgatcatcagtgtttaattgatttaattcctaaggcaatattaatgtgttttctaaagtcattcaggtaaggaagaattataaatcaggtaactgggaccaacaaagggaacacatataaagctattatggcatgcatgggagccgtttgaggctagttttttaagggccacaactccaggacccctggatttaggactgaggtagggggaacagatcttgaaagaatccttattttaatgatacatgaatatgcatgttcctatacgcttaataattggtcttctacgttttaatgatacatgaatatcctgttcccatacggttaataattggtctctacgactttaatgtttttgtttttttaagctgtgtaagtatttttaaatcaaagcttaggaggtgtgttgcgtggtactatctgctgcaaatttatctgaagtttggtaatattttccaagatttttgtcagccttttcataatccagtcattaacaacctattggtaaacaagaatgtaggtc

SEQ ID NO: 49349 - DNA, 516 bp, Homo sapiens
  misc_feature (1)...(516): n = a,t,c or g
gccattttcagaatttcctggcattgatttatattttgaagcatacaggaaacttctcgtttcctcgtttagccccacccagatcaggtgaaagggcagctttaatggtggtttttatggaccacattatcagagagcactgtgcaagccaaatggttcaataatgaatgaaaattctgggtgtaaagagtaaatatgccctggctctttctaccaatgtttgctcctggttggaaagaaaccaaagatttaagacgggctgctcttccagactggctgtgcctgcctgtgcccagcaacctgtgcagccggcagtgtgcctggtgtcacgccaggaggctggtggctgctgtgggccctctggaattgtgctcctcacaaagtttccccaaaaggttcttctaagcctttattgtccctggtaaatgtttcccggctgggcgcggtggctcacgcctgtgaatcccagcactttggggaggccgaggcgggtggaatcacctaaaggtcangagt

SEQ ID NO: 49350 - DNA, 1137 bp, Homo sapiens
caagcgattcaccccacctcagccctccccaaagtgcctgggattacccggcttgagcccacccacacccggcacatcttcattctttttatgtagtaaaaagtataaggccacacatggtttatttgaagtattttataatttaaaaaaatacagaagcaggaaaaccaattataagttcaagtgagggatgatggttgcttgaaccaaagggttgcatgtagtaagaaattgtgatttaagatatattttaaagttataagtagcaggatattctgatggagtttgactttggttttgggcccacggagtttcagatgcctttgagaaatgaatgaagtagagagaaaataaaagaaaaactagccaggcacagtggctcacgcctgtaatcccagcgctttgggaggctaaggcaggcagatcacttgagaccagcttgggcaacatggcaaagccccatctctacaaaaaaacacaagaattagcctgggcattgtggcgcacacctgtattcccatctactcaggaagctgagatggaagaattaattgagcccacgagttcaaggctgcagtgagtcgtgattgtgccactgcactccagccggggtgacagaagagaccttgtctcgaaaaggaatctgaaaacaatggaaccatgccttcataattctagaaagttattttcaactgataaatctatattcacccaaataatcaagggtgaaggtaaaataatacatttttagacaagcaaagactcaggggttacctccatgtgccctttttagggaagctgttggagaaaatactccagcaaaatgaaggagtacacaaaccagagaatgacatgaatccagcaaataggatccaacacaggcaatattccagctatggagctagctttaaaaaggaacagtaaaaatattaatcggttagctgggtggaatggcccatgcctgtagtcccagctactcaggaggctcagcagcaggacgacttgagcccaagagttccagaccagcctggccaccatagtgagatcccttctcttaaaaataataggttattgccagatttggggcatttggaaagaagtgcattgaagataaagcaaaagtaaaaaaaaaaaaaa

SEQ ID NO: 49351 - DNA, 887 bp, Homo sapiens
  misc_feature (1)...(887): n = a,t,c or g
agcagttgaagctcttcattcatagtagttactgtcagctaacaggttttttaaggcttttaactattaatattttatggaatggggcaaagtaaattgatgaaagaattggagtgataatagtcctttacaaacatacagtccataagaaaatgaatttggcatatagaattattacaatttcctgggagagatggatatttaaacctctattattttagacaagactgtctagaacttaagtttgatctgtcagccagtactcccattaaattcagtgtagtttcacttgatagaatcagatatgttatcgaaatgttagcagcagcttcatcctccttctgattaaagtaagtagaaatgggatgttttgtttaataacagccatagtgtgtgtttagaccacagcggatgttgtagaccaggaccatagatgatacatgtcagtgctgtggaatgtgcattctctgagtgttgttttgtggtatcattgtctttcctgaatgactttctaactgtgcagaaaggcagaaaagtcatcatatgtatatgtcatatgactttataaaatatttaatgtgacaaaaagtggaaagaatctttacaaaccctgcaattacttttttaaaggcacttttactctttggttttatcattccattttgctaatatttactagctttataaattacagtaaggtacaaaaactccatcttgtaattattttccatttttggaagtggaaaaagtacataataattttggcacaggggttttatactggctaaggtgccctggggttggggtcggtgagatggatgantagatccggggggtgaaggcngagagaccngggggtttaggggctagccccggcctccaacctc

SEQ ID NO: 49352 - DNA, 419 bp, Homo sapiens
gcaggcattcaaaggggcaaaaaatacacaacccacaattaagagactaatgaattaatcaaaaccaacccagaacttatacagatgtgagcattagcagaaaaggacttgaagtagttattagaactgtctccctggccgggtgtggtggctcatgcctgtaatcccagcactttgggaggccgaggtgggtggatcacctcaggtcaggagttcaagaccagtctggccaaaatggtgaaaccccacctctactaaacatggaccaatgatgaccactggtggcgtttgagtcatggacgatgaatactacgtgtctgaaactctgaggtccaacagaaaacataattggatagatatcagaaatgtgcaaagatcatattcttactttggattaatagattgaggttcatcatcaa

SEQ ID NO: 49353 - DNA, 1312 bp, Homo sapiens
tgggtgtcatctacaacaagggatttttgcacaagaatttttatatctttggctatctaagcccagctgtggtagttggattttcggcagcactaggatacagatattatggcacaaccaaagtatgttggcttagcaccgaaaacaactttatttggagttttataggaccagcatgcctaatcattcttgttaatctcttggcttttggagtcatcatatacaaagtttttcgtcaaactgcagggttgaaaccagaagttagttgctttgagaacataaggtcttgtgcaagaggaggcctcgctcttctgttccttctcggcaccacctggatctttggggttctccatgttgtgcacgcatcagtggttacagcttacctcttcacagtcagcaatgctttccaggggatgttcatttttttattcctgtgtgttttatctagaaagattcaagaagaatattacagattgttcaaaaatgtcccctgttgttttggatgtttaaggtaaacatagagaatggtggataattacaactgcacaaaaataaaaattccaagctgtggatgaccaatgtataaaaatgactcatcaaattatccaattattaactactagacaaaaagtattttaaatcagtttttctgtttatgctataggaactgtagataataaggtaaaattatgtatcatatagatatactatgtttttctatgtgaaatagttctgtcaaaaatagtattgcagatatttggaaagtaattggtttctcaggagtgatatcactgcacccaaggaaagattttctttctaacacgagaagtatatgaatgtcctgaaggaaaccactggcttgatatttctgtgactcgtgttgcctttgaaactagtcccctaccacctcggtaatgagctccattacagaaagtggaacataagagaatgaaggggcagaatatcaaacagtgaaaagggaatgataagatgtattttgaatgaactgttttttctgtagactagctgagaaattgttgacataaaataaagaattgaagaaacacattttaccattttgtgaattgttctgaacttaaatgtccactaaaacaacttagacttctgtttgctaaatctgtttctttttctaatattctaaaaaaaacaaaaaggtttacctccacaaattgaaaaaaaaaaaagtgaaaaaaatctgtttctaaggttagactgagatatatactatttccttacttatttcacagattgtgactttggatagttaatcagtaaaatataaatgtgtcga

SEQ ID NO: 49354 - DNA, 215 bp, Homo sapiens
cttaactcatttgaaaagcaattctataaaacaatatgtattcatgtattgttgggtctataacatataggaatgtaatttgctaataattgcacaaaggaaggcagtaggggcaaagctgtactggataaaggaaatgaatccagataattcatttctggattcttgaatctacaggaagaaagagaaatagcatttttttttaaggttaacat

SEQ ID NO: 49355 - DNA, 942 bp, Homo sapiens
attcggcacagagccacacaaagctctgtcatgtatggagtgatgtgattagatccagttcatgcggtaacctcaccatcttaaagtcatataactggcatataacaacatagtcacaggaatggtgtctcatcaccttaagaggctttagagacaagggtgtggcatgtttggggaccatttcagaaattccatttaccacagtaggacactcacattcccccatctgcaaagtgcatttaccctctcccctgaggtttccagatttcatgtcattaaaggcattagttcaacatggaaaaatgtcatgtaggaccacattcaggttcaaaagttttaaaatcccatctaaaaacattccacaccaggtgtggaatgagggcttccggagagtgttccattaaagtgtcagatccttgacataatttcccttacctctgtcgacctgtgaaactgaacaaacagcttatctgcccctaatgtgaaatgatgggacagacatagaataaccactacagtgattctagttcaaaatgagggaacatggaggggataaagaagtcaataacccaaaatagtttggaaatggagctgggcaaaatccagcaggagtttcttagttaggatccacagcctgggactgaccctctgtcctgtgggtcttttgcctctgggctctctgctctgcatttcttgaaaccattattatttatcatttttctcacactcttttgcgtatggctcctattgcactcaaaatgtttttgagattcatccatgttgttttgtgtgtcaaaagtttgttcctttagccattccatggaatgaatgtatcacagtttattgatccattcttgtattgatagatatttgaatgtttccagtttttcctattatgaataaaactgctatgaacattcttgtataaatcaaaaaaaaaaa

SEQ ID NO: 49356 - DNA, 2863 bp, Homo sapiens
ccgcagcggcgattccggcggctgctgcagcccgggcggctgccgagaaggagggaggggaaacacaaagccggctacgcgctgcgagataacaagagtaatccacagacttaaaacatgagctcagatgccagccaaggcgtgattaccactcctcctcctcccagcatgcctcacaaagagagatattttgaccgcatcaatgaaaatgacccagaatacattagggagaggaacatgtctcctgatctacgacaagacttcaacatgatggagcagaggaaacgagttactcagatcctgcaaagtcctgcctttcgggaagacttggaatgccttattcaagaacagatgaagaaaggccacaacccaactggattactagcattacagcagattgcagattacatcatggccaattctttctcgggtttttcttcacctcctctcagtcttggcatggtcacacctatcaatgaccttcctggtgcagatacatcctcatatgtgaagggagaaaaacttactcgctgtaaacttgccagcctgtacagacttgtagacttgtttggatgggcacacctggcaaatacctatatctcagtaagaataagtaaggagcaagaccacattataataattcccagaggcctatctttttctgaagctacagcctccaatttggtgaaagtcaatataataggagaagtggttgaccagggaagtaccaatttgaaaattgaccatacaggattcagtccccatgctgcaatctattcaacacgtcctgatgttaagtgtgtgatacacatccatacccttgcaacagcagctgtatcctccatgaaatgtgggatccttccaatttctcaagagtctcttcttctgggagatgttgcctattatgactaccaagggtcacttgaagaacaggaggagagaattcaactgcagaaggttctgggaccaagttgtaaggtgctggtactcaggaatcatggtgtggttgcacttggagaaacattagaggaggcttttcattatatttttaatgtgcaactagcctgtgagattcaggtgcaggccctagcaggtgcaggtggagtagacaatctccatgtactggactttcagaagtataaagctttcacttacactgtagcagcgtctggtggaggaggtgtgaatatgggttcccatcaaaaatggaaggttggcgaaattgagtttgaagggcttatgaggactctggacaacttggggtatagaacaggctatgcttacaggcatcctctcattcgagagaagcctaggcacaagagtgatgtggaaatcccagcaactgtgactgctttttcctttgaagacgatacagtgccactctctcctctcaaatacatggcacagaggcaacagcgtgaaaaaacaagatggctgaactcaccaaatacttacatgaaagtgaatgtgcctgaggagtctcggaacggagaaaccagtccccgaaccaaaatcacgtggatgaaagcagaagactcatctaaagttagtggtggaacacctatcaaaattgaagatccaaatcagtttgttcctttaaacacaaacccgaatgaggtactagaaaagagaaataagattcgggaacaaaatcgatatgacttgaaaacagcaggaccacaatctcagttgcttgctggaattgttgtggataagccaccttctactatgcaatttgaagatgatgatcatggcccaccagctcctcctaacccatttagtcatctcacagaaggagaacttgaagagtataagaggacaatcgaacgtaaacaacaaggcctagaagaaaaccatgagctgttttccaagagcttcatctccatggaagtgcctgtcatggtagtaaatggcaaggatgatatgcatgatgttgaagatgagcttgctaagcgagtgagtaggttaagcacaagtacaaccatagaaaacatcgagattactattaagtctccagagaaaatcgaagaagtcctgtcacctgaaggctccccttcaaaatcgccatccaagaaaaagaagaaattccgcactccttcttttctgaaaaagaacaaaaaaaaggagaaagttgaggcctaaataaagtctttttataattattattataacaatgtgacattgcacatctaaataccacatttaagttgatcattaatatgcaatggtagatcagattgggggatgtagcaaactggactttaagaactggaaagaggttttacaaaagaaaaactttcagattcatctctcattttatatgtccagaaatggctttgaattttaagcaattactagttttaattagctctgccctcatgaagtattattataattcaccataaacagctatctgtctgaattacttcaggccttctccataatatctgttagaaagaaattgccagtgagcaagtgagaatttttatttctcaatacctgcttcacttgataatcatattataattttttatcatgattattgactatatttttggagtcccattgtttcagtgggcattaacagaatgctttaaaaacttctaagacaagaatctatagcattagtatacactggcacataattttttaaaaagttttaagaaaagattcatttggaattttattcacagtataaaatttcctcacctgaagtaactttgtttgccaaaaaagttgttttaataaactataatttttgaaaacttccttttttattagtttagaaagccccttatttttcaacaaaggggattttgtacacataacatgggttatttagtttaactctggcaaaaaaaaa

SEQ ID NO: 49357 - DNA, 872 bp, Homo sapiens
ttttaacatgttaaaaaaagtttaattaaaaaactaagttcacgcataatccaaaaatttttaaacacattgcattttattacataaaagtacaaatagtaaaatgatatactactaattcactttaattttaactaagattaaaaatggttttctcttactataatgcagaagaatattgctctgaaaacctacttcatggatcactcaatattataagttaaacacaaacagcctcttcactcaggttttcatcatgcatcttacattttaatgtccttattctttcatagaaagtgtcataaataataccgacctaacagaaatgatttctcatatctttgatgcatgaaaaattaatcacatgctttcacatgtgaatacaataggaatgaagagcatgaatttgagttgaattacatcattattcagctttcaaaaaattttattcaaggaaacaagtatactttcaacgtaattataactctccaaaaatctactccttttaaagttaaatagaaatcatttacctaaaaactgcagttgtggattaagtttttatattcaatgctctgttttagtgtaatgtctaaagtgtcagtgccttagttatttctactgtaaattatttaatatttacatagactcaattttggattaaatatttttcatacttactgcatctgcaaaaacacatttcaatataaattcatgttttctacgccgtagtttttgaaaaaaaatgtttttccaaattcattacatttgcaggatttttctccaatataaattccctgatgttgaacaaagtttgagcaactgcttcagtgtttttctctagtacaaaatgcgtacaataagatttgtaatac

SEQ ID NO: 49358 - DNA, 1593 bp, Homo sapiens
gaggagaggccacttcccaccaggacccccaacatgaagtctaggcctcaggggctcccgccctttcttcctccagcagcgggaactgccactgctctcccagggccctgttctggaggctaaccttggttcctggagagtgtgcccctccaccctccctccagcagccctgatcacaccatgagagccaggaacgggtcaccctgctgaagatcactctgtgccctgggggaggagccaagccctcaccccacaaggggcaggtgggggcttggttgctgacccggcccaagtccccacagagcaccttctgtagctccagcttgtctcccctggcttctctttgaaggagaaaaatgtaaaatatgcactgagaaagccagccccgcctgcttagtcagccccggcagcagggcagccatgggaactcaggaaaagcaggaaccctttccaaaagcccagagatgccctgggctcagatctgtaattctcccaggagctgtgatagagcaggccacacaaagtccctacgcctccctgctgcctcccccagatgcatgtgatggcatcaccattccccaaattgaatatcagcatgcggcctgaccagggactctttagatgcatgaatttatttatatgaaggctctcacagagacacacacagcacttcagtagcatttgcattcctggttaaagaatcaccaatatttaaaataaaaactttcctgaaattgggactgtcatgttatccagaagggctggtacatccgcccaccatgtccccctgctgggtcaggagccaacacaggaccctgcgtgtgagcgtgcctgacatctcacgcacggccactccagagccggtccctgtccttggaaagctgtgaagccttgcgttgagttccttcttcgatactgaacggctccgtgctgacattctgagctctgggagttcacaccagcgcaggggcgtggaaggaactgaggtttggaaggaatgccaggtctcgcacagcttggcctcgagaaggtgagaggaaggcaaaggccagggaggggacccaagagaggcctggcacacaaggcccaagcaccaccgtcaacacagcccagtccatacagaaatgggtttcatgcctgaaaagctttttacagaaagatgccgcctgtagccagtgacagccgcaaccctacaggcctcagttccttgcagaggtgaggggtagagagtcagcctccctcccttccagcagcgacccagcttccctccacttccaggtggtgctgggctcaccaagggagcactggtgggtgctctgaaaacccacaggatcccacctccaggcccacctgggtcccatctcactctcttcttctttcaccaattgctaacatagaccttgttgggatcacgatggcttcacaagccagctgttgggtttgctatgtcactgtggctcagtcacatccctgcgtgtatactgtctgcggggcacatatgtatccatttagagctaaaggaatcagtgtacactacagctaatcctaataaatccgatgttttcggaaaactcaaaaaaaaaaaaaaaaaaa

SEQ ID NO: 49359 - DNA, 1006 bp, Homo sapiens
  misc_feature (1)...(1006): n = a,t,c or g
tttttttttttgctgaaatcacttaacaaacagcaaaacacacatttattgggcatcgccggctgcccgccaggcgctttcactagtgtagtcctcacactcctgaggcaaacagacttttcnnnnnnnnnnnnnnnnnnnnnnnnnnnnnnnnnnnaggtggtacccaggacccacagccaacctctgtgctcgttcctctcatctacccttgaggaagaggggagtccaagagcccagctggcatcgggaaggttcagtgacaaaaagctcagtgccagatcttcatgtcccctccccaggagcaggtggcgaggacggagggcagcacggggtggtaggtggtgcggtcagctgagtcccgggtgggaagcgtctgtgctgctcaggaactcggagccttcccggaggaacaggatgtccaaggtctgctggatggtcgccttgtagcttctcatcaccttgccagtccttatatcccaagctttcatttcagagctgaagcctccacataaaaagatgttgtggtcttttggatggaatttcaaggtagtgattctaaagtcacttcgaccactaaatagctgggttcctgtttcaaggtctgttaggtgcagcgcgaagtcaaagccaccactgaggatgcgccggccacagggagcccaccgggcggcccgcactgcctctgtgtgcagggagtaggtctgcaggcagtgcccggagtccacggcgttccataccttgaaagttttatccatagaagtggagagaagcatgtggctcttagaaaggactggacaccactgaatggtgttgacagggcccctgtggcctctcaggtggaaaagcactttccggggaactgtggtttctttataatggctattcaaatacggctgaataaactcagacactcccgggcccacgtagagaggggctggggcacgccctgcagggggcccctgtggctccacgtctttacccttgcctgtctccgtgcttaatg

SEQ ID NO: 49360 - DNA, 454 bp, Homo sapiens
gcaaccctatgaagcagacaccagtaacagcccagtttacaagtgaggaacctgagaaagagtgctcagttacttactcaagtttacatggtgggaagtagcatggccaggcagtgtctctgctgacgctactccgtgttaggatatgtacaggaataggaaagtgcgtgtctattttcacttcctggagcacaggaccagccacaccagcaggtttctggcactctggagtgtagttcagaaatggaaatctcaccaggccccactggggtctgaagcctcactatctcctagccgctggtgttggcacatcggtgttactcagccacattcagtctgcttctcctgctgccagcaccctgcttctctctgctctcctccaatcctcactacttctgcctagcatcttctctgtgtatcctttgatttctactccttaccaactactgcaaag

SEQ ID NO: 49361 - DNA, 1207 bp, Homo sapiens
ggggaggccaaggcaggcggatcacttgaggtcaggagtttgagaccagcctggccaacacggcaaaaccccgtttctactaagaatacaagaattagctgggtgtggtggcgtgcgcctgtggtcccggctactcaggaggctggggcaggagcattgcttgaacccgggaggcagaggttgcagtgagctgagatggcaccactgcactccagcctgggagacacagcgagactctgtctccaaaaaaaaaagtgctttttgaaaatgttgaggttgaaatgatgggaaccaacattctttggatttagtggggagcataatagcaaacacccccttggttcgcacatgtacaggaatggggacccagttggggcacagccatggacttccccgccctgggaatgtgtggtgcaaagtggggccagggcccagacccaagaggagagggtggtccgcagacaccccgggatgtcagcatcccccgacctgccttctggcggcacctcccgggtgctgtgttgagtcagcaggcatggggtgagagcctggtatatgctgggaacagggtgcaggggccaagcgttcctccttcagccttgacttgggccatgcaccccctctcccccaaacacaaacaagcacttctccagtatggtgccaggacaggtgtcccttcagtcctctggttatgacctcaagtcctacttgggccctgcagcccagcctgtgttgtaacctctgcgtcctcaagaccacacctggaagattcttcttccctttgaaggagaatcatcattgttgctttatcacttctaagacattttgtacggcacggacaagttaaacagaatgtgcttccctccctggggtctcacacgctcccacgagaatgccacaggggccgtgcactgggcaggcttctctgtagaaccccaggggcttcggcccagaccacagcgtcttgccctgagcctagagcagggagtcccgaacttctgcattcacagaccacctccacaattgttataaccaaaggcctcctgttctgttatttcacttaaatcaacatgctattttgttttcactcacttctgactttagcctcgtgctgagccgtgtatccatgcagtcatgttcacgtgctagttacgtttttcttcttacacatgaaaataaatgcataagtgttagaaaaaaaaaaaaa

SEQ ID NO: 49362 - DNA, 672 bp, Homo sapiens
acaagtagctacgactgacaagcacctgccaccataaagggctgcattttgccaccataaagggctgcatttttttaaaaagcctaggcagctctaacatcatctgatatggacacaaggccaacagtttccttatttacatccttacctctaaaagatacttcaaagtgacaaaaacgtgttccttccccacttagagacaatgattaacagggccctatatgttcttaccacatacagaggatgcatttattttttgctctatggacacttggcaaaaatctctactgtatttaatttgggtctattattaactctctgttccatcatagaatgtgggccaggccttacaatgggagagccagagttaaaacttcaagttgcatctgtttttggggctgagtcaccacctttgcctcatgctcctttgtctggcaaaggcctagggattctttctttaaatgaaatgcttagggactttgtgggcttgttacatttgtccatttaacttgcagtgctattctttgaaagctgctatgtgtattttctctgaagtctgcattttactaaaatttacaacagtctgattgattgattactgtccaggtacattttagaaaaaagtgttcttcttccagtttgttttactaaggcaaactttgaagttaaaaa

SEQ ID NO: 49363 - DNA, 263 bp, Homo sapiens
  misc_feature (1)...(263): n = a,t,c or g
gcctgctccaaagaaggaatgaggttctgcagagctgtggtccgagccgtgatcaggaaggatgcctcgggaagtatagttttccccagcaaactgcccagcagtgcatccgccggctgtggctggcttcagtgcagacagagctcacaactcggctcctgcaagacccatcctggttcatctactccatcgaggatgaacagcagtctctctggcctagacaggatctgccttntgngancccnannggntggcctnatctt

SEQ ID NO: 49364 - DNA, 1066 bp, Homo sapiens
  misc_feature (1)...(1066): n = a,t,c or g
tttgaatttaatcaacgtgttcacacacagcatttattttgtaagattaatttttacaaaccatccacaacttgttcaaacctttggctttatcctatctaatttcaaacaaatgcccagccttaatttattacaattatgattcgtagactttcactcaattacataaattcactctcggttgaggaaaagagagaggtggcagaggattaatccaaaggatcctggtgtccactacccttcaaagccagaccctggtggggcaagtcctgccaagtcatcaggtgctgattaaatgcagggcactgggtgggaagcaaattcctaaaatgtggttctttcccagaagcatcttataatctagctcagggggcttgcagctccaactcactccggaatcacctgggagcttctgaaaccattctgatcctgaactccaccctaaataaatcaaaaactccttgggtcccataaactgaaaaaaaaagtttaatcctcccacaggacattctaatgggcagccagagaggagatccactgcatctaggtttttcataaattacttaaaaatttgcaaattataaaatatttcattaaagtatgaaaatctgaatcagttttgggggatttttttgggggggaggtggtaaaagaccttaaggaaaaggttgtaattcaatttcacaaataatccacaacttagtacatcctttgatggaagcaacacccccnnnnnnnnnnnnnnnnnnnnnnnnnnnnnnnnnnnnnnnnnnnnnnnnnnnnnnnnnnnnnnnnnnnnnnnnnnnnnnnnnnnnnnnnnnnnnnnnnnnnnnnnnnnnnnnnnnnnnnnnnttgcttgtgaagggtctgcttcctcagagaagtctcatacttccccttgaagctcacattgatggacttcatagttctgcttggcccaatcctccaaatactcctccatgtttcccaattatcttttgttatccagtaaaccaaattgttttttctcctaaagattcctgttacattattaatgatttgtcccttgaagttttaggagaaaatg

SEQ ID NO: 49365 - DNA, 16809 bp, Homo sapiens
  misc_feature (1)...(16809): n = a,t,c or g
ggcagggtttggtttgggtgtcttcagatttgcttgtctcgaggtcctcacaattgctctacagctcagagcagcaactgctgaggctgccttgggaagaagatgatcctaaacaaagctctgctgctgggggccctcgccctgactgccgtgatgagcccctgtggaggtgaagacattgtgggtgagtgcatgagtgagggatgttctctggagctgaaaaacagtaaattgaaggaaaagagataaagcgatttgcagagaaactgtagagatttcctaagggccctttcagtattaagacaattaaaaattatagctgttcctccttcaggaaaccagagccccaacctactctttttgttatctatgctgttggagttcactaaggacgctattctgtttatattatattcagtgactacagcctggaggtctctatgtcgttccatcatgattgcctcaaaaattaatgaggtttccatgaatggagtatttttttgttattaaaaatttctgaactgttactcccaaatttctctgaacaacttttgaagcttttcatatgcctcctatagcatatgttggggtagatagttccatgaagtatgtacactctatagatataaagaaagaggttcttttctttctctcagacttacatttccacatgggaattggcacaggtggggagtaggtgaaagagcccagcaggctgaatgccttcaacaatcattttaccacgtggtaaatgtggtacttactctctgctacctcatatatgtcacctcgcttatgatcaaataaaatgggcatgtagatatgctttatgaatagtaaaaacatgaatgtcaactttttttaacttattcctattacaggtataacttcgtattttttctttagcaaagtaaggaatatattttaaaactgagaactttatgataaaatgcttggtaaattaaattattttattctcaaattgtcaacccaaattacttgttcttcaccttttctaatgaagtcttataaagagaaaaatgggcaggcacagattatttggtcccttagtcccctctgcctttgtcgtccatctctttccacctctcttcatgcatccctttctccctcttccctttcaggatccatctctgactccctgctcctttacagacatgggcagtgggtttgtaaaacaaaagttggaaagtcaaatagttaaaaggggaagtgaactggaagctactcgaaacttccacaaccttattaaccatagctgctcccattctgattttgtttggcagtggaagtttcacctgcttctccagagcacttggcttttttttttcaaatctcctttcttcaacctcacaccagagtgccccggtcaggctcgacttatccattaggaacagtgtgggcagtgaaggagactctccaaactgtaaagctacaagagaacgttttaactcgttttaaaattagaagaaaaatgaagttttacagtctatgaaaatgttttannnnnnnnnnnnnnnnnnnnnnnnnnnnnnnnnnnnnnnnnnnnnnnnnnnnnnnnnnnnnnnnnnnnnnnnnnnnnnnnnnnnnnnnnnnnnnnnnnnnnnnnnnnnnnnnnnnnnnnnnnnnnnnnnnnnnnnnnnnnnnnnnnnnnnnnnnnnnnnnnnnnnnnnnnnnnnnnnnnnnnnnnnnnnnnnnnnnnnnnnnnnnnnnnnnnnnnnnnnnnnnnnnnnnnnnnnnnnnnnnnnnnnnnnnnnnnnnnnnnnnnnnnnnntgtacaggcgtgatccaccgcgtccggccttaacttttaatgtagcctggattgtatttgtctttataccaatacaatcagaagctgtaattttccgtatttttatggaggaaggcgcccacaaaagcaacagtgctcggggctcacaagtcagaattcagccctgggcatccctgatcctgggctttgcgtggttctgctacctgggtgcctgtcagtcttccccaaaatctatgtaattgtcaaaaattgcaattgtcattcaatacacatgtttgagcacacaatgagctaacttttgggaattcaaagataaaaaatcatgctgtctgccttgcagagggtgcacaaaccagtgatggaaacagtatggggcacaggaaagcagaaggccctgctgagcaggacagtggcccagcagaggctgaaactataaaaatgacttggttccagctgggccagtagagtgatgtcctccagcaacactcagcacccaggacaagtaccagatgaaaagaaggattgcatgtattccacatatattcatgtttgaacaaggagtcaaagtttattgtaaggataaggagtctttgttggtggcctgttaagtaaccaaccagggcagtcatgctgggtagggaagaaggtgagctggaggaggaacagacaaacttggagagccagacattgagattccattgaggcgttggaggtcacaacgcggtcaaaaacatgttgagagcacttagctgcaaagttgttaactaagtagaaacctcaaggatgaattttaggatttctccaggaaatcctaaaagataacttctttcagggagaaaaaacagacccttgcaaagacatgaaaggaagtgtagtttggtttgattggcagatagttgtgaagaatgtcggactgtaaggctgtcgatatcctcctcacagaactccccaaagtacattgtatttgctcccttaccgacctgattctcccactattcagttcattccttgatgctgttttaagcaacccctgctctgtctgacacttttggatgctcagtaaatgaggaaggaaggaaggaaagataaaatggtaaagggctcacacatgtcttaacaaaaatgtccagttcggctcatttggctatacttcatggctgctgctctgcccttgcatcctcggataagctcactgcccattagaggaaaaagggtttaatttacctgagtcctcgagtgaatgtaattgttgaatcagaacactatagacatttagtaacctccttcagaggaaaaaaaaaaaaagtgggggcaatgacagaaattaaaaaaccagtcgagcttccacttttcatttcagaagaaatcaggtgctctcctctaaggaccactactattaacaaaacagagaccttagaagaattgtttatttgttataaatgtataatgttgctattcttgtaatagtctttctcgtaccctataattgttagaagaaattcttttaagttaatacgttcctacatgcttttctttggtttaaaaaaaaaagaataaaggaaactctgtgtagaaagtgtcctgttctgatctagtcctgacaggaaacgaagtataatcaacttgttattaactgagagagaaaacttaggaagcagagggaaataaactgaatctctgagtaagaaaactaaatcctatgataactcattcattccttcctttgtttattgcaatattcatcataagcttatgatgtgccaggcactaagtaggcactcaggaaataacagacgtgtgacgttctgcctttgtggagcatatgttatagtgagaaagacagaatcagttctaacctgatgactaccaacgttaggcaaggaggaagcaggtgttaggaagattgttcagggactgtgccaaagatgaagcccataatatttgaaagtgagtttcttcaatcactttctgtattaaggttctttctccctgtgttccaccctcctgcttgtcaccttcactcgtcagctgaccatgttgcctcctatggtgtgaacttctaccagtctcacggtccctctggccagtacacccatgaatttgatggagacgaggagttctacgtggacctggagacgaaagagactgtctggcagttgcctatgtttagcaaatttataagttttgacccgcagagtgcactgagaaatatggctgtgggaaaacacaccttggaattcatgatgagacagtccaactctaccgctgccaccaatggtatgtgtccaccattccgcctctctttactgaaactaatctttcataccaagttttactcccttcttctcaagagatttccagatcttctcatggtaattgctgaaattttatcatctcccatctctaaaatcacatattcccatgtaatacaagggtctttccattatgtattaattcctactttattaaacatgcccacagagagaagggcacaggaataaagcagaggcaatgtgtcgttgctcccaagcagaaggtaaataagacctctttgactatcaggtggtgaaatgctggtaggagggctcttccaggatgtaatgcagaagctcatggcagagctattcacacttcacatcagtgctgtttcctcaccacagaggttcctgaggtcacagtgttttccaagtttcctgtgacgctgggtcagcccaacaccctcatctgtcttgtggacaacatctttcctcctgtggtcaacatcacctggctgagcaatgggcactcagtcacagaaggtgtttctgagaccagcttcctctccaagagtgatcattccttcttcaagatcagttacctcaccttcctcccttctgctgatgagatttatgactgcaaggtggagcactggggcctggacgagcctcttctgaaacactggggtaaggatgagttccaccacttcatgggtttctaataatagacttcactcttctccctaagcctggggccttgagtcttgcagagccagccctccaccccatcccatcccacacacatgcacatgagcacactgcacattctgacctcaacagctccactttcacagagcctgagattccagcccctatgtcagagctcacagagactttggtctgcgccctggggttgtctgtgggcctcatgggcattgtggtgggcactgtcttcatcatccaaggcctgcgttcagttggtgcttccagacaccaagggctcttatgaatcccatcctgaaaaggaaggtaagattgagatttgttggagctgaaacctcagtatgagagggaggaaagtgggagggggttgtggacatgaatgtggttgaaagttgtaggcgaattgggaagtggcatgatgatcacacaggaggcccctcagacccatcgatctcatgtctgtcctgttgcaggtgcatcaccatctacaggagaagaagaatggacttgctaaatgacctagcactattctctggcctgatttatcatatcccttttctcctccaaatgtttcttctctcacctcttctctgggacttaaggtgctatattccctcagagctcacaaatgcctttcaattctttccctgacctcctttcctgaatttttttattttctcaaatgttacctactaagggatgcctgggtaagccactcagctacctaattcctcaatgacctttatctaaaatctccatggaagcaataaattcccttttgatgcctctattgaatttttttcccatctttcatctcagggctgactgagagcataacttagaatgggcgactcttatgttttaggccaatttcatgtcattccccagatcatatttcatgtccagtaacacaggagcaaccaagtacagtgtatcctgataatttgttgatttcttaactggtgttaatatttctttcttccttttgttcctacccttggccactgccagccacccctcaattcaggtaccaacgaaccctctgcccttggctcagaatggttatagcagaaatacaaaaaaaaaaaaaaaagtctgtactaatttcaatatggctcttaaaaggaatgacagagaaataggatacaagaattttgaatctcaaaagttatcaaaagtaaaaaattttgttaccaaaagtcaaactgcattctcaaaactttaaatttgtgaagaatgacaacagtagaagctttcctctcccctcctcgcctttagggaataaaaattctctaggcaggaaaagaaatggaagccagttagaaannnnnnnnnnnnnnnnnnnnnnnnnnnnnnnnnnnnnnnnnnnnnnnnnnnnnnnnnnnnnnnnnnnnnnnnnnnnnnnnnnnnnnnnnnnnnnnnnnnnnnnnnnnnnnnnnnnnnnnnnnnnnnnnnnnnnnnnnnnnnnnnnnnnnnnnnnnnnnnnnnnnnnnnnnnnnnnnnnnnnnnnnnnnnnnnnnnnnnnnnnnnnnnnnnnnnnnnnnnnnnnnnnnnnnnnnnnnnnnnnnnnnnnnnnnnnnnnnnnnnnnnnnnnnnnnnnnnnnnnnnnnnnnnnnnnnnnnnnnnnnnnnnnnntaaataaattttttaaaaaagaaaaatattaaaataaggcaataatataagtgggtatctgaaaaggaacaaatgcttgttccttacttagggttagtgacaatggaaaacagatagaagtagaagctacagacccatttaggggccccagccccctgctcctcccccttcctggctaaggaaagcatgagcctatgagagagaaatcctaggaagaacaagacagttgagacaatgtagcagcagtagtgggtgttgtgtcctacactggattcgtggtctcctaatagaaaatctctcagaggaaatgggtccacagagacctgagggctctaaacagctatgaaatctgccaggatatttctgtccatgctatctgcatcagtgagtttaaaatgtaataggagaaaaaaaagagacaaaacattaacataataattgatacagcatagttttgtacaaagaaacctaaatccaaatacttgactcagtattttgaagctaatattttaaactttactgggtaaagtatctgattgacatttctgaaccttatttttctcatccacaatgtgggagtgataatattttccttgcagagttattgacagaatttgaataatcttggtatatagacagtgccttacacgtagtatataaatatataagaaaacactgcagttatgtttataatggatttattaaaaagaatggatcatattatatgaaaagtacatttgttttccttagccctttagtgatttaggagattcaagcgtagacgtaaaagtgagtttcttttcatatgttaactggaggatttttttctttcttgagaggctgagattgggttgataagagaactcttaggacaagaagttgtaatatttgacttcggtttttaactctctaaggggtatattccctccttatggcccataaattttaagtcaaggtgaattatatgcaacagcagtttatccatatttactttggggaggaggtggggagactccgggagaaaataattataaatgcagactgggaattagtaagtgcagggaatctgaaccagtggtgatcatgaaaacgtccatcacagaacannnnnnnnnnnnnnnnnnnnnnnnnnnnnnnnnnnnnnnnnnnnnnnnnnnnnnnnnnnnnnnnnnnnnnnnnnnnnnnnnnnnnnntgtacaacaccaagaatgaaccttaatataaactatggactttgggtgataatgatgtgtcagtgtaagttcataagttgtagcaaatgtacctctgtcgtggaggatgttactagtgggggaggctatgcatgtgtgggaacagagagcatatgggatacatctatctgtactctacaatttttctgggaacctaaaacttctctaaaataaactctattaaaaaaaaagaaaagaaaaggtcaacaataatgatcccaaatatataaaattaaaactgtagtataaaaatggtcacatgaaaatgcatgaatgtgctaagaacttttctgcaataggatttaaaataaattttatataaatttcaatgattcatgagccaagaacccagcattctggagnnnnnnnnnnnnnnnnnnnnnnnnnnnnnnnnnnnnnnnnnnnnnaggcttacattgaatggcattataaccagagtcatacagaaatacacaaatgctcccctatttagaatccttccccaagaaatactgaggaaagcaaatataatggtagttggattttactgaaagaatgtattcaaaaagtatttatataatgttaaaatagcatagttaaaattagttttataaaatagagcaaatatatctttttatcagctaaaagttcaaagtgaaatcatcattattatattattatattattattataaacagttataaatcaggctgcatgattttaaattaaatgattattaaaaattgttatctgaattatttcagattacatacataaagtatgacttcattaataggtaatatcacattgttcaaattttacaaaatttccagtcacaatggttcatgcctgtaatctcagcacaaggtgagggtcccttaaagcccaggagatggagaccagnnnnnnnnnnnnnnnnnnnnnnnnnnnnnnnnnnnnnnnnnnnnnnnnnnnnnnnnnnnnnnnnnnnnnnnnnnnnnnnnnnctgactgcaccactgcactcgnnnnnnnnnnnnnnnnnnnnnnnnnnnnnnnnnnnnnnnnnnnnnnnnnnnntgaatgaatgaataaataaaaattacaaaacgtaaaaatcacgtaaaatatttcaggtttgtacttaccacatacaaactagagatatgaagaattaaacattacaaataaagcacttcacacacagactggcccatagtaagcagtttatagaaattaacaaatttgtgttattgttattttctggagtccaagacaaaatcccatgatgaatgacaccacaaggatgtaagcaacaaaattcagaatatgagaagttctactagattaaataaaaagatttctccagcaaacaatttgcaaaaaaagttaaaaatagagaaaagaaaagctatacacttgaaaaagactgaagaaatatagtaaccaaatgctgagctttgtctagattcatattcaaacaaaacatctgttaaaaaatttatatgaggcaatcagaaaaattgacactgagtgtattaaggaattatttatctcgttttaaatgtgttagtggcattgctgttatgtttctaaaaagccattatattttagattttcataataaaaatgtataaatgaaatatgatacctaaaaatatcttcaaaataatccattatgtgcctgtatgataactgggtgggtttacaaaattgctcatgaattgattattgttaaagcaaggctgttgatacatggaattcttctctgtactattgcacacagttgaaattttctgtaatacaaaggtttttttttttaaatgtattcaggaaagtcccataaacataggcagacaagcattctgtttgaagttatgttagtttttcagtttttctcatttttatcacatttaggaaaccctgtccaaggcctgcccaagactgtaagaacctctcaggaatgcaactgtaaagaatgtgtatgcaggaactaataataacaaaggaaagcaaagtaatgcttgctttattattggctggactaagcccccagacttgtttatatattcactaattcatcaaaaatgcaaaaatggtcattgagtcccagtgctacaataagtactcatagtttgttgaatgttattaaaataatgtgaaaacaattacattcattatcttcatagaacttacactccagtgggaggaaaatacatatattacataattccacaaacatagttacaaggtctgaaacatttataaagaaaaagaatgaggtaaaatgagagagtgttgcacagggaccaggtatgatttggggcagtttagaagtggcttgaagaaatgtatcttcagatgaaataaggtggtatacagtaggtaaaggacaaggttgaagaggccagagcaaatgtttgagaaactcttacaatatgaaagagaagatgagaataaaataacatgaaaattatcacagatttaatagagaaagttcatgtaacagcaaacaagtttaaagtcattctaattagaattcttgatctgtaaaagtaataatagaatgctaaaaacaattggaaaatttaatagaaagattggaaaattaaatcaagaaaatctcacagtaatttaaaaggcaaaaaaaaaaatataatatatggtagaaaaaataagatggagaacagaccaaggaagtcaaacatcaagtgacaaagctagagagaccaacagggaagatgaagggagaaaatgatcagaacaaataataagggaaaattttccagatataaaggatttaattcttccatggaatagtcttgtcaggtatttagcaaaattaacagactcacttctaaatatctcattttcaaaatttcagaacttcaggtgttatagaaaagtcataaaatattccagtggcggaaaccaaaatgaaacaaactgacaacaaaaaaaatacttctattattaagataatgagaaagtccttgaagttctaaaggaaaattattttttattaataaatgtagatcttttcaaagtcacaatcaggcatggagaaagaataaaaatacctgtgaatgtgaaaggacataaaatttacctaccacgcagagttttactagaaattgactaaggatatgaccaattgagattgttaatcaggatataggaaggtaaggaatccaggaaactgggtttaacccaggatctcactgaaaagggatcctactacagcagtttcttggcaagcaaagaatacctgactacataagtgatatttagaaagtgataaactttttttttcaaatttagaattaatctgtgagcaaagcccaaggaatcttattgctacagcagaatgtcaatattttcagctttgacaatattgggggaaaaaaaaagatgtagatacttaattttggcaactggaagcgtaaaggagaggggaaagggagggtaacaatgccaataacttcatcttccaagaaggaggggaagaggcattgcccatacttacagaagtcacaaagatcaatatatttaaattacaatcacaactggaaaaagtatgtaaaatgactcatgaattagagcaaggttttagaaattggactattatttcagttacaaaaaaaatggactgttattcttcggcctaagctattcagaagctgcaagagcccctcagagttggcccaaattagagcaggcttttatactcctatactgaccaatcattataggtgagttcctcctgggaagtggatcaaaatccgatgaggcagctttcatcaccaaaggcaattccggggcatgactgacagctgagggcagtcagccagcaacattcccagcaatgacagaataaatcgttcagtctcaaagggaggagtttaggtacagtggaacagcaccgacggcagaaacactgttctagttcctgggagtacatatacattcatgtggaagaaaacaaacagataaaattcagcatctatttnnnnnnnnnnnnnnnnnnnnnnnnnnnnnnnnnnnnnnnnnnnnnnnnnnnnnnnnnnnnnnnnnnnnnnnnnnnnnnnnnnnnnnnnnnnnnnnnnnnnnnnnnnnnnnnnnnnnnnnnnnnnnnnnnnnnnnnnnnnnnnnnnnnnnnnnnnnnnnnnnnnnnnnnnnnnnnnnnnnnnnnnnnnnnnnnnnnnnnnnnnnnnnnnnnnnnnnnnnnnnnnnnnnnnnnnnnnnnnnnnnnatagcatggacgaacccattnnnnnnnnnnnnnnnnnnnnnnnnnnnnnnnnnnnnnnnnnnnnnnnnnnnnnnnnnnnnnnnnnnnnnnnnnnnnnnnnnnnnnnnnnnnggagggggtggggtgtggggagagggagaaaaaggaatgagatgttggtcaaaaggtacaagtttcagttagagaggaggaataagtactgaagatcaattgtgcagcatggtgactagttaataatatcatacagttgnnnnnnnnnnnnnnnnnnnnnnnnnnnnnnnnnnnnnnnnnnnnnnnnnnnnnnnnnnnnnnnnnnnnnnnnnnnnnnnnnnnnnnnnnnnnnnnnnnnnnnnnnnnnnnnnnnnnnnnnnnnnnnnnnnnnnnnnnnnnnnnnnnnnnnnnnnnnnnnnnnnnnnnnnnnnnnnnnnnnnnnnnnnnnnnnnnnnnnnnnnnntaagctgtattatttttatgttgtattgttgtattttatcattttttccaaatattttcaatccatggttgactgaatcagaggatgcaaaacccacaaatacagggccagctgtattgtatatttgaaaattgctaagacagattttaaatattcataccacataaaaaaannnnnnnnnnnnnnnnnnnnnnnnnnnnnnnnnnnnnnnnnnnnnnnnnnnnnnnnnnnnnnnnnnnnnnnnnnnnattgtaccttataagtactcaattatttgtaaattaaaaataatttaaattttttgaaatgtaacattcttaactttttcttgttcaaataaagttttctgttctttattttcaaaaacttttttgtttaaaaatatcatctcaatcatctcaatttctattaactcaattgattcaccctattaacttatgaactctcctctgaagttaaacattccatgattattgagaagggtaaagttaatgtgcagtaagatcttagcccacagtaaaaaacaaatcttagtgatgtcacttaataaagagacttaattccacagtttctccagtgactcaggttatatggagtttccaacgtctcatcgtgcatctacttgcaagttccattggctagtattagtcaaatgatcccaacctaacagcagaaaagactgggagatgtaaagaaccttatggcatattgacgagcaacattgtctctgaaagatatgctgatatttcctaaggtaaggacaaatgctaacaactggcaggttgttctctagaacacccacatactttcctccaagttatatgccgactaagactcaattcttcttgttagcaaacttatttataaaaaatgtacttgttactttaattatcaattaaagattatactacccaatgaaatctgggtgcaaaaaataattgtttctatgaaactgtcagtggaagaaagggaaaaagactttgatcctctcataaccaggatgtgttcagtgtgacaatgttgaactgaatgttctagaatctgtgttggactgcattaaatacggtcataggctgcatgcagcccgcgggctgagggttggaaaagcttgtctgccttaatgacaaacccagagactgacatgtagaccatcttcagggctgagcccacatcaaaggggtcacagtgtgtagtgacgtccctcataaccgggaagagggtgtcatcaggaatgaacaggttacgatgtcaatgacaaagggagctcagacaaggaatgagatggctgtgaacaggtacccccactgagggaccctagaaccagaggaagctctgccgtttgacctgtgtgctccacaagaaacaaacttcccctacaccactctactgtgaggaggctctggaggctgaggtgttccacatggctggtgtagacatctgcacactggaagtcatttccagcatcagaaggatctggaaaacccagtcctccttcctaataagagggatgagcatgctggctggcagcatcccgtgcacaggatggtgtgtttgggaggtgtgcatgttacccaggcttggacaatcagaatctttccccaaattattaaaactctggtagacacttcagaaacatatacaacaaagacagacacacacacacgcacgcacacacactcaaacgaagagagacatgagataaggtgtgaggtaataagaaagatgcagaaaataaagagatgcaaaaagaaaaagagaaagaaatgcagataaatagtgccaaaggattacaaaaatagagaaaggcaacaatgcagtgaaagagacacaagaagggaacaaagacaaaactggagagagacacacagaaagaactacacagggacaaagagacacacggagaggagaggaggatgcacagatggaactataacagaaagagaagagagagatgaagatctcatggaatatctggaactagtcacttctgaaaccaacattccttgtaacatgaatcaaatatctttgggttgggtgtctatcatttggaaccaaaaatagtactttcattcctggttatgctttcttaaaaataaaaattagccttgattgatgtgacttgccagccagaatatatttgaaacatcagtcactataattgtccccaaacaattccaccatgcttacttagacaacactcgccaaaccggaagagaggctgggatgtcctaaggccattgcactgaacatcaatattaaagaaccatgaatgatgtgatgactgaattgattttctacctcctctgcctacccttactttgcaccccaagatgctttcagtgtcttttcaaagtacaaccctctttctagccacggtttggctgggtcacctcaaggtatgttccttcacttggcagtggtttcctacctctgcttagttaaggaagttccgaacacagataactcagaatcaggtttaattatgggaaaaagcactaaagttaggtaaatgattttgtttgtcatgcttctcttgacaggtctgtggggggagaatggaaacagagatgccccttggggcctgagtagacacagcttgcagtgcacaggcagaggctctgggtcagtgcaggaagcagagtcaccgccagtgccttgggatggggatcacagaaggtgacctgtggctgcatgagccactgtaggactctgacctcagtgggacaggatgacacaggcagctaggaattctgggcaggggcaggtgggcattacagaagagtgatgaccaatcccagacaaaagtcctcaggagtcagtgcaggagtcctggagaagagagatgaggcatgatcagcacagggtaccctgagggacacaccctctcccccagtcctgagtttcctctgcagcatcaaacagaggatgctgaggtccagggcatatcatcatcacgttccccaatatctgtgtaaaggtaaaatcagctcatgaggacacagaacttcagcttgatgcagatatgtggaggtgggggaacagcagttacccttctgggtaatatgaagagtttgatttttttagtaaattgggtgacacttcatctccaccactagcagcctcttttagtcactgaaaatgcctacaggcagtagctaacaaaatgtggcacaaagtgggcatcaccctactatctcacattcaagatgtggctctgtccccacatttcacaaaaagatgccaccaaagttaaggcctggttctaggaaacaatctctggagattcgtagaaactggcaaacttctcccctaagtcttaaccctcatagcagcaaacaggccatgaacagagaccactgtgccctggaacactccgctcatnnnnnnnnnnnnnnnnnnnnnnnnnnnnnnnnnnnnnnnnnnnnnnnnnnnnnnnnnnnnnnnnnnnnnnnnnnnnnnnnnnnnnnnnnnnnnnnnnnnnnnnnnnnnnnnnnnnnnnnnnnnnnnnnnnnnnnnnnnnnnnnnnnnnnnnnnnnnnnnnnnnnnnnnnnnnnnnnnnnnnnnnnnnnnnnnnnnnnnnnnnnnnngctcttccctcttatgcctgtgccctctcccctgactggatcatggctgaaatattacctgcaggtggaggccctcgaggtcctacaaaaggaagttatacagagaaaggtcttgttaaacaaacaaccactatcttaccccaaaggaaaatgacacatgtagtttaattggggttatatcctcttccctcccgtgttctttaagtccttaagcaccctaagttaaaatcccccaaaacaaaggaaattgtcactagaagacaaggaggccgaggctctgaccctcttaatggaggaagcttttagaaaggagccagtgagacgatgatgaacggtaaggacgccctggaataagctctatcagtcagctctggcagcgctaccattcacccagtaaaatcagattccaatgcctcctccaatcttgtcctgtctcctcgcacttcctctcagggtaaggaggaaagagctacatctagagacagaacctctctgaatagagggtctgggtcacagcccatcttcccccatttcccccttngggttcctcacctttctgacccctgtgacggatgataaggcccagcccgaggaagatcagccccagcacgaagcctccaacaccacccagcatcttgctctgggcagattcagactgagcccctaaggagcagagcctgagtgtgagtgtttgtccccacaccccataatgtccttggtacaggaggtggagatgtcaggggacactagttctccagtctgaccaccctagggaagagaaagaccagccagtaggtctttggacacaataggtgggtgagggagaggaagaagcacaccncctgcccctcaggacttcatccataaccttaaccctaaggcccagtcaccagcccaagtaagtctctcaaagtgtaaagct

SEQ ID NO: 49366 - DNA, 1012 bp, Homo sapiens
tttttgaccattctcttttagtctatgggaattacagggttgccgctaaaatattcacttgttcatatcgtgtcagagatttcctcttctctggagcttaggtggctcttcacaatccataggcttgaatctgcaacctagtgtaaactgccttgctttccccggttctttcccctgctagcacctgctttctcatccctatctccagtcaaagatgggattgcttaatccaactctggagagggaccaagtcttttctgcccacatctcacacaattgaggtgtctgaacaagcttggggagggtctataaggggtaggctcaaaaaaaaaaaaacccatttggcagaggcagttttgccaacacaagggctctttcaagccgactttcacaaagagagccggacttgttagttggcttctgtctctttagagcccaagaaaatagtaattaagtggcctagatataggaagggcagaataagcacttactccccctgccttccaagatgaagaggagaagcaggccaaccctcaataattgcaagcctgaagagaagtgatcttagagaaagcagagaacagaatggactggatagacatcttgactctattcagcccgtagtctgtgatctggagagtccagttaaggtaacccagatttttgacaaccgccttcctgctgagccaaagttttctcattacccctccactggggaagcagctgagggccccagggccttgctccctgggaaattctcttctctccatctttcggtgcattggccatgttactgtgccaaagtgtcttaattcttgtcccatctattctcagctggccttggaacccacataggagttggtgggggagggatggaatgggtattattcattgtagttgatcctggtgtgtgtattatataaagagacccctccccttattttgtgttttccatccctctcccttaacaggattgaaataaaacatgcttctgtttttgtaaaaatatttt

SEQ ID NO: 49367 - DNA, 380 bp, Homo sapiens
gggatcgcgtggactggaagtcacactgcggcggtgagttttactctgtgttgtattgaggctgtgcctccaggtccccggcaattctgtacctgggatgtggggtctccacagacctggaaattctcgcccttcttccttcaacaagagcaaatggagacattcccctaggagtccggaagtcacttccttttgggtttaaagtcgccctgaggctgccctgtcctcggtctttttgctatagggcaatgtatacagtttgtatcgcgtagttttcccgttcacaaccgtttgttgactcctcccaccccgcgctttttaaagtcctcacccgagaggtggatccctgctctggcgcttccagcctcaccctcgtcggc

SEQ ID NO: 49368 - DNA, 1868 bp, Homo sapiens
gggcgctcgctgaggcaaaaggaggcgctcggcccgcggcctgacagggacttagcccgcagagatcgaccccgcgcgcgtgaccccacacccacccactcatccatctatccactccctgcgccgcctcctcccaccctgagcagagccgccgaggatgataaacacccaggacagtagtattttgcctttgagtaactgtccccagctccagtgctgcaggcacatgtgttccaggggcctctgtggtgctcctgatgcccctcacccactgtcgaagatcccccggtggggcgaggggggcggcagggatccttctctctcagctctaatatataaggacgagaagctcactgtgacccaggacctccctgtgaatgatggaaaacctcacatcgtccacttccagtatgaggtcaccgaggtgaaggtctcttcttgggatgcagtcctgtccagccagagcctgtttgtagaaatcccagatggattattagctgatgggagcaaagaaggattgttagcactgctagagtttgctgaagagaagatgaaagtgaactatgtcttcatctgcttcaggaagggccgagaagacagagctccactcctgaagaccttcagcttcttgggctttgagattgtacgtccaggccatccctgtgtcccctctcggccagatgtgatgttcatggtttatcccctggaccagaacttgtccgatgaggactaatagtcatagaggatgctttacccaagagccacagtgggggaagaggggaagttaggcagccctgggacagacgagagggctcctcgctgtctagggaaggacactgaggggctcagggtgagggttgcctattgtgttctcggagttgactcgttgaaattgttttccataaaagaacagtataaacatattattcacatgtaatcaccaatagtaaatgaagatgtttatgaactggcattagaagctttctaaactgcgctgtgtgatgtgttctatctagcctaggggaggacattgcctagagggggagggactgtctgggttcaggggcatggcctggagggctggtgggcagcactgtcaggctcaggttactagtgctgttggctttctgttttggttattaagacttgtgtattttctttctttgcttcctgtcaccccaggggctcctgagtataggcttttcagtccctgggcagtgtccttgagttgttttttgacactcttacctgggcttctctgtgtgcatttgcgtctggcctggagtaagcaggtccgacccctccttctttacagcttagtgttattctggcatttggttaagctggcttaatctgtttaatgttatcagtacattttaaataggggcattgaaatttactcccaccaccagggcttttttgggggatgcctgggcctttaaaacactagccaaactctaattaattctcaaatcactgccaggagttcttgctcctggctgcaggcccaggccccaaggtctccttcttggggtcacaaacagcagtaaggaagaggaatatatagcaactcagggcctgggaattgtggggcaatccgttcttagggactggatacttctggctggctgagtatagtactagctgcctccccaccaggttccgagtagtgtctgagactctgctctgcagggcctagggtagcgctgggagtgtagaagtggcctgcccttaactgttttcactaaacagctttttctaaggggagagcaagggggagagatctagattgggtgagggggacggggatgtcagggaggcaagtgtgttgtgttactgtgtcaataaactgatttaaagttgtgaaa

SEQ ID NO: 49369 - DNA, 348 bp, Homo sapiens
gagaatcttcttcgactgccaagagcggtccaaggcaatggtcagccactgcagcctcctgagatatttttagagactggacctgaggcctctggaggctactgatgatgcctgctgtgaacgcagacactggtgtgatgcgatgcctgcgcctgcagcggcagtgccctgggcactatggttttgagcttgtacccagcgctgcttttgccttgctctgtgaccccaggcaagctgcctcacctctctgggccagtttccccatcgtacagtggtgctgcacaccctggccctggccccgaggtggctgggaggtggctcctcaaacagccgctgtctcatcagtgc

SEQ ID NO: 49370 - DNA, 897 bp, Homo sapiens
ggcccgggagtctgggcaatacagttttgtgctcactgggtgaagaggctgacttagggcggggaaaggagggagccaggctggatctctttccgcagctctcctcacgttcccctctagtcccggcgcggcgctgctgcccaggggactggcctatcctcggccaatccgctgggtccttattgcctgttgggcccctagtgcgaatcagtcccgccagagacccttgacgggcatactgtttcctccgggctcctgcctcatgaggggagaggaagaggaaactccgaaatgggatcgcggaagacttaaagggccaggctgatttttttttcctactgcaggtctctgaggctgtggttgctacagggtcaccacgagcttggcttacttgtctcatccttcccttgcctggtatcattttctcagttctcccaaaagccatgtcccggcccttgctcatcaccttcaccccagccactgaccccagcgacctctggaaggatgggcagcagcagccacagcccgagaagccagagtccaccctggatggggctgcagcccgagctttctatgaggccctgattggggatgagagcagcgctcctgactcccagagatctcagactgaacctgccagagaaagaaagagaaagaaaagaagaataatgaaggcaccagcagcagaagcagtggcagaagggagcttcaggaagacatggacaagggagatcccttgaggctgaggataagatgactcaccggatactgagggcagcccaggagggggacctgccagaacttaggagactgctggaaccgcatgaggcaggaggagctggggggaatatcaacgcccgggatgccttctggtggaccccactgatgtgtgctgct

SEQ ID NO: 49371 - DNA, 587 bp, Homo sapiens
gaagataattcccctgaaatttggagagttgaattaagctaggactgattctggctggaatttgtggtggctacgtaccctagagggcctcaaggaaacccacggttcaagacagccctgacagattctggagtcttagaacagaaatggattttgaacatgggcaaggccaaccacccagttcacggcctgtgtacagcaaagattacgttacagcctgagagctaagcctggaagctctttcatccatccgtttgtccatctatccatccatctgctcatccatccctccatctgctcaacaaacgttagagaatcaatccttgtgtcagatactggggctgccctcaaggagcttttatagagttcagggtacagccaggtgggggagacagatcactataaaaacctaccactataatccaaaggacaagagcaaaaatagtaaagaggagagaagacccaaatttgcctggtgggttcagagagggctttctagaagaggtaaaaaatctttcggggctatcactttaccttgcctggttggattaagggaggattttccagattacagtggacagaatgtt

SEQ ID NO: 49372 - DNA, 826 bp, Homo sapiens
gttgtttagaaagtgattttacatctggtggagtttgtcattcggatcccaagatgacaagtaacatgctcgcctttctgggggaaaatgcagaggtcaaagagatgatgactacatggactctccagaaaggaatccccctgctggtggttaaacaagacgggtgttcactccgactgcaacaggagcgcttcctccagggggttttccaggaagaccctgaatggagggccctgcaggagaggtacctgtggcatatcccattgacctactccacgagttcttctaatgtgatccacagacacattctaaaatcaaagacagatactctggatctacctgaaaagaccagttgggtgaaatttaatgtggactcaaatggttactacatcgttcactatgagggtcatggatgggaccaactcattacacagctgaatcagaaccacacacttctcagacctaaggacagagtaggtctgattcatgatgtgtttcagctagttggtgcagggagactgaccctagacaaagctcttgacatgacttactacctccaacatgaaacaagcagccccgcacttctcgaaggtctgagttacttggaatcgttttaccacatgatggacagaaggaatatttcagatatctctgaaaacctcaagcggttaccttcttcaagtattttaagccagtgattgacaggcaaaagcttggagtgacaagggctcagtctgggacaggatgctccgctcggctctcttgaagctggcctgtgacctgaaccatgctccttgcatccagaaagctgctgaactcttctccc

SEQ ID NO: 49373 - DNA, 385 bp, Homo sapiens; identical to SEQ ID NO: 11004

SEQ ID NO: 49374 - DNA, 829 bp, Homo sapiens
ttttttttttacgttgcttcaaaatatttaatacgtgttagacacgtagaagttacatttttatacaaaaatcaatacaacgaaggagaaaatactgtacaaaaaccttatcagctcccccaacctttatacaacaaagactggagtcaccatatctacaaaaccataaggtctttccacttcgggcttctgtctgtaaactctcattaaacactttttaaaagcactgtgtagtacttctgacctagagcttttaaaaatatatcttttctctataaactccattatttccaagcttgaactcttctgtgaagttcgtcaagctttttctcccctgcggggaagcaaaggaccgttaatacgcccctttcctagagtaatcacaggatataaacgtttcttcattgggagagaaaggtggggagggacagaaggaatccaagtctgtgctcttggctaaatccctctcgtcttaggaaatcctgtgcggaaacgcactcctggccctgaagcgggtctagctttccggtgaggggtaggtgtaaagtccctccctccccggagaacgaatggggaactccccggcccaaaccttttagccgcttccttctccacgcagccggcagaggaaagtccctgtctgcccccaatctcttaaaccctggggaaggagtggtgcattccagaagagcaaaatagtcttaatgccacaagacaaacttacatacacagacatacacaaacacaaaagttaacgatcgtcctcttccaatgagcctcaagctcccaggtctccagataagccagatgcgcccgggggcagtttgcg

SEQ ID NO: 49375 - DNA, 1475 bp, Homo sapiens
cagagtcagtgctcctaactggagtgtacatatgaatgtactcgagggagtcaggagcccatgatgatggatgggggctctctatgcagtcagccaagatgtttaactacgcgggatggaagaacacctgcaacaacatcttcatcgtcttcgccattgtttttatcatcacccgactggtcatcctgcccttctggatcctgcattgcaccctgggtgtacccactggagctctatcctgccttctttggctattacttcttcaattccatgatgggagttctacagctgctgcatatcttctgggcctacctcattttgcgcatgggcccacaagttcataactggaaagctggtagaagatgaacgcagtgaccgggaagaaacagagagctcagagggggaggaggctgcagctgggggaggagcaaagagccggcccctagccaatggccaccccatcctcaataacaaccatcgtaagaatgactgaaccattattccagctgcctcccagattaatgcataaagccaaggaactaccccgctccctgcgctatagggtcactttaagctctggggaaaaaggagaaagtgagaggagagttctctgcatcctccctccttgcttgtcacccagttgcctttaaaccaaattctaaccagcctatccccaggtagggggacgttggttatattctgttagagggggacggtcgtattttcctccctacccgccaagtcatcctttctactgcttttgaggccctccctcagctctctgtgggtaggggttacaattcacattccttattctgagaatttggccccagctgtttgcctttgactccctgacctccagagccagggttgtgccttattgtcccatctgtgggcctcattctgccaaagctggaccaaggctaacctttctaagctccctaacttgggccagaaaccaaagctgagcttttaactttctccctctatgacacaaatgaattgagggtaggaggagggtgcacataaccccttaccctacctctgccaaaaagtgggggctgtactggggactgctcggatgatctttcttagtgctacttctttcagctgtccctgtagcgacaggtctaagatctgactgcctcctcctttctctggcctcttcccccttccctcttctcttcagctaggctagctggtttggagtagaatggcaactaattctaatttttatttattaaatatttggggttttggttttaaagccagaattacggctagcacctagcatttcagcagagggaccattttagaccaaaatgtactgttaatgggtttttttttaaaattaaaagattaaataaaaaatattaaataaaacatggcaataagtgtcagactattaggaattgagaagggggatcaactaaataaacgaagagagtcttttaaaaaaaaaaaaaaaaaaaaaa

SEQ ID NO: 49376 - DNA, 121 bp, Homo sapiens
gagactgcatagggctcggcgtggtggctcacgcctgtgatcccagcaggagttcgagaccaggcaggagaatcactagcagagaatatgtctccccaacccctctcaaaaaaaaaaaaaa

SEQ ID NO: 49377 - DNA, 397 bp, Homo sapiens
  misc_feature (1)...(397): n = a,t,c or g
gcccacaacaggtcattgtaaaaaataagtcattcatttagttaagcagtaactcaaagttttcaaaaactaaaagccaaaacctttcactctttgagacttgctttcccaaacaataagagctaataaagacagcatgaagccaatcaaatctttctcagatattatagacaaatctaataaattttaatcatcttgaccataagatacaacttttgtaaaccttttcataatctttcataatttttttaataagaatgggttaatgatccatgaaaacattgttaatcttacatggggtcccacatgctggtcttgcatcagtgttccttagatattcacgtttactttataggcntgctgtggnggctcgcacctgtaaactcagcactttggc

SEQ ID NO: 49378 - DNA, 1903 bp, Homo sapiens
atttgtgtatggtaatgtccagtatcacatcacccatgttagtcgcgggcagttcaggagatacctgccttgggctttgttctttgttgccttagggcttcagagaaagatcacaacaaaaaatggacactgtcgtttacagctattaagcgatttgattttgtttttttcccaaagagaaaacctacctgccctgtttctgatcccacccctctgctggctagaagcaggtaaccctttcccagccctgcagctgcccacctgggcctccatgccatcctgcccccacctggctggcaaccctggctctccatgtgggccctccggctctgtgtgaagcctcaagtcaggcccagcattgtttccataaggaagtgtggggtgcccagcaggtaaagcacagggaagagagggcagtgggaatgccacctttaggctgcagcaggagccccacactgcccagttttcctccccactgttctacaccaaccaggggagactaacactgtgactctgggattggcaggtgcaacttggagccacttaatttcctggggacgtaagttcttcccaagcttagagcaagctgccctgccaaaggagaccaaaccatgccaaccacgctggcaactgctgctgtccagtccctgtgttttctgaccaccgtcactgtgcaactcatcgcctctgccacttaggaccagggaaagaggctggttttgctcccactcttagttgctgataaagtggggagaaggaaaatgggacactctacagagtttggggaagggagagtaggggagcccatctttgtccagaaagattcatctgtgggtctgtctgttaaacacagctgatttcagtggggctttcccctggccctgggggagcagacactgactgggttgtgggcagaggagccatcctggcggagccctgctgcaggggagctccttcaggagccccatccggacctcttgcactgggctgcctttgcctccatttgccttcctgtatctgcaacaaaccttttaaaagtgttcactcttgctttttccagtatttcggtaatcagcccatcttgcctgtagtacaggatgacattgtcgaatgctctttgtatgtgtgcacacccccttactcccttactgccttcatacacctccacaagtggtacagtattttgtgtcattgtaaaaatcaaaattggctttggatctttgtaatacacctgtacctgaaaaagtaaacaacattcttcaattactagccttcagcttgaaaagacatgctggagaagaaggaagggggaacccataggtgtggcgtggagccaagatgtactattcaactatgtgtttctgtttataaaaaacacataccatggaaccatggtgcttttgttcttagtttttgccgttagatcccttcaaactggaagttccttacaatatctttctcaggaaatattttgggaaatggggtaagagatggcaagtgtgagacgggctgtgtcagaggttgctacgtcatggatacagtgcagttccaagttgccttaggtgtatgtacatatagttaataatgacactgttcatcaccattctaaaatactgttcttccaaccctatcttcaatgaccagtccagaaggggttaagctggattcatttgctctggcatgtgcattcccagcagggtgaagaaaggtttaaattaaagaatttattttctctctcccccttcctctttctcccagtctttgcataggagaatgttagacattcagaaattactgtttctgttttaaattgagtattgatttttttatattgactttgtattgagttctttttgaaagaataacaaaataaaatgcaggatctttgtaaaaaaaaaaaaaa

SEQ ID NO: 49379 - DNA, 2230 bp, Homo sapiens
ttttttttttttttaacaagaatgcagatgccatttatttggtccataagtatagtcgttatttgagttttacaaaacatcgaatataaataacctgaaactgtaacaatacacaaaaattggcttcttacacagacataccaggcggtacaaactgaaaacttgagtaaattaacattgttttacattaatatacatagtgccatctaacatttaaaaacaagtttcaatgcatagcactcgatacttctttgaatctgtttcaatcagttaagagtatgaaaatggttagatctaggctaaaaataattcttcttctagccaaaaataaaggcataatatttataaccaggtatcaactttactaaaccacaatattttgaaactattaatgatacctaagggtatttacattaaaaaggcaacatgcattgtgttgttttatctcatgactggttatgcacacactttgttcaaagggtttttaaaactatattcctactttcaatacagcatactgcaatgtgtctaacagttctagcaaaatgaatgctttcaaagggagcagaatcattttcaagtcactgctgtcaattttttccctttggaacaaaggacataacaatctggttctgcccagataaactaaatagtaagagggttctgtttagaggcatttctgttcaatctaatgctatgacatcatcaagctcttccttctgttctatacgtgacctctttgcactgagattctctttctcatctaatttcctcttgcggcttctctcttcttcactgacgtcggcattatttgaagaatcttcttcatccgaatcaactatgagaacgtcatcttgctcttgagctgtggaggtggagggctgagctccatcatcactgccattggttatgcttttggcagcatcttcagcttgtttgggccccactttttccggggcatcaccaacaacttcaaattcaacgtcctttcctaggtcttcactatgaaggatgttgatcaataaagtatagtcctggaggaagtcatctgcttgaagccggctgccatttctaattccaaattctgacaacttcttgtgattattagcttccgtctctccctcttcggaagatattaggattgttcctttcccatcttcaatttggacatctggtgctaccatagcaaatttttctttcactatcttgtcttgtaaggtgagaacagtcactttatggacattcagccgcacagtcacctctggcttgctggcacatacataacaattggggttgggaggatccagtgcacaaggcacaagaagcttctttcttgggtttggttgtttattcaaaaaaattgttctgcactggtctatttttcctgataaaatcttcaatccttccaatactatcaacccagcaattactgcattagtagtagcaatagcaggaataatgttccctgccattgatttgatatcaaatctactcttcatattcatactgaaaatatgcatcctgaggtttgcagcagaggtgacaaaatccattgcagatgggtcatccttatcccatatgagcctcagctccatcccccttttctgctaaatgaactctcaaagtctcgatgctctttgaaaaaagacgtgcatagctctttacatctagaacctgctggtctttcaggcctaactggggttcattctgttgatctgatgcattcgtttcttctccttgactttgtacttcagcccagtccaacggaactggaggtttccttttccgccatagtttgtccattgtcaacagatacctgatgtcacctttaaaaaagcttggtaaaaagtttaactggatcatatccagttgatttagcccattccttagtagaaatacgtttaatgtcaccatcttcattagatgctctagctctggcttcggcttccgttggttcccaggcagcttcagggtcagctctgtcaggagatacttcttgatcagcatcttcttccccaaacaactggttgaacaagtactttgcccaaacgatgcaatgtataggttctgaaggtgtgttacgaattgtacagccaggaaaggttctctgggtcggcttaggatgacactcataacactcggtcacaccctttttgatagtagttacttgtccaagatacccagctgttccactttcaataagaggaacatcagctgccaggcacattcc

SEQ ID NO: 49380 - DNA, 991 bp, Homo sapiens
ttttttttttgaaaacagaagctctttatgccaaatcacaaggacagacaggggaatgtgggggatggacaggagggagggcctgggcaggctgcctgccttttggcaccttgtgcccaggcgagttcccggacccatccaggagctcttagttcgttcagtcaattccttgacatttgatgtgcctggctcagaactgggtgctggggacatctaggtgcataaagccaggttgcattctgacaggagagagtcaagccaaccggccaggacaggcctgctgctttattcacagatttagatgtcgttccatctgctctcgaagtttgaatttctggatctttcctgaaatggtgagggggtagtttgtgacaaacacgatgtacttcggaatcttgaagtgagagatcttccctttgcagaaagcttttatctcctccaccgtggtctcctccccgtccttcagccgaatgcaggcacaaatctcttcccccatccgatcgtccttcactcccaccacctgcacttcctgcaccttcgggtgtgtgtgaaagaagtcctcgagctctgcggggtagatgttctcaccaccccggatgatcatatccttagagcggcccacgatcttgcagaagccctgctcattcattgtggcgacatctcctgtccaataccacttgtcctgatccactgcttcctctgtcttctgaggctcaccccagtagcccagcatgacgcagtaccctcggatgcacagctccccgggcgtgttcagctttgccagcgtccctgcctccatgttcatgatccgggcctccgtgtgaggcataattctgcccacgctttctgccttctgctccacagtgtcctcagggaagtgcgcgaatgtcacgggactgttctctgtggttccataagcaaccaccaggtccttcatatttatcttgttgatgatggctcggatcaactctggaggtgcaggggacccagc

SEQ ID NO: 49381 - DNA, 481 bp, Homo sapiens
ccctgagagaccacaaatgatgggaactcttgaaaggtctagggcagtagcctccaagataggtcactcctattccctggattcacagccagcaagagcagtagggaagccatggcctcagcaagcttgcaccagggtaacagagttaactgaagcaactggaaaactgataagaacatcccatattggaaagcctcaccctcagtcctttcaaccagcagcagccacacaaaaactaagacctgcttctcagcaaggagtccagatgaagacacaaggtggggcttcaaatccagctctccaaatagggtcccatcccatgtgcaagagctctcagttcaaatccgatcagtccaacccatccacagtcaaacactcccagcctaaacccttccattctgtgccctctcaacctaaatcctctcagacaaaatcctgtcagtcccagccctcccaaactaaaccttctccatgcaaatct

SEQ ID NO: 49382 - DNA, 446 bp, Homo sapiens
gcaaaatgcatagtgtttggtatgaaaggggcagaaaaataacaagattaaatagaccctaatactgtaattcaagtaagaaataattttgcagttttaatttgcacctgaagcgaactgtatgcattttcttccttccttgccctgtcacatgcctgcgtgggcacgtgtgtgcacgtatgtgcgtgaacatgatgtggcctggcttggtgtatccttcagctctgtgtttcctccttcacaagtgtggttttggggagaagtggttgaatgttgcagaggagggagctgctgacctttgtgcctgtaaatggctgtcctctctgcccccagtgtatcgcattaagttcaaggagagctttgctgagatgaacaggggctcgaacgagtggaagacggttgtggggcggtgccatgttcttcatcggtttcaccgcgctcgttat

SEQ ID NO: 49383 - DNA, 864 bp, Homo sapiens
cacatttttccaaaaatatatttatttttaaaaacagaaaatcagatcagttttatagagtcaaattttcaagagacaaaccagagtttggattccagcttagagtgcaagtgaagcatcagtaatctcatgcagaagatttgtctctgcaggaggtacattctgcttgactgcaagcactcaattctctaaatctggtttgtacttctgccatcattttattccattccagcgctctggcatgcaagataatccatctctaaaattcaagacttccaaattgagatgaacggattattgggcttgggttggggtttataaccaatccggatcattgatcatttgttcccggctcttgggatcactgctaagcccaatggctccttctccatcactgcctcctacaacttccacatcttccttctgtttcttacgggtctccaggtcctttcggaatgttctcaaactcttcaatgtcatcaagctttagctctaggcgtgttggtttccgtctcagcatactgaagtcaacactaagggccaaacccagtgaactattagcaattcacaggattatcctccgcgtccaaacagatcttaaatgtgtacgtcattcattaaacaaacacttcttgtgttccagctacagagttaaaaggtacagtcataatctcttttcaagccggcctagccccttcccggaacctcggctcccccccaacgaaactactgctaagccaactggactacacttcccagactgcttggagcctctctctccgcagaacctcgtcttccgcgagcttttcctggaggttctaggagggatgcccctcaatgccacgacgccatttcctactacgc

SEQ ID NO: 49384 - DNA, 1595 bp, Homo sapiens
tgagatccacgccctggcatcggccagcaagcccctggcctcgtggaccacccagcaaggaattcaggaatgccgggaggcgtgtggaggacacggctatctggccatgaaccggttgggtgtccttagagatgacaacgatcccaactgcacatacgaaggtgacaacaacatcctgctgcagcagacaagcaactatttgctgggtctcctggcacaccaggtccacgatggagcttgcttccgcagtccgctgaagtcagtggactttctggacgcctatcccggcatccttgaccagaagtttgaggtctccagtgttgccgactgcttggactctgcagtcgccctggcagcatacaagtggctggtttgctacctgctccgagagacttatcaaaaattaaaccaagagaaaagatcaggaagcagtgactttgaagcaaggaacaaatgccaggtgtcccacggccgtccgttggcgcctggccttcgtggagctcacggtggtccagaggttccacgagcacgtgcaccagccttccgtgccgccctcgctgccgggcccgtgctggggccggctcagtgctctgtacgccctgtggtccctgagccgccacgcggccctgctctaccgaggaggatacttctccggtgagcaggcgggagaagtgttggagagcgccgtcctggctttgtgttcccagctgaaagacgatgcagttgccctggtagacgtgatcgctcctcctgactttgttctggactcaccgattggcagagccgacggcgagctctacaaaaacctctggggcgctgtcctgcaggaaagcaaggtgttggagcgggcatcctggtggccagagttttctgtgaacaaacctgtcataggaagtctgaaatcgaagctctagtgggactggcacacattcagccaagtctaatgaaacgaagggaactaatcagacgtggacctcaacttctgattccagaacacgccggagattgctgctgctttctgagcccgcacctgtgcgcctaaactgctgattggcctcaactgcccaggcggacgggagggaggcacccggccggctggactaatctgggatcgcggtgatttgcagcgtggaaaagaaatgcagatgatcatgtctacctgatgcgccgtgggttttttgataattagaatttcgcacattcagttttcagggttcagctcctttctctaaagtaaacagcccattgtcagggatcttctggtcagacaacctgtgattcatctagattttttaccgagctccacttcattgagaagtcaatgatgccagtctggttctttgtcaactctccctcgggtttgttcacataattgaattatgtcataaccttattaatttgcacatagatcatctgaatgtcgtggtttaagacttaaggaggaacatctgtttgattactttcttttgtggaactggaaatttccatcgaggaaatgtttttttaaaaagtctaatgatttgaatgggcaattcagtctccaaccgcccccctcgccaggccgccagttatatacaaatcactttattggtaaa

SEQ ID NO: 49385 - DNA, 1441 bp, Homo sapiens
gcccagcagatgaggaagtggcaggcaggcaggctggccccggggacttctctctggccctgctccctccgagcgctccgccgttgcccgcctggcccctacggagtccttagccaggatggaggctgttgtgaacttgtaccaagaggtgatgaagcacgcagatccccggatccagggctaccctctgatggggtcccccttgctaatgacctccattctcctgacctacgtgtacttcgttctctcacttgggcctcgcatcatggctaatcggaagcccttccagctccgtggcttcatgattgtctacaacttctcactggtggcactctccctctacattgtctatgagttcctgatgtcgggctggctgagcacctatacctggcgctgtgaccctgtggactattccaacagccctgaggcacttaggatggttcgggtggcctggctcttcctcttctccaagttcattgagctgatggacacagtgatctttattctccgaaagaaagacgggcaggtgaccttcctacatgtcttccatcactctgtgcttccctggagctggtggtggggggtaaagattgccccgggaggaatgggctctttccatgccatgataaactcttccgtgcatgtcataatgtacctgtactacggattatctgcctttggccctgtggcacaaccctacctttggtggaaaaagcacatgacagccattcagctgatccagtttgtcctgggtctcactgcacatctcccagtactactttatgtccagctgtaactaccagtacccagtcattattcacctcatctggatgtatggcaccatcttcttcatgctgttctccaacttctggtatcactcttataccaagggcaagcggctgccccgtgcactttcagcaaaatgggagctccaggtattgccaaggtcaaggccaactgagaagcatggcctagataggcgcccacctaagtgcctcaggactgcaccttagggcagtgtccgtcagtgccctctccacctacacctgtgaccaaggcttatgtggtcaggactgagcaggggactggccctcccctccccacagctgctctacagggaccacggctttggttcctcacccacttcccccgggcagctccagggatgtggcctcattgctgtctgccacttccagagcttgggggctaaaagggctgtacagttatttccccctccctgccttaaaacttgggagaggagcactcagggctggccccacaaagggtctcgtggcctttttcctcacacagaagaggtcagcaataatgtcactgtggacccagtctcactcctccaccccacacactgaagcagtagcttctgggccaaaggtcagggtgggcgggggcctgggaattacagcctgtggaggctgcttac

SEQ ID NO: 49386 - DNA, 2512 bp, Homo sapiens
gggcacgggcccgccggccttcaccgaggtggacaacccggcctcctttgctgacagcatgctggtgagggccgtaaactacaattactactattcattgaatgcctggctgctgctgtgtccctggtggctgtgttttgattggtcaatgggctgcatccccctcattaagtccatcagcgactggagggtaattgcacttgcagcactctggttctgcctaattggcctgatatgccaagccctgtgctctgaagacggccacaagagaaggatccttactctgggcctgggatttctcgttatcccatttctccctgcgagtaacctgttcttccgagtgggcttcgtggtcgcggagcgtgtcctctacctcccccagcgttgggtactgtgtgctgctgacttttggattcggagccctgagcaaacataccaagaaaaagaaactcattgccgctgtcgtgctgggaatcttattcatcaacacgctgagatgtgtgctgcgcacggcgaagtggcggagtgaggacagcttttcagaagtgctctgtctgtgtgtcccctcaatgctaaggttcactacaacattggcaaaacctggctgataaaggcaaccagacagctgccatcagatactaccggggagctgtaagattaaatcccaagtatgttcatgccatgaataatcttgggaatatcttaaaggaaggattggctacaggaagctgaggagctgctgtctttggctgttcaaatacagccagactttgccgctgcgtggatgaatctaggcatagtgcagaatagcctgaaacggtttgaagcagcagagcaaagttaccggacagcaattaaacacagaaggaaatacccagactgttactacaacctcgggcgtctgtatgcagatctcaatcgccacgtggatgccttgaatgcgtggagaaatgccaccgtgctgaaaccagagcacagcctggcctggaacaacatgattatactcctcgacaatacaggtaatttagcccaagctgaagcagttggaagagaggcactggaattaatacctaatgatcactctctcatgttctcgttggcaaacgtgctggggaaatcccagaaatacaaggaatctgaagctttattcctcaaggcaattaaagcaaatccaaatgctgcaagttaccatggtaatttggctgtgctttatcatcgttggggacatctagacttggccaagaaacactatgaaatctccttgcagcttgaccccacggcatcaggaactaaggagaattacggtctgctgagaagaaagctagaactaatgcaaaagaaagctgtctgatcctgtttccttcatgttttgagtttgagtgtgtgtgtgcatgaggcatatcattaatagtatgtggttacatttaaccatttaaaagtcttagacatgttattttactgatttttttctatgaaaacaaagacatgcaaaaagattatagcaccagcaatatactcttgaatgcgtgatatgatttttcattgaaattgtattttttcagacaactcaaatgtaattctaaaattccaaaaatgtcttttttaattaaacagaaaaagagaaaaaattatcttgagcaacttttagtagaattgagcttacatttgggatctgagccttgtcgtgtatggactagcactattaaacttcaattatgaccaagaaaggatacactggcccctacaatttgtataaatattgaacatgtctatatattagcatttttatttaatgacaaagcaaattaagtttttttatctcttttttttaaaaacaacatactgtgaactttgtaaggaaatatttatttgtatttttatgttttgaatagggcaaataatccgaatcgaggaatggaagttttaacatagtatatctatatgcttttccccatagggaagaaattgactcttgcagtttttggatgctctgacttgtgcaatttcaatacacaggagattatgtaatgtaatatttttcataagcggttactatcaattgaaagttcaagccatgctttaggcaagagcaggcagcctcacatctttatttttgttacatccaaggtgaagagggcaacacatctgtgtaagctgctttttagtgtgtttatctgaaggccgttttccattttgcttaatgtaactacagacattatccagaaaatgcaaaattttctatcaaatggagccacattcggggaattcgtggtatttttaagaattgagttgttcctgctgttttttatttgatccaaacaatgttttgttttgttcttctctgtatgctgttgacctaatgatttatgcaatctctgtaatttcttatgcagtaaaattactacacaaactagcatgaaaatgtcatattgccttcttaatcaattattttcaagtagtgaactttgtatcctcctttaccttaaaatgaaatcaaactgaccaaatcaaa

SEQ ID NO: 49387 - DNA, 1806 bp, Homo sapiens
  misc_feature (1)...(1806): n = a,t,c or g
gaggagggaagagaagagcaaggggaggtactgaggggcagatggctccaggagaggcagctcccctgcccaagggtccttgggcagaccccagctgttgtctgcccagtagaagtgggtgggggtaggaggggatagggtgtccttgggaacaatggatcccagcttagccccaaagaccaaccaaagagccagccagagtaagctggacctgcaacctgcctgagccccgtggcctctcagctctgcggccaccccgttccctccccagcttcctgcccaaagagccccacattcaagccaacttgagggaagggggcgtctcgtcagctggtccctgctagggagctattgatgtgcaatattagaaaggagacatgaaaaaaggagaaaaggaaagacagaagtgtatatatatattatttaaacaaacaaaaagaaggtgcgttactatttttttttcacccgggaaagaggtgagaggatgggaaggagcagccaggcgtgggaagcggcgagatcctcgggctgggggtgcccacgtttgctacctcccactgtgaaatcgctggtgctcacaattgtctctcacagtgtatgtgattttttttaaggaaaaaaaaaaatccctatttaagattctgaaggtgctaccattattttgccacagactttgaagaaacttttggatgtggggcatcatccgcatctttctctctcctccaaatgacaaagtttggggaatttttgaattttcctagcatcgcccttgtgctcatcaggtaatctgctaaggaggnnnnnnnnnnnnnnnnnnnnnnnnnnnnnnnnnnnnnnnnnnnnnaaancaaaaacaaaaaccctaccagaaaccagaagtagagagatttaccatataacttatggactttgaaatgtctgtccttttaaggcagcagggaggcctgggtgcgaagatggtctggcttggcccttcacggtcctggagggaggtgaggctggccttggaaggcgtgccctggagaggtcttgggtgaaaacttgaccttgaagaaaccaatcacaaaagccggcgttgggtcagggctaggcttagaggtgaagcatcaacatggaaccatctcaggaagccgtcatcgcctcttccgaggtcctcacttccagggagcctgtccttgcaagatgcaatcattcgttcctgctttttcattgttcattaaatttcttgtaagaaacccatttgttcatttagctccaagtgtaaatttgggtcaagggagaccagaataataatgggaatctcggagttcgacaccatagtgacgtttcagcgtcctctgaattgtgctacatcagcgaacaagtcggcgcttgaattggattttgaggttattttaaccctggaattatttttatagaaggggaaaatgtatgtgaaaagtctcctaattgtgtaatttctctcctaaagttgtgtctctttgggaattggatttgatttttattatttaatacctcactttggcccgtcccccctcccaacacttctgtatccgtcgccctgccggccccagccttggagctctgcgtggaagtgcgtgtttgtagcagctcgggcctcatctcagcgctcggatccctcctgctgccagaatccactggcctctgtctcattcttgggttttcctgctgtcttcgtttacgtctctgtccacatgtcagtgtattaaaaccccaatgggttccgtttctccttttcccctctggattttaaataaatatttaaaactgaggcaatggaatgac

SEQ ID NO: 49388 - DNA, 913 bp, Homo sapiens
ggatccgcggcagcagcggctgcttgagatctgtttctggggcctctggcggtggcggcctggggcggcgcgacggctggtgcgcaggtacactgatgctgaagtactatgagccttcggaacttgtggagagactacaaagttttggttgttatggtccctttagttgggctcatacatttggggtggtacagaatcaaaagcagccctgttttccaaatacctaaaaacgacgacattcctgagcaagatagtctgggactttcaaatcttcagaagagccaaatccaggggaagtagcaggcttgcaatcttcaggtaaagaagcagctttgaatctgagcttcatatcgaaagaagagatgaaaaataccagttggattagaaagaactggcttcttgtagctgggatatctttcataggtgtccatcttggaacatactttttgcagaggtctgcaaagcagtctgtaaaatttcagtctcaaagcaaacaaaagagtattgaagagtgaagtaaaataaatatttggaattactaatttgtcattaaatcattctatgctgattagcttcataaacattgaactttttgattttatagccacaatgctgcatattcatactttaattcctaaagaataatttttaatgttaaaacgtgataatgcaataaatagaaaaatgtggtttacaaaataaaaacggtcttcactagttaccacctgaagtaagatgtctcgtttggaagctaagaagccatcattgtgtaagagtgaaccactgacaactgagagagtcaggaccacactttctgtcttgaaaagaattgtaacatcatgctatggcccctcaggtaggctgaagcagctgcacaatggctttggaggttacgtgtgtacaacctcacagt

SEQ ID NO: 49389 - DNA, 610 bp, Homo sapiens; identical to SEQ ID NO: 11080

SEQ ID NO: 49390 - DNA, 7857 bp, Homo sapiens
gaggctcctcggtccttcagcacccctcggcccgacgcacccacgcccctcaccccccgagagccgaaaatggacccaagtggggtcaaagtgctggaaacagcagaggacatccaggagaggcggcagcaggtcctagaccgataccaccgcttcaaggaactctcaacccttaggcgtcagaagctggaagattcctatcgattccagttctttcaaagagatgctgaagagctggagaaatggatacaggaaaaacttcagattgcatctgatgagaattataaagacccaaccaacttgcagggaaagcttcagaagcatcaagcatttgaagctgaagtgcaggccaactcaggagccattgttaagctggatgaaactggaaacctgatgatctcagaagggcattttgcatctgaaaccatacggacccgtttgatggagctgcaccgccagtgggaattacttttggagaagatgcgagaaaaaggaatcaaactgctgcaggcccagaagttggtgcagtacttacgagaatgtgaggacgtgatggactggatcaatgacaaggaagcaattgttacttctgaagagctgggccaggatctggagcatgtagaggttttacagaagaaatttgaagagtttcaaacagatatggctgctcatgaagaaagagttaatgaagtgaaccagtttgctgccaaactcatacaggagcagcaccctgaggaggaactgatcaagactaagcaggatgaagtcaatgcagcctggcagcggctgaagggcctggctctgcagaggcaggggaagctctttggggcagcagaagttcagcgctttaacagggatgtggatgagactatcagttggattaaggaaaaggagcagttaatggcctctgatgattttggccgagacctggcaagtgttcaggctctgcttcggaagcacgagggtctggagagagatcttgctgctctagaagacaaggtcaaagccctgtgtgctgaggctgaccgcctgcaacagtcccaccctctgagtgcaacacagattcaagtgaagcgagaggaactgattacaaactgggagcagatccgcaccttggcggcagagagacatgcacggctcaatgattcatacaggcttcaacgcttccttgctgacttccgtgacctcaccagctgggtgactgagatgaaagccctcatcaatgcagatgagcttgccagtgatgtggctggggctgaagccctgctagatagacaccaagagcacaagggtgaaattgatgcccatgaagacagcttcaaatctgcagatgaatctggacaggcactgcttgctgctggtcactatgcctcagatgaagtgagggagaagctgaccgtcctttccgaggagagagcggcgctgctggagctgtgggagctgcgcaggcagcagtacgagcagtgcatggacctgcagctcttctaccgggacactgagcaggtggacaactggatgagcaagcaggaggcgttcctgttgaatgaagacttgggagattccttggatagtgtggaagcgcttcttaagaagcacgaagactttgagaaatcccttagtgcccaggaggaaaagattacagcattagatgaatttgcaaccaagctaattcagaacaaccactatgcaatggaagatgtggccactcgccgagatgctctgttgagccgccgcaatgcccttcacgagagagccatgcgtcgccgggcccagctagccgattctttccatctgcagcagtttttccgtgattctgatgagctcaagagttgggtcaatgagaagatgaaaactgccacagatgaagcttataaagatccatccaacctacaaggaaaagtacagaagcatcaggcttttgaggctgagctctcagcaaaccagagccgaattgatgccttggagaaagctggccaaaagctgattgatgtcaaccactatgccaaggatgaagtggcagctcgtatgaatgaggtgatcagtttgtggaagaaactgctagaggccactgaactgaaaggaataaagcttcgtgaagccaaccagcaacagcaatttaatcgcaatgttgaggatattgaattgtggctatatgaagtagaaggtcacttggcttcggatgattacggcaaagatcttaccaatgtgcagaacctccagaagaaacatgccctgctagaggcagatgtggctgctcaccaggaccgaattgatggcatcaccattcaggcccgccagttccaagatgctggccattttgatgcagaaaacatcaagaagaaacaggaagccctcgtggctcgctatgaggcactcaaggagcccatggttgcccggaagcagaagctggccgattctctgcggttgcagcagctcttccgggatgttgaggatgaggagacgtggattcgagagaaagagcccattgccgcatctaccaacagaggtaaggatttaattggggtccagaatctgctaaagaaacatcaagccttacaagcagaaattgctggacatgaaccacgcatcaaagcagttacacagaaggggaatgccatggtggaggaaggccattttgctgcagaggatgtgaaggccaagcttcacgagctgaaccaaaagtgggaggcactgaaagccaaagcttcccagcgtcggcaggacctggaggactctctgcaggcccagcagtactttgctgatgctaacgaggctgaatcctggatgcgggagaaggaacccattgtgggcagcactgactatggcaaggacgaagactctgctgaggctctactgaagaaacacgaagctttgatgtcagatctcagtgcctacggcagcagcatccaggctttgcgagaacaagcacagtcctgccggcaacaagtggcccccacggatgatgagactgggaaggagctggtcttggctctctacgactatcaggagaagagtccccgagaggtcaccatgaagaagggagatatccttaccttactcaacagcaccaacaaggattggtggaaagtggaagtgaacgatcgtcagggttttgtgccggctgcgtacgtgaagaaattggaccccgcccagtcagcctcccgggagaatctcctggaggagcaaggcagcatagcactgcggcaggagcagattgacaatcagacacgcataactaaggaggccggcagtgtatctctgcgtatgaagcaggtggaagaactatatcattctctgctggaactgggtgagaagcgtaaaggcatgttggagaagagttgcaagaagtttatgttgttccgtgaagcgaatgaactacagcaatggatcaatgagaaggaagccgctctgacaagtgaggaggtcggagcagacttggagcaggttgaggtgctccagaagaagtttgatgacttccagaaggacctgaaggccaatgagtcacggttgaaggacattaacaaggtagctgaagacctggagtctgaaggtcttatggcagaggaggtgcaggctgtgcaacaacaggaagtgtatggcatgatgcccagggatgaaactgattccaagacagcctccccgtggaagtctgctcgtctgatggttcacaccgtggccacctttaattccatcaaggagctgaatgagcgctggcggtccctacagcagctggccgaggaacggagccagctcttgggcagcgcccatgaagtacagaggttccacagagatgctgatgaaaccaaagaatggattgaagagaagaatcaagctctaaacacagacaattatggacatgatctcgccagtgtccaggccctgcaacgcaagcatgagggcttcgagagggaccttgcggctctcggtgacaaggtaaactcccttggtgaaacagcagagcgcctgatccagtcccatcccgagtcagcagaagacctgcaggaaaagtgcacagagttaaaccaggcctggagcagcctggggaaacgtgcagatcagcgcaaggcaaagttgggtgactcccacgacctgcagcgcttccttagcgatttccgggacctcatgtcttggatcaatggaatacgggggttggtgtcctcagatgagctagccaaggatgtcaccggagctgaggcattgctggagcgacaccaggaacaccggacagaaatcgatgccagggctggcactttccaggcatttgagcagtttggacagcagctgttggctcacggacactatgccagccctgagatcaagcagaaacttgatattcttgaccaggagcgtgcagacctggagaaggcctgggttcagcgcaggatgatgctggatcagtgccttgaactgcagctgttccatcgggactgtgagcaagctgagaactggatggctgcccgggaggccttcttgaataccgaagacaaaggagactcactggacagcgtagaggctctgatcaaaaaacatgaagactttgacaaagcgattaacgtccaggaagagaagattgctgctctgcaggcctttgccgaccagctcatcgctgccggccattatgccaagggagacatttctagccggcgcaatgaggtcttggacaggtggcgacgtctgaaagcccagatgattgagaaaaggtcaaagctaggagaatctcaaaccctccaacagttcagccgggatgtggatgagattgaggcttggatcagtgaaaaattgcaaacagcgagtgatgagtcgtacaaggatcccaccaacatccagctttccaagctgctgagcaagcaccagaagcaccaggcttttgaagcagagctgcatgccaacgctgaccggatccgtggggttatcgacatgggcaactccctcattgaacgtggagcctgtgccggcagtgaggatgctgtcaaggcccgcctggctgccttagctgaccagtggcagttcttggtgcaaaagtcagcggaaaagagccagaaactgaaagaagccaacaagcagcagaacttcaacacagggatcaaggactttgacttctggctgtctgaggtggaggccctgctggcatccgaagattatggcaaagacctggcttctgtgaacaacctgctgaaaaagcatcaactgctggaagcagatatatctgcccatgaggatcgcctgaaggacctgaacagccaggcagacagcctgatgaccagcagtgccttcgacacctcccaagtaaaggacaagagggacaccatcaacgggcgcttccagaagatcaagagcatggcggcctcccggcgagccaagctgaatgaatcccatcgcctgcaccagttcttccgggacatggatgacgaggagtcctggatcaaggagaagaagctgctggtgggctcagaggactacggccgggacctaactggcgtgcagaacctgaggaagaagcacaagcggctggaagcagaactggctgcgcatgagccggctattcagggtgtcctggacactggcaagaagctgtccgatgacaacaccatcgggaaagaggagatccagcagcggctggcgcagtttgtggagcactggaaagagctgaagcagctggcagctgcccggggtcagcggctggaagagtccttggaatatcagcagtttgtagccaatgtggaagaggaagaagcctggatcaatgagaaaatgaccctggtggccagcgaagattatggcgacactcttgccgccatccagggcttactgaagaaacatgaagcttttgagacagacttcaccgtccacaaggatcgcgtgaatgatgtctgcaccaatggacaagacctcattaagaagaacaatcaccatgaggagaacatctcttcaaagatgaagggcctgaacgggaaagtgtcagacctggagaaagctgcagcccagagaaaggcgaacgtggatgagaactcggccttccttcagttcaactggaaggcggacgtggtggagtcctggatcggtgaaaaggagaacagcttgaagacagatgattatggccgagacctgtcttctgtgcagacgctcctcaccaaacaggaaacttttgacgctgggctgcaggccttccagcaggaaggcattgccaacatcactgccctcaaagatcagcttctcgccgccaaacacgttcagtccaaggccatcgaggcccggcacgcctccctcatgaagaggtggagccagcttctggccaactcagccgcccgcaagaagaagcttctggaggctcagagtcacttccgcaaggtggaggacctcttcctgaccttcgccaaaaaggcttctgccttcaacagctggtttgaaaatgcagaggaggacttaacagaccccgtgcgctgcaactccttggaagaaatcaaagctttgcgcgaggcccacgacgccttccgctcctccctcagctctgcccaggctgacttcaaccagctgggccgagctggaccgccagatcaagagcttccgcgtagcctccaacccctacacctggtttaccatggaggccctggaggagacctggaggaacctacagaaaatcatcaaggagagggagctggagctgcagaaggaacagcggcggcaggaggagaacgacaaggttgcgccaggagtttgcccagcacgccaacgccttccaccagtggatccaagagaccaggacatacctcctcgatgggtcctgtatggtggaagagtcggggaccctcgaatcccagcttgaagctaccaaacgcaagcaccaggaaatccgagccatgagaagtcagctcaaaaagatcgaggacctgggggccgccatggaggaggccctcatcctggacaacaagtacacggagcacagcaccgtgggcctcgcccagcagtgggaccagctggaccagctgggcatgcgcatgcagcacaacctggagcagcagatccaggccaggaacacaacaggtgtgactgaggaggccctcaaagaattcagcatgatgtttaaacactttgacaaggacaagtctggcaggctgaaccatcaggagttcaaatcttgcctgcgctccctgggctatgacctgcccatggtggaggaaggggaacctgaccctgagttcgaggcaatcctggacacggtggatccgaacagagatggccatgtctccttgcaagaatacatggctttcatgatcagccgcgaaactgagaacgtcaagtccagcgaggagattgagagcgccttccgggccctcagctcagagggaaagccttacgtgaccaaggaggagctctaccagaacctgacccgggaacaagccgactactgcgtctcccacatgaagcccttacgtgggacggcaagggccgcgagctccccaccgcgttcgactacgtggagttcacccgctcgcttttcgtgaactgagccactccctgggtcacccacccctcgctgcttgccctgcgtcgccttgctgcatgtccgctcctctgtgtgctctcactttccactgtaaccttaagcctgcttagcttggaataagacttaggagaaaatggtgcttcactaacccgcttccggtccagtcacaatcatcatgtcactgtggggacccagatctgtgtcttgaagcagctgccctcattccgacttcagaaaatcgaagcagctggctcctccccttgttctctctcccaccctcccccaaatctgttttcatgtaaaaagacaaataaatgatgacttcccccaaaaaaaaaaaaaaaaaagttttg

SEQ ID NO: 49391 - DNA, 442 bp, Homo sapiens
  misc_feature (1)...(442): n = a,t,c or g
gttttttgtattgtctttggttttagtgtcagagtaaaatcagttttataaaataaatagggaagtgttacatctattttctgcaaaagatggtctagaattggtgttcattccttttttaaacgtctggtagaattccgcagtgaaaccatttggacctagaggtttcgtttttggggagttttaaaactatgaattcaatttccgttgtagtttatagggctattcaatttttttcttttttgtgagacgtagtttcactcttgttgcccaggctggagtggnaagggtggcctcctcgggtcactgcaacctctggcctcctggggttcaaagcgattttcctggccttaagcctcccgaagtaagcccnggaattacanggctncccgggtaaccanggccccaggctaaactttttttgggaatttttcccaggtta

SEQ ID NO: 49392 - DNA, 386 bp, Homo sapiens
gatttaaagtaaaataagacaggtgtgaaagacatacattgtatgattccattcatatgcaagtccagagcatgtaaagctatatagaaagtcagttcgtggttatgtaggcctaggatgtagatcggtggggggcagggagtgatagctaaaggacaaggggttttttttcttcttcattttttgagatggagtctcactctgtcacccaggctggagtgcagcggcacaatcttggctcactgcaacctccgcctctccggttcaagcgattctcctgcttcagcctctcatgtagctgggatcacatgtgtgccaccatgcccagctgatttttgtatttttagtagaggcggggtttcaccatgttgccaggctggtctcga

SEQ ID NO: 49393 - DNA, 1729 bp, Homo sapiens
tttttttttataaatgtttctaagaaaagtaaaagctcttttgaggcacaagataaagaggtttagctaatgaggagggtaacgaacctaactggaaaagtactgctaagggacatataataagaggtagcagattcagagagttggaggaaagtcactgaaatgatgaagttcttaatcttattatctctcacaaacccaaaataaatttaaaataattctaagtgattgaaaacatgaataaagaagtattttctattcatggaacaaatttcaaggtgatacaaatacagaaaacccacaagtactagcactaaaattataatgacattatttctataataaaaatttatgtcatattcttataaaggaaataattaaactagtctggaagatgctattaccttttagggatctgttttagcactgcagctcagaaaacagaaaggatttgtttaaggaaagtagagctggagaccacacaattctctgattggccaaactctgcatgagtcagccaggtgctccctcctcaccaggtgatctagtggggaagagatggggtagcccatggcatgggaaggaaaggaaaaacctgacatgctgttttcatgtctgcaacatgatagtctgtctgtctctttatgtgaacatcatcagtcagatgttctacctttttataacttcaaaatagttttaaaaacagcgtcggtggccccttattagataactgagtgtacatgaattttcaaatttgaaatctataaaaattttactgttctaaatgatagcagttactcagctaaacacagacatggaattgttgagactacaaaaccagccagcaaagctccccattgctttcaccaggacttgcaaaggcagcaaggattaaacagccagaaacagtgtaagagggctagagacttcatactttcaaatttagttggtgttctataaaaactgaagtaagaaaagctagccagatttaaaggagggaaaaaaactacaaaagaggataactatttttaggaaaaagcttatcaacagcatatagtagacactatgtaaacacctgatataatctagcagcaatgaatccccaaacatttatgtgtatatttactcaggagacaataagattacaaaggagataaaaggagaaaaaaaatgattaaatgctccaaaaattttgtttgttttttttgtttgtttttaaagtctacaggtaagcagacatttctatacatgtcctggtcactctttctaaagtatttataattaggttattgaccatgtcttggatattgttggcagtttaaataataccctcatccgtaggtatacacagaaagactgttttctttataacaaaaaatactataaagaaagagataatggaaataaggcctataatgaagacagaatcactaacactgtcagaattaactgatacagagaagaaaagattttttcttggaaaaggcattaattttgcagatcactgggatactatgtacatctgcaaagctaaatagaacctcagaggtccaaatagggcaatgtcatttcactggtcagatcaagcccagataagtaatcacagaaaaccggaagtacacttttcatagattttttttaaaaacactggctgaacaaaatagtgtataaattaatgtaagaaaggcaactgttagtggccagttaatagatactcgttttttttttc

SEQ ID NO: 49394 - DNA, 716 bp, Homo sapiens
  misc_feature (1)...(716): n = a,t,c or g
cgattggagtcaactcaatgtgctcaaagtaagcgtgagcggagaggatctggagccgcttcagtcgctccctgaagaaaagaagagtcggggacctcctagccagttacattccagaggatgaggcgctgatgcttcgggatggacgctttgcttgtgccatctgcccccatcgaccggtactggacaccctggccatgctgactgcccaccgtgcaggcaagaaacatctgtccagcttgcagcttttctatggcaagaagcagccgggaaaggaaagaaagcagaatccaaaacatcagaatgaattgagaagggaagaaaccaaagctgaggctcctctgctaactcagacacgacttatcacccagagtgctctgcacagagctccccactattaacagtttgctgccgccggaagtacagaggtcaaactccaaagtgggaagatcagtagggaacctgaacntgcggcttgccacaggccgaggagtcagcaactgtctcagcccctgcacccatgagccccacaagaagacgagccctggaccattatctcacccttcgaagctctggatggatcccagatggacgaggtcgatgggtaaaagatgaaaatgttgagtttgactctgatgaggaggaaccacctgatctccccttggactgatacccttttcccattcattcacaaataaattacaatgggtgctgag

SEQ ID NO: 49395 - DNA, 1420 bp, Homo sapiens
cttcgttgcctggactctggtttccgccctggagcaagccggggcctggtcggcagctgggccgccatggagtccacgctgggcgcgggcatcgtgatagccgaggcgctacagaaccagctagcctggctggagaacgtgtggctctggatcacctttctgggcgatcccaagatcctctttctgttctacttccccgcggcctactacgcctcccgccgtgtgggcatcgcggtgctctggatcagcctcatcaccgagtggctcaacctcatcttcaagtggtttctttttggagacaggcccttttggtgggtccatgagtctggttactacagccaggctccagcccaggttcaccagttcccctcttcttgtgagactggtccaggcagcccttctggacactgcatgatcacaggagcagccctctggcccataatgacggccctgtcttcgcaggtggccactcgggcccgcagccgctgggtaagggtgatgcctagcctggcttattgcaccttccttttggcggttggcttgtcgcgaatcttcatcttagcacatttccctcaccaggtgctggctggcctaataactggcgctgtcctgggctggctgatgactccccgagtgcctatggagcgggagctaagcttctatgggttgactgcactggccctcatgctaggcaccagcctcatctattggaccctctttacactgggcctggatctttcttggtccatcagcctagccttcaagtggtgtgagcggcctgagtggatacacgtggatagccggccctttgcctccctgagccgtgactcaggggctgccctgggcctgggcattgccttgcactctccctgctatgcccaggtgcgtcgggcacagctgggaaatggccagaagatagcctgccttgtgctggccatggggctgctgggccccctgggactggctgggccacccccctcagatcagcctcttctacattttcaatttcctcaagtacaccctctggccatgcctagtcctggccctcgtgccctgggcagtgcacatgttcagtgcccaggaagcaccgcccatccactcttcctgacttcttgtgtgcctccctttcctttccctcccacaaagccaacactctgtgaccaccacactccaggaggcagccccatccccttccagcccctaagtaggccctcccctccctaaatctgcttccgcaccacctggtcttagccccaaagatgggccttctctctcccagataagttggtcctccctctgcctttcctctcaagcccccaaagagcaaaggcaacagcaagaccagcgggttcttgcaacactgtgaggggcagccagggcggccccaataaagcccttgaatactttgaaaaaaaaaaaa

SEQ ID NO: 49396 - DNA, 1610 bp, Homo sapiens
ttttttcttttttttaaaaccaaacacatttccatttagtgacaggaatttaagcaaggacctgaagtagaatcaactgattcacacagtagtaaatacaaagtagaacaatgatcttggcttcgctgtctggttcagtggtctgctggaatgcaatacacaagttaagtcacactgcagactgttttctagctgtggccgctggatgccacttctagcatagtagaactatgttaggaggaatgggaaaagtgagcaccacttctcaccatgttcccccctcctgctgccagtctctgctcccatgttggatgcagcagagatcacccaccagttggcccaggacagaccaataggaagggtccaatcactctaactacagccgaactcacctccacaacagtctctgtggctctagcctggactcctttacaggaatccagctctggcagtggcagctggagagggtaatagggcctcctgctgaatgaaggaagttgggtgaatgaatgggtgagctgcagggttcacttgcaaagggaccaggagtgataaggaaacaacaactcattcagggcagctgcttttgacctctaactcccaaacctgcctgttgcatgaggggaagccatctcccatgggagcgaagttaatggggtgggaggctatattctcactattgagtctttccaggagtctcaaggcacaaggctcctggtttcttactctcaaccaccccctacactctttatactctcactccttgtgcttcttcttgtgcttcttcttctttttcttcttctttgctgccttgctgtcttttgatgtgtgccttgccctcttgcctgtatcactctcagagtctgagctgtcagagtcagatgacttcctatctctatgtttctttttcttcttctccttctttctttttctagaaggattccttgtagggtcaggcttctcaaactctgctgactttgcctcttccttttcctcttcctcatcaggtatcagagagtatttagtcccacctggttgcatgaaacaatcttttgcaaagtggcctttacagccacacttcttgcaggtagtgttcaagacagcctcaagggtgatcttctgcccagtgtaatcctggaaggatcgcctccgcctctcttcttgctcaatgataacattgttgggatcaaggtctttcccagtcccttgattgacaaccttcatggagagggatacttttattctatcatttttcatctctcggccaataagcttcacccacactttatctccaacatctactatctcagagggcttatccacccgacaggatgacatatgagttcgatggaccagaccttgcttccgacaggcctgggattttgataaaggccccatagtctgtcaccatagcaacctctccttggaaaatagtgtagagagcaggcaagttttccatggtctcaggccttcctgaattcatccttaatattctatggctcctccatttctcttctattaaagctaatacaagtgtctaggcgtcagctccaggtccccgagtcgctgcgctgaactaaacgccgaccccagtcagccagcgcgtttcc

SEQ ID NO: 49397 - DNA, 781 bp, Homo sapiens
ggaattttcttggaggccgaggccctgcgcctctgtctgcacccaaggcgaccgcccagcttacccccggctcttctgagcacagggaggcctcccagcaaagcctgaaccctctaagtttagctgcaggcttcgaaccccgaccgtccccgccgagccttgggctgctgaggtggggatgaactgggcgaaagacacttgggagttaggaagaaacaaacaagcagggaagtgaccaggagacaaggtgagactttgcccggctcaggtctgaactgagtgttggagataaccacagttaacaaaataaacaaaattcttcgcccccgtggagctgttagcaaccctggtgcctgggaagcctgggaagaggctcgggtttagttaacaacctccaggatgccctccgaactggtactggcgccgggactctagacaaggtccagattcccgggcccttccccttacgggtgcaaaaagggagggtcaggacctgccagcccctggcttcaggatgttgactggacggacctggactcatgggaactgtgcgccaaagtcctgggagcaaagtgtcataacgctcctcgtttgtctcttgccttcacaggagacagccctgctgcaagcggccagtgggaatccttggcctttgggggtatgatccaagaatgtaaacgctagcttttcagtgttttcgatttcgtgatattcaatgcatacaatacaatgtgactcttgaagcttaataataaaattatcaagggttttcaaattcaaa

SEQ ID NO: 49398 - DNA, 1443 bp, Homo sapiens
  misc_feature (1)...(1443): n = a,t,c or g
ttttttgttctgaggttgcttttattccaagaactctgtgagctccgcccagataccattggcgcctgcttgtgtccccaggggacctacacacaacagcaccagcaccatgagggcgctctcgacccacacaagccctggtccccgtcagtcaatgtgactgagtccgccattgaggccagtctggctggccccaagtggtccctctgagtccccaactccctggccagcaaggagtgaagctccatgccccttggtccacgcctctagagtctgagcatatcctgcagcctcgatctcaggaggcaacgcatgcagcccccctgcactcagaaagggggcttctccagtcgtggtcttcttctctgtccacaagtttccagatggcccctccttggagcccctgcccaggcagggaacggccacatcctcgggcagagccaagagtcaccgtctttcgtgggcctgggaccaggcccagcccaggacgctaggaggctgcctctgctgccatgggctggaataaaatgggtgggtggcctgcagcgggtagtagcggccccgccaggtcttccagaagattcccttcttaagcttctgcccgctgctgtgggatggagcggaagtactggccgttgaggttggaatggctgcaggtgccaaaccaccagcctccagagaggctcttggcgcagttcttgtccctgcggaggtcgtgatcctggtcccaagtggagaagggtacggagaggccgctgggtgggacggtggtggcgcccagctggccggccacgggtgcagtgagctgcaggctataggccgtgtcctcgctacccaggtgcacggagaactgcagcaacctcgcgttgccatcccagtcccgcagctgcacggccaggcggctgttgcggtcccccatgatgctatgcaccttctccagacccagccagaactcgccgtggggatcccccaaaaccaccgccttgtaggcttcccagggcccggttgaaagtccactgagccatcgtggcgcctctgaattactgtccagcctccatctgaggtcatcttgcagttcaccaaaaatggcggagacccctgaggctggatttcaaatagtccactctgcctctccccaacctggaacagctcctggcaatccctgggcagccggtgcaggcggctgacattgtgagccgggtcaactggctgggccatctcgggcagcctctttcttcgggcaggcttggccacctcatggtctaggtgcttgtggtccaggaggccaaactggctttgcagatgctgaattcgcaggtgctgcttctccaggtgccgctgctgctgggccaccttgtggaagagttgctggatcctgctgttctgagccttgagttgtgtctgcaggctgtgnaaggacctcagggtccacgccggctctca

SEQ ID NO: 49399 - DNA, 350 bp, Homo sapiens; identical to SEQ ID NO: 11130

SEQ ID NO: 49400 - DNA, 2044 bp, Homo sapiens
gcttcccgtcccccgcctccctcactccccgcccctctgctgtgaggacacagcctgagcgcagcctgtcctccacaggtagatgatgagctggagatcaaggcctactatgcaggccacgtgctgggggcagccatgttccagattaaagtgggctcagagtctgtggtctacacgggtgattataacatgaccccagaccgacacttaggagctgcctggattgacaagtgccgccccaacctgctcatcacagagtccacgtacgccacgaccatccgtgactccaagcgctgccgggagcgagacttcctgaagaaagtccacgagaccgtggagcgtggtgggaaggtgctgatacctgtgttcgcgctgggccgcgcccaggagctctgcatcctcctggagaccttctgggagcgcatgaacctgaaggtgcccatctacttctccacggggctgaccgagaaggccaaccactactacaagctgttcatcccctggaccaaccagaagatccgcaagatttttgtgcagaggaacatgtttgagttcaagcacatcaaggccttcgaccgggcttttgctgacaacccaggaccgatggttgtgtttgccacgccaggaatgctgcacgctgggcagtccctgcagatcttccggaaatgggccggaaacgaaaagaacatggtcatcatgcccggctactgcgtgcagggcaccgtcggccacaagatcctcagcgggcagcggaagctcgagatggaggggcggcaggtgctggaggtcaagatgcaggtggagtacatgtcattcagcgcacacgcggacgccaagggcatcatgcagctggtgggccaggcagagcgtaggagcgtgctgctggtgcatggcgaggccaagaagatggagttcctgaagcagaagatcgagcaggagctccgggtcaactgctacatgccggccaatggcgagacggtgacgctgcccacaagccccagcatccccgtaggcatctcgctggggctgctgaagcgggagatggcgcaggggctgctccctgaggccaagaagcctcggctcctgcacggcaccctgatcatgaaggacagcaacttccggctggtgtcctcagagcaagccctcaaagagctgggtctggctgagcaccagctgcgcttcacctgccgcgtgcacctgcatgacacacgcaaggagcaggagacggcattgcgcgtctacagccacctcaagagcgtcctgaaggaccactgtgtgcagcacctcccggacggctctgtgactgtggagtccgtcctcctccaggccgccgccccttctgaggacccaggcaccaaggtgctgctggtctcctggacctaccaggacgaggagctggggagcttcctcacatctctgctgaagaagggcctcccccaggcccccagctgaggccggcaactcacccagccgccacctctgccctctcccagctggacagaccctgggcctgcacttcaggactgtgggtgccctgggtgaacagaccctgcaggtcccatccctggggacagaggccttgtgtcacctgcctgcccaggcagctgtttgcagctgaagaaacaaactggtctccaggctgtcttgcctttattcctggttagggcaggtggtcctagacagcagtttccagtaaaagctgaacaaaagactacttggtactctcttcttggtgtacatggctgtgtcctgcactgtgccccatcccgcctgggacagagacgggcatccagggtgctgggacccgggcagggaggctactgtggagaccaggcagcagtgctgtggggccccaagcagctgtgactgccctggcttgaccagcacagggttgggcctggtgtggcctaactttggctttaagtgtccagggtcatcccgtggctcccgaactgtggccccttgcaaggttgcaggaaggcagcacccgaggtttccgtacagcacttgactttgaaggaataaagcccgtgggctggggcta

SEQ ID NO: 49401 - DNA, 1338 bp, Homo sapiens
tttttttaattgactaatacagataaatttattagttaaatactgattttccagccatttcaccttaaaacaatgttaacaggtttgtgggttagggagggtatacgagggggcctttggaaaaaaacaatgtaaatgatgattaaaacagaatcttggttcaaaggtattctctgctatagccagtaggattttggagtgaggggtctgggcgtgtggggaggcgtagtaatgccacagtcagctacagctctgctgagaaagaggaaggagtctccatgagctccagcatcaggggcagaaacagcaatgtgcagaggagaacgcggcagatcccggagcagctcagagtcggaggctccctccaggcccccctgccgtgtcttagcagtcgtcttctttccaggaattctgttgtgttgtgtttgtttgcttcgaattcgtgttgcagaatctctggctttttgcctcctggacaaaagacttctgccggggcgaggctgcaggtcctgagggactctggctgccatctgaccaagggctaggaggagcagacagacagcaggtgggccagcccttgggacactcctgccccctgaccaggactctgtccacttacactctccccagaaggacctcgaggctgggctgagtgcttgccagactggcttgagcagcagaacgttttgttcttactcagaacccctctatgtgtgacacggtgaacgaagggtctgcagtgaactcgagggggtgccgtttggctaaactacccagctcttgttttgccaggggagagacatgtacaagctgcgggcagagctgaatcgctcagagcgggaagagggatttttattttgagagatgttggaagtgaaggagcaaaggccggcagcagggggaaggcacctgggggagaagttgcccagctgcattttgatgaggtgcgctgtggtgggttaagtgcccctgtagctccccaggaagtgttcagtcacttgtgtgtcacaccccacagttttggagtcagatttggtattagggatgcaggcggtgccatgccctcaagcggatggatggggcaagggcctgtccccaggggcccgtcgcatccaggtacatggcaaacagatgccgtcattcgggctggagcaggggtccccaggcccggccctccgcttgttctcagatcctcggtgctagaaacacaatgcaaaacccacggtctaggccacagtggggaacgcaggggacaaggacatcttgggaaagaagtctccagctcacaggagagatgcagtgtgctcgtgctgaagggtgggctccctccctcgtgcc

SEQ ID NO: 49402 - DNA, 470 bp, Homo sapiens
gactggaagaattcagaacactgagtaaactccagaagaaactaccattgcataaatctggttggccctaggcagtcttatcattcttgtgttttagtctttgccagactcaaagtgcctatatttcatcccatgagtctgcaaacctgctttgtggtaacctgcctggctacttgccattcattaactgcttcttgacccatgttgattccctctgtcacttactctgaaaagacctgttagaaataagcttgtgatctgcttgagactttggcaatactggtttagccagaatagagaaatccttaagtagcacagcaatcctttctgaatcttctatttgtttcttctttgttctctgtgtctctcccacctaacatccctctccaatttaagtaatcaaaatagaaagaggggcccaggcaaggtggcccacgcctataatcccaaagtgctgagattacaggcgt

SEQ ID NO: 49403 - DNA, 490 bp, Homo sapiens; identical to SEQ ID NO: 21567
  misc_feature (1)...(490): n = a,t,c or g

SEQ ID NO: 49404 - DNA, 496 bp, Homo sapiens; identical to SEQ ID NO: 21568

SEQ ID NO: 49405 - DNA, 531 bp, Homo sapiens
agagcctccacatcaacggcgggggcagcgcagctgagcagcgtgagaagatcaagcagttctcccagcaggaggagaagaggcagaagtcggagcggctgcagcaacagcagaaacacgagaaccagatgcgggacatgctggcgcagtgtgagagcaacatgagcgagctgcagcagctgcagaatgaaaagtgccacctcctggtagagcacgaaacccagaaactgaaggccctggatgagagccataaccagaacctgaaggaatggcgggacaagcttcggccgcgcaagaaggctctggaagaggatctgaaccagaagaagcgggagcaggagatgttcttcaagctgagcgaggaggcggagtgcccaaacccctccaccccaagcaaggccgccaagttcttcccctacagttctgcggatgcttcttaacaaccgcccggggctgtggctggcagcttggtgggccccagggccttctccttcattctctgtgaacatgtaactcaggaccccttttccc

SEQ ID NO: 49406 - DNA, 1527 bp, Homo sapiens
cacaattgtgttaattccgtagtgtcagggattcttcgggaaggtcaacagtatgaaggattctgacccctgtgcctcccatttatgtgatcaggtgacagttaataaccgtggaggtcacactcagccatccaacagccttacagtgaccctacacaaaagcccccaaattccaaagactttttcttaacctaaaggaagaaattatttgttaattccagtagagcaactgaatatactgggctatttgtacttttttatagagaactttaataataattctttaaaaatgagtttttagaacaaagcaactgacgatttcctaagattccaatgccctggagcttgtaggaggacttagcctgggtcagctggagcacccccgacctgatctcccactgccagattttcccatgctcctagggtatggagtccacgtgggaatgactgcaagttcaggtggaacttggccgactgatgctctgcgagtttttaatagacactggggacaactgcttaaggtttagaaacttccaaaccacaggaaagacatttttagtgtcccccatccagaggcagccctggaataggattcccaggggtttctgggacccctttccttgctccgtgaggctctgtggccatcttttggcaggaggaggatgcttccttggctctgtgcccagacccgcctggtccccaggtctctcaccttgggtgaagattcagagatgccctgtaaggattttgcccactgggcaactcagaaatacttcgatctcccaagatataagaggcagcagcaaacgtgcctattgacgtctgtttcatagttaccacttacgcgagtagacagaactcggcttttcagaaaataggtgtcaagtccactttataagaacctttttttctaaaataagataaaaggtggctttgcattttctgattaaacgactgtgtctttgtcacctctgcttaactttaggagtatccattcctgtgattgtagacttttgttgatattcttcctggaagaatatcattcttttcttgaagggttggtttactagaatattcaaaatcaatcatgaaggcagttactattttgagtctaaaggttttctaaaaattaacctcacatcccttctgttagggtctttcagaatatcttttataaacagaagcatttgaagtcattgcttttgctacatgatttgtgtgtgtgaaggacataccacgtttaaatcattaattgaaaaacatcatataagccccaactttgtttggaggaagagacggaggttgagggtttttccttctgtataagcacctactgacaaaatgtagaggccattcaaccgtcaaacaccatttggttatatcgcagaggagacggatgtgtaaattactgcattgctttttttttcagtttgtataacctctaatctccgtttgcatgatacgctttgttagaaacattaattgtagtttggaagcaagtgtgtatgaataaagataatgatcatt

SEQ ID NO: 49407 - DNA, 684 bp, Homo sapiens
gcaacttctgctgcctgggcttcatcgccttggcctactccctcaaagtgcgagacaagaagcttctcaatgacctgaatggagccgtggaggatgcaaagacggcccggctgttcaacatcaccagttctgccctggcagcctcctgcatcatcctcgtcttcatcttcctgcggtaccccctcaccgactactaaggcccgccagggaacggctgctggcgagacaagcactgagacatgtttattctcatggtccctgaaacgcaggatcccatgaggttggggcagggcagggcttcttgtcctggggcccccttgagctgtgaactgggcagcaaggccatcagaagctgagtacagcaagggggcagtgagcttggccctcagtccaccccctccgcctcctggcctccaccctgcctgtgtctggggcctgggggcttctcccctcgctgctgcaccctggcttccagcgtctgtgtccctgccctcacgtgccccttcccaggctcctggggccccttggacctgacacctagcaggaagggcttatgcaaaattgtcccaggttgggaggactcactctgtgctccccgaccctgcctcctccacgatgtgaccccgctcagagcccttgtgtctgtgaactttcaatgaaatacccatgcagctccaaaaaatc

SEQ ID NO: 49408 - DNA, 732 bp, Homo sapiens
  misc_feature (1)...(732): n = a,t,c or g
aaccttcaaacttcagcggctttacataatgagggtttacttcttgctcatgtcacagttcggggagcagagagaagcattggacagggaatgggttctacccatcagagtcgtgcagtgacccaggtttcttctgtcttgtggctccacccatctctgggtccctggtgtcttctctattcagtaggtggccttggtgctgggaaagtggagcaccactgcaactctggctggggcattggatttttataaaactttatttcaagccctgaatgactgtgttctccaatctggtagaatacagctggagaaaggcagctggctgggtgcccaagagaagggaatttcttcctagcactgtgacggagtggagcatcggaaggctgaactgttataactgctactggaaaggagaaatactgttgtcttatttnccaagagatatacacagccttgttgattttagaatcattaaaatttttaaaattgcagaccatacaaaagtacacaataatgtaggcttgttcctcattccagagattacttcaaaattcgttcaacttaaggcctggcaaggtggttcatgcctgtaatcccagcactttgggaggccggggtgggtgggattgcttgagtccaggagttctagaccagcctggacaacatggngaaacctcgggtctactgaaatacaaaaactagcagggcatggtggtgttgccctagtctcaa

SEQ ID NO: 49409 - DNA, 316 bp, Homo sapiens
gccacagccctgggaacacacccttgagccaaacttggttgaagactaggtcttccctggcaagttccggaagaatggacttactgacttttatcaactcttctcactgccaaggccaacagcatctgaggtatagctttttgggagtacctgctttcttgcctcctggaggatattttctgtcctgggcttcatggcccctctcttccctgttacacattgctgtgcttcagagcctttgcagctgcaacctagttgaatccacatagggttccttccacacggtgggaaggatctgctgcttcactcacagacc

SEQ ID NO: 49410 - DNA, 274 bp, Homo sapiens
gtttcctttggacaaccgaagagcttccatcattttcaactagcttccagtcttggtgtcagctgaactaagtcctatacaatgccattgctcaacctggtgataccagtgggtaaggaggttagaggaatgttcccggattcctacagtgacccttttttaagaggaaaaatgtttaaggttatttagagaatacagatatgggaatctatttaaggaatactaaatagaatagaaattttgtgccttgtgaaagaaacttgaaaggatcctt

SEQ ID NO: 49411 - DNA, 790 bp, Homo sapiens
gcggccgcctactactactactactactaaattcgcggccggtcgacgggagctgaattccggaagatccccacatcgatgaaagcaaagcgaagccagacaagccatcatcatgtccacgtcgctacgagtcagcccatccatccatggctaccacttcgacacagcctctcgtaagaaagccgtgggcaacatctttgaaaacacagaccaagaatcactagaaaggctcttcagaaactctggagacaagaaagcagaggagagagccaagatcatttttgccatagatcaagatgtggaggagaaaacgcgtgccctgatggccttgaacgaagaggacaaaagacaagcttttccagtttctggaaactgcgggaaatatttccattcaaagtttcactgaagagaagaggatggataaggacgttatccaagaatggacattcaaagaccaagtgagtttgtgagattctaacagatgcagcattttgctgctaccttacaagcttctcttctgtcaggactccagaggctggaaagggaccgggactggaaagggaccaggactgaacagactggttacaaagactccaaacaatttcatgccctgtgctgttacagaggagaacaaaatgctttcagcaaggatttgaaaactcttccgtccctgcaggaaaggattgatgctgatagaagagcctggacagatgtaatgagaactaaagaaaacagatggctggagatgacatttatccagggtcactttgtcaggccctaggacttaaat

SEQ ID NO: 49412 - DNA, 1236 bp, Homo sapiens
gaaggcggcggcggcggcacctgcgttcagggctggggcaggttatggtagtgcggactgcggtgtgagcagaggccacacggggccgccatgcccggcggcctgacatgggcgccagcgggtccaaagctcggggcctgacgttcgcctcggggccggaggcggctcagaggcagcaggagctgagcaagctttggtgcggcctcggggccgagctgtgccccccttcgtattcacgcgccgcggctctatgttctatgatgaggatggggatctggctcacgagttctatgaggagacaatcgtcaccaagaacgggcagaagcgggccaagctgaggcgagtgcataagaatctgattcctcagggcatcgtgaagctggatcacccccgcatccacgtggatttccctgtgatcctctatgaggtgtgaccctgggaggtggcagacagaagcaccccctgccccggcaagaaactcccaggctcaatcaaggtgtggcttccattgaggagcccaggctggggccacaaccctgaataaactctgttggcccataaccttcagctgtgagcgggtcggtcccacagtattggttgggtgttggtttgtgtgtggacaagaggtggttggtgggtggtgaaggctaatggcagagttagcaccccactctcccaagccacccctgcaagcagcacagcagggcatataccagtcaggaatgcccgttacctggttccttgcctggtctgctttcttccaagtttgcctgggggcctagccctgctagaggctacagcactttacaagcaaggtatgctttcttccagcccctaggctgtgggcactgtatacaagtaggaacttcctttccttcacttcccttttaacccctagtcagagcatttcagccgtttgctacctcgattcctcctgtgttggacagaggctgggggcagtgccagcctgattcttccgacctacctgccatttgttcccgccttcagatggatggacagtttgctggctattgataggagtggggactgggtgggggcttctccctctacccagggctgggctgatccccctactgcaactaactgttgccccccaaccccgaacccccagttgaggagttgagagagtgcaggctggggtcaggacaggctgcggatgcttgtgcctatggggagttactccaacccacctattctgtctaatctccatggctt

SEQ ID NO: 49413 - DNA, 384 bp, Homo sapiens
  misc_feature (1)...(384): n = a,t,c or g
atttcggcacagtgaccctgtctctcccaccaccacaaaaaaacaaaacaaaacaaaaataggcatttttctgtaactttaatcagcatctttgcttgctaaaattgccattcttatttagaaaccttatgcattcatgatcccactaactttactaaaacttacttttactgaaacatctagtaaactctcaagaatctatgcaacttagtaagggaaaaaaaaaccacctttgaaaagttctagatcagtataggccaatggaagaaatattgagtagtggccagggcgcagtggcttcacacatgtaaccctagcactttggggaggaccaggcgggtgggattcacctgaggtcagggagtttnaggaccagccgggcca

SEQ ID NO: 49414 - DNA, 1571 bp, Homo sapiens
cgtcgactttttttttttttttcagttccagttccactttctttttatttaaataaccgaagcaacagccgtggcacagcagagggaagctgggttggggcgtgtgagaggtggcagcagtgtggcctgatggggggactaggtcacagtgaactccccacacgcctgtcaggttcagcagtcatggccataggattgggagcactacggaggagccatcagttagtgatgtctctccaagtcccagagaccttagggacgggagctaagtcagctccctcaagtagcagggccagggcatcccagtcaggggtcacggggcccggaaggcattttcagcagccccagcgggctgcattggcagctgcggttcgcaccgcagggttggagaagacaccagcagcaaattcttgctgggccttctgaaagctggcacctgtgcggcggtataaggagtggatccgtttcagcatgacaattcctagcacagcaatgccagtgaagagcagggcgaccagcagcatgagcacggatactgctgtgttgcccttcggcaccaccagagcagagatccagccactgaatccccaacctgggataccaatggcctggaggacaaagagcacatcctggacgaagaaaatgaagaagaaaacgaagaaattgaatgaactgtcactccggaaagccttatacatggggcggtaccagcagacaaaggagcagggagtgaaaaggaggacccagaggatagaaagcccaaagcctgcgccattgttggtttccacacagaagctggccaggcaggcgaggaagttcaggagaagagccagcgtgctgcacatccagaggtagtacatggtggatacagtcttctgaaattcttgggggatctccatggagatgtcctggaaaaaagcagggctgaactggacaaaaagaaggtagagggggccaattgttctgtcgagtagctgtgccccccagggcagcatgctggcaagtctcgctttcccttcggttccaaactcctcttgccttccggttgaagcttcctcctgtttctttcaagcagcttcagctgtggctgctgcaagctgaggcctgagtgcttgtatgagccatagttcttaggttctgtggggctgagctttctcgagggctgcaatggacgggagctgacgggtggaggcaatggggcaagggctggaaggctcaataggctggtggtggctcccgggtctcaaaagggttgtaagacgtcaagcgtggcatactgccggctgggtcggtgctggatcacagctgggtcctgaaaggggttgtcaaagctcgctgggctcggcgaacgggtttccgccgtctctgctctgagccatgtttgcaactgcggcctccgcggccctctgccctcccaagcccctgccgcagcagtggcggtagcggtagccctcagagtccacttcactcgcctcagttcgccccgcttctctgtgcacggattggttccatcgaccggaagggccacaaggatccccgcagcagccgtgggttgcgcctgcgtcttgtcc

SEQ ID NO: 49415 - DNA, 938 bp, Homo sapiens
ggggctcaagagaaggccatctccctgatgccatctgcatgatccatgttgagcgggttcacaccagtgccttctctgctcttcaatggtatcatggcattgatctacttgtgcgtggaagacatcttccagctcattaactactacagcttcagctactggttctttgtggggctttctattgtgggtcagctttatctgcgctggaaggagcctgatcgacctcgtcccctcaagctcagcgttttcttcccgattgtcttctgcctctgcaccatcttcctggtggctgttccactttacagtgatactatcaactccctcatcggcattgccattgccctctcaggcctgcccttttacttcctcatcatcagagtgccagaacataagcgaccgctttacctccgaaggatcgtggggtctgccacaaggtacctccaggtcctgtgtatgtcagttgctgcagaaatggatttggaagatggaggagagatgcccaagcaacgggatcccaagtctaactaaacaccatctggaatcctgatgtggaaagcaggggtttctggtctactggctagagctaaggaagttgaaaaggaaagctcacttctttggaggcacctgtccagaagcctggcctaggcagcttcaacctttgaacttactttttgaaatgaaaagtaatttatttgttttgctacatactgttccagacttttaaaggggacaatgaaggtgactgtggggaggagcatgtcaggtttgggcttggttgttttagaagcacctgggtgtgcctacctactcctcttttcttttaaaagggcccacaatgctccaatttcctgtctcctttagagagacatgaaactatcacaggtgctggatgacaataaaagtttatgttcctaaaaaaaaaaaaaaaaaaaaaaaaa

SEQ ID NO: 49416 - DNA, 875 bp, Homo sapiens
  misc_feature (1)...(875): n = a,t,c or g
tggtttaatctggataagctgaaagatagattgctatcaaaaaagttccccaagatgtgcatagccaaactgggatagaaggcaaactcccccaaangctacctgctggttttgaaaaggggtggttaagaacatggcnaattccccaggagtagtagaaaataatatgccctgactaccaacagcctcaagtatgcttatttgcacatcctagacttggtgtctgtaagactcagttaccacttttattttcctgtacctaggagttagcaaaaggaaactggggccttcccagccgagccactaaacctgtcttatttggaatggggattgtccagcaaagggagcaaacatgaattagatgttaagctattgagctgaagaaaagaaagcagttcacatttaggtgaaatagatgatgttatcaggaagccaggttcccaccagagtcggtgcttggtacctggtctctccagtctcaacagactcaggtcaggtctctcacccaggaagcaaccactcaataaaatagagaacatctgagaattacaaatgtctgtgcttgattgctcctctaaatccagtgcataggttaaccctgcatgcccatttcttcctgggcttcttgatggcaatgtgttcttaaataactggtcttgtgttcatgctaaagacaaacttacatgaagtttttcagtttaagacattctagtgaatggctgctatgtgtttctggcactcattcctaaccaagtctttagagatttcagatgaccttaaagatgcaatatctttttctttctttctttctttcttttttctgagacaagagttgcgccctgtcgcccaggctggggtgctggagtgcagtgagc

SEQ ID NO: 49417 - DNA, 541 bp, Homo sapiens
cccagaatgagcggcggaaaatgaaagacctgctgggaggcttggaggtggacctggattctctcaccaccaccgaagacagcgtcaagaagcgcatcgtggtggccgctcgggacaactgggccaattacttctcccgcttctttcctgtctcgggcgagagtggcagcgacgtgcagctgttagccgtgtcccaccgtgggctgcgactgctcaaggtgacccaaggccccggcctccgccccgaccagctgaagattctctgctcatacagctttgcggaggtgctgggtgtggagtgccggggcggctccaccctggagctgtcactgaagagcgagcagctggtgctgcacacagcccgggcaagggccatcgaggcgctggttgagctattcctgaacgagcttaagaaggactccggctatgtcatcgccctgcgcagtaacatcactgacaactgcagcctcctcagcttccaccgtggggacctcatcaagctgctgccggtggccaccctggagccaggctggcagtttgg

SEQ ID NO: 49418 - DNA, 579 bp, Homo sapiens
  misc_feature (1)...(579): n = a,t,c or g
gacagcccactagtgagttacactcgagagggatcatttacagaacaaagtgctgggattacagctgtgagccaccgcacccggccgcattcttctaaatcacagtacatctggttcccagtgcccaggctctcagggcagagggtccagtgtgatcactttgcatggcctctctcccctcctgagcttgtgccagggccccagggctgacctggagaaggaaaatggcagagggtgaagatggggtgtctggtttggggaccatcctggccccccttgtcactgttggcatctcttctgcacagtggcattgctgggaggtgcttactgtgcctattcaaggggctggcagccgcagcctcactgcagatcagggacttggcttcccggttgaccacaggtccaagaacctgcagggtccagcctcccccccatccccagtcttccccaccctggcccggccctccaggtgcagaaacatgcaggccctctcagaatgtggaaggagtgtgtccctaaaatggcctgtgtctgggtcctcttaacaactcttcaagaggttgtaactgcaanttgccc

SEQ ID NO: 49419 - DNA, 2144 bp, Homo sapiens
tttcaagagtattaatttattgggaatgagctgaggcggatttccccagagaaacaaaaaggtataactttaacaaatatatatttaaagaaagaaatattattgattctatagaaaaccatttaccaactgaaaggacacgaagtctagctccggacaaaagctgttagaggcccaggctgtctgcctgcggtccttcctccggccagagtggaggccccaggctgctagcacaggtggaaggctggggcccgggggcgggttgctctgccgggggctcctccgtgcttctctcctaagttctctgcgccccaagaactcgagggttgtgccttgctctcggcggccgtgtcctcctcctggcgtggctgcgtcccagggcgcgggtgggtttggtgaatgtgggtgtgtcagcgtggcagccacgtggaagcagggcatgtagcaggccaggccacgggcttgcagctcctctgagggtgtgcctggccccctctccaggggctgtgcaggcagcccatccaccccagtggagttcccacggacgcttctgctcatggtccaaggctgtgttgtgtggtcattctcgccctcccttttcctctctcctcctgccccctccaagaagtactgactggtctcctctatcgtgtttgctgatccacagtgttgggcacaactttgacgtttcttaaaaaaaaaatttaaaaaatgccgaaaaccagcgattgtggtgtggggcgggtggaggcggctggcggaggtggcgtcccggcgtgcagggccccttcctgctgtctcaccccgtgtttccctgcgagtggacgtgcccagctgtccccccaggcctctcctcagagggcggcacaggctgggctccagcaggtgggcaggggaggtctgggcaaggcgctccgtcggctgtcaataaacagcaggaaacagaggtgcctggctcactttttgggggcacatgtgttgggggagatgggactggaggccagcagcttgggtgtgacgagttgcctcctagcagggaggggaggccccggagtgggccgaagtcctggggtccaccaaaggaaactgccccatgcccccccactcacagcagccagtgcctgtgcacaccaacctcaaggccacacacagcccccttgtcccgaggagctgtccccactcacagccacagtctgtggagcatttatttcaaccaggaggtaaccaaatctacatacagtctaaaaacggtagaaaaggtgagtaaaaaggccctcgctccatctagggtggggatggagggtggggatggagggtgggccggggcaagcgtcgtacctggcacccagagaggggctgggcagcaaggacagtgccgagtagagggaggctcgccgagcatgggacggggagggcactgccggtctgccagagcctgtccacctatgcccacggggcaggcagaaaccccgagaccaccccatgtggccagcctggctcagaaaggtccagggctggttcaggggaaaccacagcctggcctggatcctgttagcaagtccaaaccttcacagtgctatccacagcccctgagaagagtcggccccgggacacagccagcgcggtgacactgccctggtgacgcagcagggtctgcgtgcagatcatgttgtccatactccagaccctgagggaccggtcgtaagatgcactgaagactttggtctggtctggcgtcgagatgaccgccagggcatacacggtgcccacgtggcccgtgagggtccgcacctgctccttggactcaatgtcccacacgtggatgaggttctcgtaggtgccacagacaatgtggtgatttgtcacagcaatggagtagacgctgccaccagacgtctgcaggacgtggatgcagtcaagggttcggatgtcccagatcttgattgtctggtaggagccgctgtacaggtagctctgggcagccaccagggcccgcacccagtggttgaggcctgtgagctccttcttcaacttcagctcagtgcccacgatgtcccagaccttgatggccttcagggagccgctgaagagcacgttgtgtgaggagaccagcgtgcacaccgggttgtcatgggcccggatgg

SEQ ID NO: 49420 - DNA, 1090 bp, Homo sapiens
tttttttttttttttgtaagactctgttatgattttatttcttcaattgttccaatcacagtttctaatacagaaataaaactattcagcgtctccgttcttgcttcattttgtttcacagagatctgcatttctgagtttccaggctccaatagcagttctgttaagaacagacagccagtatcatcctgagcactgaggtatgctttccatggccgagacccagccctactcattgcgatggtctggatgttcactacttgaagagccatctggagggtgtcaggatgggaattctccccgccaaggcaacacttgctgatgagcaactttaaggctaagccaagttttctcaaaataatcagcagtaagctggcgattggggactagcatgagggctccagaatcagggagttcttgtaccctctccttgttctcttcaggaatcaaggggtcctgatgcggcaaaggatgaagttttaggaagctctgggtcacaacgctctgccccctggcatttagagatagttgcccagtgggctttgccatacactggcaccagtgtgttgaagtctgaggcccagctattcacaggtctttctgccggatcctccaaaagtccaagagtagggtcagatttagggctacacagaatccgcttaacttcatcaaatgcccaactaagaggaggcgataatagaagagacctcggtcccgtacagccatatctttttcttcctctatgcagtaatacaacaaacgtcctagcatgtcctggcactcagcaggtcgggagaggaaaaggcgcagcgaagcagtgagcagctccatcttaacagctggaaatgtttccgacttcacattctcaacaaagtcctctaacacataaggagcattaggaattctttccccatggacaccaagtagccaaataagtgcttgcttcccctcactatcttgaatgttctcttcacagccgggcagggcctgacatacagcttcagtacactgaggacacaaccaaaccaggtctcggaaagtctgcaccaccactgtggtaatgtgctcttgtcgaagacccagcaactct

SEQ ID NO: 49421 - DNA, 1569 bp, Homo sapiens
  misc_feature (1)...(1569): n = a,t,c or g
attttttttttttttttctttaaccgtgtggtctttatttcagtgccagtgttacagatacaacacaaatgttccagttagaaggaattcaaacggaatgccaaggtccaagccaggctcaagaaataaaaagggaggtttggagtaatagataagatgactccaatactcactcttcctaagggcaaaggtacttttgatacagagtctgatctttgaaactggtgaactcctcttccacccattaccatagttcaaacaggcaagttatgggcttaggagcactttaaaatttgtggtgggaatagggtcattaataactatgaatatatcttttagaaggtgaccattttgcactttaaagggaatcaattttgaaaatcatggagactattcatgactacagctaaagaatggcgagaaaggggagctggaagagccttggaagtttctattacaaatagagcaccatatccttcatgccaaatctcaacaaaagctctttttaactccatctgtccagtgtttacaaataaactcgcaaggtctgaccagttcttggtaacaaacatacatgtgtgtgtctgtgtgtatacagcaatgcacagaaaaggctaccaggagcctaatgcctctttcaaacattgggggaaccagtagaaaaaggcagggctccctaatgtccattattacatttccattccgaatgccagatgttaaaagtgcctgaagatggtaacccagctagtgaggaataaataccccaccttgcccagtccacagagaaacaacagtagaaagaaggggcaactctttgctgcagagacaaagtgagtgttttttcgccatggattgcagtcctctcctccagaccagctgcttatttcctcaggggcccagggaatgttgattctggctgtaaatgtgggaggggtggagaagtgcggaaaaaggagaagaggaagagtgcaaagtagcctccagaagcagccagcctcaacagtggaggagaggacattagtctttaacaatgcttcaaggtcagcagtaactttaggaaaatcctcctcagcagttctcttcagctcctcatgcccgtggtaacagttgggggggacttgccagcaatcacaacctccttcccagagttcctttgattgagtgggataaaagaatgagaatggtgccaaaccctcattgccaggactgagggggaaagttgttcacctctgctagatcttgcattgctgagcccttgtgattatatgtaagcttgatccgcattcgcagctgttgcttctgagggttcagaactttaatgacttgtgtgatggtccccgtgttaaatgctgggacaatgctgctgctaggagacaagagctgcagctggaatgtctttggtactgcagcttggaaaacaaagtccgtcatatctagctctgtgctgttggaggcctgtatcgttatcactgttacactggggttggtatttgaccgttcaaaggtgaantctatcttcaagccantcttactgtatgctgtgatggaggggatgcctgcagcagtgcc

SEQ ID NO: 49422 - DNA, 5367 bp, Homo sapiens
ggttcatctcctggctgctttattctgtcaattgacttctgtaatacaatttccatatggtgacactgccttccaaaacagttagagcttattctcagtattcttcattggcagtggaaaatgcttcagtactttattgaaagaaagcaataaataatactgtgataaaaatagttcaaaagtagactgtacatactttgttacataatcaggaagttgacaaaagattaatagaaaaacagaacagtaacaatgaattgtacaagtaaattaaaagcagaaaccaactgaaaagacaggctgcctctgtctctggatctgctgcacaataaataccacgccatggtctgacacactttgctggcttgttaatatgccatttaaaaagtaaaagccacatctgcaacttacacaatccaaaatggctagagcatcaaagtctaaaaatgtcccactaggttcgttctttaaacatgtttacaaacaaatgtaaaaagatgatttacataagaaaaataaggcctttattagagctgcactgcactgctttctgggtctcctgccttcatccactgtgtgcgccgacttgcaggatgagagcgtggtgcttggtgctggccctaaggggagccacatgggtgtctctccacccgctcccaaggagcagaggcagggaagagggtgcaggggctagactggtccccaggttaccccatcccgagtctctccagctgagagaactgctcccagctcacagtctcagccactgaagacaagctccccaaatccagagactaggctaggaaagcgttaaccgtgctaggggcttctcatagtgttgtgatagtgttttcagtccacatcttattaggagctgatatttaacaccagccattttaaatctgttcatgctgcagaataaagcatctcttgctagaaaaagtacagttaaggtcagtcatgaaaataccaaccaattggcttgaaattaggtatgcttattccgggatggattgctgtagagctagggctgcgtccgtaaaggataatgcacatggcttcctgtcataattttataaacgtaaaatcctttgtcatggtttatcattaaaaaattaatgataattacaataaatgcataatttacaaaagccctctattcataggatttatacatacaagcattacagtacattcatttgaaagactaaaattaggtataagaacatgatttgaaaggatatttatagcctggatatacatgaaaaagtaagtaactatataaatgaagagtcataagtttacataaatataagaaacattaaattctaaaatattttctctatggtattcatgaatttttcactaattaaaaattctgtaataaaatatcttagggtccatataacaagtattaacaagattaaagattccactggattccaaaatgtagtctttgttggattcaaatgctgcataatcatctgtagaagtagtgtgggtaaacaacaggagactttagcaggagtaagtcctgactgtagcagaatccaacctctgtgttcctgatacattgccgtccatctgcatcttctttggctgcatagagggggaagacatagaagaagtcacccggaagtttgcagggagagtctctgctgacccagcagctaagccacgaatgtcctttggtctaaacttttttctccatgaaggtgctctcctaaagcttttatcatcatcttcatcaaaccttctatcagtccccatgaccaaaaggttgttaaattctctttccaagacagcacgagcctgtgtgttctgcgtcgggatctgtaacagcagtgccagtgcacctgaagtcgaaggtttcatctaaggccagaagtgctccgtgaacaccactctctataagattgtttgcatattctttaaggccaattgacaggatccagcgaatcactcgatcattgctccaaacaagcacgtcttttattcactctgacttcactctgactttcttctctttttctttccagttctttccggtcataatttaaccttctcaggcacataattccacactggaaactgtttctgtgaaaactgtcgaccattttcagctgccctcgaaggtctttcttggtcaagtggtccagcatcctggcgtctacaaggcactccatgaagtagctgcggtactgggggaggcccaggctggggagccactcgttgccgatccactcgtggttcatgtccccataggcgagtgtcgttctagatgtgggcggggcagacgggctggtcagcgacatgatctcctggatggccagcctcagcttcagcctgtgcagggggttgctgatgccaatctcacgctggatctctgtgtcggacagggccgacatgatggccccgcttttcacgtttgctcggcaggcagccacataccaggctggcatcccaacccagagctctagccagaccacaaccgttggcccgtcccattgggcaaaaggtaaaccttgtctccgggcttcctccagcaattcatgctttttttgaagtttacgatttttttcagcctgtccccccaatttgctaagtcccaaggcatcctgagatgagttatccgtctcggaaacaccagcttgtcctaatgcttctttgccagtttgtccaggtcggcccttttctttcttgccaaacaagcggccaatggaggacttaatgcctttcttctttggggctttgtggagcgagtcctggctactgttgctactgctggggttgctcacgggaccatcctgggagcctgtggagttccttatgtccctgatgtcctcgtggctgacggtgtgcagcgcccctttgtgcagccggtctaaccgaagggctctcggggaggaaggcggggaggtttcacactttatggttgtcttgtcatctcgtacctcttctctggaaggtggcaaaagggtcatgacgcccagtctgtccacttcccgagctgggctgtgagggatccttcgtggggtggagcgcccactgcccggaggggaggagctagcaagcgaggaagcagggtaggggggaatggagctcattgatctaaaacgaccaagattgtctagacttccactgccaactcgactttcaatctcctctgcccgctgctctgtattttctttttcttcctgaatcaacctgatctctttgttgatggcgtccagctgctcctgaagcatcatggctagtgtgtgcgcgtcggcctgcccgctgggcgatagcaggtcaactgagctgaggagagtgtccctgtcatcttcaccatcagacacgtcagcatcactctcgaatgcttgtgctacatttgccaagacactagcttgctgggcacgttcccaatcctgctcattaagagtttgtaccttggaaggctcatctcgcagggctgccagccggcctttctgtgggcgccgcagcactgcactggtgctgtaggagtctgtgtggccgtctgccatggggaacctgaaatctgggacactgcccaagtggggtcggccatgatgaagtgaagcacctcttagtctcatgtggtctagttcagccctcagtgcttcaatgtttaggacaagctgatccttatcgtgttgtgtttcttctaactgcttttttgcactttcaacttctcttaaaagagagttcttatcttccaaagcagccattctctctttaagatgaagttgaagcctctcattagattctgaaagcagcttgtcaacagtgtctgataaacgtttattatgttcttcgttcattttttctctttgccttgcccgctgcagttcttgattcttctcctccaactgtgcttccatctgtcgtaacctttcttcaatgttgccgtgtctctcttcagccttggaaagcgctgccaccctctgggccagctccgcctccacctccgggagcgtctctgccttcctcagtgtctgttgcagcttttgctctgccaattccaagcgctcctgtaactggcggtttttatcttcagtctgtcgatgcatagaatctttatttgcaatttcattttcaagtttatcattgaggtcatgcacagatgtggcttcacgctgtgcagcgaggtagcgtttttcaagagtagtgattctctcttccatatcttccttttgggccatggcttcacggacatctcgttgcaattttgtgttcatttcttcagatttgatgagatcttttctagccgtgtccagatcctcttccagttctgtcacatgactggaaagggaagccaggcgttctttcatttggctctgttcccttgactgcttacttatgatttcttggagctcaattactttagcaaggtcttcctcgtggcttaaagaaccatcagaagatctctttccactcgtgcttggtgtattttcttgttcatggtttatgtccagcactccatctgttagagtttttttctgattattctgttctttaagaatcattagctctttgtgtgtggcacctaattcctcttctaacaaactacatctttcaagtgctactcgtaatcgctctctcaccttttcatccagagctttgtggtgttcaaataaggacttcagtgctttcagcacttccacttcgctggacacgcctgctggagactgcgcttgtctcttcaccacggtcatcctaagagaccgctcatgcctggagacaaggcattccaaatgctctaacagcagcctggtgttattcctttctgctttcagttcagcaatttcttcttccctttcaaggagctgttccctgcatacattgagttctttagtaagtgctgcgaactcctgtggaagtgccgtgttgagctgtctctgcaaggaatctctttcatgaccaacctcgtgtaacttcccctgggttaaggccagcgtttcttgagtctctctcagtgtatcaagaaggcggtccctttcttctagcatggagaccatcaactgttcaaaatgtgaatctgcatctggctgtgaaggggagccggaaccatggcctccacctcctccaggggggccttctgcttcgctgatggtcggcatcacctcgcacatcatcttgctcgccggcgggagcgggcgaggaggctccgcggcggctcgcgggcggctgctcgctccgggagagcttgggagccgacgaaagcagcccgcggccggcgtccgcctgcccgccccacgccgcggccccggggcccgccgccccagtcactaaggccggcccgcggccggacactggcggagcggaggaagagccttaagagggacggccgggggcccggaattc

SEQ ID NO: 49423 - DNA, 473 bp, Homo sapiens
gagataatgatgatcacatagtcttgatgtacggacattaaaagccagatttcttcattcaattctgttatctctgttttactctttgaaattgatcaagccactgaatcactttgcatttcagtttatatatagagagagaaagaaggctgtctgctcttacattattgtggagccctgtgatagaaatatgtaaaatctcatattattttttttataatttttttattttttatgacagggtctcactatgtcaccctggctggagtgcagtagtgcgatcgcggcacactgcagccttggcttccctgggctcaagcagtcctcccacctcagtctcccaaatagctaggactacaggcgtgcgtgaccaagcccagctaatttttgcattttttgtagagatggggttttgccatgttgctcaggctggtctcaaactcctgagcactagcaatccacccacctctgtt

SEQ ID NO: 49424 - DNA, 1571 bp, Homo sapiens; identical to SEQ ID NO: 11237

SEQ ID NO: 49425 - DNA, 489 bp, Homo sapiens
  misc_feature (1)...(489): n = a,t,c or g
gnnnngnnnnnntnttngnncccccctttgaaaaccnctatgacatgattacgaatttaatacgactcactatagggaatttggccctcgaggccaagaattcggcacgagagaggaactggaagaagttcaagctgaattaaagaagaaagatgaagaatttcaacgaaccaaacttttaaatggaccgggagatgttgaaacgggtacaagcataacagtacctcagaaaaagtggttgcattttatttcacccatttttgttcaagctcttacattaacattcttagcagaatggggtgatcgctctcaactaactacaattgtattggcagctagagaggacccctatggtgtagccgtgggtggaactgtggggcactgcctgtgcacgggattggcagtaattggaggaagaattatagcacagaaaatctctgtcagaactgtgacaatcataggaggcatcgtttttttggcgtttgcatt

SEQ ID NO: 49426 - DNA, 952 bp, Homo sapiens
tttttttggtgtttttgtttttgtgtgtgggtgtgtgtcaagttttaatacacgctagaacaagccacaagagggtgctgctaggccagaactacactcaccccaagcccaccccaggaaccccaaagcagaggtcaggaactgagtccacagctcctggggaggcccaggcacccctgaacgcttctgtcacctctgacctcccatcttgccctcagcctagactcgtcccttccctaccagtcccttccctagacaaaggcccctcccctccctgggtcccaggacttcctccctcaagggacagaggagcagccagagagcgacggttcagggccctgagggtccggctctccaggagaagctgggctctgaaccagggtgggtaaacgttgcagaagggctgtcaggacactcaggcgcccacacactccacgtagttggcagggtacaggccaatgcggccactctgcaactggccttggcaccagccctgctcgtcctcctcactcatcttcagcagctcctcccctgctcggaagctcagctcatcagcttcctggccagcgtagtcatagagtgccctcacccgaaccccggtggcagccttccggggactctcttcatctgaccactcctcatcctgccccgtgctggagaggggaggcaaagggagcagctcagagtgcaaggaacacggggctggagatctcacccaggatcagggcaaaggcctccctacccccagaggcacctgggagagtcaggtgaggtactaaagattctagctctacctcgccatgcccgactgtgagcaaagaggcaattcctgccacacgcagctgatttaaggcataaacgagagggaatgtgggaaatgcccagcaaatctaaaccactatgagaaccagtatcattacaactactaagtaggccctcaggtccctggcac

SEQ ID NO: 49427 - DNA, 1627 bp, Homo sapiens
  misc_feature (1)...(1627): n = a,t,c or g
tatgaatgtaaggaatgtgggaaggtattcagtttttccagttcccttcggagacatgaaaggacacacactgaaaaactctgtgaatgtaaacagcatgggaaaggattttttcatagaagctgtcctagacacatgaagatagacactggagagatacttcataaacgtaagatacgtggaaaagtctttcattctcctagttcatttcaaacatgtgaaagatctcacactggagagaaaccctatgagtgtaagcaatgtgggaaagcctttatttctttcaaatcctttcaaagacatgaaaggactcacactggagagaaaccctatgagtgtaagcaatgtggaaaaaccttcatntttcaccagcccttgcatatacatgagcggactcatacgagagagaatccgtatgaatgtaagcaatgtggaaaagctcttagttgttccagttcgcttcgagttcatgaaaggattcacactggagaaaagccctatgaatgtaaacaatgtgggaaagccttcagttgttccagttctattcgagtacacgaaagaactcacactggagagaaaccctatgcatgtaaggaatgtgggaaagccttcagatcagccttgcatagacttcaaatgcatgaaagaactcacactggagagaagctgtatgaatgtaaggaatgtgggaaagcattgagttctctccgttccttgcatagacataaaaggactcacactggaaagatactctctaaatgtaagcaatgtgggaaaacattcaattatgccagttccattagaatacatgaaagaactcataccggagaaaaaccctatgaatgtaagcaatgtggaaaaacgttcagttattccagttcctttcaaagacatgaaagaattcacactggagataaaccttacgtaaagaatgtgggaaagctttcatttatcacacaaccttccgaatacctgtgaaaatgaatagtggaggacaggtctacaagtatctacatatctaaagaatatgggaaagtcttcagtttgctttctgggtttcagacttgtttgggagctcacccctttctcctgtttctcactttttggaataggaatctctatcctgtgcctgtctcatattttggaaatacatgactaggttggttttcaccggttcggagctgaagaagaattttgcctcagcatgaattgagtctcatccatatctgagtgatgtgatattgaagatgacactttggagtttgagtttaaacattaggcttcatgctggaattaactgagacttttgaggcctttgggatgagatgaatatattttacatgtgatgacatcgattttgggggccagaggtgtaatgttttggctgagtgtatgccacctcagattcatatgttgaaaccttacccccgtgccccccctntncnannacaatgtgatggtatttggaggccctgtctctggtggtttttaggattggaggacatcatgaagatggaggccttgtaattgggattagtttcctgataggaatccctagagagctagctttgcccttcaccatgagagggtgcagtgagaagatagctatctttgaaccgggaagcag

SEQ ID NO: 49428 - DNA, 615 bp, Homo sapiens
tttttttttttttttggcccttagtgacagtcggtcacttttattctattgattattctcctgtgtttataatgcgggcggcagggtgggggtttctttaaaatgcttctcctgagcctaaagagcctccccacccagcccctgtctgagggaaggggcagagcatacacgcccccctggcatctctggagaggaagaaggatggggtgggcagaaggggctgcccccaaacggctccccaggctggcacttctgggcctctgcccactcagtccctgttgacctcccccaccccccgcgaaagaggaaccaaaaccagaaaagaacaaagcatcctccgccccggacccttggggctgggtctcccccagccctgccactttcctaccaacagcctcctctcctctctgggaatcttgtcccttcttccccatccccttagcaccggcctctgccctcgtgggcacctctgtcccaactgcctggctttccgcaccacctgggggtgccctgaggttcatccttcctgcctgttgtctagaaggcccggggcactcactgagcgccctccgctggctatggcaccatgtgtcagccctgcctcgagacaggaca

SEQ ID NO: 49429 - DNA, 935 bp, Homo sapiens
  misc_feature (1)...(935): n = a,t,c or g
cggagcggcgggtcccgtctcgacaggtcttctctgttggttgaaatgtctatgattttatctgcctcagtcattcgtgtcagagatggactgccactttctgcttctactgattatgaacaaagcacaggaatgcaggagtgcagaaagtattttaaaatgctttcgaggaaacttgctcaacttcctgatagatgtacactgaaaactggacattataacattaattttattagctctctgggagtgagctacatgatgttgtgcactgaaaattacccaaatgttctcgccttctctttcctggatgagcttcagaaggagttcattactacttataacatgatgaagacaaatactgctgtcagaccatactgtttcattgaatttgataacttcattcagaggaccaagcagcgatataataatcccaggtctctttcaacaaagataaatctttctgacatgcagacggaaatcaagctgaggcctccttatcaaatttccatgtgcgaactggggtcagccaatggagtcacatcagcattttctgttgactgtaaaggtgctggtaagatttcttctgctcaccagcgactggaaccagcaactctgtcagggattgtaggatttatccttagtcttttatgtggagctctgaatttaattcgaggctttcatgctatagaaagtctcctgcagagtgatggtgatgattttaattacatcattgcatttttccttgggaacagcagcctgcctttaccagtgttatttacttgtctactacaccggctgggcggaatgttcaaatcttttttgacttttgggcttaaatctgtcctatggcaacatgtatcntctatggaactgcggcaacccctgggcagcttttccttncaggtgaccgtggggagccattgtttacactacag

SEQ ID NO: 49430 - DNA, 1161 bp, Homo sapiens; identical to SEQ ID NO: 11246

SEQ ID NO: 49431 - DNA, 1722 bp, Homo sapiens
gtgctagaatgactaggaggcttggaaatgaggacctgatagtgaccaacaaactcaatgtcaagggctggtgtctcatttagttactattcaaaccaaaagaagcacacagattagtataaatactatatttattaaatatctttacagtttatttaaatgtatttacagaactattcctgcataagttataattcagacatccaaattcaggtaattgcctcttgggtaataagacaaataatgatagtctcaacagaaaaaaagcagctcattagtatacacacagattctaatttgcttcattatttagccatctttgccacaaactacctgctaacagttaaaattctgacatggacacgttttagttgagaagttcaattttgcaaagaatttaattttaaataaatagaatccaaatatgtcctgcttcatgttttgtttcataagcagattttggttttttgatactgtaaaatttttaaaatgcaaaaatgtgatacagtttccagagaaactgaatgctgtagcttctaccaaagatagctggtattaaggtgacctaaagaaccatgaactcatccaaagtacaaacgtttacaattcgagccaatcttgtttacattctctcaaacactcaaagctgactcaataaattcccacgattcctgcctaacttgttacttggtatggtgggctaatggtactgaaggtggtttccatctccgggctactgtcctatccagaacacacgcagctgatagaggagaggacgctctcccatcatgcaaagcttgaaacccagtttctaatctagacacagcccaacccccagacatgcatacctggaatggattcttttgtgatttagtacccaacaaccatgtcaagcaagtacagtaactcaggacaaataacttgttccccctgcatcccatttcttttagtttttagagcctatggactctactgcatctccatttggtaaattttttttttttttgtgcgcaggcagcttaagttcataggaagaaataaggttctgatatgtttagagtgcacattttaaaacaacaaaataaaaatttcaagcatgtgataaaaatattgatttttataatacagtattgctttataaatatagatggaaaagctataaactttactggtctttggtgcatccagagagggataaataatttgccatttgtaaattagaaatccaaattttttcttttgttataaaagtccattacatgaggcgtgtgtgtgtgtgtgtgttgcttaaaatataattaacacacacatcaggttcagaatcagacccaccaagtggtacagcacagtaacaacccatggaagcttgggtctgtgacctggaaaattctactatgggtccaacacagcctctgaccactgagagtaggagagatacttgttaagcagcactccagctgaccccccggcagtcataaaattaagtgcataacacaaaaagaacaggggaaaatagagaaaatattttatgtcactaatctataggccagatccaaagccaattccactgtgaaactcaattcttgcccccactactttcagtatcactggaacaaacacatcgtcaatttctaacaatcgtttctcaaaaaggtaagctgagtaaataagttgtataaaacaccaccaatctagctttacaaagattgtgtttgacgggtt

SEQ ID NO: 49432 - DNA, 971 bp, Homo sapiens
tgaagaactgctgtgtttagatgtctctgaaaacaggttggaaagacttcctgaagaaatcagtggcctgacttcattaacggatttagtcatttcccagaacttattagaaacgattccggatggcattggaaaactaaagaaactgtcaatcttgaaggtggatcagaatagactcacacagttgcctgaagcagttggggaatgtgaaagtctcactgagttagttcttacagaaaatcagctcctgaccctgccttaaagcattggaaaactaaagaagttgagcaacttgaatgcagacagaaataaattagtgtccttaccaaaagagatcggcgggtgctgcagcctcactgtgttctgtgtacgtgacaacagactaactcggatacctgcagaggtgtcacaggcaacagaacttcatgtcctggatgtggcagggaacaggttgctgcatctacctttatccctgactgccttgaagttgaaggctctgtggctatctgacaaccagtcccagcccctgcttacattccagacagacacagactacaccacaggagagaagattttaacctgtgtcttacttcctcagctgccttctgaacctacttgtcaagagaatctgcctcgctgtggtgcactggagaacttggtaaatgatgtctctgatgaagcctggaacgagcgtgctgtcaacagagtcagtgcgatccgatttgtggaggatgagaaagatgaagaagacaatgagacgagaacacttctaaggcgagccactccacacccaggggagttaaagcacatgaaaaagacagtggagaatttacggaatgacatgaatgctgctaaaggactggactcaaacaaaaacgaggtcaatcatgccattgaccgagtgaccacttctgtgtagagttttcacctccaagttttacctcctgtgtcttcctctgctgtcgagacgt

SEQ ID NO: 49433 - DNA, 1087 bp, Homo sapiens
tttatcaataagcagctttttattgaaggactgaaagaattaaatagaaggcacagtagcactgtaaagctttctcagaacataataatctttttctatgtatgtgtggaacccagactttcttttttgttgttaaaaatgtcttctggacaatcagaaaatctttatttgtcatccttccctttggtctttctgtaaaccatttctcgaaaactggccagaatcttgttctctctctttcgtctctcttcttggttaaaggatgcaagggctctcttctcatcagcactgtagatctggttctcttttcgcagtcgcacagcctccattcggcgatgcctgctaccactcattacataacctgagcattcaaatgatgcaatttcttcacttgtcaagccaatttcacctcttcgtgggatacgttttccagcttttacatattcagccatagctgcaccttcaccaggtaacagagcatggccatagttcaaaggtttatcatcttgagaggtaagtgtttttggagcctctgggccaattaaatctgatggttcttcagcctttgttcgatccttccagggattttccagaaactcttcttgggattctttagagcttgaatcactggactcttttctgctcttcttagacctctttttcttatatttcttcgatctgtgtttcttcttcttttcctttttcttggctttctttgctctccttttgttatcttcatcactggagtctgtttcagaatcagagtcactgtcgctatcttcagaatacttcttatgttttcttttcgatgattttttctttctccttttcttggacctttcttttgaacggctagacttcttctttttttcttcttctgaagtagaagctgaagtagtgcttttctttggctatgattcctccactggtgtatgttcatcagaatctggttcaggatactttggagaaagtccccatacttcaggagctcccaattctccaattctctctctctcacttaatctcttctgcgcaggctctcctccctctccttgtcgaggaggctagccaaggttgtcgctcccgt

SEQ ID NO: 49434 - DNA, 616 bp, Homo sapiens
agtaagtcgctgattttgtttctttttttcaaacagttttgatttgaagttcctttaaaggctgttggagcttttgcaaatacccagctaatgaaaggcacttaagattgggcccatctgcatcatcacattgaagttttctgtctaaaggaaggttccagctacctgttacccttttgctaaacacagttgcagtgttgcagtgtatttcatgacaaaagtgcactctagttttctgtgaaatgattattttctctgaaatgattcttggtcatgttgagcttctaaatgttaaagagaacatagtgcttttgacctgtgggaaatcttcatcttgggtaccatggtgctgcacagaccatcaggaagaactgaaaagttcaggcaacttgagaaaataaagtcaccaccagcaagaagctgtctaaaataaccggaagattataacccaagcacgtggaggagtgtgctagtgagtagaatgttatgaaagctactagaggtcctccatagatgcatgtgctagtcctaaggagaaggaagaggagaaggattgccacggaggaacacctgaagtttcagttgagcactttgtttggaaagttgtccaaggctg

SEQ ID NO: 49435 - DNA, 366 bp, Homo sapiens
ggcaaaggagagggaagctggaagcacctttggcccgggacagaaatctggagagcttggctacctccatcctcctcaggccggagcaggcttcctgagagagtccaggtcgtaggagttttacgacttagaaaagcgggctgcagattccttcctgggtgtttggttcaagccttggctccagcctcactctcagtcttcccgggagttcgtgggatttggaccttagattattagtattattttgagggcctcctgtgtgtaagcactggttgtgcgcagatggctgtgcagaagggccatgaggtagaggctggggaaatgagggcttggaaggtgcttgaggtatggtctttacctacgtga

SEQ ID NO: 49436 - DNA, 771 bp, Homo sapiens
ctgagcttcgtgagttgagcgctgctgctccgcggtggagtcaccgcaccgctcccgggatcatggtgttctacttcaccagcagcagcgttaattcatctgcctacactatttacatgggaaaagataaatatgaaaatgaagatctgatcaagcatggctggcctgaagatatctggtttcatgtggacaaactctctttcggctcatgtataccttcgattacataagggagagaatatagaagacatcccaaaggaagtgctgatggactgtgcccaccttgtgaaggccaatagcattcaaggtaaaaattgtgacagtggagaagaaagtaaatgagatcctgaaccgattagaaaagaccaaagtcgagcggttcccagacctagcagcagagaaagaatgcagagatcgtgaagagaggaatgagaaaaaagcccaaattcaggaaatgaaaaagagagaaaaagaagaaatgaagaagaagagggaaatggatgaacttaggagctattcatcactaatgaaagttgaaaatatgtcttcaaatcaggatggcaatgattcagatgaattcatgtaaaaggagaaaaggagaaaaggacctttgaaagatgtgaatgtagagacaattgcagaccttttggtttcatctgtgttctgaagtataaaatacaaccaaaattctaccttcatcctacccagaaattattgattttcaagttttaaaaaaattgtaccttttttgctgacagaaaaggatcagat

SEQ ID NO: 49437 - DNA, 355 bp, Homo sapiens
  misc_feature (1)...(355): n = a,t,c or g
ggggttacctaaccacaggtactgtgataccgtgacagtcaatctgataaccaagacagctattgagtaacaggcacatagtgtccacagcatgggtatgctggacgaagggatgatttatatcccgggagggatggagtgggacagtgtgagatttcatcatgatactcagaatggcacacaatctaaaacgtagttctgtaattttccatttaatatttttgaccgtatttgactatgggtaactgaaaccgtgcaaagtgaaaccgtggataagggaagcctactatatcttcttagtctcttaggacacttttgagactaaagccaactangaaaatagtttttagactct

SEQ ID NO: 49438 - DNA, 741 bp, Homo sapiens
gtatactgtgacatcgaattggctggcattaggaactgtcttcctgtttgggctcttgtcattttctcgctctgtggcactgttcagaggatatcacgggccccttgatttgtatccagaattttaccgaattgctacagacccaaccatccacactgtcccagaaggcagacctgtgaatgtctgtgtgggaaaagagtggtatcgatttcccagcagcttccttcttcctgacaattggcagcttcagttcattccatcagagttcagaggtcagttaccaaaaccttttgcagaaggacctctggccacccggattgttcctactgacatgaatgaccagaatctagaagagccatccagatatattgatatcagtaaatgccattatttagtggatttggacaccatgagagaaacaccccgggagccaaaatattcatccaataaagaagaatggatcagcttggcctatagaccattccttgatgcttctagatcttcaaagctgctgcgggcattctatgtccccttcctgtcagatcagtatacagtgtacgtaaactacaccatcctcaaaccccggaaagcaaagcaaatcaggaagaaaagtggaggttagcaacacacctgtggccccaaaggacaaccatcttgttaactattgattccagtgacctgactccctgcaagtcatcgcctgtaacatttgtaataaaggtcttctgacatgaatactgg

SEQ ID NO: 49439 - DNA, 735 bp, Homo sapiens
gcagttcacactccgggtcagagttcctggcccggtgcacctgagaggtcgctctccgactcccgcgctggaccctcttgcgccattgaaccccctgatccgggggcctcggaccccagggtctcaggaggactgaaccaagacttacccgaagttgccgcggggccttccgatcccctaggccattgcccaagtctggccaggctgatgggaccagcgaggagtctctgcaccttgacattcagaaactgaaggagaagagggacatgctggacaaggagatctcccagttcgtatctgaaggctacagtgtggatgaactggaggaccacattacccagcttcacgagtacaatgacatcaaggatgtggggcagatgctgatgggcaaactagctgtgatccgaggtgtcaccaccaaagagttgtatccagagtttgggctggacatgaatgactgagcaggctcatcgccccttgtccacagctcccagggacagaagggtgtggacatgataaacactgagagcccaaccagcacacctacagagtttccagcgagacaatgccagaagcacttttctagagagcccaagcccaatcaggaggaggctagagaagaggcgggcagggaggaaggggcgttcccagctccaaggttcctgaaatgtcgcagtgatacttgtgtaggggtacatgtactttatttgtcaataaacgtatctgtacactgat

SEQ ID NO: 49440 - DNA, 1216 bp, Homo sapiens
agacttggcatgcatgttatcatagctggaaataatgacagcaaaccaaacaagttgtaagcaaaataaaagaagaaaccttgaacgacaaagtggaatttttatactgtgacttggcttccatgacttccatccggcagtttgtgcagaagttcaagatgaagaagattcctctccatgtcctgatcaacaatgctggggtgatgatggtccctcagaggaaaaccagagatggattcgaagaacatttcggcctgaactacctagggcacttcctgctgaccaaccttctcttggatacgctgaaagagtctgggtcccctgggccacagtgcgagggtggtcaccgtctcctctgccacccattacgtcgctgagctgaacatggatgaccttcagaggcagtgcctgctactcaccccacgcagcctacgcccagagcaagctggcccttgtcctgttcacctaccacctccagcggctgctggcggctgagggaagccacgtgaccgccaacgtggtggaccccggggtggtcaacacggacctctacaagcacgtgttctgggccacccgtctggcgaagaagcttctcggctggttgcttttcaagacccccgatgaaggagcgtggacttccatctacgcagcagtcaccccagagctgggaaggagttggtggccattacctatacaacgagaaagagaccaagtccctccacgtcacctacaaccagaaactgcagcagcagctgtggtctaagagttgtgagatgactggggtccttgatgtgaccctgtgatatcctgtctcaggatagctgctgccccaagaaacacattgcacctgccaatagcttgtgggtctgtgaagactgcggtgtttgagtttctcacacccacctgcccacagggctctgtcctctagttttgagacagctgcctcaacctctgcagaacttcaagaagccaaataaacattttggaggataatcaccccaagtggtcttcaaccataaactttgtgattccaaagtgcccagttgtcacaggtgccataaataattacattttccaacataaatgtgccattttccttgccgcgttaatacaactgagtacaaaagttccaagagagatgctctcttttcaggggctgcaatgtcctctctgagacctagtggtggatgagggtcttctgtttgattttgttcct

SEQ ID NO: 49441 - DNA, 1131 bp, Homo sapiens
ccagccttcacgaaacatccacggttctggtggagactgtgaccaagtcctcctcaagccggggctccagctacagctccatccccaagttctcctcagatgccagcaaggtggtgactcggggccctgggctgtcccaggccttcgtgggccagaagaactccttcacctgtggactgcagcaaagcaggcaccaacatgatgatggtgggcgtgcacggccccaagaccccctgtgaggaggtgtacgtgaagcacatggggaaccgggtgtacaatgtcacctacactgtcaaggagaaaggggactacatcctcattgtcaagtggggtgacgaaagtgtccctggaagccccttcaaagtcaaggtcccttgaatcccaaaagtgcctccccagcctcagcccccacctccagccacacacacattacacacacacacacacacacacaaatgtgccacacccagacacgcacagaatcagacactacaaacaccgtgccttgggggtgaagtgaaggcccagcctccccaccccaccgcgccccaggggttggaggaccttgtctgtgtcaggacagtgtccctccctgggaatgtgacatgagggccgactgggggcaaggctcaggggcagaggctgggacacaaggggctggcgaagggctgcgaagcccagggaagccctgagtttctggcggggctgagcagtgggggagcattgtgttgtgggtgtctgtgtgtgaggtcaccctcaaactgcaccgccggccagataccctcctgaccccgaggacttggtctggtctctctggtggctacaaccccagagttttaaggacttggaaaggaaagcacaatcagagaagaaaacagcccccgaaccagcaggagtggcctggcacatggaccggcctgagcgatgtgcactccacccaagccaggctcccagggggcctgatttctctctcactgtctctttttttaaaatggttgcacggctctgccccatggggggccttttttacacactgcgaggcccagctttctaggggacttttgcacatgtcatgcagctcagctgggagctgcttaggtggaaaactccaaataaagtgcggctgtcgca

SEQ ID NO: 49442 - DNA, 1535 bp, Homo sapiens
tttttttttttgcagacaaaaagtggtttatttagcacccactatgtaccaggcacttgggaggtattttctcacactttcgctttccatcctcacaatatcccttatgaggtagggactaccctcatttttacaggtgagggaactgaggcttagatgttgacagacccatccaaggtgacccagctggtaatggtagacttcatcctgctacacagtatttaaggggcctaaaccataaacaatttttaaaaatttgggaaagtcacacataaaggagatgtttcaataccttctctctccaggtatgaacagtattgagcaagacccacagggcagcaataatcattttatcctgatgaaaggttcctctgtgaaaggtaagggggttgggggagacctaaagccttctgcagacccacatttaaatgagctgacagtcccagcaggactacagaggaaccagctaggggaagctgccaggatcttagacgtgaaattaaaaggagatcatgcttcttacccaggaagtggggaattcagttgacccttgaaaaaactgaataaattaacatggggaaaggctaattaccatgccccagtgctgggggtggagaaacagagtggccaaggttgtagcagcctgggcacctgctgaggccccattcagcgggagagccaccagttgggagtgtggacatgtatggccctaccagctctaagcaggagctggtaagggacttcccaaatgcaaacccttggtgaatattctagcagtgagaggaggtgagcaccagaccactggacaagagaggtcagagtcatacatagcaatctggacaggaaatggcatgaggagctgtgagtaatctgggggctatggctagaaaaacagggcacgagctggggctgagaagaggtgagcatccatcaagctgaaaggtgggactcaagccccctcagcactgtgaccccgttcctgtacaccaagctctagttggtgaatgcagtcccctggaccaagaggaagagaaaggcccagatgctttctcactgtctctgctatagcctaaaaacctgaacttttctatagttcccttcttgagccttggtgggttttatttttccttactgcctccagaagaagcttgagaaccaaaggatgtttcagtggatgtggggctcctttctctcatcagaagcttccccatggcaagaggaatgactgccagggcatcattaactatggatctagagaataaggtctcaaaatatgcagtgaactgtcaccacactatgtcccccaccaagggatatatacatggccctgccctatgagggaccggtgccccctcatctggcctgagacagatgctggagcccaagtcccaggatgtcccagccctttgaagggtcctggggcttgagaggatggggccttctactctgagtctgggagaggggctggttggggtggcttcggtgacatgaaggataatgcaagagtggagacaggccaggggacctcaaagcag

SEQ ID NO: 49443 - DNA, 334 bp, Homo sapiens; identical to SEQ ID NO: 11273

SEQ ID NO: 49444 - DNA, 581 bp, Homo sapiens
atgcacgttccatccggcgctcagctgggcttgagaatcctgttacacctgggatttaggcactttcaatctgaaaaaatacatatcctttcagcactctggacggacttgagaactgtccttacgtgacctaaagctggagtattttgagattggagaattaagaaggacagaataacgggctcccagattcacaagccccaccaagaggatcaccccaggaacgcttggaggctgaggagttcactgaggctactgcatcttgagactcaggatgaagacccagcttggggctgtcaaaggttttttgcatgtctgacacccatgacttccacctggaccttatggctccacccagaagcaattcagcccaacaggaggacagcttcaacccattacgatttcatctctgccccaaccactcagcagcaagcacctgtttacctgttccacccccaccccttcccccaaactgcctttgaaaaatccctaacctatgagctttgaataagatgagtacgaacttcatcgcccatgtggcgtggccggcctcgtgtctattaaattctttttctactacg

SEQ ID NO: 49445 - DNA, 1151 bp, Homo sapiens
  misc_feature (1)...(1151): n = a,t,c or g
gcccattgcaaagaacacatgatttattcaagacaactcgtcatcaacagcactgactcaaggaacaaaacagatgaaaaaactaaagcaaacgttctgaccctctggagtgagacccgctgaattcatacagctcaatctgtaagtgtccaagatccagggggcaggttctcaagcaggaagcctcaggcactctggctctgtggggacctcccttgggcatctgcttgagaatctggggaagggacattatcagggcaggtcctttctgcaggcggtgtcctgctgggagctcagcctaaccaaggcctggtccctgtgctcttgaccttcatctcaaggtcaaggagagggcacttgacccaactctgccagcgaggcaaagtaatggtgattcaagtagtgtggttccaggagggaaggtagggggcagacaagagtgagtgcactaaagagtcctgggcagtgtctgctgggtcccaggcagtggcccaagcttatgaaggggttggagaaggggctgaaccaccagctgacaagtcctggagagagggtggcccaggtgagcaggaagcatcatgcctctgcctcatcctggaggtcctggagtcagcccagttctcttcccatctttacactcaattccagtacagaactcagagcccgctcagccaggacctgcttgaaaaccaggcagttcctagaagcatggggagaagaggctgactttgatcttggaaaatgaagaggatcttgtctccaactcctttctcccttcctatacccatgcctcatccccagagcacttgccaatgtgcaatacatagccaggagtctgaataaatagtcaaagtctcccaaatactgtgctctgggagaggagacaggcaggtgcggaaatccaggcggcatcaaaggaaaagcctggtagaagagccacctggggaagcctttcctggcccaaagccgggcttggaagggcagcgagaagtcctgcccaccagactcggaaagctttgggggcaggagggctgctggggcctgactcctgccagccagtctggaggacgagggtcctcactatggcacccggctnccggaggcaaaccttgtacaaggagggaggtgcctgcgtgccaagacttgggcgg

SEQ ID NO: 49446 - DNA, 2716 bp, Homo sapiens
taaaggcggatttcaatcttgctgactttgagtgtgaagaagacccatttgataatctggagttaaaaactattgatgagaaggaagagctgagaaatattctggtaggaaccactggacccattatggctcagttattggacaataacttgcccaggggaggctctgggtctgtgttacaggatgaggaggtcctggcatccttggaacgggcaaccctagatttcaagcctcttcataaacccaatggctttataaccttaccacagttgggcaactgtgaaaagatgtcactgtcttccaaagtgtccctcccccctatacctgcagtaagcaatatcaaatccctgtctttccccaaacttgactctgatgacagcaatcagaagacagccaagctggcgagcactttccatagcacatcctgcctccgcaatggcacgttccagaattccctaaagccttccacccaaagcagtgccagtgagctcaatgggcatcacactcttgggctttcagctttgaacttggacagtggcacagagatgccagccctgacatcctcccagatgccttccctctctgttttgtctgtgtgcacagaggaatcatcacctccaaatactggtcccacgggtaacccctcctaatttctcagtgtcacaagtgcccaacatgcccagctgtccccaggcctattctgaactgcagatgctgtcccccagcgagcggcagtgtgtggagacggtggtcaacatgggctactcgtacgagtgtgtcctcagagccatgaagaagaaaggagagaatattgagcagattctcgactatctctttgcacatggacagctttgtgagaagggcttcgaccctcttttagtggaagaggctctggaaatgcaccagtgttcagaagaaaagatgatggagtttcttcagttaatgagcaaatttaaggagatgggctttgagctgaaagacattaaggaagttttgctattacacaacaatgaccaggacaatgctttggaagacctcatggctcgggcaggagccagctgagaccaggccctgcctaggccctgccgcagaaccaccatccctgggaggccctgcagagcccacctgtggggaaagagaaggggcagcttccggattttcttttgggggttagaaggtcaggtgtggagactgctcgccagtctctgtgagcctaggccctgagctggggaggtggggaagattcgggcatgtgagtgcccccagaactgtcctggctccttccgtattaaacgcatttgcattttgagaagtgtccttcccacttcagccctccggagagactaccctagtctttctggggtgtttatgtcctcagctgaagcctggcctagttggcgagaggggctggggagatggggcgggagggccagactcagtgctgctgtggagctaggtgcttcccccttcccctgagactggtggactgaactccagtcaagttgagttcaagtgaaagattcttccagggttttattttttcccctcctaacaaagtctcatagtgttaacactggttctgcaatatctctgaggtgcaaagaatgcacttttccctatggggcccagagtttgccttttctgccaggcagtcaccacgcttccctaccccagcctgtttcttttggcttggtttggaccacagtcctctgctacccagggttttagagcccctgctctagggaaacagtttaagaaatcattggccccttcccagcacattgaatgggtaagcagacaggccatgatttagttggccagcactaactccacctctgttctccttgaacagcttcccctccagcccactgctttaggatgacacaatgaataacacctagtcatagaaatcagtctctctggtttgttttgtattatgttgtacatcattaaagatctaaatacaaaggatatacagtcttgaatctaaaataatttgctaactaactattttgattcttcagagagaactactaataaaaatctaaaaggtatgtcttggtgtgataacttctttattaccaaggctgttttatgggagtgggggggccatgtggtgtataaagagatttcttgcttagatttgctggggatagaataggacctaaccgttttctatttcggagctttcttcccacttcagacctgtcctcgtttttggtttgcaaaggcaagcctagactgagtcttttaaacctggcccagctccgtctgtggaccaaggacgtaggccttcctgactgtggagttgggataggctgggccttcagggggatcacccagtaaaagaggaagaagcccttttactgtgagcagcaggcatttatgcatcatttgccacaagcagaggatgggatttaaactgtttcaccagctctcagtggtgctgttgtatatgatgatagaatagggttcattcctaaagtaagtaagtttttgtccttgaccttaatactgtgccattgtcccacttgagcttttggctagactgggtctttgaaggtttttagtgatcatgtgagggaggggccgcagtgccctgcagccgggaagcaccaataaggatgcccctggcggtcagatgaggcactgtcaggctgacaaagggtgactggaccaggctgctagtgtctcaagagagccatttaaccctctt

SEQ ID NO: 49447 - DNA, 1935 bp, Homo sapiens
cggacgcgtgggcttttaactacggcctctccatcgaagaaaaaaatgaaaatgatgaaaactcattaagcagttcctccgacagtagtgaagacaaggatgaaaaaataagtgaagaatgtgatattgaagaaaagactgaagtgaaagaagaaccggagcttcaaacaaaaagggaaatggaagaaagaacagtaactctagaaatccctgaagttctgaagaggcagctggaggatgattgttactacattaatcggaggaaacggttagtgcaacttccatgccacaccaacatcataacgattttggaatcctatgtgaagcattttgctatcaatgcagccttttcagccaatgagaggcctcgtcaccatcacgttatgccacatgccaacatgaacgtgcattatatcccagcagaaaagaatgttgacctttgtaaggagatggtggatggattaagaataacctttgattacactctcccgttggttttactctatccatatgaacaagctcagtataaaaaggtgacttcgtctaaattttttcttccaattaaggaaagtgccacaagcacttaacagggagccgggagggaactctctcccagtccgcctttgttggaatccatccacgccacagtccacagagagtcagccgaccaccggtggaaccagccacccccaaaaggcgcaaagctgagccagaagcattgcagtctctgaggcggtccacgcgccacagtgccaactgtgacaggctttctgagagcagcgcttcacctcagcccaagcgccggcagcaggacacatccgccagcatgcccaagctcttcctgcacctggaaaagaagacacctgtgcatagcagatcatcttcacctattcctctgactcctagcaaggaagggagtgctgtgtttgctggctttgaagggagaagaactaatgaaataaacgaggtcctctcctggaagcttgtgcctgacaattaccccccaggtgaccagccgcctccaccctcttacatttatggggcacaacatttgctgcgattgtttgtgaaacttccagaaatccttggaaagatgtccttttctgagaagaatctgaaggctttattgaagcactttgatctctttttgaggtttttagcagaataccacgatgacttcttcccagagtcggcttatgtcgctgcctgtgaggcacattacagcaccaagaacccccgggcaatttattaaaatgttgttggttctgtaagagcaactgctctgtctagtttggcgctctgggttccaggtgaataactaacaaggtggtgggtctttacccacagcgcaaacacaatgcccaccttggggctctgttgtttgagttgcccacatactgcagttattctgttaggaatgattccctgggtgcctgaaagtgctctgacacgacacttgttactttgcaggccatctgtgatggcaaggaaaaagcaactatgttcacagtgaaatattcgtggaataggttaggccatttcagtagacattgcagttagttagcaagaaccacattgtctctttatttgttagcattaaacaaatttttttttgcaaattggttttatttttttgatgaagccgagcaactctgtccaaaaaggtttagtttgtactcggaaaccacaaagtagtctcaaagtattttagagggaatcgatattgatggcaaaagaaaatttgcagctatgcatttgcttctaacggttccctctctgtgaaacattatttttggtgatctaaagaaagcattgcctttcttatttgagattttacagctatactttgttgtgtaatgttatggttccctttctgtaaaatgttatttttggtgatctaaataaagcctgtcttgtttgaaagaaaaaaaaaaa

SEQ ID NO: 49448 - DNA, 1110 bp, Homo sapiens
aataatacttgacattttccaaaggcaaatctcattctgcaaggagattgtggcaccatcctgtttgactctcagaaacctcttgtaattctgatgtaaaaactgtagaatgaagatgagaaaattctcgcaatgagtggatcatgacaactgtaaattagaacaatcagatttaaaccaattccgcaatcttctatatctttgtaaaagacaaatccttgatgttgtctgtgtgcaaccttttcataaactctggttttatgactagtacaaaccaccaaaaaagccatgtgatcaatagtctgtgtcctgttataacatggctgtgggttgagccatcttgtttataaataatagagctctcctgaatttgtggcataggacttcttggttcctggcttttgttttttgtatcaagagattgtgatataaaacagcagaagataaatggaaaccttccattttaacttacgttgtttctggggtaatgttagaaccttgaaagatgcattcaaagactgtatcttattttgcccttggctattagtgtctcacatatgtgtgtaaatgttttcctaccttctttttgctcagcaaaggcaagcaagtaaaatatatttgctaagtgattagtgatgcacatttggggctagatttttttggtacttttatgtaaagaaaagtggattttgcagtaagggattggcatgagcaggcgtcagaatcacaatcatgattttctacttgaataattacaattcagaaggtatctggataaatagatacatgtctagtgaacaatttgtaacaataacaggtaaggatcaggaaattcagtattcagtttgtcagatttgccagaatgacgaaagtatttgaacatgtgtgtttgtttcttatataattgtattgagtggattgtttgactgggaaatctgggctagaataggaaacagaagatactgacttctaccctaatagatgggccccaatttagcaaagataaactgactttatttttagtcctttttatattaacttaataaattctggagttaggctctcaagaggacagagggactgtctggcaatggccagccagacctttac

SEQ ID NO: 49449 - DNA, 734 bp, Homo sapiens
ggtcgactttttttttttttttcacttcagactaaattttattaaatatggtgtcatttggctacaatcggtttgtctttataaaactaagtaacttattttgtagtaaaaacaaccccaacccactgcccctctttggcagcccttgaaactcagttcaaagctaggcctggctcccggccatggcccctgctgccttcacctgctgagcgctctaggaagcctcccaaatcccaagtgtcaggcccccggagtccatcacctctgcctcaaacagccaagcccaggggctttggggccgcaggtatgaaggcccctccagtagccacacctgtgtcagggctgtgcctgggggggcctgggccaacatcccccctccccttgaaccatcaggaactgggcaagacgcccaccagaggcttgaccacagggggcgtgcatccccttctgagcctgggagaccctaggggagtgggtagcctgggctggacccctggtgggcttgtgttctggatgtcgctatggcactttggtcctcaactcaaacccccacccctacccaggagtctgagacctcggccttccctggacttgttgggcagaaaaaggcaccaaggacaggatgagaaacccggaggggcagccccacaaatgagggcgctctgacctgtcctcccattgccaccccacccaggaacagcccctcaactggtcacagccaccaggaagcccca

SEQ ID NO: 49450 - DNA, 2175 bp, Homo sapiens
gaacagttcaatcctgggctgcgaaatttaataaacctggggaaaaattatgagaaagctgtaaacgctatgatcctggcaggaaaagcctactacgatggagtggccaagatcggtgagattgccactgggtcccccgtgtcaactgaactgggacatgtcctcatagagatttcaagtacccacaagaaactcaacgagagtctttgatggaaaatttttaaaaaattccacaaagagattatccatgagcttggagaagaagatagaacttgacgtgaaatatatgaacgcaactctaaaaggataccaaacggaacccaggattaaattagagtcttttgggaaatcccaagctgagttgaagaagatcagaaggaaaagccaaggaagccgaaacgcactcaaatatgaacacaaagaaattgagtatgtggagaccgttacttctcgtcagagtgaaatccagaaattcattgcagatggttgcaaagaggctctgcttgaagagaagaggcgcttctgctttctggttgataagcactgtggctttgcaaaccacatacattattatcacttacagtctgcagaactactgaattccaagctgcctcggtggcaggagacctgtgttgatgccatcaaagtgccagagaaaatcatgaatatgatcgaagaaataaagaccccagcctctacccccgtgtctggaactcctcaggcttcacccatgatcgagagaagcaatgtggttaggaaagattacgacaccctttctaaatgctcaccaaagatgccccccgctccttcaggcagagcatataccagtcccttgatcgatatgtttaataacccagccacggctgccccgaattcacaaagggtaaataattcaacaggtacttccgaagatcccagtttacagcgatcagtttcggttgcaacgggactgaacatgatgaagaagcagaaagtgaagaccatcttcccgcacactgcgggctccaacaagaccttactcagctttgcacagggagatgtcatcacgctgctcatccccgaggagaaggatggctggctctatggagaacacgacgtgtccaaggcgaggggttggttcccgtcgtcgtacacgaagttgctggaagaaaatgagacagaagcagtgaccgtgcccacgccaagccccacaccagtgagaagcatcagcaccgtgaacttgtctgagaatagcagtgttgtcatccccccacccgactacttggaatgcttatccatgggggcagctgccgacaggagagcagattcggccaggacgacatccacctttaaggccccagcgtccaagcccgagaccgcggctcctaacgatgccaacgggactgcaaagccgccttttctcagcggagaaaacccctttgccactgtgaaactccgcccgactgtgacgaatgatcgctcggcacccatcattcgatgagaggacagccaaggactctcccgggcctctccggttctcccttgcggaatgatgggcgcatcctgtctgccacgtgctgacggtcgggaagcttcagtggagaggcctaactctaatgtcgcctgcttaagcaaatcatgcttctctgtttcacgtagttgggttgacaagtttctgcctttaagataaatgagtaatagtctaatgaccagctcagccatttaaaatattttcttcctattctgttcaagaaacagtaaacttggtttcaatctttactgtattttttaaatgaattttttccttaataacagccagaataagggatagtctatgctttcaggactggctttctgcacctgatatgaatgagaccagttttattttataaagcatgtgctcttaatagcattatgtctaaagaagatatcacgtaagtttgcatcttagcatgcaaatcataattttaagcaatataaattatgaaaatactatataaatgtaatttaacttaaaatgtttaagtgtagagcttccagagatggagaaacccccaccctccctccaaccacgccagagctgtagagtgctaagacgctttgcctggcccttatcacagccacacgtagcactcgacgaaatctcctccgagagctccttttcttggtagttaggagtcgccaacggattcgctg

SEQ ID NO: 49451 - DNA, 808 bp, Homo sapiens
tctgaacaatatatacttatagaattcagtcaaagatacacaatctgaaacagcttcatggggtggactctaacagtagttgcaatgttttagaatgagacttacttctctgctatctagatctgaactccttggcttctttacttagttcaagccccagcctaggaaagccagttacataaaagttggctcaggagtcttagagctttacctaaatatgagcccagaaaacggaggatgggggtggggcgccttcctggaggtgacacttgatgggggtgtgttctggttactgttctaaggctgtgccatcagctccttcctcccctgttcattctgcattctctagtcagttggctaagaagtgactcttgcaactaaaaaaattaagaaattcacttcccctctaggaggtgatgatagggtttctaatggttatatgtatatcacattcccatttgcttagaaagtctgattgtagctatgattgtccataggcccatactagagttcatggatatgttatactgaaccaggccagagcaaacagaaaaagaaggttgagggcaatggacaaggaaggaataaagggagaagagggaaaacagaaaacctgatgctggggacacagcatcagctcaagacgtcaccctccattctgcactcagaaaatggcacttgggggactgggcgcagttggtctttaaccacttttcaatgtctaaaaacatttgtttgtggtctataagatgaaacatcatttcaatcgtaaaatttcccattaaagaagtttttttttctaaaaaaa

SEQ ID NO: 49452 - DNA, 1008 bp, Homo sapiens
agcgattctcctgcctcagccacggcaccttgcaaatatcagctccttggaacaggtgaagttccaggtaccaatgccaatcagaggaaggcagtttggttcaggctttggagttagaaacacctgaagttgaatctgggctctgttgcttccttctttcatgggctagagcacgactctttacctctctcttggcctcaatttcctcacctgtaaaatagatgaggaagctgctcacttattgttgtctcgttctgaaagcttggaaagctacatcgaagatgaggctcttcattcagctttgatttgacctgtacccctggtgggggattgcactggcaacatttgggtctcagcaaaaaaaccaagcacacacatctttccttccatttattgaaaaacatctttgtaagatccattcattgaaaaacataatccatttattgaaaaatatctttgtaagatcacctgctaaatatgaaaatctgacttgaatttgtactctttaaagttgcgtatctgctctagtgggcaggacctagggcttaaaggggaacttcctttctccaattctaggaactgggactctaaaatgagaagctggttgtctgaagtaaccctgcaggtgtggttggggaaggtctgttttcttggatgaagggattaaactgagcaaatcactagaagtatgccctgtcccctgctcagaacactggggagctcaagagtgggctgcaatgtgcacccctcaggaatagctgtgaattgcaggtctactggctttttgctttttgtcctttgctgcaaggtaccccacgtacttaaccattctcaacagtgtaaatcagtgtcattttagaatgagatactcagcttgcttctaaagtcactgaattactgagtgagtctctcctttagagtcttcggcaaccaaattccagaattgaagagtctactactcagaggcaacaagattaaaaaaagaaaacacaaaaactgttgaggtga

SEQ ID NO: 49453 - DNA, 809 bp, Homo sapiens; identical to SEQ ID NO: 11291

SEQ ID NO: 49454 - DNA, 887 bp, Homo sapiens
ctattactactaaacttgcggccgcgtcgactttttttttttcttttttttcaaagtcaattaaattttatttcaaccaagaatataaaataaatgcaatgtaatttattttagttttaacagtcatttcaagaaggaagtcaggtcaactcaaaagcaggaaaccctcgctccaaagcagtagctcgtcctgcactccatggagcaggcctcgctggggtgcagcggctctgagcacaaacctcgcagtggagcacgaaaagctacagtcatctctataaccatataaagggggatgcgtgcagaaaatgactgaaaaaagagacaagaacaggtacacttcacaaataggaattataggaatatacaaactaggcagtttagaaaggatatactacataacatatataaaaagtactttaaattgttgttaaaaaggacaccttcagtccagattttgtgtaatacttttagtgtctacacagacaaatctttaaaaaaattaaatagtattaatttactaaatatttaggagataacagtgcattaagggtttttttttttatataatacatacatatcacccctttgcagtgatagcatagaagagtaagtatggccttaggtacaacacgttttttaaaaaccctaaaacaatgaactttgttatatttgtgactatttttgaggattatggggacctaaactgctatgttttatacaaaatattacttgtacttgaatccttcaagcctctgttggtctaactgccatttcactgcctttctctactccctaggaagacatcatcatagagttttggatttgtaatttccatagaattcttccttcattgtatagtttctgctgcataaatttactcaaaa

SEQ ID NO: 49455 - DNA, 1454 bp, Homo sapiens
  misc_feature (1)...(1454): n = a,t,c or g
tttttttttttttttttttacatctgaatgtattttaatataaaaataacagctttcccccaattctcgctctaggaaaatgtgctatgctcaccttccctctacccctgtcccatcaggcccagagccaaggccatagggctgctgaatacacatgtgagggggccgaggggaagacaacagtaccaggagggcaggcagggcacccccaggctggccagtggaggggtgggggtatcgatcccgccgggggctggcttggttgctggtgccctgagcccttctctgcccgcctgggtgttgccttcactgatggaggtaggcgtccagccagatgtcaccagacttcttcagggacctgacgatgtccaccagcgcggtgaggaagggcttcacttcgtagctgaggccgtgcttggcacacagcgacttgaccagcggggccacccggctgtagttgtgtctcggcatcctggggaagaggtggtgctcgatctggaagttgaggtgcccgctgaaccagttggtgaaaacgtgagggctccacgttgcaggtggctgccagctgagagctgacccagtcccggtgcttctcgtggccgatctccttggggatgtggttcatctgtgtgatccacacgaaccagtggctttcccaggaccctgacagcaacaaagaagagcagcaccccagggacgccgtagaaggggaggtaggataagaagaagcgggcatagaagctggcggcccagagcaaatccgcccactgcatgcacaccagcatgtacgccagattttccacttcaaagttcaccagggtgagcagcggcgggccgatcaggaagaagtacaggtgctgctggttgtagggtaggtatctgcgtttcttcttgccatactcgacggatgactcccccaggaggaagacgggcgccaccgtcacgtctgggtctttgtggaagatgttgggcttggcgtggtgctggaagtggcggaagttccaccagtgggcggagaagccctttagctgccccatcacgaacttctgggccacgtggttccaccaggacttcttgaagatggaggcatggcccaggtcatgctgcagacaccaggactgagcctgagagatggccaggatgaaggcggcccagggcactgggcacccagccaggacccaggaggtagataaggagccaggccagcacctccatggccaggatgtggcccagtaggaaagcaaagaaggtgggactggcatcaaacagcttcatgtcctcggctgcctggtgcagggctcggaagtcctcgaccntgcgcattcaggggtccatcctggctgggttcttccggagccagctctccaatcaacaggggctgtaggaacttgcgcacaaaattgagatcttgatggaaggcacggaaggcatccgtgcgtcctcagcgccgntgt

SEQ ID NO: 49456 - DNA, 706 bp, Homo sapiens
gcggaactggagcaggaatttccccagtgatcctcaattcaggagagggcaaagaagtagacattttacgaatgctcatcaaggccaaagacgaatacacaaagtgtaaaacctgttctgagccaaaaaagataaccagttcctctgccatctatgacaatccaaatctcatcaaaccaattccagtgaaacccagtgaaaaccagcaacagcgtatacctcagcccaaccagaccttagaccctgaaccccaacacttatccttgacagctctgtttgggaagcaggacaaagctacatgtcaggaaactgtggagcctccgcagactctccaccagcagcagcagcagcagcagcagcagcagcaagagaagcttccaattagggcagggggttgtacgcttccctgtcctatgaggaacccagaaggacactcaccccccatttgaggaaggcagctctgtccagccattcagaaactcatggtcaggagcgcagacctccacccattgtcagagctgcctgaaaaccggccttgtgaaaatggcagtacccattctgcgggagaattttttacaggacctgtccagccagggtctcctcacaacattggaacttcttcgtggtgtacaaaatgcttccagaactcagaacctgttcgagaaactttcagagttaccccagggggcagcaaacaattgtgacc

SEQ ID NO: 49457 - DNA, 2048 bp, Homo sapiens
ttttttttttagcatttttgggatcaatttttatttgggcttctcacagtggttagagccactctgtcttcagaacaatcacagcacaggaaatgcgtcactgagactgcccagaaaagtctgaccagctgaatcttattgcttaaaatacacatattcacaacaactgacaaagggtaacgtgcctcacacaggaatgtgttcgcatttgcaaatcttctgactggctgtagcaccaaaccctccaccgaccccgtctcattcacgtggaaagccagcctcagtcacatctccctggccccctaacgattccttcagctccctattaaatctctctctgagcagggcagcatcctgtagcgggggccaaactgtgacctgggaaccaagcccagctccgcaggttgcatttccgtcttctcgtgcctttaggataggacgctgcagtgagtcccacagttaacacttgcccagttccccactctaactggggaaaggaacttgagaggctcagaactcatccatttgatctgttaactgaaaaaggattcattttggtaaaacttgttcgcctttgagacacttcagtgagttatttgggattcttaaaaaataaaaaaaggtggaaggaaaggcatctgaggggctgtgacacactccggctacctctggccacacgccagcttgcttgtgcctgttggactcaccagaggcaggcaggccctgcggctcctctagagcctgcaaagcctcctcctggcaattctgggcagggcccgatgtctgggccaacagctagtccaaagcctgtccattgaaagaccccagtcaaccttctgtcctgaaaattcccaccttcttctgtccccaatggttgtggaacacccccgggccgctggtactgaggacccagcagcagcccgagggagacagacaggctcagagcacgcttcccatttaatagggaacagaacgcaggccctcccgagtgtcccacggagcaatgtgcaaatccgcagtgatgaagtagagtaaaacctcctacttcgagcacagtatctctggcaaacacaggggactgcagtcgacaatgctgcggagtacacccgagtacacagtcagacatttgttcggtaaacagtaaatgcgtaagatcaatgaccttgagaggcctgtctgtgctccagacgtgtggttcacgtggagagaatggctgccactcaaagtatcttcacaggaaaacagggcttgaggcacacacacaacagacagacacacacggctcacccaaaaagtcactgtgtacggacttaactttgttcaacatggattttggttttgtggaatctaaatgcagacactcgtttacctcacacccttggatttgtctgtttttggacatatatatatattttttgtttgtttctttctttcttccataacatcaatgcttcgtctgaatatcatcatcgttcaagagttgggggaagaacgacttcatatgcacagggccgggtggggaatgtttgttttggctgtttgctgcctccattcagattttcctatcgcagctcagctggtgacctgaaggcgagcaacaggcacaaggatccccagggccttccggatggccgctttcacctcctgcctgggccaccgagtctctacacagaaaaatgagtcacccgactcaaaaggggtgggggtagaggcagggacaaggcatgaaaaccacagataaccaaggtgtttcttccaagtggtcagtttaaaacaaacaactgccaccaaaaaaaaaaaaaaaaaccccacaaaaaatatttattcagaatcaaagataaaatactgtgtgagagccaggctacaggggccctttctctggggccatcgcttcctcagtccgctgtctgtttcctcatacggaacagtgagacttgaaggcccgcagggtgtgtgcttgcgatgcaggctgacacgggtcacctgtgaacatagaccaaagggcagagaggcagagagctgcacctctatccactgctgcggcttag

SEQ ID NO: 49458 - DNA, 349 bp, Homo sapiens
gcaagcattggcccaaataataattggacaaagttcctaaagttgtcaagtgtgtaagaattagtgaggtagctgttgaaaatgagtgaggatggtatttgtatttgtaataagcactgcaggtagagatatttcatgggttataataagagaaacacagatgagatgtagatggtaaggagtcttactgttgttggggtccttcctttctccttcttttttcccccttacccctcccacaatttcatgaagtcttttaaattaaatatatagctgaattgtgttgtgaatcagacctgaggactattttttcgattatgtgtgttcattctttgttcaaatatttgcc

SEQ ID NO: 49459 - DNA, 782 bp, Homo sapiens
tttttttttttttttaacacacagagcagctgcggagcgactttattgtcttctccttcgacagcttcgttgtacatagctgggcccccgaggccctgactgtccctgggaaccaagccacgtggggtgaagctactttgaaacctcacccacagttcacacgtggtgaaagagaaaatctagcaaagtaaatccaacaacaacccaaattaacagtattattaacttcctaccccaagctggctctcccccaggccctgaactggctcaggaaggaggcaggaatgagctgaccgagacaaggcatcctccacccacacatcccatcttctgagtggtcccagagctgtgcgccacccctgtgggacaatcaggcactcctgggtctctaccagctgtgatgagacgtacaagaggagggtctgagcccagaataaacaagagcatcctgaggctggagaggcaggcccagtgtgcccggaccaccctgctctgcctgagaggatgggctgggttccagctggcccggccgccacctagtgactgcttgggacagtggagatgatgacaggatgcccactcgccctaggcagtcagaagcggggtacacacaaacactctagaagccacacttagcaggaattcccagtcttccggcccaggggagggtgccaccagctcaggcagccctcaagaggaggccgggagcaacttctccagggccttcttctgcttctcggtggctgcagccagggcctcaaccagcttctcctcgggcatca

SEQ ID NO: 49460 - DNA, 619 bp, Homo sapiens
ggcaaccaactatatctgaggaccagagccattttggggcaccagagcttgtgacctctccatctccacccagctgggtccaggggccactctcagcactcacctcagcagctgacatcataaagcagacttgggaacctggaagcactctggagaacctttccctgagacatggagctttggggccgaatgctgtgggccctcctgtctggcccagggaggaggggaagtacccggggctgggccttcagctcatggcaaccccaaccacctctggctgggttatccagtgccatagaactggtcagccactggactggggtctttgagaagaggggtatccctgaggcccgggaatccagtgagtacatcgtggctcatgtccttggagccaaaacatttcagagcctgaggccggcactttggacccagcccttgacctctcagcaactacagtgtatccgggagctgagtagccgtcgattgcagaggatgccggtgcagtacatccttggagagtgggacttccaggggctcagcctaaggatggtgcccccagtgtttattccgcggccagaaacagaggaactggttgagtgggtgctggaagaggtggcca

SEQ ID NO: 49461 - DNA, 1636 bp, Homo sapiens
ggcggccaacatgtaccgggtcggagattatgtctactttgagaattcctccagcaacccatacctaataagaaggatagaagaactcaacaagactgcaagtggcaacgtggaagcaaaagtagtatgcttttatagacgacgtgatatttccaacacacttataatgctcgcagataagcatgctaaagaaattgaggaagaatctgaaacaacagttgaggcttgacttgacccgataagcagaaacatcagttgaaacatagggaactcttttgtcacgccagtatgaatctctgcccgcaacacatatcaggggaaagggcagtgttgcccttctgaatgagacagaatcagtattgtcatatcttgataaggaggataccttcttctactcattggtctatgacccctcattgaaaacactattagctgacaaaggtgaaatcagagtgggacctagatatcaagcagacattccagaaatgctgttagaaggagaatcagatgagagggaacaatcaaaattggaagttaaagtttgggatccaaatagcccacttacggatcgacagattgaccagtttttagttgtagcacgtgctgttgggacattcgccagagccctggatttgcagcagttctgtgaggcagcctagtttgcatatgagtgctgctgcagcttcccgagacatcaccttgtttcacgctatggatacattgtatagacacagctatgatttgagcagtgccattagtgtcttagtaccactcggaggacctgttttatgcagagatgaaatggaggaatggtcagcctctgaagctagcttatttgaagaggcactggaaaaatatggcaaagacttcaatgacatacggcaagattttcttccttggaaatcattgactagcatcattgaatattattacatgtggaaaactactgacagatatgtgcaacagaaacgtctaaaagcagcagaagctgagagtaaactgaaacaagtatatatcccaacctacaaaccaaatcccaaccaaatatccactagtaatgggaagcctggtgctgtgaatggagctgtggggaccacgttccagcctcagaatcctctcttagggagagcctgtgagagctgctatgctacacagtctcaccagtggtattcttggggcccacctaatatgcagtgtagattatgtgcaatttgttggctttattggaaaaaatatggaggcttgaaaatgcccacccagtcagaagaagagaagttatctcctagcccaactacagaggaccctcgtgttagaagtcacgtgtcccgccaggccatgcagggaatgccagtccgaaacactgggagtccaaagtctgcagtgaagacccgccaagctttcttccttcatactacatatttcacaaaatttgctcgtcaggtctgcaaaaataccctccggctgcggcaggcagcaagacggccgtttgttgctattaattatgctgccattagggcagaatgtaagatgcttttaaattcttaaccttatatgttgtgcttctgaccattttctcttttcctctctttccttttttttttgtttgtttgtttgcaataaacataagttcttgtgt

SEQ ID NO: 49462 - DNA, 467 bp, Homo sapiens
gatgacactgaaattccccataagggtgtgattgtatattcagccaagacactgtatctcccttatgccttttattttcctgacatagcatgctgctggatcaatgtgtgtattgttgctactctgcctatgccagaggtggtgactcactcacacatataaataattttagttgaatgtttttataggttgtgtattccttacttgaaaggcttgggaccagaagtgttgcagatttcagatatttttagattttggaatatttgcattatacttaccagttgagcatcccacaaacctgtttaatcatgggacagcataaaatattgcccagtggagaacaatgcacatatatacttagatacaatgtttgcgtgaattttttattgttgtttttgagaaaaaaaatcatggtaaatattactacttctgtgtttctgcatacataaactttgagttaaagcaaa

SEQ ID NO: 49463 - DNA, 405 bp, Homo sapiens
aattcggcaccaggggagattgggggagagatgacagctgcagggatggttgtgagccgctagtgatggagagcagagggagagggccaggctccagactcccacacgcccacacagcacctctgccaggcctaggagaggacaggtgcagctcttgcagctctgcgggtgtgcggccaaaggcaaggcccacgggctggatgtcacttccccgactgtctcttggttggcttgtccttgtgcaagacccagcctgtcacgacagagcctgggcacttcagaggaggagccaggatcgaatggaaggggggaattggggtccaccatagtcttctgctctggtcctccacgggtggaccaagatggagtctcctgcctacctactgcattgcactggacctggga

SEQ ID NO: 49464 - DNA, 2079 bp, Homo sapiens
  misc_feature (1)...(2079): n = a,t,c or g
ttttttttttttttagttagaactcaactttattgttacaacgaatttttatttacagaatataaatctcttcaaaaagatacattccttcatttaatcaatggtaaaaagccttattaacagaaataaagcctaaacatcacttatatttgaactgaaagacaaacagcttcattaaaagtttatgaacacatagtgaaaatgtatttttacttaaccagttacatgaatgaggctgtttttaattttcttcactgccaacctcattttatccacagaacaaattttatttaaattaacagtagtaaaaatgtaaaacttaaattttgaacatgaaaatatgaaacaagaaaacaggaagtatcttcattatcaaacagattaacaaattctcagacagatattttctgaggcatagcaaaacacctacatcaaaagttgcattcatttaagaggtatccatacttttcagtgctgagactatttggaggcacttacattatatacaaagcagcattatactactatgggtcncctttggtnaaccncggatttaagccttatgccacaatttcccaattcaacataaantaacgcaatgacagttacccaatttcattctttttcttctgaaactgaataaggaaattatcatttaagcacatggaataatggccatctttttccttttaataacagtatattttaaaactcaaatacttcatatcatggaaatttgaccaagctgtacaaaggctcctaaatacagtacagtcaaaaagtttcctctttgcagactcaatttatagtcaatttagtacagataaatataggaaactacttcagattattggacaaataagaatttcagtgtgtcactacctataattaagtagcagcacaccacaaccacagcaagtaaacactaatctcctctactgcctttttggggtcttttccagtcacaggagctaatttacagggataccactgggtttcaaccaatctctgaaagttcctttattatgagttttgaaatttaactaatgcatcacctacaattctgttggctagtttttttcttactcttcactaattagttttaaatacaatatgtaatgttttcaaatttttataaacataggtgttgtactaaaatgattaatggcatttgaaatacaacaaatgggtaagatgttaaccaaaacaatgggattaagagtattttagaaagcgattttttgttaactagaaaagctacaggattcacaatgaatacagatacaatatttttaaccctgctcttttattacatcagtagtatagtaagtgcataaagtatagaagagaaagaaaatttcaggagagaaacttacaaaaaacttgaagtttgatgcgtcaaacacaaaatagtttaaaacagtttacagttcttataagcactatcataattttttctacccaaataattcaggtcttcattccatttcaaactgcaatccagaaatgaagattttcagtgtaaaaactgttcagagaaatctaattcattatgtaatacatcttattaatttcagttttcaagtattcaagtaatgcatacccaagtattttctgttacagcaacacatttacagactaagcctcaaacatggggaaaaattcatttaaaataattgatacacttttctgtccaacgacatcaaacccaagacatgacactggaatcacacaagtggtatataaaagttaaaaattttaaaataaggtggttcaatataaataatgtcttcttttcaaaaagaactgaaaacaggttatcttaatacataactaaattcccagtaaaaggacattctggaatctaatggactaaagaaaaaccagagcaaatcaattttgaaagatgaagctgctttaccacatacttaaaatgatttttcctctgtgcataataattactagcatttgtcttctgcataaagtcgcacaggttactgtcaacaagtttcctagcataaagcatcgctaactttgtctatcaactgaatgactgattgattaaaagcttaagtctgt

SEQ ID NO: 49465 - DNA, 1353 bp, Homo sapiens
ggcaagagacttcctctggtttcctcaggaggaaatgggcaaggcagagtaagcaggggagacaggtttaagggtagctggcttgagtaatttcagtggctctcaggataggggctgccctttttgtctgatacctggccccgggatagtcaggacaggtgaatgttggcctggggtgtgacagccctgggagagccatgtgaaggaggcagctggcgccatcgcttccggattagttggtttccataggaaaggcatgctttcagccagatgcttgccatctctagggattgggggatttgctagcctgggaggatcaagtctgtccaggtcagcgaggccccagataccagagcatcaagagtacaggaaatacagttaatgcagggcctctgtgtggctggttcctccgtctccatcagatcagctctgattgatctattcttgcacgatttcctctgaacacagggttccagagtacttaaacacaacattttttaaatcgtgatttcggcctatttccttgccaggcctgtttccccaccaggaaatgagataggaggactggatgaggatgtcctgttatagttgctgtggaggaagttcctctggttaaattctcatcagcgtctgcagaaaagaaggaaagagggcacccttttcagttgggaagaaaggagaggggtggcgccatggacgtggccctaaacgctgtgggagagggaagaggaggctgggcctagctgccctcttgtctctgctgacttcagcctggtcatgcttgctctgccacttgcgatttcatccctaatttcttcctccaccatgcctgcagacttttccctgggcttgttttttctcgcacatctctgaagagtttttaatctcagctcatcatgccccagaagtggcatcataaaaggaaatatttttttttcctaggagcagtgttaaaatctgggtcacattcctgaccaaggacagcatcctgccttctgcccatccccttcagttcacaaaagctgacattttaaacaaatcatgactcacacgtattaattggttataaatatgttgtgtacactggttagataaaacttaaggccacaaggagggcccaggtaggcgatgtcagtgtgtgaaggggctggattgggcgtggtgaggatgttggcaaaccagtgcatgcacctggttggaagatgctcagcctcacaaaagctccaagccctttgggagccaaagtgtctgagagtgtgaccctctcctgtaaagtatttatcccacccattaatataatttctgtataataaacttgacctgaaattatttcattctttatattaaactttt

SEQ ID NO: 49466 - DNA, 800 bp, Homo sapiens
  misc_feature (1)...(800): n = a,t,c or g
tttttttttttttttttgatatgatttttttattaacatataataatatatttaataaaaaatagtatccactctgggctctctcctccactgcaaggggaagagtggtgaggaggggctggcactgcccacccctaggcatccggaaaaaccctgcttccagggctcccctctacccctgctttccaacaggctctgacctccagacagacggttcaaagttacaagtgctttaggccctcccttgagttcccccaggcccatcccttgcgcagaattcaggggccacctggacaaaccccttgctttttctcattcttggcatccttcattcatgctagaaagaggatctggggacagagagtagagtctctacctgccagggggaagggaggaaaggaatggtggtgggggatggggccaagaagagggatggtgatgaggtgccctcattggagccggtcactgcggaatgactcctccacagcaggatcaggcagcagggcacaggggtcactcagcatgtttagcccttccaggcccagtggctccatgcgcagctcatcttctagcccaagccctagctccaatccagctgctgacacctcaaagccaggcactccggccagggctgctgcaatctccttagagaaacctggagaggagtcccctgtgaggatgatgttaggccctgagccatggcgggaacagtgggtcaagttctggtggttgaaggtgtggggatccatgggccaccaanttggcccctcaccccctaaaaattagcncccttcagaaaa

SEQ ID NO: 49467 - DNA, 436 bp, Homo sapiens
gaccgagagagttgtaggcgcaaagctgaggaaaggagagtgtggagaggggcctggtgtggtggggcccggtgtttgggaccggagggtgttgacggctgatgagttccttgggtttgctctttcttcacctgaaaagaagactccaggaagggcagcacatgccggagaaagatgaattccagcttgaccgcccagaggcgcggcagtgacgccgagttgggaccctgggtgatggctgcgaggtccaaggacgcggcgccgtcccaacgcgacggacttttgcccgtgaaagtggaggaagactcacccggaagttgggagcccaactatcccgcggcttcgccggaccccgaaacttctcgactgcactttaggcagctgcgttaccaggaggtggctggaccggaagaggcgctgagccggctccgagaac

SEQ ID NO: 49468 - DNA, 1194 bp, Homo sapiens
gctggagagcagcaacagcacggactacattgccatgcacgacgttgacctgctccctctcaacgaggagctggactatggctttcctgaggctgggcccttccacgtggcctccccggagctccaccctctctaccactacaagacctatgtcggcggcatcctgctgctctccaagcagcactaccggctgtgcaatgggatgtccaaccgcttctggggctggggccgcgaggacgacgagttctaccggcgcattaagggagctgggctccagcttttccgcccctcgggaatcacaactgggtacaagacatttcgccacctgcatgacccagcctggcggaagagggaccagaagcgcatcgcagctcaaaaacaggagcagttcaaggtggacagggagggaggcctgaacactgtgaagtaccatgtggcttcccgcactgccctgtctgtgggcggggccccctgcactgtcctcaacatcatgttggactgtgacaagaccgccacaccctggtgcacattcagctgagctggatggacagtgaggaagcctgtacctacaggccatattgctcaggctcaggacaaggcctcaggtcgtgggcccagctctgacaggatgtggagtggccaggaccaagacagcaagctacgcaattgcagccacccggccgccaaggcaggcttgggctgggccaggacacgtggggtgcctgggacgctgcttgccatgcacagtgatcagagagaggctggggtgtgtcctgtccgggaccccccctgccttcctgctcaccctactctgacctccttcacgtgcccaggcctgtgggtaagtggggagggctgaacaggacaacctctcatcacccccacttttgttccttcctgctgggctgcctcgtgcagagacacagtgtaggggccatgcagctggcgtaggtggcagttgggcctggtgagggttaggacttcagaaaccagagcacaagccccacagagggggaacagccagcaccgctctagctggttgttgccatgccggaatgtgggcctagtgttgccagatcttctgatttttcgaaagaaactagaatgctggattcttaagtgatatcttctgattttttaaatgatagcacctaaatgaaactttcaaaaagtatggcaggccagacaaaaaaa

SEQ ID NO: 49469 - DNA, 1314 bp, Homo sapiens
ttttttgaaaaactataattttaaattttattatataggttttctcaataacttcccaacacaaagcaaaaaacaccaaccattcccaaaaactacagatacatagttgagtctataagttagaaggcagaaaaatattaacttcaaagagtttaatgatgaattagtactgtatttctgaaaacattggtgatactgaaataatacaccaatagacatgaccaatatgatcctggcaaaatgcacatctcgctggtcaagcagaaatatatccttttacaaatgttctgaggaacaatgcttaaaattatacaagggtttaaaatataattttaatgaagtatatataaagtgtacatgaaaaggggaaatatgaaatctggcaaaagtcttttggctttcttacaaatggtatccttataattccccaactatcagaggatgacatatttttctagaaaaaataaaacgactgcaattgtatttcctatgatgctttatgtatcagagtcacttgcagattctggtctgctgtcatctggcccatcactttccttgtcccagtctttcatagatgctcccatcatgaaatcatcacgtaggatcgtccaacctgggccttcttctgatttcacttcagtctgtttggcttttggtttcttcctgcttgaagcagtctcatttgtacttccatccatccctctcaaaacactgatgaaatctttcttggaaacagttgatatcaacttagcacgctttctcatagaacttccagcttccttaaccttttcatcaacattcttttgatgtttctgaacagcattaaataattgcaccacaccccttgttgcaattctctgaagatttctctctgtctctttgtcttggacaacatctggctttactctgcacatcatttcccactccagcctcttatcacgctgtttaattttctctagtctttcttgctttaacttttctttttccttttccagcttcttatttttgaccagaatagtaggtttactttcaggagttttcttgttgaggactttagccatagcatctgcccagcccatattagtcccaacacttgattctccatcattttcattttctttgtcacagggctcagcatcaccctcactgtcagcttctattgcgtcatcatcagaataaaagtggtccttttccgatccacagcttccttcactatcagaagtgtctgtggcctcgtcttccagcaccgacgctacggctccagttaccattttcatcttcttctttggggtctttttcaggttttcttcctcc

SEQ ID NO: 49470 - DNA, 815 bp, Homo sapiens
ggaatccgtcgcggaacctgtctttacccagagctaccatgagcaagcggaaccaggtatcgtacgtgcggccagccgagccggcgtttctggcccgcttcaaggaacgggtcggctacagggagggacccaccgtagagactaagagaattcagcctcagcccccagatgaagatggggatcacagtgacaaagaagatgaacagcctcaagtggtggttttaaaaaagggagacctgtcagttgaagaagtcatgaaaattaaagcagaaataaaggctgccaaagcagatgaagaaccaactccagccgatggaagaatcatatatcgaaaaccagtcaagcatccctcagatgaaaaatattcaggtttaacagcaagctcaaaaaagaagaagccaaatgaagatgaagtaaatcaggactcggtcaaaaagaactcacaaaaacaaatttaaaaatagtagcctcctttccttttgacaacgaagatgaaaatgagtaagtgtaaatattttgaatttagtctactttgaaagtatatggagtgttcattaaaatcacattttttcctattataaagatactacaagttctttatagaaagtttaggaaatagagaaaaaaatttaataaactacatctattcatcaatacccctctgacttaaaatgccaactctatagaaattagctagtattaacattttgttatttcccttgtgtggttgtatatatatgtaaattatatttttaagcaaaatacattttttgtgtgtaaacaaaattttataaatacaactgtattgcaaaaaa

SEQ ID NO: 49471 - DNA, 512 bp, Homo sapiens
tctgcctctgcctctgcctcaccctgctggctcctggtgggtttcatcccaggcagagttgacattgctggaggggtttggtggactcctaagaatcatgaaaccacaggagcatgtttaggaagagatttgtctctggtccctgtctctgaaaggacacagatgctaaatatttattgtcttagatcatggattcctgatacctctcactcaaggggaccaaaagggacccccccgtgttcatcccttgtaaggtgagttcagtctacgttgtctctttccagtcactggatgcgtggcaccaactggtcaatgggtgcttggtgccataccctgctcaccctagtctctgcaggccatgtcctgaagggttcctcaggaggtcgggactagggtgggagaggcactatctgagacctgcaatcactcttgttggtcttgagcccattcatttccaaaacatccatctttctccacttcccccaggtcttggttttgagaaacagcaggca

SEQ ID NO: 49472 - DNA, 994 bp, Homo sapiens; identical to SEQ ID NO: 11342

SEQ ID NO: 49473 - DNA, 2131 bp, Homo sapiens
ctcagaaggagacgattaaggatcttcccaagatgaaccaggagcagttcattgagctgtgcaagacgctttacaacatgttcagtgaagaccccatggagcaggacctgtaccacgccatcgccaccgtggccagcctcctggttccgcatcggagaggtggggaagaagttctcagcccgcacaggcaggaagcccagggactgtgccactgaggaggacgagccaccagcacccgaactgcatcaggacgcagccagggagcttcagcccccagctgcaggagacccccaagccaaagcaggcggagacacacacctcggaaaagccccacaggagagccaggtggtggtggaggggggcagcggcgagggacagggctcaccctcccagctgctgtctgacgatgaaaccaaagacgacatgtccatgtcctcctactcgggggtcagcacgggctccctgcaatgtgaagaccttgcagacgacacggtgctggtgggcggggaggcctgcagccccacagcgcgcatcggcggcaccgtcgacaccgactggtgcatctcctttgagcagatcctggcctccatcctgacggagtccgtgctggtgaacttctttgagaagagagtggacattggactcaagatcaaggaccaaaagaaagtggagagacagttcagcaccgccagtgaccatgagcagcctggagtttccggctgatgcctgcagctgtgaggcctggcccaaggtgtcatcagtggggctggcctcatctcctcctgcctttcctcccttatcagtttctctttaaaggtgtgcccctcctgctctcccaggagcagtgagttgtgagtggaaagaaggctggtgcagacccagctgccttagacagattccctgggcctgcatctcctggcgccggctgcttctgggcccaggaagaggctgtggctcccaccttccttacacctggtgggagcccgcctcgcaccagctgcacctgcctagcattagaggctctcagatctgcccttgcttgcctcatacctctgtgctccacactgcggccaggccagctgagtccctccatccgtggatgctttcctgcagctatgtggtatgggggtcattcctgcctcttggcaccaggttggggggcatgtgcttgttgggcaccaaagtgatggaaccctcaggtgctctccgggagcctgaacctcctgactgaggaacatgggcagaacatgtttattgcacagagtgggcgctgcgcacaggcgtggctgtacacgtgctctcagctcatcatcctttccagtaactttaaaaaaacatccctcaggtcctgatatatttccttggattcatttcacttggctagaaattacactgtgctcaatgccttaataaatccctgaaagaaataaaaaccactgtgtgcaatgccttgctgtggcccccaaccactgcttaggcctcccaacttctccccagggccaagtatggggggccctgggctgtgttctgggaagttcaaagacacttagtcctccacagtgggtggaaggagtgcaaggtctgccaggtcagatggagacgcagaacctgctggtgcaagctgggcaggtcctgaccaacctgcatcagggggatgccctgagctccacaggtcttcatgggcaggggttgtgggtcctggtgaaggaagtgcatcctcaggcctgggctgtagcaagctgtctgcccttgggttcaagaaccagactgtggagccaaaggtgaccgcagggggccccagggctggagccacaaggataccctcactttgcatgaggagctgaaactgaccagtgtccagtgttagcccccacatggggctgctcttgcttctactaaaagatacagcagttacccccttatccacaggggatacagtggatatctaaaaccagacccccagtggatgtctaaaaccacagataataacaaaccttatacatactgttttttcctatgcatacatacctgtgattaagtttatgaattaggcaccttaagagattgacaacaataactaataataaaatgtaacggttatactgtaatgaaagttgaaaaaaaaaaaaaa

SEQ ID NO: 49474 - DNA, 1618 bp, Homo sapiens
tttggacttcagaacaaatgtttattactgcttaatggggccaaaggggcaacacaaagcattgaaaacatcactggctcacaaaaacagtcaccttgttaccttctcagttgcatttgtttatttcacaaggcttcattcacacataaaaacaagatactaatccaattcaagttcataacgattataaaagtaaacatttgttgggacaatgtacaataaattgcactttttagacaagcattacatttacatttatagagtgtactatacataatacatggaattacggaaacgtctaattggtcattgtttatagaggaagaggctgatcactaacgtttattttgtagttaattagtactgttcagactaatcaactcctttattctagaacctgttttcattagagatgccatggacaaaataatggaattcataaaaatagacaattccagaatctctactacctcctctgcaagggaaaggtaggagttagaaagaaaggaagtggggctgactgagaaactttgtccctcatttgaactaaggatccatgcattatgcaaaataccaaaaatagagaaactgatacaaaaggcttttgggacatcttggatctgggaccatctccagccttattcttgtgctttcatgacaccagagtctttcgatgcatttatattctcacaattcagtccatatattttatcccatatataatatatagttattaaaagttatacagtttaatggaaaagattttacatgttaactaattgccaatgaaaaaggaaaataacttaaaatgttcactttctactcaatgattcttttttcttaagcttttcagaataccactaatgacaaaccagagatggaggtaggaagaatgggatatattaatgaaatgtttttatagcaggcagcaaattcaggtggagataagcttgacatatgtagtcttttagatgcaaactgagaaaggaatgccagacagctgactgcagtcactaaaatctcctatatgcccacttttctcattacaactcaagatcagcatctcctattgaggtgcagccaaggttgaagtcctcattttggtcacttttgaaagataaagaatttgctaaggtaaagggctttgccctgtattaaatggaagccattatgagagaggaagaatgtgttgggacagttctagttcagtgtgactatcagcatggcgacgagaaagagttttatatctggttgtaggaaacaggctgcagagctgtggtctggccttctggctttcatcatcatttcttgaaatctcaatgtgtatttggttgtgtggtacccaggtaaacaaaagcagcagagatactctatataaaattcttccaattaaacacacatacaaacctaatagtgttcaaatcatacaacagaatttcttcacactcatttgtaattggagaaaaggagtcagtattttggagtgtttttaagggcaagttatataatataatcatcttgctaatcaagtaaaagtgttctttcccagaagataaaacaaaaccaaggcatttaattttttaaaagttttttcccttaaaggggcccccctaatcag

SEQ ID NO: 49475 - DNA, 535 bp, Homo sapiens
  misc_feature (1)...(535): n = a,t,c or g
tcnnttntcccctttngatacctnaatgacctnantacgaatntaataccgactcactatagggaatttggccctcgaggccaagaattcggcacgaggagaccagagcccagcttgccaggcactgagctagaagccctgccatggcacccctgagaccccttctcatactggccctgctggcatgggttgctctggctgaccaagagtcatgcaagggccgctgcactgagggcttcaacgtggacaagaagtgccagtgtgacgagctctgctcttactaccagagctgctgcacagactatacggctgagtgcaagccccaagtgactcgcggggatgtgttcactatgccggaggatgagtacacggtctatgacgatggcgaggagaaaaacaatgccactgtccatgaacaggtggggggcccctccctgacctctgacctccaggcccagtccaaagggaattctgacagaccctgttctgaaacctgaggaaaaggcccttnccttnagtggcccttttaaactta

SEQ ID NO: 49476 - DNA, 9044 bp, Homo sapiens
  misc_feature (1)...(9044): n = a,t,c or g
ggatccgggtcccctcacgctcctggctgagtccctggcttcacaggggaaactacctccgcaggccaggacccatctagttacaggatacctcgatgttacaaagacgaggcttccagcgcgggggcgtggaggcggctgccagccctgcccgcagcgtgctggcgacccccgggacgccccttccctcccgcgcctctgctccctagctggtgggagcagagcgcaccgggatcacttccaggtcccttgcaccggaggaatgggcggcagcagggtccggagtcggcccggcggggcccacgtggccagcacatcggtcctccgctcgcgatttcccttttccgctctcgggcacgaggtactgaacgccaggtggaagcacagctgtgcagctacaggctctgccgttcagctgccgcgggccggggccggggcctgcggcgtcgtgcgcgtgcgcggaccagttccaggcgggcgagaccgccgcagggcggggcggggcgaggcggccgcagggcggggagggcggggagaggcggccgcagggcggggagggcggggcgcgaagccgggggcgggggccacgcgtggggcaggcggtgctcggctcggctgacgtcggcccgccggcgccccaccagctccgcgcgggcccgggttggccaccgccgggcccccgcccctcccccggccgtgtcccggccggaaccgatcgtggctggtttgagctggtgcgtctccatggcgacccgccggtgctataagtagggagcggcgtgccgtggggctttgtcagtccctcctgtagccgccgccgccgccgcccgccgcccctctgccagcagctccggcgccacctcgggccggcgtctccggcgggcgggagccaggcgctgacgggcgcggcgggggcggccgagcgctcctgcggctgcgactcaggctccggcgtctgcgcttccccatggggctggcctgcggcgcctgggcgctctgaggtgagggactccccggccgcggaggaagggagggagcgagggcgggagccggggcgggctgcgggccccgggccccgggcacgtgtgcggcgcgcctcgccggcctgcagagacacgtggtcgccgagcgggccacgaccttgaggcgccgcttcctcccggcccggggttctcccgcggctggataagggtgatccgggcgcctcgttctgcccccgtcttcacagctcggggctggaggggcctaggggagacccacccggagaccctgcggccccgcgccggcctctttcccaacccttcggcggccgcgcgctggccggggagccgttggggaggccctggcggccgcgcagcaggtgcaggggcgcagagcctgggctcgccttggtacagacgagcgggccccggccttggcgccttcagtttccttccagtttttattttcgctgtgtctacagagcagatgacaccaatttggaaacccgcgagagtgggtagagctaagatagtcttgctgtagtagctgtgatattagatgctcggccatgacttagaggtgtttatttaaggactgtgaatgactcggtgatttcggaaaagcttggcttagatgaacggacatacacaggggagacagccctaaggtttgcagaaaaggctgattgtgctgtttgcgaagtcgaaataattggtgaaagtgtagaaggcagaacctctcaggaatgtctggggaggacaaagaatgtgttggctgactttgtttaaacataaaattgggcagactttaattgatttgtgaaatttttttcaaagtttgtttgaattagcccctatctcttctaacattatcctcttgtgctaattgattgaccattttaaataacttagctgttacagaaagaccgaaaggtgttcttcagtaaaatatattcaagtaagttacttaagtaacgccttaaaagatacagaaaagcaaaaaagtattggcgtattaaaaagaaatcaaaactttccaagtttaggcctgaacattgccttaaaaatatttaataaggcctcaaatgacccagtccgagactgcatgagcctatttattattaaattgtaaatattcttcatataaacaaaaatatataaccatgtctgtaacaaaaatggttttgctagcgttgttactctcttcccttctccgaggggtgatttaggcaacttcggaggttgacaatgccaagcagtcacaatagatagagctttaaagcaaattctatgcatgggtttggatttatgacaggcccgtcaccctgggcctgtcatagtaccccatgccagagcaaactgtgtccccgaaccattgcctggcctctgtgcccgtaggctgctggcactgaagtgggttgcacagtggaaaagaagaaagctctacctggcagaaatttttaaaggttaaaataaataattttaagaaagctggttcacaaggtgccacatttgatgaaagcaaaatacagtggcttttattgttactagagtgatgttcttgcttgtttttcttttttggtgaagttagccccaaattattctcatagctaagcaaatacgagagtgactgtaaggacagttggcattcccggaattgctaaacttggtaggcaacgctggtttaagaatactgagttcnnnnnnnnnnnnnnnnnnnnnnnnnnnnnnnnnnnnnnnnnnnnnnnnnnnnnnnnnnnnnnnnnnnnnnnnnnnnnnnnnnnnnnnnnnnnnnnnnnnnnnnnnnnnnnnnnnnnnnnnnnnnnnnnnnnnnnnnnnnnnnncnnnnnnnnnnnnnnnnnnnnnnnnnnnnnnnnnnnnnnnnnnnnnnnnnnnnnnnnnnnnnnnnnnnnnnnnnnnnnnnnnnnnnnnnnnnnnnnnnnnnnnnnnnnnnnnnnnnnnnnnnnnnnnnnnnnnnnnnnnnnnnnnnnnnnnnnnnnnnnnnnnnnntactgaattctgatcaggtaacagcaactgtaatacaatgtgataagttgacttgaagattacagtttttaagaagtatatacccagctaatacatgaaaattaactcgtaaaatctcaaatgctccagacatttccatgatgcctgttggtcagtaaaaatcattctaagacttagtggaagtaggaaatgtttgtatggctgtgtataaaggctatannnnnnnnnnnnnnnnnnnnnnnnnnnnnnnnnnnnnnnnnnnnnnnnnnnnnnnnnnnnnnnnnnnnnnnnnnnnnnnnnnnnnnnnnnnnnnnnnnnnnnnnnnnnnnnnnnnnnnnnnnnnnnnnnnnnnnnnnnnnnnnnnnnnnnnnnnnnnnnnnnnnnnnnnnnnnnnnnnnnnnnnnnnnnnnnnnnnnnnnnnnnnnnnnnnnnnnnnnnnnnnnnnnnnnnnnnnnnnnnnnnnnnnnnnnnnnnnnnnnnnnnnnnnnnnnnnnntctataatgctattttaagtttctaaggaactgaaactgctctgaaataaatcagaccattataagacttttttccatatcagtgagctaagtgcagataagcttctgaaacttgcatgctagatttttttggtacaaatatttgaaatgcttagtgtgctgccttggaaaaacctggtattttttgttgtgtccttatactgccaaggtttatggaatcatgtaccttatgcctagtaataattaggatgaccaggccagtgagtggttcatatccggggcatgattagctctgcgtgtgctcagccagtgccccatcttcaactcgatgtgttcctaaggtagacagcaaattccctattttatttctcagattgtcactgctgttccaagggcacacgcagagggatttggaattcctggagagttgcctttgtgagaagctggaaatatttctttcaattccatctcttagttttccatgtaagtattcagtttacatttatgttgcaggttaatcttaagaattgtattgctaaggcttctaagtgaatttctccactctatttgcattttgttgcatttcagaggaacatcaagaaatcatgaacaactttggtaatgaagagtttgactgccacttcctcgatgaaggttttactgccaaggacattctggaccagaaaattaatgaagtttcttcttctgtaagtatatgaggcccatgctggcagtgcagctgagagtgccaggcaagtggaaaactttggcaaggtctaaggaagagcaatgaggcttacatgtcttgttatggaatgtagaaattaattcactggtggtaaattaatagtgataatggtgatactcatatcagtggctagactcaaaagagcaggattcattgtgactgatgggaatgaaggtcgctggctattggtgtggtgtgtggtgaggctgctagtgagtcacctgtgaccactcttgtttcaggatgataaggatgccttctatgtggcagacctgggagacattctaaagaaacatctgaggtggttaaaagctctccctcgtgtcacccccttttatgcagtcaaatgtaatgatagcaaagccatcgtgaagacccttgctgctaccgggacaggatttgactgtgctagcaaggtaagcgatagcagcaggcctcaaaagcgttgtataaaatgggcctggtattccccacgaggcagatacaagttgtgttttttgggcaataaatgctcactaaaggcaaatggggcgggggggtacatgacaacttcccatgcttttctgtttattccacgtgttaagccacatatggatagcatgacaccactcttctttttcagactgaaatacagttggtgcagagtctgggggtgcctccagagaggattatctatgcaaatccttgtaaacaagtatctcaaattaagtatgctgctaataatggagtccagatgatgacttttgatagtgaagttgagttgatgaaagttgccagagcacatcccaaagcaaagtgagttattcccccatctgagggcaagatcgggagcataagatatgtggattcttatcaaacaaacttaaatttctgattattatatttctatactttagtagaaagtagttgaaacccccattgagtcatgaagcctgggactcaaactacagaatatatcagcgacagtatttagaacaggattgtttttattttaattgtggctataagtgaacatctatcatgagacatttgctgcactttccttgcttgtaggttggttttgcggattgccactgatgattccaaagcagtctgtcgtctcagtgtgaaattcggtgccacgctcagaaccagcaggctccttttggaacgggcgaaagagctaaatatcgatgttgttggtgtcaggtgagattttggtgggatagctagaggtcaagacattgaacagtttgagttttacaggctttctcctagtgtttgctattattttaagaaatactaagacacagtgtctcgtctctttattttaccccagcttccatgtaggaagcggctgtaccgatcctgagaccttcgtgcaggcaatctctgatgcccgctgtgtttttgacatgggggtgagtatacgtgaccctgttagggaagggcgggacacaactgacaataactagtcttaattctagagttaactttttatggcagttggttctgtattacatgggtttcagcctatctgctgcatacatttttgttattagctgtggatctggctgacttattttcttgattctaggctgaggttggtttcagcatgtatctgcttgatattggcggtggctttcctggatctgaggatgtgaaacttaaatttgaagaggtaatttagaacaaaactgtaatactcagtagccgttctaataaattcctttttggaatatttcaaaatttaagtgtcttaactaataccacaatgggctgaagtgtcttggtgtgatattttgagtgatttctttgtgctgtctgacattacacttgataccatttggttttctaaagtgtgaatcagctttcccagaagactaggataattggttacattggannnnnnnnnnnnnnnnnnnnnnnnnnnnnnnnnnnnnnnnnnnnnnnnnnnnnnnnnnnnnnnnnnnnnnnnnnnnnnnnnnnnnnnnnnnnnnnnnnnnnnnnnnnnnnnnnnnnnnnnnnnnnnnnnnnnnnnnnnnnnnnnnnnnnnnnnnnnnnnnnnnnnnnnnnnnnnnnnnnnnnnnnnnnnnnnnnnnnnnnnnnnnnnnnnnnnnnnnnnnnnnnnnnnnnnnnnnnnnnnnnnnnnnnnnnnnnnnnnnnnnnnnnnnnnnnnnnnnnnnnnnnnnnnnnnnnncatgttgctgtgggcttcctagagaatatgctgactgtagcacatcatcaccccaaatgtgctttgctagacctatgcttcctctccttaaaatacttgaaatgtttagtcacttaggaagttaagccattatattggtgcttgaatttataaaatacatccacatggtttgttaaaatcatgacgtaggcagaataggatttttatcctgttggcatgtatttgttaaaatgttttgacatcttgatgccttcctaggtagtagttagttgcgtactgttctttgataaaaatcatacccataacatcctaaaggagatagggtgcctggaggggaatgaaaacgagccacctgggatatgtagcctggttttcagggagatgttgatgtttttttgcttttgttactttaatgataaacctgtctgttgatgcctggtctcatgatgtcatgtcacaaggccctgtgatgttactcccccatgtgaatttcccacaatgaaggctgctctttcttttctgtttcactctcttagatcaccggcgtaatcaacccagcgttggacaaatactttccgtcagactctggagtgagaatcatagctgagcccggcagatactatgttgcatcagctttcacgcttgcagttaatatcattgccaagaaaattgtattaaaggaacagacgggctctgatggtatgtataaaggacgaatcacttcatgtataactgaaagctgatgcaaaaagtcattaagattgttgatctgcctttctagacgaagatgagtcgagtgagcagacctttatgtattatgtgaatgatggcgtctatggatcatttaattgcatactctatgaccacgcacatgtaaagccccttctgcaaaaggtaatttctgagcatactgtataaaacaattaagaggactggtcacaacacgtgtaattaagtagtacttcctctctccgtctctttatatagagacctaaaccagatgagaagtattattcatccagcatatggggaccaacatgtgatggcctcgatcggattgttgagcgctgtgacctgcctgaaatgcatgtgggtgattggatgctctttgaaaacatgggcgcttacactgttgctgctgcctctacgttcaatggcttccagaggccgacgatctactatgtgatgtcagggcctgcgtggtaagtaagccatgcatgttgatggtgctgccaagaataggcaccttcttggatgtgtgcttcttgtctagacgaataagaaattgtcttgcctaagattaaatatatatggatatttttcctaagaaaagttttagaaaagactgatgagtgtatttctatgtaattggaatatatttaagttcatgccatgtgtcttgtggtttccttattaccaaaacggtgactgaagaaacgcttgctttagaaatacattgaattnnnnnnnnnnnnnnnnnnnnnnnnnnnnnnnnnnnnnnnnnnnnnnnnnnnnnnnnnnnnnnnnnnnnnnnnnnnnnnnnnnnnnnnnnnnnnnnnnnnnnnnnnnnnnnnnnnnnnnnnnnnnnnnnnnnnnnnnnnnnnnnnnnnnnnnnnnnnnnnnnnnnnnnnnnnnnnnnnnnnnnnnnnnnnnnnnnnnnnnnnnnnnnnnnnnnnnnnnnnnnnnnnnnnnnnnnnnnnnnnnnnnnnnnnnnnnnnnnnnnnnnnnnnnnnnnnnnnnnnnnnnnnnnnncattgaattgtttcctgatgggaagtaaatactctcatgcccagttaggagtgagtcagggtttttaatatgccactttttctttctcaggcaactcatgcagcaattccagaaccccgacttcccacccgaagtagaggaacaggatgccagcaccctgcctgtgtcttgtgcctgggagagtgggatgaaacgccacagagcagcctgtgcttcggctagtattaatgtgtagatagcactctggtagctgttaactgcaagtttagcttgaattaagggatttggggggaccatgtaacttaattactgctagttttgaaatgtctttgtaagagtagggtcgccatgatgcagccatatggaagactaggatatgggtcacacttatctgtgttcctatggaaactatttgaatatttgttttatatggatttttattcactcttcagacacgctactcaagagtgcccctcagctgctgaacaagcatttgtagcttgtacaatggcagaatgggccaaaagcttagtgttgtgacctgtttttaaaataaagtatcttgaaataattaggcattgggacgtttttatggtgtgttcattccagacagttcacgaatcccgtatagctcgctctgattctcagagaacaatgagtgggtccacccacacacaggtaggaggacaggtgagacggaagccccatcctcccatgtggacggtgcacatctgctcagcccaccccacatgtccagagttggctgcaaactccttgtccagagcctctggtggtgggacctacttaagtctgacggacctgtcctgtccaggccagtgcccagggaaggtgtgggaggccctttgagcctggcctgcag

SEQ ID NO: 49477 - DNA, 2764 bp, Homo sapiens
atggcgaccgccacggagcagtgggttctggtggagatggtacaggcgctttacgaggctcctgcttaccatcttattttggaagggattctgatcctctggataatcagacttcttttctctaagacttacaaattacaagaacgatctgatcttacagtcaaggaaaaagaagaactgattgaagagtggcaaccagaacctcttgttcctcctgtcccaaaagaccatcctgctctcaactacaacatcgtttcaggccctccaagccacaaaactgtggtgaatggaaaagaatgtataaacttcgcctcatttaattttcttggattgttggataaccctagggttaaggcagcagctttagcatctctaaagaagtatggcgtggggacttgtggacccagaggattttatggcacatttgatgttcatttggatttggaagaccgcctggcaaaatttatgaagacagaagaagccattatatactcatatggatttgccaccatagccagtgctattcctgcttactctaaaagaggggacattgtttttgtagatagagctgcctgctttgctattcagaaaggattacaggcatcccgtagtgacattaagttatttaagcataatgacatggctgacctcgagcgactactaaaagaacaagagatcgaagatcaaaagaatcctcgcaaggctcgtgtaactcggcgtttcattgtagtagaaggattgtatatgaatactggaactatttgtcctcttccagaattggttaagttaaaatacaaatacaaagcaagaatcttcctggaggaaagcctttcatttggagtcctaggagagcatggccgaggagtcactgaacactatggaatcaatattgatgatattgatcttatcagtgccaacatggagaatgcacttgcttctattggaggtttctgctgtggcaggtcttttgtaattgaccatcagcgactttccggccagggatactgcttttcagcttcgttacctcccctgttagctgctgcagcaattgaggccctcaacatcatggaagagaatccaggtatttttgcagtgttgaaggaaaagtgcggacaaattcataaagctttacaaggcatttctggattaaaagtggtgggggagtccctttctccagcctttcacctacaactggaagagagcactgggtctcgcgagcaagatgtcagactgcttcaggaaattgtagatcaatgcatgaacagaagtattgcattaactcaggcgcgctacttggagaaagaagagaagtgtctccctcctcccagcattcgggttgtgggtcacggtgggaacaaacagaggaagaactggagagagctgcgtccaccatcaaggaggtagcccaggccgtcctgctctaggcagagtcccgggaccatggcctcctgccacacaacacgcagagaggactcaagactcccgctggccatggagtggcctgaaaggagagcaagaacatgtggatctttgataggattgttaccaaatggtgtcagtatggaccaattgtgtgaccatgagaaggatgcttattttttttaaaaagaaaacacatctaaaagcccaggaactgatttttttaagaggaaaactaatgacagtgtataactgatgtttaaattgtgcatttagtactatttaaatgttttcttatactagtattttatattcttttgttgtcgtttaaaactggagcttcagtgtctcttccctccctctaatagtaatggttcagtaagcactccttaactccttagtatttcatagaaaaatgactgcaacattaaagctaagaggaacacttcaacatatgtggtacaaatttatattgaagatctaaataaaccacgtattttccagtcttcgttgtgtgaagctaaatggtggctaaaaggaacactttttgtgtgattattataaactttgcattgtatttgaatcttaggaacttttgtacacactaaatattgatgtcacaccatttctaatctgagcatccttagccagagaatattcattatacttcctaagtgagcaataatttaaatcagaagctattttattttaatgtaattaacctttctttacatttcttatgtgttcacctctaatctgttttaggaagagagttggttattatgttgatcccataatataaatcatatcctttatattttagaatatctcaaatgtattccttttttgtatggtgggtttgcctagggacgtgtaactacaggcttttactaagccaaggaaaaagagaatttttcttttcatcttacaaattccagatatctacaaaagatgtgaaagcactaaaaataccatttttaagcagtactttacctgttttttctttagcaaaccaggttatgtggtgtaaaggtttgttatacgtgccacaatatagcatataaatattatgccatcattccttctcttgttaaaggtagaagaataaaattgtgatttttataacctgtgcttattactcaaatggtcttcaacatctttttaaacaacacatactttttgaatgttcagtttctattttgcttgaggtattttgtacatatgtgccttgtgattgctgctgctttaaaggataaagtactctttgggggatgagtctggtttgttttgttttattttttaatgaaataaacctatattcctgaaaaaaaaaaaattaaaaaaa

SEQ ID NO: 49478 - DNA, 1107 bp, Homo sapiens
ttttttacaaattatatacatttatttttaataattttaaataacactcttgtataaattctttcatatattcaaatcatacacaaatttagaaatgcatgatgaagcctagtacagcatatgtatgagacacattttttaagtttgtgttagaattttagtgacataaatacaagtttaatgtttcagaaacattccctaattgctcggcctataatttaatgtattatagagtgcttatgcctagcattacaacttgactttaaatcatttagcttttggactaacttagatctgaagccctgggcttactttctaggggctggctgctgcagcaacaagtaacaattcctacccacatagcccaaaatataggaaccagggatgttcattataagtggtgttatgttcaccaagcatcctaaaaagtgtaggaccaaggtgaatgatctaataaccccattccaatcaaagctgtcaagaggaagtattgttgctttagttttctactcccaaaacagcacttaaagggttaaatatcctgatggtactcagctgaccaaaataaactagtaggtcagtgagtattgctttaatggtcaatttacctgggaatattggcgctagagaacagtgatataatttgaggtgtctacaaatgttgtctaaaaaacctctctcctctcatccccatgtttcctctgttctctactcttaaaatctaggtatcactgggaagagtaacgcactaggcccacaggaccttagtattaatataaatgagctttagttttcaaatgtcatttttttctctataactggagaaattccattaataaaagaaccctaggggatagagggtagagggagcgagaggggagtaagggaggacacggacatacttaacactacctagggcacctaaccatcagaaatgcataggcgcttaccaaaatgaattaatgaagataaaagcatcgcttaatggcagtatctgtaatttccaaataagattcacatcagtgctatcttatttaaaaataaacagatttccaatccttacacaaacattctcccaatattaggctttctttttcttcctttttt

SEQ ID NO: 49479 - DNA, 843 bp, Homo sapiens
tttttttaaaggatttaatccagtatttattccacactcatgatggttctgtaatcagaatacaagttgtaagaacaatctatcaaataatttgctgatagtcttaaataatgcagcacagcattacttttaatactcctctgttctagattaagtttaaaaactcaaacagcaatctccattatcaataaaaaaagttctgaattttaaaaaaaggacactatatcaagctgtttcataatttaaggattttccatttataaaaatgctttggaagcttgaggcttgaatctgtttctctactcatctgccccaccctctccccattacatgttagtatagggttctgcaagaatgctaggctttagacattaatttttttctttaatatagtactttaaaatctgagaaagaattcaagaaaaaaagattacatgtcatgtattttttcaaataaaaaaggaaaactaagtgaataaattttaggcatactaagtgtccctttgaggtagaatgctaaaaggacttttgatgaaatcacagcctaaaaacctctgcatcagaaactaacttctcataaattctctctaaaggtaactgtggagaatattaagtgtaacatattaacaagagccttccaagataatatacagtagacaagaatgttaatcctacaatgctgccttcttgtacattggcagcacatacttctcctataatagacatccaagatccattctcaaagtctttagcattctattacgaaaagcacagccatgctaacttcagtacacaaaccataatcccacacctacaaaacaaaaatagattagtggcagttta

SEQ ID NO: 49480 - DNA, 1422 bp, Homo sapiens
ttttttttttttttttgaagttaaaggacactttatttactgacagattgaaaactgtaactccaggtagtgcaaaatgcaccacaacccaattacaaagaacaggtgttaacacacaatgtttaaacaatgctacactcatttttggcaaagtgctgtattgttcagtctgtgtacaaaactgaccatctatgaaccaatcagtataaaaaatttctataaaaacaaaatttagacagtggctcaagaaaacaagctgccatttatgcatagattgatgtacagtaacctaaccaaatgtcccttttgaattttcaagttactgaaaaaaaatgtgtcgagaaacacattaagaaggcacatgtacagtctacaatactcttcagtctccctaactcatgccctgcccctataaaggaaatatgttcacaattttacttgagaaaaaaaaacaaagccacttaaaaaaaaaaaaacacacacgcaattattaaagttcaaaatctctggaggaaaatacaagcaaaaccactcatacactccaagcctgaaacacacatctaacctccccaggtactggtttggttttcaggaggtccacctagaaaacaaatactaaaacttcaggcaaaacagagcaaaactggacatttaacaattacacaatttttaaaagtgtcgtaaaattctcaactatatacaaaacattgtccacttaagctgcctgcctttcaagagtaactctcctcccatgcaaaggatactgttgcacataaaagatatcctcatctgcatgttttccagtacctctttctccaccctaaacagttgaaatttaattggtctcaaatttcaagtgaaactgatacatggcaaggctgacaccactgtatcatgtaggttttctaaataaagcattttatgtataattttaagcattaaagtaagtagatagggatgccatttctaatatatcagcatggctgatggcagtgaaaccatccaagatagaaggcccacttttaacagagtttaaccagtatttatgggccttataaaataaaaagataattttaaagtaacattacaaacatatactactagtgtctcccagtacaaggagcagtctcttgactcaaaaaatgaaaactaatatgtggaaactcttaaagttttcccactaatctatttaaatgtaaatatctgtcttctagttggagtccttcatgtttttgtttccaactcagagaaaatgagaataatgaagatactcttccttgctcgtttttcttaagagtacataaagataatatataatgtatttcattgaggaggaagagaagtagcaaggatttcaatgaagacataatgattacaaaccagtgtactatacagatttcagaagcagaaacaatgctgaac

SEQ ID NO: 49481 - DNA, 591 bp, Homo sapiens
  misc_feature (1)...(591): n = a,t,c or g
ttttttttttttttcctgtagagtatttatttatttactctataacagttcacattttaaatagtgcttcctgacaatataccagctggctcttctttaatagggcaataaggatagcaattcacattcaggggattagtttcaccataccacacatttgggggatggcaaaaacggggtctaaggaaaagggagggtgtttaagggaaagaggagggtaagacccttgcatttgtagaagtcattactatttctcagtagtggtcatattggctttgccggcaacctcaggatgggattagagaaagaaaggagcatgtcctatcttagacacctgggtgggtggctgcctgcaaggagaaggaggcttagggacacatttcacaagaaaccagcacccacattggtcagatgaagcttcctcaattttcagccaccacttacacctttctgtaccggctgcaagaggaagaagaaaactaaacttataatgttgtttggcaaggagagattcaaacttaccataggcaaaaagatcttatgttaagttagtttggaaantcaaccaagagganccatggtacnccgcgc

SEQ ID NO: 49482 - DNA, 2132 bp, Homo sapiens
tttttttttgaatatactttgtgggattttatttaggtcaagttcttagtacacggcaacaattccaaatacaattaaaaaattaaaaagtgatgttcctccactcatctggaggtggtttaatggcacacaaggaacattactggcaacagactgctccctcaagttcccctggatggtttttactcaactcataataccaccaactctccctctgggagctaaaagtacaactggccagatcacaaattgtttacattcttttttgtaagccattttaagaaaaatggtgcatggacacaaaatatgataaaaactgcttttccatagaattcttaagttgcaaaagaggtttcattttaatgtgaaaataagctttttttgttggtttttcttttttcttacaaaaaaccttaagatattcagcaaggatcatttatacacagctagggccccgccgtttcgttttaattgttttttttttttaataattatatgagattctcaaaacaggaacaaaggtcagcacaaagtaaacttaaaggtaatgagctcaatgcctccatttaatcacttttataaggctctctccaataaggctgctgtgctgtgctcctgccagtgttggagtaatataacatttttactgcacacaccttatgggaaagtgtttatactgagtgtagttttaggaggggtaaatgaagattatttccacaaattaagattgcacttagtacacgcctttacacaactctgatggtatttaccaaaacatggcatgtcttttcacgtatattcctgaaaacaccaaatagaactcttaacttttaaagaaaaatacagcacatttagttaagacagttgtggtgcagtggaaaattaagtactgagcactgagtgagaactctgctgttattaactagctgttcatatgaagaagaaaactcacctcatcagtctaatgagacaaccagaaattttaaaaatttcatctagctcaaactcagtgattctaaatcttatatgggggaaattaccaccttaacaccaatcaggagttcccggccaaaaagaccagaagtgagcagatcccattcttttcaaagacttgtcagtcacctgtgaattcctccatcaaacctttttcaaaggcaaaggtgaccttcaggacatgtcatgctgtctccacaaaggagaaaagaaaaggtagtaaaagataaaaacagttcttaatgcagaaaggtcacctactaaaagaaaatgaacattaaaaagataaaagcaaactaccatcattttgatgcctccccaaagagaaaaatctttagttatcttcaacataaactgccaaggagcacaggtacggtccagacatcacggtaaatatgcataaaatattgtctagctggataataaacaccagcagtaggaaaaaggaggggatgaaaatgtctcacacccagtaacttttaggaacatagcaaaattagcaggccactgtcaactctaaaatgggaacagcaggcgcctctgagggagataggaagtagctaaatgatggaaaatattaaacaagatagcttagaagattcatatttattccaaatgggaggctgaatctctcagatgtcgattttgacacattggcactatttttgtttctgatttattgccttggccgtaagttcaaaggcaacaataaagtgtactttcattaataccaccatggactttcgagtattaatatgacaagaaaagacaactattcattttttttaaggggactggacacacaaacttcaggagggaagaatcccctctcccattagaatccctctatcttgataaaatggttgctttattggtcagattttggacttggatcgtctgttataatattaatagtacacagcatgtaagattttctgcattcatttgaaattcctaataccaaccatcttttaatttataaaaaaagagggaaacttacaataaaacaaaaaatactaccctcacagatgattaatagcatgcaatctatgaaatattacatacattaaaagtctccaattactgtgtgcctgacccatcacacagtatccttccaagacaatctatagaattcaaaa

SEQ ID NO: 49483 - DNA, 421 bp, Homo sapiens
aaaagcattacagaatacattcatttattgggtcttatcttaaatctccttattagatattcaattcattgtcatccaaaataaaaaaacaaacaacaaaatgcttatgacagaaatcacaaacagatggctaaaatttgaaattgacctcatctctgttctttaggataaatgatacagtagttttttcctctctagcctaaactggcttctgggttttctgataattcactgtactagtacaacatcatggcaatttgtatttccaggattttcattgtcttggttatcatttccaccttcttcgttattctcaggagatacactctcctttttttctgtgggagtagtaactgttttctcaggttgagaattcatgttctcagcattactgtcctctgtatttcttggcttggcagct

SEQ ID NO: 49484 - DNA, 1403 bp, Homo sapiens; identical to SEQ ID NO: 11364

SEQ ID NO: 49485 - DNA, 689 bp, Homo sapiens; identical to SEQ ID NO: 11365

SEQ ID NO: 49486 - DNA, 1640 bp, Homo sapiens
tttgaagatacacaaaacactgaggattttagttttgaaatcaaagactattaaaggagctgtacagaggtaaaaaaataaatgtggaacattattaacttattttgtgtctaggaacaatggattttgtatctgatttaaaatgccaacactgttttgtctctgttcattttttctgtgaggatacttaaggttattattcctgtctgtttcctgtactcccctagtcatgagcacttgaagtacaaggtgtctccccctagggtgcaattaggttgtttctttgtttttagtttcaattctatgtgcatagcaggaatgctccacaggaatggcttctgacaataatctgtcctgttgattttgttttccttgcccatgacttgaacaactgtgttttaaagtactgtagtctagtaggtaactttgtggcaaaaattttcaatataatacattctgaaacaatagttgctgccttgcaaaggtaatctctcattttaaaattggacagtattaatgaaggggaaatatacaatttatttctattgagtggtagaactatatgtctggtcccttgctgctcttgtttaggccactatcatagatatatttcaaatattgtactactcagtgttaagtattgaatgactgtttccctttccttcaaggcctagagtatattctgaaaatttaggaatgaggaagaaatcttaatacttccttccttaacatacaacatgagtcccgagaataattgatagtagcaagagaaaactatgtcagtaacatgttgctttgtataaaaatcttatttataaatgtgaagctttttgatgccatcaaaacttattaaaaaataggatttacttttttctaattctgacctaagaaaaataatgagaacaaggctgttgcaaggctcttttgtagtctattgaatattttatagatattcaaaatttcctacaaactataattttttccatgatttagcagtgagtgattttctaggctttggctcttattaggtattgtaaatagtagggttatatcgatatcagcttttgtgatggcattgtggtcatcagcttcatgacattttacccatttgcagtgatcctgtgtaaaactgccaaggaaagtaattacctgtaggagtttgctgagcttgaagagtgaaaactgttgtgaatgagcctgatcataaaacggaccaggccattcattattcctcaagtgttaatatactgacttatgcagtattcaaaccatctagtgcaatgtttttgtttttgttttttttttttttggtaacacaggtgccagtgtattatagaaaaaataaaaactacaatcattagcagttttaatactgctgtgtcagttttgtaaaaaatgtacattatgtcttttgacatgttgaattttaaactagggaaatgacattgtaaatcatagtagcctcttttaatttaatatgaaaaatgccactatattgaaagtacttaatgtattgtatatatttctctactttggttctagctattttatatgattgacatgttatttaaaagataactgccttgaacttttggagacttgtactgtaaataaagaaatcttaacaataaaaaaaaaaa

SEQ ID NO: 49487 - DNA, 2221 bp, Homo sapiens
actcagtagaccgccactggctgtgcacgttatggggtttccacctagggctcggcctgaggcttgtaacactccgttttcccccgagtcacaggggcagtcttgcccctcgcagctgggtcgcggtgtctctcaaaggtccccctctacaggggcttcgtgaggcccgggcccacagggcgctcggtcccggaagtgacgtctcccagaggggccggaagtggcagtggagggagggaagatggcggaggtgggggagataatcgagggctgccgcctacccgtgctgcggcggaaccaggacaacgaagatgagtggcccctggccgagatcctgagcgtgaaggacatcagtggccggaagcttttctacgtccattacattgacttcaacaaacgtctggatgaatgggtgacgcatgagcggctggacctaaagaagatccagttccccaagaaagaggccaagacccccactaagaacggacttcctgggtcccgtcctggctctccagagagagaggtgccggcctcggcgcaggccagcgggaagaccttgccaatcccggtccagatcacactccgcttcaacctgcccaaggagcgggaggccattcccggtggcgagcctgaccagccgctctcctccagctcctgcctgcagcccaaccaccgctcaacgaaacggaaggtggaggtggtttcaccagcaactccagtgcccagcgagacagccccggcctcggtttttccccagaatggagccgcccgtagggcagtggcagcccagccaggacggaagcgaaaatcgaattgtttgggcactgatgaggactcccaggacagctctgatggaataccgtcagcaccacgcatgactggcagcctggtgtctgatcgaagccacgacgacatcgtcacccggatgaagaacattgagtgcattgagctgggccggcaccgcctcaagccgtggtacttctccccgtacccacaggaactcaccacattgcctgtcctctacctgtgcgagttctgcctcaagtacggccgtagtctcaagtgtcttcagcgtcatttgaccaagtgtgacctacgacatcctccaggcaatgagatttaccgcaagggcaccatctccttctttgagattgatggacgtaagaacaagagttattcccagaacctgtgtcttttggccaagtgtttccttgaccataagacactgtactatgacacagaccctttcctcttctacgtcatgacagagtatgactgtaagggcttccacatcgtgggctacttctccaaggagaaagaatcaacggaagactacaatgtggcctgcatcctaaccctgcctccctaccagcgccggggctacggcaagctgctgatcgagttcagctatgaactctccaaagtggaagggaaaacagggacccctgagaagcccctctcagaccttggcctcctatcctatcgaagctactggtcccagaccatcctggagatcctgatggggctgaagtcggagagcggggagaggccacagatcaccatcaatgagattagtgaaatcaccagcatcaagaaggaggatgtcatctccactctgcagtacctcaatctcatcaactactacaagggccagtacatcctcacactgtcagaggacatcgtggatggccatgagcgggccatgctcaagcgggctcctgcggatcgaatccaagtgtctgcacttcactcccaaggactggagcaagagggggaagtggtgaccagacactgcccactgcagtgccaagacggcagcaggactggggctgatagcccaccccgcccccactgcagctcccacaaagcactctaagggagatggggctgaggacagctcaaaaaggagaggacaggcctggcaggggcccactggtgcccagcaccaaggcgagctccgggctcagaccaactccaaggtcaggctggccacaggcccaggcctcctctgaagcagggaccagagggagccaggcagctgtgtacagtgagaagggatccggatgggggagctctgtacagagggctggtgattgtaaaaatttcttttgtaaagtagaagttgggggtggggtgggtgctggctgcaaaaatttctggcttctcttacccctattgcccccggcaataaattgtttctatatgccagaaaaaaaaaaaa

SEQ ID NO: 49488 - DNA, 396 bp, Homo sapiens
agactttaacatcctgggtcttttctgtttcttctttgtttccccaagtttgtctgtccccctttgccttccctgagtgttgaacatcaggtagtaaaaggctaaacgcaatttcttgcatgtcaatctattctttttctatgtttgactctgatgcagtgtgtttagcgtgtctagtagctggctactcctatttaaaaactcttcctggtagaagacaacccaaagacccttttcgatgaggtggtttctcattctacatcctctgatctctatagactgtaggatgctttgctttcaaagataactgggttagagggtggggtgtgcaataggtgatttatcatggtttttttcattatcaatattacatggatgattttctcagattcttct

SEQ ID NO: 49489 - DNA, 1088 bp, Homo sapiens
tttttttttttagaaagttaacttatattaaaaaagtatataaacaatttcaatactacaaagtagtatttcaatacaaagcagttcaaatattaactgttctttaaactgttaaactttattataaattaaaatttctttacaaaaaaattgcacataatatttgaccactcttaggttctgatgcactggcatttgcaatagtttctttaatcttcaagttaaacagtctcggcaaggagtccagaacgtagaaagggtaataaacaaccctgatagagcattcaagtgcaactagcagacttgtggccatggcagttacactttccttaagatggactgctatagttttaaatcctgaaatgaagaatctcaaaaaaatttaaaaaggaaaaactaaaagggactgcctgctttttttactgtaaacacagccctggatattaaatcccaaacaggaatctctcaggcatcagagagtgtcaagtgagtcaggaataacacaaaataaaggaatgggggagaaaataaaaaaaacaaagcaaaattaaaataaatgtcagtcactttgaggaactatacttacgtatatgatgttatgagaatctggcagggcctagaagcaggccaaacaggaagttcatttatccaaccgaagaggatcatgttcattgcttccggttttgaggacaggatattgtagggaacttgatatgatcaataacgcttgtctgccttacacagaccttagccagggatcagcctaatcttgaagaatcattcaaataattttggcaattattataaggacttagaactgactgcacccagtgttcagtgattcttgctttctgttttgttactgtttaaatttaagagctcatttaggctgactccaatctcttggcacttggaaactagttttctcaggttatcagttttacctccttctgatgcttcaaacaagagttgatctttccacagtgatgcacaaatgaggtaacttctgtaatggctctctgatataaacggtggacctctctttgtccctttagaacaatctcatgcagcaatgctattttcccctc

SEQ ID NO: 49490 - DNA, 3136 bp, Homo sapiens
cgagctgataaaggcgccattttggaggggccgcgggagacgtggtgccgctgcgggctcgctctgccgtgcgctaggcttggtgggaaggcctgttctcgagtccgcgcttttcgtcaccgccatgtcgggaggtggtgtgattcgtggccccgcagggaacaacgattgccgcatctacgtgggtaacttacctccagacatccgaaccaaggacattgaggacgtgttctacaaatacggcgctatccgcgacatcgacctcaagaatcgccgcgggggaccgcccttcgccttcgttgagttcgaggacccgcgagacgggaaagacgcggtgtatggtcgcgacggctatgattacgatgggtaccgtctgcgggtggagtttcctcgaagcggccgtggaacaggcgaaggcggcggcgggggtggaggtggcggagctccccgaggtcgctatggccccccatccaggcggtctgaaaacagagtggttgtctctggactgcctccaagtggaagttggcaggatttaaaggatcacatgcgtgaagcaggtgatgtatgttatgctgatgtttaccgagatggcactggtgtcgtggagtttgtacggaaagaagatatgacctatgcagttcgaaaactggataacactaagtttagatctcatgagggagaaactgcctacatccgggttaaagttgatgggcccagaagtccaagttatggaagatctcgatctcgaagccgtagtcgtagcagaagccgtagcagaagcaacagcaggagtcgcagttactccccaaggagaagcagaggatcaccacgctattctccccgtcatagcagatctcgctctcgtacataagatgattggtgacactttttgtagaacccatgttgtatacagttttcctttattcagtacaatcttttcattttttaattcaaactgttttgttcagaatgggctaaagtgttgaattgcattcttgtaatatccccttgctcctaacatctacattcccttcgtgtctttgataaattgtattttaagtgatgtcatagacaggattgtttaaatttagttaactccatactcttcagactgtgatattgtgtaaatgtctatctgccctggtttgtgtgaactgggatgttgggggtgtttgtggttatcttacctggggaagttcttatgtttatcttgcttttcatgtgtctttctgtagacatatctgaagagatggattaagaatgctttggattaaggattgtggagcacatttcaatcattttaggattgtcaaaaggaggattgaggaggatcagatcaataatggaggcaatggtatgactccaagtgctattgtcacagatgaaattggcagtattgaccttatactaaaaggcaggggttaaaaatgattatatacattttccttaaaacacttgcaaacattttattcagttgtctttagctacaattgctttgctttttaaaccttggcaattgtggcaaaattatattgcccattttgtagcaacttattttgctcccttccccccatttttgttttaatagggactaatgtgggaagaactggctaatttgtcacagtgcttagttacaactgttaatgtgtgacctgctgttggtgtacatgtgggtacagggtgtttttaaatccaacaagatagagtataatatcaatactgctaaatctgcatgtcctctgtgtgactgatagagcgttgctatttcatttttttaagacaaaatgaaagcaaaatatagagttccaatgtattggtgtagataatctagttgggaatacttttaagtctcaccttcccctttaaactaatattcataattggttcatatgtttaaaagactttaatttacaaattaaattgcaaatgggagcattagatttagttttagacttaggtgggtagcaatgccagtaaacttaaattacgtaacttcttgcaaccacgaaacctgtaatacgctgtacagtaacaagtgttggcattatcagttgaactgtaaatacaaaatgcttcttccaattagtctctatgatgattaagtttctaaaatttatctgaacaccattcagaaacttgttttggggaatttgatagttattgatgtgcatctgttaaactgatgacagacataactcatcattccccagaaaccttttttgattacagtatctaacattttgcctcctcttttttgggttttgctgggttataaaggtttggattggagagggctcactgggatccccaatccttggagctggatcattggattcaaatcataatgtggataggatagggaggatgaattaccaggattcatggagcgggatcagattaccaggaacataggagtggattcctgccccaaccaaacccgcattccgtgtggatttttttattcaacttaattggctattccaaagattttttttttcctatttttgacgattggagcccttaagatgcacgatggaattgtgttttgccgttttttggtaaaaggagcaaagcgaggacctggagataaacgctggagcaatctccttggaaggattcagcacgagtagatggtaaacatttaaaggggaaagggggggtttgtttaaaatagtaaatcagtaagtcacttctaaatttaaagaaaacaaaattggagttgaagaataaagtaggtttccaaattggctattgcccgttttctttgaaaaaataaacattttttaaaaaactatgcatggttgtcctttttcctcttcatgtaagattctaactgggtctatcagttaatctttaaattgttaagtaagataagattttgactcttgtgttaatgtgttagcaaattaaaagttcttaaaaggcaatctaatggtattagccatcttttattgttaattgtaaaagtcttcaggggaaagcaaaaggggagaataaggcatttgtgtatgtaacttggtaaatgacggtgggggatggatctagcatctgaaagataaagcttctctactttgttataaaagtgggttaaaaaaactattagatgctgcttattttcccggtggtcatagaccac

SEQ ID NO: 49491 - DNA, 1721 bp, Homo sapiens
aatctagaaaagtgatagagcaaagatgcatgaggtataatctgtccgctggcaccatcaaagcagtaacagattttgtaataccagagtgtcaaaaaaaaagtcccatcagcaagtccatggggactttagaaaatacatttgaaggtcataaaagtaaaaacaaggaagattgcgatgaacgtgacttacttactgtcaaccggaaaataaaaatatctaaccttgaaaaggaacaaatgctcacctctgactttaagaaaaataccagactattaccaaaattgaagaaaatagaaaatcaggtagctatgtcattttataagcatcagtcctcaccagatttgtcaagtgaagaaagtgaaacagaaaaggaaattaaaaggaaagctgaagttaagaaaaccaaagcaggaaacaccaaagaagcagtggttcacctgagaaagagcacaagaaacacaagtaatattccagtgattttggaacctgaaactgaagaaagtgaaaatgaattttatatcaaacaaaagaaagctagaccttccgtcaaagaaactcttcagaagtctggtgttaggaaagagtttccaattactgaggcagtaggatctgataagacaaataggcatcccttagaatgcttacctggtttaattcaggataaggaatggaatgagaaggagttacagaaacttcattgtgcttttgcatctcttccaaagcacaaacctggtttctggtcagaggtagctgcggctgtaggttctcgatctcctgaagaatgccagaggaaatacatggaaaatcccagaggaaaaggatcccagaaacatgtcactaagaagaagccagccaattccaaaggccaaaatggcaagagaggtgatgctgatcagaaacaaactattaagataactgccaaagtgggaactcttaaaaggaagcaacagatgagggaatttttggaacagttgccaaaagatgaccatgatgattttttcagtacaacacctttacagcatcaaagaatactgttgccaagtttccaggacagtgaagatgatgatgatattctgccaaatatggacaaaaatccaacaactccatcatcagttatctttccattggtaaaaactcctcaatgtcagcatgtcagtcctggcatgctaggttctataaataggaatgactgtgataaatatgtttttcgtatgcaaaaatatcataaaagtaatggtggtattgtctggggcaacatcaagaaaaaattagttgaaactgatttctcaactccaacaccaagaaggaaaaccccatttaacacagacttaggagaaaactctggtattggaaaacttttcactaatgctgtggaatctttagatgaagaagagaaagattattatttttcgaactctgattctgcatagtaaaatgagaaaatatgattcctgggatttttaccataaagcagacagtgtttgtattttcaactggagtacatgtattttctttgtaaagtagcttcctatgaaaatgtggacttttttgaaggtttcatatgtttgtgttcaaagtaaaatatcctcattgctgcagcttactaaaaatgtaaagaaaattgtttttgctcgtgtagatatctgtaaatttgtttttgcatattaaaatatatatagataattttttaataagcatccaagtctgtttactttaag

SEQ ID NO: 49492 - DNA, 1829 bp, Homo sapiens
tgacaggatacagagtcaatccataaactaaataattataactgttctgaattatacagagtctaaaaatatgtgtcagctacttcattcctgtaaatactcttgctgtgttataaatatggcaagaaataaacatgaccaatatcaatagacttcttgaggctactataagttttgagaaataaggttcaaaaaataagaatgctaacacttaagcacagactagagcttgcttgggtttcttcctgcattacaaggtaaaaatttgttaatgtttgtttttattcagcttgggaaagctttgtgccatgaatacgtcgcatttaataacaagcaacacacggcatatagaaataactttaattaaaaaacttacatagaagattataatatcagacgtgacaaagatttgagtttatttgcctggacaacttgggtttgtctggcttttgttttctttttctttaaaaataaatgtacagtaaaactacaagcaaaagtttgtcagtattgaattgaattttttaccccttaaaaggactagtataatttccaatctctaacaaaaacttagtgtcaaatctcacagataaggccaaatggctaatattttcagttatgtgggtagtacaacttgagtaaccttttttacatgacaaaaagtgagttatataaattgtcctcaactttcacataggaaaaaaatggtttaatagcttcaaaaggaattttctttcatgtatactcttcagtatccaatattgaagctttgttctttgaaaaattttaatttccaatctaggatgcaagcaagaatatatgtttatttgaatagagtaagctatggcaaagaatgaccaaattagctagaaatagaaatcagccagaattaactaatttcttgctaatctagaaatacaatcatcttttttttttttttcaaattttatactgatagggctttactgtttgtggctcattttaaaactggtgtcttctcttcatgagacacattaattggtaaaactcaaattgagttttcaaagatgtgatagtattaaagtgcaccaatatttgactcaaatttgcttgctttattttgttaggagtaaacagaaagtagcctgtgtttagtcccaaagatagcagtgattttgaataaaggagttttgtgttgcctggatatatgaatttctgtaaataacttctgttggttaaacatgttaaaaccaaccaaccaaccaaccaaccaaaaaccttctgtctctatattcaggacgttcagatgtcttttattagtggaaacctgtgttttatctattctgcagcttacatttcatagggtagttcatacatgcatttccaaggggagtgggtcattgccagtgttttaaaaactacataggggtgtgtgtgtgtgtgtatgtttattttatacacacatatttgtatattctaatatattactaaggcaattttaatgaattaccatgtatataaaaaaatagctgtcacttggcacacaggtttgtatgtatgtgtatatatatatgtatgtatgtatggtgtgggtacatagtcttaaaaattacccagtaatgtgatttgacatcaagttgcagcaattaatatcttggtgtttgtaagtaagttgcatgataaacacaaatgactaccacttgtctgtagatgaaaatctggttacccttatggttccagaaggaaaaacagacttatcttgcctgtttcataaacagcataaaagattaatacatgcagaacatgctcttattctggaggggatgggggatccagaacagggctttatt

SEQ ID NO: 49493 - DNA, 3776 bp, Homo sapiens
tttttaaattttgcatttgacttaaagtgccatgagaaaatttgcatactgcaaggtggtcctagccacctccttgatttgggtactcttggatatgttcctgctgctttacttcagtgaatgcaacaaatgtgatgaaaaaaaggagagaggacttcctgctggagatgttctagagccagtacaaaagcctcatgaaggtcctggagaaatggggaaaccagtcgtcattcctaaagaggatcaagaaaagatgaaagagatgtttaaaatcaatcagttcaatttaatggcaagtgagatgattgcactcaacagatctttaccagatgttaggttagaagggtgtaaaacaaaggtgtatccagataatcttcctacaacaagtgtggtgattgttttccacaatgaggcttggagcacacttctgcgaactgtccatagtgtcattaatcgctcaccaagacacatgatagaagaaattgttctagtagatgatgccagtgaaagagactttttgaaaaggcctttagagagttatgtgaaaaaactaaaagtaccagttcatgtaattcgaatggaacaacgttctggattgatcagagctagattaaaaggagctgctgtgtctaaaggccaagtgatcaccttcctggatgcccattgtgagtgtacagtgggatggctggagcctctcttggccaggatcaaacatgacaggagaacagtggtgtgtcccatcatcgatgtgatcagtgatgatacttttgagtacatggcaggctctgatatgacctatggtgggttcaactggaagctcaattttcgctggtatcctgttccccaaagagaaatggacagaaggaaaggtgatcggactcttcctgtcaggacacctaccatggcaggaggccttttttcaatagacagagattactttcaggaaattggaacatatgatgctggaatggatatttggggaggagaaaacctagaaatttcctttaggatttggcagtgtggaggaactttggaaattgttacatgctcacatgttggacatgtgtttcggaaagctacaccttacacgtttccaggaggcacagggcagattatcaataaaaataacagacgacttgcagaagtgtggatggatgaattcaagaatttcttctatataatttctccaggtgttacaaaggtagattatggagatatatcgtcaagagttggtctaagacacaaactacaatgcaaacctttttcctggtacctagagaatatatatcctgattctcaaattccacgtcactatttctcattgggagagatacgaaatgtggaaacgaatcagtgtctagataacatggctagaaaagagaatgaaaaagttggaatttttaattgccatggtatggggggtaatcaggttttctcttatactgccaacaaagaaattagaacagatgacctttgcttggatgtttcccaaacttaatggcccagttacaatgctcaaatgccaccacctaaaaggcaaccaactctgggagtatgacccagtgaaattaaccctgcagcatgtgaacagtaatcagtgcctggataaagccacagaagaggatagccaggtgcccagcattagagactgcaatggaagtcggtcccagcagtggcttcttcgaaacgtcaccctgccagaaatattctgagaccaaatttacaaaaaaacgaaaaaaataaggattgactgggctacctcagcatacatttctgccacattcttaagtagcaaaaaaggaaaagtgctttcctcctctgcaggatgtaaggtttatcagccattaaaacttagacttctctagcttttcactagctgtgaaccagccttcctgtccatggacgtgaaactgcatagtaatgagactgtgcacactgatgtttacaagattgaaagagtctttctccgaaaatcatggtaaagaatactgagacaatgaaaaaaaatcaacaaaatatgctttctggagaactgtaccttttatggtttgcttgcacatcagtagtttctgctgaacgtgctgtcataatgaagagatttccaagattttttttcctgattagaactggtagccagtatattaaatattgatataaaaataaaagaactggaaccagattcagaatcatgaaaacaacatttttacaacaacaaaaaaactatattaaacagggtttaaaggaaattaaaacagaactatgagaagtacaatttgttatagtatagtatcaaatttctatatagattttatacctcagtggggaaaaataactgattccaatgacattcattttgttttcatctgtgatagtcatggatgcttttattttccttggggtgctgaaattgagctgaaaaaaaaaggctctttgaatatagttttaatttctctctacagttttttttgtttggtttgtgggctgttggaattgtaatttttaattgccttctaaaaaatggaaatttaacaatgtctgatctcagctgaacaaattagatgtttccagttgctcttgggtcaactggcttacagatttacatgtgcacacacacacaaatttcttatcacattttcgacttcttcacttgacctaactgattatgcgaaatacccaagattcatgctactgtaccacagatttgttttcacagcaataaatcttcagttctttgtttatgattccacttaacaaaaggcctgcagaagtgatttattatttgggtatttggagataatacatttgatggttttttggaaaacctttttcactccatactcagatatgcttcattgtcaaatgcatatttagattagattattgaattgtaatgtttatctgctgctttttttaaataaaatttgactgaaaatgtttaattggcattttttaatgacttagccaaagaagtgcagctattattccatattaataggcttgcatttcttttcctaaatcttatttaggctaaatcagttttatttttctctgattttttttaataccacagaatcacctgagtgtcaattgaaagttgtcaattaaaaggtaaccttttaatctcgtaggaggaatctcattaagacatttttcctgatatgtagagcagtctgttggcaaaaatgcatatattttctttcatatttgtaaaattatatttaatggaattcttttctttgattatcaaggactttcactgcaggcagtgctatttcttgtgcctaagaatgtttccaaaagtcgcatcgctaatgatatttgccaagttgagtgtacacaaagtttctcatatcctgttcaagttaatcaacatcaagcacatggggatgctttagggtgagtctatagtacaaaatgcataaaccatgtccccaggaaatttgaaaggaagcaggtgctgaatggaatttttttccttttccatgagctgtgttaattctatctccagtaggcctaatgcttgaataagcaagatgtctaatcaataaattattttcatgctcagaatttcaggtttttgtactccagcatagcttggtcttatttcttactgtatgaaagcttaacagcaatgtgatttaaggttttgttttaaatgggagatgtaagtgatttaattcatgggtacttttagaacctgatagataatcccattgcctttatttttctaattaaagaattcctaaatactttgaaaatacaaaatattcctgaaa

SEQ ID NO: 49494 - DNA, 1034 bp, Homo sapiens
ggcagccttggagaaggagcatgaggcgatcaccaaggtgaagtatgtggacaagatccacatcgggaactacgaaattgatgcctggtatttctcaccattccccgaagactatgggaaacagcccaagctctggctctgcgagtactgcctcaagtacatgaaatatgagaagagctaccgcttccacttgggtcagtgccagtggcggcagccccccgggaaagagatctaccgcaagagcaacatctccgtgtacgaagttgatggcaaagaccataagatttactgtcagaacctgtgtctgctggccaagcttttcctggaccataagacactgtactttgacgtggagccgttcgtcttttacatcctgactgaggtggaccggcagggggcccacattgttggctacttctccaaggagaaggagtccccggatggaaacaatgtggcctgcatcctgaccttgcccccctaccaacgccgcggctacgggaagttccctcatcgctttcagttatgagctctccaagctggagagcacagtcggctccccggagaagccgctgtctgacctgggcaagctcagctaccgcagctactggtcctgggtgctgctggagatcctgcgggacttccggggcacactgtccatcaaggacctcagccagatgaccagtatcacccaaaatgacatcatcagtaccctgcaatccctcaatatggtcaagtactggaagggccagcacgtgatctgtgtcacacccaagctggtggaggagcacctcaaaagtgcccagtataagaaaccacccatcacagtggactccgtctgcctcaagtgggcaccccccaagcacaagcaagtcaagctctccaagaagtgagcagcctggcccctgctgtcggacctgagcctcctggctcccagcctgtaaatatgtatagacctgttttgtcatttttttaataaagtcagttctggtggccctggactttggaggggaaggggaggccaagaaaaaaaaaaa

SEQ ID NO: 49495 - DNA, 1812 bp, Homo sapiens
attggtaatatatttttatatttggaaatgtacctgtagatgttttctagaggcatgaaagttaaatgtatatattatggtagaaataatattgaaggatattgtacttcactagtgctgccagaggaattgttaataaaagcaccttctttaacaataaatgtctttcacagacttaagggactatgtactactgttaatatctcgtaagaacaaaacacattgaacatccttccagaaagtctttgagggaggacctgtacccataatagaattatggcactcatttctgacagtgatcaagaaatcagttatttccttactgttggaaggacattgtaaagtatgtggttatatgcagtgaaactgcagaaaatactcctggttgaggagttttcactttactacagtgatataaaaaccagcagtttttacactaaattttttaaagaaatattagacaaaaatatagaattaaaacctttggttccaaaatgggaaaggttccacgatacataaatcatttctcatttgctttaaaaaaatttaaaagtgtaaaaattatgagagactttattcgttaacaatgggggtaaagagctatatacatgaaaatgagtcttataaaattaagtgaagtgcaaataaaagcactgctactataagacattctggaatggttgtttaataagggtattatccatttgatctatagcaatgtgattttatttttaaaaagaaaagcagtgtgttttctttttttgttgttttcttttgcttaagcacttcatcaattgctttattctgtatctgcgaagtaatctgcaatctcttttgttctttttaaaatttgatttgttataaaattgccaaatagaagtgtttcagatacatagtttgtacctgtatttttattttattgcctcatgttcttgtaagtcattcttaattgaccaatgattgtagaccttgcttgagtattttttctaataaaacaaagcaaatcacatttagcttcaaattgtaacaattcaattgaattttaaaatgacacctgaaaagatacatctgatattttctatataggggcacagtaaataaggtttttcattgtgtaggaatacttagatgtcaaaaccagatttcgtgatccttgattaacttctgagtactcaatcaatcataatccttttgctgcttatctgatgttggtttgatactgttaacacaccaaaaagaatatggaattgaaatgagctaggctttataacttgtatgtatacatatatacacataacatccaattatgactgggtaataagtgtgaaaattttaatttgtggttttcatttattaatgtctgcccatctgtattgttgctcctaccttcaaatatgacacctgaaataataagtctgttgtccagaatttatgtattgttcagcatcaagcaaactacagctcacaagcatacccatttatatgttgtctatgcctgctttctcctgcagtggcagaattgagtggtgagaccttaggtcctgcaagcccccaatttttactacaggttggcaatccctaatccaaaaatctgacataaaaaatgctccaaagttcaaaactttctgagtgctgacatcatgctgcaagtggaaaattccacgcctgacctcatgtgactggtcatagtcaaaacaattaagactttgtttcatgcacaaaattattaaaactgttgtataaaattaccttcagtctatgtgtataaggtgtttgtgagatataaatgaactttatgtttagtcttggaaa

SEQ ID NO: 49496 - DNA, 1102 bp, Homo sapiens
ttgccattgtttattagaaaatttcagcttaatccattgtgtatatgttacatgcatttcatttaactttgctatactgtatatattgtatatataacggacaaattagtcccgattttataatatctagtctctagatattaaagaggttgccaatgtatgacagaagtagagttagtaaactaacacattttgtacactttggtaaaaatttgtagaaaggctgtcttctgaaaaggacttttggaagtgagataacatcagctctaagtgacacgtgcctatatccatcaggttggtgggtggagaggagttggaaggaatgaagggttctagaccagaatgttcgtatttagaagacactatcagatataaccattgttacatgtgtgtagtttattcaaccctactgtgtatatagcggacaaacttaagtccttatttgaaacatctagtctttctagatgtttagaagtgcacaaagtatgttaaaagtagaggtagtaaataacacattttgtagctatccttttgatatgaaatattgtcttggaaattgatcaattctctgagcagtacccattttgatatttgtgctggttcagggggaaggaggagcacaaagtgcaaagggctttctaccagtgtccagtgtgtttatgaggaggcacattgaccattgtcccttatgtctgcattttcatttactgtgctgtgtatatagtgtatataagcggacataggagtcctaatttacgtctagtcgatgttaaaaaggttgccagtatatgacaaaagtagaattagtaaactactacattgagtacactttgtgttaaaattcatagggaagacttcttaaaaacaagtgaaattgttaaaaccccccctaagcattacagatggcttatagctgtccacggggttggtagaggtgggaaagggaagggttctaggccagaatgttcctatttagaagacactcaaattacagtctgtgttatgtatgtataccatttattcaatgctactgtgtatataatggaaaacttaagtccagtttgaaacatctagtctttctaggtgtttaaaagtgtacaac

SEQ ID NO: 49497 - DNA, 733 bp, Homo sapiens
acttttttatttctcttttttttcgtaaaataacttttatacaggattagtagatctgtttacatataaaaaacagaaaggacctcattacagttagatttcacataaattacaaattgacttttaaaaactactattcaacttcatttaaagtcccttttaaaaatttcattttgaaggcacagtgcatgaaataaaccaaagactgaagcacttgagatgaatgggtgttgggcacctcacataaacagctgtagattgctctagaactgggagtatcacttggaaaaactggagaggtgaaaagctgatttttaatctgagcataaaaaaatactattgtcatacctccagaaaatctgtagcatggccagcatagaaggtagttagtacactcatgttatgccatttataaaaatcataatcatacatatttacataatttatatccaactgcctcaaaatggtaacctactttcaaatttcataatgtatgctgtcaaatcaaaatcaaccaggacaatattctgaaaatcaagtggaatcattaacgaattattgctaaaaataggataaatgggtattgggagagatttcttcatgaactagaaatccaagttcagctgacattaatcaaagacccaaatcatatccccaaaattttagctaaaacaaatcagaaacccaaagagttaccaaaaaagttgctatagaaaatcactgaacatcaatc

SEQ ID NO: 49498 - DNA, 1600 bp, Homo sapiens
  misc_feature (1)...(1600): n = a,t,c or g
aaataaataaataaataaataaataagtttaaaattaattctttatccagagtcgggtgctttagaatttataagtcacttatgtgttttgcttgaattaattctgacagcccctatgaggaaatctggaggcaggtaacagttcccattttagagatgaagaactgaggcacagattaaaggacttgcctgtgttgaataccagtcctgttctaggacattctcccctctcctaggagacggatgtcacgcacaaatggggagagaagtgtttattttgtaggcactaagggtttctaaaacccttaacactggtaagggctcaaaaataaacgtatgtgttcatattcgatcaccgaaatgagagttcttaattgctaattgacaaacgcgttanaatttcagttagggagtcatctcccttgattgtgttctttttcctgtcaattttcatagacctaatttggcaaacttcaatcggggactaaaatttcccactgaaaatgttaaacattttagataactgtgaagatagtttatttttattccttgccaatctgggaatatgccttttttgtgtgtttgtgtgtttttttaagtgctgtattaataatactttctgaaagaaaaggacacttaccccaaaacttcaatctgaaatgtcttacattaagaatatcttgaatgttgtgtatatattttaaaaagcactttgcaaaatagtttgtacatttatttcctaatttatacatgatttttggtgttaatatatttaatgattaataacagaatgtttatttaatgtgctgtccatttttatgtaatattatggggaaagtgatgcccagcagttccttttcattattctatcttctgtcatatgaatgttgagcaaagcttaggccaacatgaattgtttgtgaagtgtggttgatggtgctttgtttttttctgactacttctatggaaggccagtgaagaagcaaaggaagacatgaaaattgacgctcattcttcttcctattgttccctgacatccagcaaattgtgaatttgaaaaatgatggccagttttcagaagtgctgacaaattcatattggtatgcaaaagctcatcacccattaaggtttgttgttgaatcaacagtactcagcatattaaaacagtacatcagaactcatgccaacagtctttatgatgggattaaggtggacaagatctcctaagatctgtgaatgggattaaggtggacaagatctcctaagatctgaaaagaaaccttaatacgctcatatggttggagtgttaagtgaacctctgattttgtcagggtttttctacgtgtaggcgtgaatagggggcaccccttcaaaactgtacaaagaagacgactgttttccatttccatttaaacatttttagccacttcatttctatttattgaacaggtcaaatttgtcttgttatttgtgagtacagtacatttaaaaaacatccttatcggttatttttttttcagtcggagtttgacgtataaattgtttatgcttttggtgtaatctcttaataaactggttcttcaaaaatcaaaaaaaaaaa

SEQ ID NO: 49499 - DNA, 2370 bp, Homo sapiens
cttctttctcccgcgcttccttgtactgtgcattcctcatcaacgatggcttctcggactccacgaaactgcgctgtactgaagggcgaagtggatctgaccgcactggccaaagagcttcgagcagtggaagatgtacggccacctcacaaagtaacggactactcctcatccagtgaggagtcggggacgacggatgaggaggacgacgatgtggagcaggaaggggctgacgagtccacctcaggaccagaggacaccagagcagcgtcagtccccggtctcttttagagcggatgagagtattctctcagagcctgctttccactgggacctagttgttcctagactattccgtgaccccatgagcacttactatgtagttctcgtggattcagcagcaggtcgccttgtgtttccccttctcttcgttggtgtgtgcatatgtcagtgcttcccccagcaccccagcgtgtactttattttttccttttgatttgaggatatatgatccaggggaaatttcagtttggtataactactttaattagccataattattcattctaagtttttgctcagaaacaaatggcactggaaagaaattctttgttaaagggagaaagctaagcagttgcttttttggaggaggctttatatcggtagcctcatctcatgttttgattttgagaaggcgaaaagcctaaacaggatctccttgactccagagattaaggcctttcacgtctggattttttctccataggtcatctctgaatttgagcaatggtgaaacggaatctgtgaaaaccatgattgtccatgatgatgtagaaagtgagccggccatgaccccatccaaggagggcactctaatcgtccgccagactcagtccgctagtagcacactccagaaacacaaatcttcctcctcctttacaccttttatagaccccagattactacagatttctccatctagcggaacaacagtgacatctgtggtgggattttcctgtgatgggatgagaccagaagccataaggcaagatcctacccggaaaggctcagtggtcaatgtgaatcctaccaacactaggccacagagtgacaccccggagattcgtaaatacaagaagaggtttaactctgagattctgtgtgctgccttatggggagtgaatttgctagtgggtacagagagtggcctgatgctgctggacagaagtggccaagggaaggtctatcctcttatcaaccgaagacgatttcaacaaatggacgtacttgagggcttgaatgtcttggtgacaatatctggcaaaaaggataagttacgtgtctactatttgtcctggttaagaaataaaatacttcacaatgatccagaagttgagaagaagcagggatggacaaccgtaggggatttggaaggatgtgtacattataaagttgtaaaatatgaaagaatcaaatttctggtgattgctttgaagagttctgtggaagtctatgcgtgggcaccaaagccatatcacaaatttatggcctttaagtcatttggagaattggtacataagccattactggtggatctcactgttgaggaaggccagaggttgaaagtgatctatggatcctgtgctggattccatgctgttgatgtggattcaggatcagtctatgacatttatctaccaacacatgtaagaaagaacccacactctatgatccagtgtagcatcaaaccccatgcaatcatcatcctcccccaatacagatggaatggagcttctggtgtgctatgaagatgagggggtttatgtaaacacatatggaaggatcaccaaggatttagttctacagtggggagagatgcctacatcagtagcatatattcgatccaatcagacaatgggctggggagagaaggccatagagatcccgatctgtggaaactggtcacttggatggtgtgttcatgcacaaaagggctcaaagactaaaattcttgtgtgaacgcaatgacaaggtgttctttgcctctgttcggtctggtggcagcagtcaggtttatttcatgaccttaggcaggacttctcttctgagctggtagaagcagtgtgatccagggattactggcctccagagtcttcaagatcctgagaacttggaattccttgtaactggagctcggagctgcaccgagggcaaccaggacagctgtgtgtgcagacctcatgtgttgggttctctcccctccttcctgttcctcttatataccagtttatccccattctttttttttttcttactccaaaataaatcaaggctgcaatgcagctggtgctgttcagattctaaaaaaaa

SEQ ID NO: 49500 - DNA, 1818 bp, Homo sapiens
tttttttttttttggatttcgcatttgagatgctttttataataaagttatgccaaaaatacagcaacaaatacagaaaaagtattaacaaacggagaagccccagatacacgtacagtaacaatacaaaaatgtgactggtcaaacagctcaagttcacatttaacactttcaattatttttaattacactatttctgttcaaaagaatgttttccttacatacaaccatgatcagtctttagtctcaatcgtaccaaaataaagctatatataagcactctgactaggtaaggtgtgaagtaccccgtgagttgctctgtggcttgagatgggacacatggtctcaaatgactcttatgcatgccttgccttaagaaagaaaagtaatgttgatggtttaaaaagtaagtactttttgaagcagcagatgaaatgtgtttactaccagcctaaatcaaagaacatggcaagagcaagattgttctcaggaaggaaaccataaatatggcatttatgtaaaatccttgcagcatctgaccatgcttttatctttaaaaaaaaaaaatcctcactttcttaaatataagtaacagtttattaatttttttttttacagtgagatatggctatgggaagcaggtgatactatttgtttaagaaactgggatgccaactaacacgtggagttccccaagactttgcaatctccatttgtgagtttctgtaaaaaagggaacccagctagaggattcacagagaccttgaatgacaagcgacatactcgaaatctgcagctctcctcccggagggcccagcgtgccaggagacacgctgcagtaaggcacttaccaagctcctttggatagagggaaagaagaaatcaatccaggcaacatgcaagtttcagtgaagtcagacattttatgggaatttaaagtcttgcctgttctcagtgcaccccagtcagttactgacatgtcagcctcagaaaccgcacatggcctcaggaaggtcaggccctcctgctggtgggcacgccattggctcttgatcgctgatggtctcgatgatggtcatatttcacagaaataatgaggaaaagcaggagggtagctccttgaatagcagccagaagaaaaaagtaatagttcaaatagcagccgttaatattaccaaagtctgtgtgactgctcatccatccgatggctttgatagacaccagtgccagcagtccagaacccacgaacgacccgacgccagagaagaaaaagaacaagcccattatggcactctgcatggacttgggggcagctgagtatgcaaattccaggcctgcgatacttgcaaagatctcgctgatcccaatcagcaagtactgcggcacctgccaccacagcgacagatcggcagcatggtagacgacgttgccgatggtctgaattaatggttttctctttaacaaggttcaagccttttactctccaaaattcctgcagcaaaggccgagcacatgacaaagaacatgcccacggcgatccctcttcagggaggatgggagcaggccatgtcttctcaaaatgggatcgaccagtttgtcccttcagagggatgagcaggaggatgagcacagcatcaaacatggtccagcccaggctgcagggagcgtgtgaggagtggttgtaatatttgaaatttctggaatcctcaaatgaagactctgtaaaacatatgttgtctgcatttggaaatacactgtccagtaaggtatcaaagccaagaaaacagggacaatcttgaccagagctttcacatcttc

SEQ ID NO: 49501 - DNA, 416 bp, Homo sapiens
cccctcccaaggacgaaaagatcggtgagacggtcgtcgacctggagaacaggctgctgtccaagtttggggctcgctgtggactcccacagacctactgtgtctctggaccgaaccagtggcgggaccagctccgcccctcccagctcctccacctcttctgccagcagcatagagtcaaggcacctgtgtaccggacagaccgtgtaatgtttcaggataaagaatattccattgaagagatagaggctggcaggatcccaaacccacacctgggcccagtggaggagcgtctggctctgcatgtgcttcagcagcagggcctggtcccggagcacgtggagtcacggcccctctacagccccctgcagccagacatcgagcaggggaagctgcagatgtgggtcgacctattt

SEQ ID NO: 49502 - DNA, 2819 bp, Homo sapiens
tttttttttttttttgatacatatatttattatgctgtaaaaagcaacactacctgattgcatttaaaataaatgtttcccaatttcagaatacttacaacttgtagttttaagattagattcactttgggaggttttagaagcaaatacattcatagctgtgtaatccccaggaagaatctaaatctgacatcaggtcattcagtccctgccagacagacaacagcatcaaatggtcaacagctaatccagctctgcagctaaagggcagtgtcgggcagcagtggggtatagcatattaccaaagatgagaccagcaaaaacaacaatgtgtataaagctttaaattaacatgatcatatagagcgctcaggatacagaaaaagcacatatgatactaaagccaaaacaaaaagatctttggagtttactgacggcagcagttaatagcacagtcaacagcatttaaatcaaatatattattaccagccaacagcaaacagcccgagcaggaatcggcacatagtcataaataacatcaggggtaaataacggcacatttaattaaacaacaaagattttacagaatggttttgatctgaaaaaagatgaaaactctctttgttcccaaataatggttaggaacctctttttattatagaaaagcctcaaaatcattggtaatcttcaagtcacacaattcaactgtcttgtttcattttagtcacacaaagcgggctgctctttgaataaagttatcttgattgatttcagttaaaacgtgtctaccctgtaatatctttggggataatgctgctcctgtgcagcatcttacaaatgctacctgtctccatggcttgctagatccacggcgtaggaaactgctcactcagcatcctccccatggaagctcaagcatgggaacagcttcgggcctggtgcagctaaggaacattggccgtggtttcaccaaaggaggtgccatctaggtaatgggagggcagtggcaggagccactggcttagactggaagtgaaaatgaaagcacctggaggctgctggagtaaggtgccatcaggcatgtaaagtttagaagcagcagagtgtgctcatagaaaaagaaaaaaaaaggaatttgctgtatgtgataacaactaacattcatgtacttgagctcatttcactaaacacagcttcagagaagtccatttgtgtgcatgtgtgtgtgtgcttaatatcagaactcctcactaacatgccactttatctcgaggtatgacaggataaaatgtatgtgtaactcctagaaaatcctgttctatccgttttttgaagccccttttacccactttccaaatgaatcctgaattaccaacccaagacaaagaattataggtcacaatttaaaatgaaatggcctttttcttattattaaactacagagcccaccaagaattacacaatagaaaaatcacaagaaatctggaatgatccagtggtcccccaaggaggacaaatctcttgatgcagactcttaatgacaggcttggaaacaaatgtttgttagttgtagcagttcccatactttcagaataactttggtagcttagagcatttctgaatttatctttaccctagaagctaaaaaaaaaaaacttcttaaagagctgcagttgcacatcccttcgctttttagactgataaacttgactaatttatacttagtaattttgtctctggttcgtcttctgtagacaaatggcaaagttctgatgccagaaataggaggcattttctgacttactatggaaaacataaaaactgcatagtatgccagctctcactttccccagcctaaaggaaagaggcagatagctaaatgtcctgagaagagaggctggactaaggggatatagaaaaaggaaaatttttcaaaagcattataactacattcacacatacgttttggtcaccaaacatatcttaaacagattccctgataaagtctaatcagaattggtctatcttactaacagttgttaactattatagttttttaagagtcacatcatgaagctagggtgagagagagacattttaaacacacaaccgtaagtgcatatagttgttcaaacacttaaactaaatttgtatttgaagtcttgaaaatcacactatttgcttctaaaggcaaccttgacccatttggacagactgtacaacagagcttactttataaatgcatatcagcagatcatcaccataaattgaaaattcacaaaacacaaataaatcatggaagaccacacaagctagcattggtaactatttcttttacatcaaattatacaatgcacgaggtaatattgctcacattatggagggagattgttttatttctattttttcccaaagagatcagatttgtcctgtgtgcacaatgaagaaaactccagtaacactgaaatgacaaatgtaaaatatacatcactaccagatagaaatacacatgttcttcataatcattttccacaattaaataggtaagtgatttaaatcttgggatttgagaccattacaacaatccatcaagattcttatggacggtttgattttccttcccgttgtcagaatctccttgaggtgtgtactggacttggtattcttggagaattttaaatacatcatggtgtccaaagtgcagtgcttcatccatgggagtgttattccacctaaacacgtagcacagcatggacaggatcattaggtaatttatgtacaaagatgatcaccccacattcctagattttaaatgcagg

SEQ ID NO: 49503 - DNA, 639 bp, Homo sapiens
attcggcacagaaatgaagcaagaaaaaacattttaaaagtaacatgaaaattgaaatataaaaactcatttcttggctctgtctgccaggccctaagattacctcattaatgaatctattacctaatcagttcaaattcaggaaggtagactaaacacacttggggtgcacagagaaaagagtacctgcctcccagccctgttctacgaaggctgcagaaaggctcattacctgcctccctcaactcaaaccactcctgagtaaggcttctgggtaagctctctgaggtcctaagaaagtttggtatatgccttgtctatcaaaatggagctcatagcatgcattagactctgataccttcaggtcataagaagccttactcttcggtcaggacaggctaagggtagccacacaacaggaagtcagtggcagagaaaggaagttaggccagagtcctacttcctgacccaatcaaggcagcaaggagtaggaggtcgaactcaagcagaagtatgtctctcacactattgcaaatatggcttctcaatcataatgtagctggggagcaaccagctcagctgatactttcccattcccttagtagaacccatctccatctatccatgaggaattacttt

SEQ ID NO: 49504 - DNA, 1053 bp, Homo sapiens
tacgatttggggttatcacaaataaacatcttgcgaaactggtatccttagtacactctggaagtgtgtatttacatagacatttcaacacatcacttgtcttccccagggaggtcctgaactacacagctgagaacatctgtaagtgggccttagaaaaccaggagacgctctttcggtggctgcggccacacggaggcaagagtctcctgctgaataacgagctgaagaaaggaccagcgctgtttctgttcataccttttaatcccctggccgaaagtcatcctttaatagacgagatcaccgaagtggccttggagtacaacaactgtcatggggaccaggtggtggagcgtctccttcagcacctgcggcgggtggatgctccagtgctggagtccctggccctggaagtgccggcacagctgccagacccgccaacgatcacagcgtccccctgctgcaacactgtggtgctgccccagtggcactccttctccaggacccacaacgtctgtgaactctgtgtcaaccagacctccgggggcatgaagccgagctcggtcagcgtgccacagtgcagcttttttgaaatggcagcagctctggattctttctacctcaaggagcagaccttttatcatgtggcatcagacagcatagaatgcagcaattttttaacttcctatagccccttcagctactacactgcatgttgcaggaccataagcaggggtgtgtcaggcttcatcgactctgaacaaggtgtctttgaagcccctactgttgcattttcttcccttgagaagaaatgtgaggttgatgccccaagctccgttccctcacattgaggagaacaggtatctctttccagaagtggacatgactagcacaaacttcacaggcctgagctgcagaaccaacaagactctcaacatctaccttttggattcaaatttgttttggttatatgcagagagactgggtgctccgagctccactcaggtgaaagaatttgcggcaattgttgacgtgaaagaagaatctcattac

SEQ ID NO: 49505 - DNA, 1250 bp, Homo sapiens
tgaatgccttaagatggtgataagtggaatgaggtaccatctactgtctccagaggaccgagaagaacttgtagatggcacaagacctagaagaaagaaacatgactaccgcatagccctatttggaggctctcaaccacagtcttgtagatattttaacccaaaggattatagctggacagacatccgctgcccctttgaaaaacgaagagatgcagcatgcgtgttttgggacaatgtagtatacattttgggaggctctcagcttttcccaataaagcgaatggactgctataatgtagtgaaggatagctggtattcgaaactgggtcctccgacacctcgagacagccttgctgcatgtgctgcagaaggcaaaatttatacatctggaggttcagaagtaggaaactcagctctgtatttatttgagtgctatgatacgagaactgaaagctggcacacaaagcccagcatgctgacccagcgctgcagccatgggatggtggaagccaatggcctaatctatgtttgtggtggaagtttaggaaacaatgtttctgggagagtgcttaattcctgtgaagttttatgatcctgccacagaaacatgggactgagctgtgtccaatgattgaagccaggaagaatcatgggctggtatttgtaaaagacaagatatttgctgtgggtggtcagaatggtttaggtggtctggacaatgtggaatattacgatattaagttgaacgaatggaagatggtctcaccaatgccatggcaagggtgtaacagtgaaatgtgcagcagttggctctatagtttatgtcttggctggttttcagggtgttggtcgattaggacacattctcgaatataataccgaaacagacaaatgggttgccaactccaaagttcgtgcttttccagtcacaagttgtttaatttgtgttgtcgatacttgtggagcaaatgaagagacccttgaaacatgaaaaatgagtggacttcagactcatcagagactctaaaatatagccaccagtgctttgttccaggagtttggtgacaaagttttggtttggtgttttggtaaagaaagtttcaagtgaaatgaggttcctataaaatagatgtttcttttatatggatttccttaattcaaagatcatattttagctggccacaaaaccaagaacatatctagcaagaaaacttgaaaaagtataagcatttgttaaaaatgtgaat

SEQ ID NO: 49506 - DNA, 1244 bp, Homo sapiens
tttttttttgcaggctgatacatgtgggggattttatttcaggcacttgctcttcagtttttcttacacgatgttccacaaatataaaaatgagaaactctttcagattatctgtatatccatatacctggattattctggctaaagcgacaggaaatcccagcagtctggcttccccgagtaaccctgtactgcctggtttaatcccgccgtctgagggtggggtgggcgtcaggcatggctggacacaggagtgccagtggtggggtcagaatccagcttctccctctcccggccccagtgggtctattccccgaagtccttgctcctgtctgcagggctgtgcccactgccggtggggcagggagtggagaaggggggctgactcacttgctcttctcctggagttgctattctaacggcagcaaatccacaggaaaaaggtaaacaaaaaaaaaataagaatctttcagaaaaagaagtattttttaaaaaaagagagaaaagaaggtgaggagttcagtgtaaccaggtgactactctgaactggggactgagtcagcctctgacgctgagctgaatgcccaatgacaaacgtgaccagccgtgcgggcgggggcaaggccaaggacacagagggccgagggcccagggccaggtgtggcgcttccagacgtttctactctctcattttattcatggcgacttgggaaggaaatctgtctttaatgagcaaatgtaaggctgcgttttctttgcgaagtctccacaggattttcacggcaaaaccaatgagaaaatgtcctttcaaagagaagaccgagtgtcccgagaacattttcttgaaaggcgcgtgcacgggccgccctctcgaggcatcgtaatgtgcttcaaagaacacttggtaaaaccctctggctaaaaaatcaaaatttccaaagcatatacatttgaaaaaaacaaaatctccacttaaaagcttattttgacttgttgcccgggatcaattgcaaaagcgcttctgttgagaaaggacagttcagccaaactcaagctggtttttagaaacagaactggaggaaaaaaacccagaaaacataaggcactgggcaaatgtgacgtaggctgggatgaaacccattctcccagagccggtctctcccacagcacaaagctgctcctcatgcagccagctggctgagggcccggagtgtgtccacagttggaggagcggggctggggaa

SEQ ID NO: 49507 - DNA, 346 bp, Homo sapiens; identical to SEQ ID NO: 11422

SEQ ID NO: 49508 - DNA, 1887 bp, Homo sapiens
  misc_feature (1)...(1887): n = a,t,c or g
gtcgtgtgcttggaggaagccgcggaacccccagcgtccgtccatggcgtggagccttgggagctggctgggtggctgcctgctggtgtcagcattgggaatggtaccacctcccgaaaatgtcagaatgaattctgttaatttcaagaacattctacagtgggagtcacctgcttttgccaaagggaacctgactttcacagctcagtacctaagttataggatattccaagataaatgcatgaatactaccttgacggaatgtgatttctcaagtctttccaagtatggtgaccacaccttgagagtcagggctgaatttgcagatgagcattcagactgggtaaacatcaccttctgtcctgtggactgacaccattattggaccccctggaatgcaagtagaagtacttgctgattctttacatatgcgtttcttagcccctaaaattgagaatgaatacgaaacttggactatgaagaatgtgtataactcatggacttataatgtgcaatactggaaaaacggtactgatgaaaagtttcaaattactccccagtatgactttgaggtcctcagaaacctggagccatggacaacttattgtgttcaagttcgagggtttcttcctgatcggaacaaagctggggaatggagtgagcctgtctgtgagcaaacaacccatgacgaaacggtcccctcctggatggtggccgtcatcctcatggcctcggtcttcatggtctgcctggcactcctcggctgcttctccttgctgtggtgcgtttacaagaagacaaagtacgccttctcccctaggaattctcttccacagcacctgaaagagtttttgggccatcctcatcataacacacttctgtttttctcctttccattgtcggatgagaatgatgtttttgacaagctaagtgtcattgcagaagactctgagagcggcaagcagaatcctgggtgacagctgcagcctcgggaccccgcctgggcaggggccccaaagctaggccctgagaaggaaacacactcggctgggcacagtgacgtactccatctcacatctgcctcagtgagggatcagggcagcaaacgagggccaagaccatctgagccagccccacatctagaactcccagaccctggacttagccaccagagagctacattttaaaggctgtcttggcaaaaatactccatttgggaactcactgccttataaaggctttcatgatgttttcagaagttggccactgagagtgtaattttcagccttttatatcactaaaataagatcatgttttaattgtgagaaacagnnnnnnnnnnnnnnnnnnnnnnnnnnnnnnnnnnnnnnnnnnnnnnnnnnnnnnnnnnnnnnnnnnnnnnnnnnnnnnnnnnnnnnnnnnnnnnnnnnnnnnnnnnnnnnnnnnnnnnnnnnnnnnnnnnnnnnnnnnnnnnnnnnnnnnnnnnnnnnnnnnnnnnnnnnnnnnnnnnnnnnnnnnnnnnnnnnnnnnnnnnnnnnnnnnnnnnnnnnnnnnnnnnnnnnnnnnnnnnnnnnnnnnnnnnnnnnnnnnnnnnnnnnnnnnnnnnnnnnnnnnnnnnnnnnnnnnnnnnnnnnnnnnnnnnnnnnncagaaatacttaaaatgaggaataagaatggagatgttacatctggtagatgtaacattctaccagattatggatggactgatctgaaaatcgacctcaactcaagggtggtcagctcaatgctacacagagcacggacttttggattctttgcagtactttgaatttatttttctacctatatatgttttatatgctgctggtgctccattaaagttttactctgtgttgcactataaa

SEQ ID NO: 49509 - DNA, 904 bp, Homo sapiens
  misc_feature (1)...(904): n = a,t,c or g
attgaatgtccttagaaccaccttcccctacttcatctgttgacacagcttttatactcacctgtggaagagtcgagctactcacccgctattagagtatggaggaaggggttttcattgcattgcatttctgaaacattcctaagaccctttagttgaccttcaaatattcaagctattctgcagctccaagatgcaattatagaaacagctccttttttattttatggtcctctatatgccaggtgcttcacctgttaatttcactttaatcctcataccatatttgcaaaggatgtgttattatctatgtgtgacaaatgaggaaactgaggctcaggggataaagggacttgcccaagtcccacagctggtgtgtgactgcagagactgtgctcttcccagtgtgctgcaatacttctcaaccctcctctaacctgctgtgtcacccgctttccctcccagcccccacatccttaccattttccctccctgggaattcctgcttctgcgaaaatgggtatcctctagctcacactttcctaatggccccatctcctgcagaagccaggtgagcccagcactgggactgaagttcttgcagacaccccacctgtgcccctatcatcaggggaactgctccacctgagaggaccaactctttaatttttagtaaaacctggaggtgatnnnnnnnnnnnnnnnnnnnnnnnnnnnnnnnnnnnnnnnnnnnnnnnnnnnnnnnnnnnnnnnnnnnnnnnnnnnnnnnnnnnnnnnnnnnnnnnnnnnnnnnnnnnnnnnnnnnnnnnnnnnnnnnnnnnnnnnnnnnnnnnnnnnnnnnnnnnnnnnnnnnnnnnnnnnnnnnnnnnnnnnnnnnnnnnnnnnnnnnnnnnnnnnnntcgac

SEQ ID NO: 49510 - DNA, 861 bp, Homo sapiens
  misc_feature (1)...(861): n = a,t,c or g
ttttccagaagatgacagataattgatggtctccccttttcctcagcaacatagttgtacccagagggaatttatctttagaaagatatagtttgtgaggaaagaggaggatggataagtggataaaatgtaatgcagttttaggggtggatttttaagtagcccaaggggtaggaaacctgcacagaaagaagctgcgttgtgaaaatgttgaggaggaaagtgctgcatcgctacgtgatgtggaagagactgcagtgtctgggcattgttgggaatcccgggtattttaaccatgaaacatctgacaacaaattatgtgtctagatatgtttatgtgtgaatgttcatgtatcagggattcagtttcacagttttaacttcaattttcttgtttaccccacaaatgacaaaattgcgtcattccttctctttgcccctttccaacaccaccccacaattttttaaacaatcaaaagaaaaattaaaaccagcaaaccttaaattcttgtttgttatttggatggtgaaatactgcaggtagacactgaattggacattgatttccttttctctgcgtcgaaatgtcaaggaaagttgcaagtctgtgattttgtgtttggttttttgcatgttgcttctatggaaaaaccaaaaccaccacagcagacctccctggcccaaagtgttaaaatgcctccttcataacctgagacttactttccattttctaggtgctgggagaatctgtgtaaaaggcaccattgtggaaggcaggtgagggtcctggcatgtttaatggggttttaatgggagagtaaggtgttcaatnctgtggcagggggggcaccaggtaggagg

SEQ ID NO: 49511 - DNA, 1998 bp, Homo sapiens
tcgtttttttttttttttttttgaaatgtaaattgtttttaatatatttaagagcacacagaagtcttgatttataaaaaaataaatatataacatgacaaatttactgatgatcctggagctctgaggtcaaactctttaaatgatcagtgaaaacataaaacatccatgatctgttaacacacacaggagcatattccagttgtaaaaaacaaattccttgaaggctcagaacgaacaaaaatcagtctttatggcagaaagcacatccaaagctaggcaatgaagttcagcctgggccacgtgaacctttcaccagccagcctataacctatggagccaggacaggaaagcatgatccttcagctcatgacgccacccaggcttccagacaactgcagaatgaaagagtccctcagaggctccccagcccctgctgccatcataaagcacgggagggattgttttgtccttagcggctctgtcctaaatttgagagcaggagactgagaaggttatgctcattaaatattgtcattgtaacacggaatggaaatcatgatccttgcccatgggcactgagctgaaagaaagaggaacctcacatgaggctttcctagagaccaggatgttgggtgagtgggcgtgcacttctcaagtgggcaaggaagaactgcttttctccagctgacatgctctcaggggtgaagaagtttagcttaaaatacctgatggcgctgcataaactggggatttgggaactgagtttttagctctgtgacacacaacataaaaaacaaaaatccagtctcattagctaaattcggattaaaatctgaaatgtttttatggagttgccaacaggctggaatgtacctgatacagtttaatctgcttttatttctttggctgtcttccaaaccactttcttcctgtaattcttaagttggctagttctccttcctcagaaaaattacccctaagaatcttcctaatagtgagggtgtacttccgaatagaagagtccttcggctgaaatggcatctccaaggcctacagttcgaatggggtctttacacaccaatactggtgtgaagtggaaggatattccctctctgtgccattctactactggcttgtttgggtttaatacaatcctggagcctgcctccgaatgggaagtcatgaactcttggggtgccctcagagacactcggctggtgtctatggtttctgtggcgcaggcctgtgtcccagccacacgagctcctgcagccacggctgccagctggttggcccagtgtccatccacagttgccaggatgtggtagaccagcgtgtggaaatggatcctggtgagatccgaggctctgcttttactcctcccatgttctttcaagatccagaagaggatgtcactgaccatgcccacatcaggaacaccgttccaggaagagagagaagagtgaggtccagaggctgactgggtgagaaataacagctcctgttcattcagcccaagggaagtcaccgcgggaaagacctgctgaaggaacaatgctgctcaatgagctcccctgttagtcatactggcccagctctaggtgaaactggaataccagtggggatgtcaagaaatggaggttacaacctccaagagtctcttcctctggagctccttgctttgtccctccatcatgtgcaatccagagaggaccacccaggtctggctgaaactcctcccaggctagacacaaacacctccagcatattcatggccccgttggagaggtcgtgagagaagatgaatcggttggcatggggagcttttaactggccccactcctcccctgcttgatactctaaaatgaggtggaactcatccacttcctgcaatgactctggtggaacaaagacattgtcatcaagaagctcatgtagctttggaccaactggaccgcaaagaagaacctttaaatctgagttggctgcaaattt

SEQ ID NO: 49512 - DNA, 593 bp, Homo sapiens
ggagagagtcgcgacgagaactcaatttcctgtatctactgagtctcaaaaaccccggcagaaaaaagctccagagtttcctattttggagaagcagaactggttgattcatcttcattatatccggaaagattatgaagcctgcaaggctgttatcaaagaacagcttcaagagactcagggattgtgtgaatatgctatctatgtccaagcattgatatttcgcctagaaggaaatatccaagaatccctagaactcttccagacatgtgcagttcttagtcctcagagtgctgataacctcaagcaggtggccagatctttatttcttttgggaaaacataaagctgccattgaagtatataatgaagcagctaaactcaaccagaaagattgggagatcagcctaacctaggagtttgctacatatacctgaagcagttcaacaaggcacaagaaccagttggcacaatgccctgaattcttaatagggcacgatctgacttatataatgctggggaagatccacttgctggagggagacttggacaagggccattgaagtctacaagaaagcagtggagttctcacca

SEQ ID NO: 49513 - DNA, 627 bp, Homo sapiens
  misc_feature (1)...(627): n = a,t,c or g
gggagcccaaaagttatttggcatgatcattactatcggccagtctatcgtgtatgtgatgaccgggatgtatggggacccttctgaaatgggtgctggaatttgcctgctaatcaccattcagctctttgttgctggcttaattgtcctacttttggatgaactcctgcaaaaaggatatggccttggctctggtatttctctcttcattgcaactaacatctgtgagaccattgtctggaaggcctttagtcccactactgtcaacactggccgaggtactgagtttgagggtgcagtcatagctctgttccatttgttggccaccaggacggacaaagtccgagctttacgggaggctttttatcggcagaacttacccaatctcatgaacctcattgctacagtttttgtgtttgctgttgttatatatttccaaggatttcgcgttgatctgcccattaagtcggcccgttaccgaggacagtacagcagctaccccatcaaactcttctacanctccaacatccccatcatcctccagtcggccctggtgtccaacctgtatgttatttcccagatgctgtctgttcgatttagtggcaactttttagtaaatttactagg

SEQ ID NO: 49514 - DNA, 771 bp, Homo sapiens
cggacgcgtggaaaaacttggagtgtgatgccacctatgtccacacatagacatggccttggtgtggctgtactggaaggtcccatgtatgccgtaggaggacatgatggctggagctatctgaacacagtggaaagatgggaccctcaggctcgccagtggaattacgtagccagtatgtcaactcctagaagcacagttggtgttgttgcattaaacaacaaattatatgctattggtggacgtgatggaagttcctgcctcaaatcaatggaatactttgacccacacactaacaagtggagtttgtgtgctccaatgtccaaaagacgtggaggtgtgggagttgccacatacaatggattcttatatgctataggggggcacgatgctcccgcatccaacttgacttccagactctcagactgtgtggaaagatatgatcccaaaacagacatgtggactgcagtagcatccatgagcatcagcagagatgcagtgggggtctgtttacttggtgataagttatatgctgttggggggtatgatggacaggcataccttaatactgtggaggcttatgatccccagacaaatgagtggacccaggtattttcacatacttttgaggacagcaaagatcacctggtggccatcaagcagaccatctggaggcaaaactccttatctgaggaattcagaagtcattagactgccctattatctaaagccggcatcttgtactaggcttctttaccaaaaatgtattta

SEQ ID NO: 49515 - DNA, 3833 bp, Homo sapiens
tgcggctccgctcatcgtcgcaacgagatctttcgagatcttctccgcccccgctaccggcgcctcctctgcggccactgagccggagccggcatgagcagcgctctcggttgcagtacccactggaaggacttaggcgctcgcgtggacaccgcaagcccctcagtagcctcggcccaagaggctgctttccactcgctagccccgccgggggtccgtgtcctgtctcggttggccggacccgggcccgagcccgagcagtagccggcgccatgtcggtggtgggcatagacctgggcttccagagctgctacgtcgctgtggcccgcgccggcggcatcgagactatcgctaatgagtatagcgaccgctgcacgccgggcttgcatttcttttggtcctaagaatcgttcaattggagcagcagctaaaagccaggtaatttctaatgcaaagaacacagtccaaggatttaaaagattccatggccgagcattctctgatccatttgtggaggcagaaaaatctaaccttgcatatgatattgtgcagttgcctacaggattaacaggtataaaggtgacatatatggaggaagagcgaaattttaccactgagcaagtgactgccatgcttttgtccaaactgaaggagacagccgaaagtgttcttaagaagcctgtagttgactgtgttgtttcggttccttgtttctatactgatgcagaaagacgatcagtgatggatgcaacacagattgctggtcttaattgcttgcgattaatgaatgaaaccactgcagttgctcttgcatatggaatctataagcaggatcttcctgccttagaagagaaaccaagaaatgtagtttttgtagacatgggccactctgcttatcaagtttctgtatgtgcatttaatagaggaaaactgaaagttctggccactgcatttgacacgacattgggaggtagaaaatttgatgaagtgttagtaaatcacttctgtgaagaatttgggaagaaatacaagctagacattaagtccaaaatccgtgcattattacgactctctcaggagtgtgagaaactcaagaaattgatgagtgcaaatgcttcagatctccctttgagcattgaatgttttatgaatgatgttgatgtatctggaactatgaatagaggcaaatttctggagatgtgcaatgatctcttagctagagtggagccaccacttcgtagtgttttggaacaaaccaagttaaagaaagaagatatttatgcagtggagatagttggtggtgctacaccgaatccctgcggtaaaagagaagatcagcaaatttttcggtaaagaacttagtacaacattaaatgctgatgaagctgtcactcgaggctgtgcattgcagtgtgccatcttatcgcctgctttcaaagtcagagaattttctatcactgatgtagtaccatatccaatatctctgagatggaattctccagctgaagaagggtcaagtgactgtgaagtcttttccaaaaatcatgctgctcctttctctaaagttcttacattttatagaaaggaacctttcactcttgaggcctactacagctctcctcaggatttgccctatccagatcctgctatagctcagttttcagttcagaaagtcactcctcagtctgatggctccagttcaaaagtgaaagtcaaagttcgagtaaatgtccatggcattttcagtgtgtccagtgcatctttagtggaggttcacaagtctgaggaaaatgaggagccaatggaaacagatcagaatgcaaaggaggaagagaagatgcaagtggaccaggaggaaccacatgttgaagagcaacagcagcagacaccagcagaaaataaggcagagtctgaagaaatggagacctctcaagctggatccaaggataaaaagatggaccaaccaccccaagccaagaaggcaaaagtgaagaccagtactgtggacctgccaatcgagaatcagctattatggcagatagacagagagatgctcaacttgtacattgaaaatgagggtaagatgatcatgcaggataaactggagaaggagcggaatgatgctaagaacgcagtggaggaatatgtgtatgaaatgagagacaagcttagtggtgaatatgagaagtttgtgagtgaagatgatcgtaacagttttactttgaaactggaagatactgaaaattggttgtatgaggatggagaagaccagccaaagcaagtttatgttgataagttggctgaattaaaaaatctaggtcaacctattaagatacgtttccaggaatctgaagaacgaccaaaattatttgaagaactagggaaacagatccaacagtatatgaaaataatcagctctttcaaaaacaaggaggaccagtatgatcatttggatgctgctgacatgacaaaggtagaaaaaagcacaaatgaagcaatggagtggatgaataacaagctaaatctgcagaacaagcagagtttgaccatggatccagttgtcaagtcaaaagagattgaagctaaaattaaggagctgacaagtacttgtagccctataatttcaaagcccaaacccaaagtggaacctccaaaagaggaacaaaaaaatgcagagcagaatggaccagtggatggacaaggagacaacccaggcccccaggctgctgagcagggtacagacacagctgtgccttcggattcagacaagaagcttcctgaaatggacattgattgattccaacacttgtttctattaaaacagactattataaagctttaagttgtcaactttgttctaaatatcaactagcgcaagtgaatactgaagatttcttagtcagtttttaggggattttcggggaggggaaataggtaatgtatggagcattttgacttctaaatagttagatacagaaattaagtgcattgtatctttttcataatggtactatttagaagcccagttagtcttactgagcttatgcttcactcctttatgtttaaccatgtgtctacaagaataagtttgttttgggaaagttgagctatagctacagctctagctatccagcagacttttcattatgacttacatgggcaggagctctaattatgctttaaaaatctgttgtgggagattgctttaaatgctccctgcctggtgtggggatgggggtccccctctttgtgagggctggagcatggcacggcatggattaacacggcagaggaacaaaggtgtgctctgagcttcttcatatttcaccttcaccctcacctgtgttctcttccctctctcccaataaaagggctcccattataaatgccatgtacttctcttgggaaaatagacccccttgcctagagtaagttgttaactgagggctttaaacctggaggctcttcctgaaagtatgttcatgaataccccaagcatcaaggtctaaataattttcagaagattagaattgggtagatatactgttggatatagccatggtaaatttaactgaggaattaaatccttgttaattttggtgtaaagatttgtatcctggcctgtttattcaggtgggagatgttctgtataattttgaggtatagcttgaactcctagaacaagagttaaaagttctttttagctcattcacaatcacttgtgtgttaagtgttaatatctgtcatgaacctgccaatttgtaccgtgttaagcagctgacagatgatgcaaaaaaaactaagatacactggattgtactggatgagtctga

SEQ ID NO: 49516 - DNA, 544 bp, Homo sapiens
catcctggagggagaagagcccatcgacattgacaagatcaacaaggagcgctccatggccaccgaggatgaggaggaacaggcggtgttggacaggcttacctttgactaccaccagaagctgcagggcaagccacagagccatgagctgaaagtccatgagatgctgaagaaggggtgggatgctgaaggttctcccttccgaggccagcgattcgaccctgccatgttcaacatctccccgggggctgtgcagttttaatgaccagaaggaaaggaaaccctcgccggtggggaggcagagccttatcctcggctgcccttcttggctccctgcattccagggacttgctcgtcttgtttacccctagccatcctttctttcaagggtgaaccaggccttccaccctgaccttgcatctccagactgttccagagaaggtgcggggccagctgctatgtggtggccgctgtggctgacactgagtgaaggtgtttgaaatgcaggagaggatatcccagcaaattgggatcacatgctttt

SEQ ID NO: 49517 - DNA, 716 bp, Homo sapiens; identical to SEQ ID NO: 11466

SEQ ID NO: 49518 - DNA, 345 bp, Homo sapiens
  misc_feature (1)...(345): n = a,t,c or g
ggaggctgcaggtggtatggccccgcagaacgagaggcctgccctccagaagaggtctcccccatcagcgggtttccctgtgggctgagggctgttctcttagtgtgtttgattgcactctggggtttccatcctggaataatatcagaactccagtaaaggtcgtgcctcacagttcctttacaaataggacagatgcccagccactcagaaggctgaagcgggaggatggctttgagcccagggagttccaagaccagccttgagcaacatagttgaagaccttgtcctacagaacaaatcaataatttaaaaattaaacattaaaaaacaaattanccaggc

SEQ ID NO: 49519 - DNA, 346 bp, Homo sapiens
ggctctacagagtggctggcagaatggtcctaagaaggccctgtccctcttctttacctttttaggactgacattcttttttagttacttctcacctcttctaggatctttgaggtagatgagaaggaaggcttcctcctcctgtcctaatcaggcatggcctcaaccctgtccctgtgtagcattccagatagcttaaagctgggtgcacctttgaaatgtcattttgtctttacacctttaggtatttattaaaactcaccatcagttccctgtgctatcttttctctaaaatagctaaggaaaaagtaagtaaggcagtggcataaaccagagttgcactgtt

SEQ ID NO: 49520 - DNA, 365 bp, Homo sapiens; identical to SEQ ID NO: 11474

SEQ ID NO: 49521 - DNA, 3063 bp, Homo sapiens
gagattgacgcggcagtgcacacctgctggtacgtgcaaaagtacccgacagagcagtttccagtttcggtggcttcgtaggcttttagcttctgaaatccgctaaaaggccgggttcattcatcttcaagtacctagcctgactggtagggctgctcagcattccgaaacatttcgacctggggaggggggcggcggtgaaagaatactttctgtagagagtgcccctcgcgtcgcccctgctttgaaggctttatgtattaacggaatgccgaacatttgtgtcctacttgctgacagcgcacaggatccttctaacagtatttctcaagtacttaacaaaaagatgaaaacttgaagtccaagccgtgctgctggattccgtcttcacagtttaaagactgtccagaaactttaagctttcaaaactgtacattttaaaatcctgtgcgtttatcttcattttgctgggggagaaagccaaagtactggactgcctggttcagggctgaacgcctagtacacctgctaacttggagcttcagagccatggcaaccaaggagtcaagagacgccaaagcacagttggccctctcctcatcggccaatcagagcaaggaagtgcctgaaaacccaaactatgctctaaagttcacccttgtgggacacacggaagcagtgtcatcagttaagtttagtcctaatggagagtggctggcaagttcatctgctgataaacttattaaaatttggggcgcgtatgatgggaaatttgagaaaaccatatctggtcacaagctgggaatatccgatgtagcctggtcatcagattctaaccttcttgtttctgcctcagatgacaaaaccttgaagatatgggacgtgagctcgggcaagtgtctgaaaaccctgaagggacacagtaattatgtcttttgctgcaacttcaatccccagtccaaccttattgtctcaggatcctttgacgaaagcgtgagggatatggggatgtgaaaacaggggaagtgcctcaagactttgccagctcactcggatccagtctcgggccgtttcatttttaatcgtgatggatccttgatagtttcaagtaggctatggatgggtcttctgttcggcatctgggggacaccgcctcagggccagtgtttaaaaacgctcgttgatgacgacaaccctcctgtctcttttgtaaaattttctccaaatggtaaatacattctcactgcacgctggacaacactctgaagctctgggactacagcaaggggaagtgcctgaagacgtacactggccacaagaatgagaaatactgcatatttgccaatttctctgttactggtgggaagtggattgtgtctggctcagaggataaccttgtttacatctggaaccttcagacgaaagagattgtacagaaactacaaggccacacagatgtcgtgatctcaacagcttgtcacccaacagaaaacatcatcgcctctgctgcgctagaaaatgacaaaacaattaaactgtggaagagtgactgctaagtccctttgctcctgcccgcgagagactgtcgggaagttgacccggattggcaagaaacagggtgtcttggaggtggtcccccagatctgcgcctgggggtcaggacagggcctgatttgagcctcctctctgaagatgatttggccgagcggaaggtgtggaccaccggaaagttcttaaaagttgctggtgacatttcttgccaattctaacactgtctagggaagagttcctagtctattgtgttcaaacagagtcaacaaaagtttttaattttttattacagaagggtgaagttcaatttaacatgcgttgtgttttttcagtaaacgttctgtatctttttgatattccatgacccagtgcacgctgtggcctgtcaccgccaccgtggccccgccagctggcctcccctttggcccacgccggccgcccccattctctgctgcgtagatgccctggcccagggccctgactcctccattcccgccagtagctgttcctagtgtattttcgtctttctggaaaacagcattgagtggttgttttctgtgtaaagagccgtttgtgtcttgggagtttgtggcccacatgccgatagcacggtcatcgcacatgactctcccgtttgtctcagtgtccctgcaacaagcagcaccgcagactgtaataaaaggtggggttttgtgaatggttgtggcaagtgcgtccttgtgaagctcgtctccatgtggctttcttggagaaaggctcccctggggcaagagggtggaaggtttctttggacaggaggtgctgaggctggctgcacctgctctctgaagacgccttcctctctaggttcattgttcagtgttgctgggggcggggcacgggggtggggaggttcttagttgcgaacgagccaagctcctgatggacttgcgttgggatgtgggggacacctgtggcatggtaaggcctccctgagtcccttactccaggtcagatgccagtgggactcatgcgccctatgagggtgcagggccagtgctgcccctcggactcctcgaggggttgggtgctaagcgcgaccttcgccgtccctgctggagccctcgcctgcctgcccctctgcctgtgctcctgggcagtgtggcttcccggtgctcacctgcacagcagtttaacagcagaggccgagcgggacctcgtgggggagcgaggcttgaaacctggaaccttgcccatgggagacagtttgttggttgagggtttgccacaacacagtgaggggcggaaaggggtggctgagggcacaggtgcgatgggtctgtcccacggggcagggctttggggctgtgatgctctgggaagccagcttgggtcctgggtctacagagggccctggcgcggagcccagccagctctgcctctctcagggcctggagtcctgggggagctcagccagctctgcctttctcagggcctggagtcctggatgaatcctgcagggtttttggttgc

SEQ ID NO: 49522 - DNA, 333 bp, Homo sapiens; identical to SEQ ID NO: 11493

SEQ ID NO: 49523 - DNA, 735 bp, Homo sapiens
tctcagatcctgacggtgcagcagcccgcagcctcagccagggagtcccagccgctttcaatggaggagaagcccggccagccacagcctcagcaccatcacagccaccaccatccgcaccatcaccctcagcagcagcagcagcagccgcaccaccaccaccattattatttctacaaccacagccacaaccaccaccaccaccatcatcaccagcagcctcaccaatacctgcagcatggagccgagggcagccccaaggcccagccaaagccgctgaaacatgagcagaaacacaccctccagcagcaccaggaaacgccgaagaagaaaacaggctatggtgaactaaacggtaatgctggagaaagagaaatatctttaaagaacctgagttctgatgaagccaccaaccctatttccagggtcctcaatggcaaccagcaagttgtagacactagcctgaagcagactgtaaaggccaacacctttgggaaagcaggaattaaaaccaagaatttcattcagaaaaacagtatggacaaaaagaatgggaagtcttatgaaaataaatctggagagaatcagtctgtagataagtctgatactataccaattccaaatggtgtggtaacaaataattctggttatattactaatggttatatgggtaaaggagcagataatgatggtagtggatctgagagcggatatacaactcctgaattgtaattc

SEQ ID NO: 49524 - DNA, 2678 bp, Homo sapiens
ttttttttttttttttcaactccctccaagttgtttatttaataataataaaaaagaaatgcacacacataaacctgaactcccccccaccccaccctcccttactcccagtaactagctccaaaatgaaaaaacttcccttgtcccacctggggactaaattcccacctccactgccataacactagagaaacaaaataaaaaatatgcagcagctcaccacccaccccacaactgaacctcacacaatcccctcaaacaaagaagccaggactgggggttcacaggaatgagaggagccctatattctgaaaagggatgagaagagaggtgaacacccccacctcaaataagtgcttaacccccacacctgctctttcctttaccaattgccccaagcctggggatcagggaaatttgaaacagtcccacctggccacctggtaccccctccccccgttctaagtcagtgtgaatggcagaggtcagggatgattgaggtagaggggctggtgggaggcctggtgggcctggctggctgccagagactggcaaggggccacctgtggcattgcctggggttggggatggctgttttcggagcgaggggggcactgtggaggtcttgatgtgaatcaccctggtgtccatgacctcacactcgatctgcatcatctcctcatagtcccccggggccccacggcctgacagggtctcattgggggccatggcaggcatcaccagggacatcttgggccgggaggtcttgttgtggctgatggctgggagcagcaggtggtcccttcggaaagagacaacataaaatgtgtcttcccgtcggtcaattgcatccaagaatgctggctgcgaacggtctgggtggcgatatagttgcagctggcccacagaatccctttctgggggtccagggggttggatggggacttgccttaacttggaggtgacttcttccgtggctgagacttctggaaggagaagtatctaaggactgtctctcctgggccctctgagggatcttcctccggcctctctggtggcgctggacccagccactcaactcgtcagcaagcctcagggactcagtgcggttgaagtgccggcaatcagaggagaggaagagctggtctaggtctcttagtagtagctccttggcgcccccagggaaggctgtcaggttgctgaaactgggctggtctgtggggctgggctggggctccttagggccctgggaggacccctggagaggttcaactccctgaactggctcttgctctgagaaccccagcaagtgtctccggggttgaggctcccccttgttcatccgaggagagatgggagctgaaggaggctcactgatgctgacaggtccaaagttgaaggcaatgaagagaaggaagaccatgatgcagaccaccttcctgtttccagaccctaacttgagctcgctgttttcagccagcagggcctccagccgccgccggagggcagcattctctcggcggagctgctggttgtcagccagtactgcttgcagccgagcctccagtccctgcagatactctttcttctttctccgggactggcaggctgactcccggttcttgatcattcgctgctgccgcttcagcagctttgcatccacttcaggcgggcaggagtttccaggcataggagcgggaacgatgctcttcctctcaggccgtggtagagagggagccggcccttcaggctggactcgaatagcaccctggatgaggacaactggggacactgggggtggctggacgagggactgcagaaggactgtggtgctgggaggcacagctctggatggcattgggacagtggttagcactacaggtttgggctgcagtggcggcttccgggtgggcagggctttgcctgaggagccatcaagggatgggcccatgctgatctggacagctccaagtgagggggctgggacatcccacaggaggcatcctgaaggggacagggactctgtcttcacttccaggacctcctctcctataaaagcctggctggaggagtcggctgagagcagggaggcctcagagttgaccggaagaacatggagagacaggttctatcttggtctggacatctgaggaatcatcagaggttgggggattaacattgatctgggacggttttcaaattgaggattgtttgggtcatctcccaggagacacagtgggggtgccaaggactctgtcttcacatggagcacctcccctaccccaagagcctcgctggatggctctgtggagagacgcgatgactcggagctgagggaggaggaagagcagggggaagatggctcagacttcacctgaagatctgggaagatcggcaggagttcccatgggggctcagaggggctgacatccatccccacgtccagggagctgccgtcaaacgggacatcctgctccgggcaacggaagagctgcgtctgctcctcggccacttcatctaggccagaatacaaggtgctgttctgcagaccccagtcctccgggctaagcaggttgtcggtgaagaaacgcgtcgggtcagcaatctcgctgagcagcatcagctccgccatctttcccccccaccccccaaccaggagacggttcccaaggcccgcc

SEQ ID NO: 49525 - DNA, 694 bp, Homo sapiens
atccatactggagagaaaccgtacagatgaaatgtgtgtggtaagatctttagtaataattcacaccttgcacagcatgagagaattcattcatgagagagttcttacaaactgagtatggcaaactcttcatgctaagttctagcattaatcaacatcagagattccatactaaagagaaatcatagcaatgtatgtgaatcaggtctcttgaggcctgccaaatgactagatatcaaaacatacatcttggatgaaaccatacagatggattatgtatgctgaggctattattcaaggaccattactatggaacatgataagatttacacaagcgataattcagtctctagttctccaatatttatgatactgcatgctgcagaaaagtcacagctccaaatacgttgaatctcatgacgcgatgcatgtcgaaggtccaagggcatgtggaaatggtcagttatattcaggcaattaaaaaacctaattatatggggttttttgaaaaggctactttacattttatgactttcatcctcaactctgaaatcacttcatgtgacttctttacagacctttcactgtggtctcttgaatcagtaggatgctgggcgcggtggctccccgcctgtaatctcaagtacttttgggaggctgagccggcggattcacgaggttaggagatcaagac

SEQ ID NO: 49526 - DNA, 511 bp, Homo sapiens
gagcagtgacttcaagggcctgttgaagccaccaattctggggcaaacaatccttacccagtggatgatgttccctctgaaaattgataaccttgtgaagtggtggtttcccctccagttgccaaaatggccatatcctcaagctccttctggccccacattctactccaaaacatttccaattttaggctcagttggggacacatttctatatctacctggatggaccaagggccaagtctggatcaatgggtttaacttgggccggtactggacaaagcaggggccacaacagaccctctacgtgccaagattcctgctgtttcctaggggagccctcaacaaaattacattgctggaactagaagatgtacctctccagccccaagtccaatttttggataagcctatcctcaatagcactagtactttgcacaggacacatatcaattccctttcagctgatacactgagtgcctctgaaccaatggagttaagtgggcactgaaag

SEQ ID NO: 49527 - DNA, 2801 bp, Homo sapiens
ttttttttttttttcaatagccaaaatagttatttattaataatttaaggttttacattcttataataaattccagctctaaactttacaccacgaacataatggagaatttaactctcccttcttcacaatcaaatgcatttctcttatcaaatgggtacccatgctcacacacacacacttccagttttatacaaatttttttaaaggaaagaaaccaacccaaagtattgcatttgaggtgacactccctgaagaattttatacagaggtaatatactgtttagcacagctgaaggtttttttattctttctttttttaaagtgagcccatgatttggtgtctttcccagattatcccctttgcgacaacacaagcaaaaatatttacaaaggtaaggcatagtcaaactacataaagagaaaaaatcatgaggaaaatacatgaaaaagactaaagacttcgccataacaaggtcttagtgataatagtgtccgtaaagatgtcatcagaattggtaaagtcaagcatgctgcaaatataccctttggattagaaaagagcacaattttctttttttgttttgttctgttttaagaagtggcatactgctctttctccctttggataatttcttttaagcccatcaaaggaaaaaacaaacacaattcaaacaaacactgtcaagtgattcaagatcaaatatttacaataatcaaatggagtatcagatttttttttccaaactgataccacaaatacagagctgaaatctctctttggctcctctatatgcaaaattgaattagtcttcattgaagacaattatatagtcagttccagatgcaaaaggaaacagccttacaaggccctaaagaacacatgctccctacccctatcatttggttctaccctatgcgcctggaagtcctcgaatcccagtccctgcatgggtaggctgtacacatgggtacagagcaaacctactgcctgtatctatacagcatgtcctgttattccaaagagaatggagcaaatctctctgttagtattaaccaattccgcacttggtaaccttgtctagtacagacagctggtgtcattttgacacctggggccacacacaaagaaagcagccccagctgatgctgccaagagaaactgctgaagggccagacacattccagcaaggaggggtgtggggtctttcacgtagattgcagagagtccacctggtaaaacattcctggttggaaaggggtggtaaaaatacagcctgctgtgcctggaaccctgttgtccacatgggcctgctgagtccccagcgtccctctcgaagtcccagcagctgaccccatgaagttgaagttaggggatatgttggattttttcattttgacaatgtcataggcatcgttcatcgacagattgagcttctgcataaggtaagccacagtcacagtgactgagcggctaatgccagccaagcaatgtaccaagacaccacagttcttgccccgggcttcatctatgaaagaaatggcctcagggaaaaactgggacaggttttggctccagtgatccgagatggggatttgcttgtatttaaactctcctgcgttctcaaagagattcggcaaattgggggtgacgttcaagatgtacttgatgccgaattcctccaacacgtccaagttggtggagtctttgggcacagcccaagtagaggaagggcaagatctccactgggaaggaaggctggctgttggacagcggactaccatccgagtctgttgcactattggggtctcggtcaaggtcagactcgatgtccgaggaagagtcagagctgatccgcaggcccccgagccccagcactggcaacggcggcgagctgctgctacacgagccgtctagattggtctcgcaatgcagggagaactcggcttggaacttactgaagccaccttccaggtagaacgcccggcagccctcgtccttgagcttcttgagcagcagcccgagcaccgactcgccgcccgtattctcgttccagtcgctgctgctctcgtcgtagagcaccactgtgtcggtgccacagcgccgggtgaagcggtcccggtcctcgccgcgcgtgaagagcgcgcgcaccggcaggttacccttctgcaggcgccgcagcatgatgcccgggatggccacgttgatggccgactcgatgtgcgacgactcgtatagctcctgcggccggcagtccatcagcagcagccgctcgttgcccagctccagctgctcgttgagccacgccaccgtcttgctgatcgccatttccgacgcgaagggcacgggtctgagcgtatctatcatgggggtcgagctgcgggagagggcggggtgcctaccagacgcccctcggggcaggcataggcccgaagcaccgcgcgcgaacgtgccgctctcggagcggggtttaattccgcctcgccttacccaagccgaggctagcggttggggcagacgagacagaagtaaagccggaggttctctctgcacccagctgcagccgctggctcttagtgtcaatgaatctctctcaatgaagctgcccagatagtttttgttcctccccagtgaatgaaatccaattaattcggactccgtgctactgagaggggaggaaaaaaagtctagcggcttctaatccctccctccaaggctgcacctcaaatctacccgggcgtctttctccccggattatttaagactcgatttgctatctcttggactcagcctcgcacac

SEQ ID NO: 49528 - DNA, 2160 bp, Homo sapiens
gtaccacatggaagtgccatgtttcagggatgagtctcgatcttctctccctggatttcatccatgcctgtaagaagttctcacgtcttctccacatgccacgtcatctgaaccgccaggcgataggttattcgtattttattccaaagtccataggacacgatgtggacttgtttttccacgtgcccttgtagatggtgccatccagtgtctgtgatgttccacctcctctgttgggttgtcacctcccccagagaccttctggtctcactgcttttctgtttgtatccagcaaaacactcaacaattctgtataagaacacctatctcattattcaaaaaaaatgcatgtataaacaaaaagaaatatttcaaatatttactttacaattgttttattcaaaggaaattaaatacaaatgtatatttttcattaaaaatggggatttaaaaatagttttataattagtgttatgttgctttatcttatctttgcataaattatgtattattaaaggtttctgatatccatatacattctagtcttttttaggcagctatgagaagatttcatattcaaaagccaatgccacttttctaaagaaacgatctttgtgccaaattagtagacaattgctccaaatctctggtcttgacttccggttgtgtgaagagcagtgttttgtttttttcagagaagggaaagagccttcattctttaggtttgtttttgcctcaaagacatttctatatgggtatctaaagttttagtttataagtctcataatgatttgacccatgcagtccaacttttagatagtatttccataccccccaaaagctggcaggtggtagtcgcactagattcagaccaagactctccgcattgtcatcctaggtccttctaatgaagaagacaatactctagtttatttaacaaataaaggagtctaagtacatggaagttaagggagtaagggtgggggtaatgagattattacattaaaataaagacttcacacacgtgtgtcccatgtctaaaattgttgaaaatctgattggagaagattagaagtaattagcaactcaattatttataaacaaatataaaaatgcacaaaccaaatgatgcaaaaaaacctttttaatctaaaaattcatttcccagggctaattgatagccaggccctaccaatttttatcagtttatttgactaacaagagctattcagcattttcttcaaagtaagataatatataatagattttgataaatctttctgaattaggacatgatactgtaggcagttcaaggaaaaaaaaatagccataactttttctttggtgtaaccaaaaggatatccaaaagttagcaaatgttgacatttcaagtgacagggaattgcccaatggaagtttaaactctggttaaaaaaaaaaaaaaaaaaaaaactgttgtaaaaggaaaagctccacccatagttctgtagtgcaagttttcaaatttaattctgaaaaataattttatttcataggcaggaaacaaattccagcagtgtatcacttactcctttccaacccttcccctctctctatgtccacaccatcacttcagttgtcaatgacctcagctgctactcaaggaggaaattcattaaaaaattacccacacttctaaaaatcaggctacaattgtgtgtatgtggctgcacagcgagtgtcaccaggttacagcattgccacttctacgtttgtccatttttacaaaaaagaagcaaagtctacctcccccagaaaaaagtacctgaaccaattagtcacttagcccccttccccagccctctccgtgctcaccagacctgcctcacctcagcagcacacgtgtgccatatatctgtgtgttctgtgcattaagaaccagcaactctactgcctctttcttgaagtaacatcttctcctttcttacaaaactcgctgatttctataaacgtaattctctgaaagcaattaccgcctagaccagaggactccgttactctaccaagcttaagtctggcttgctttcttctatttctgtacatgttgtttgtgtatatgtgtattttttaaaaattaaaaagtgtggaaaatgcacacatacacacccagcatttagcaaa

SEQ ID NO: 49529 - DNA, 337 bp, Homo sapiens
gcatccacagaggtaagctcgactttttaaccatcttttttccccctccctctgagacatccgaattgtgggcgagcagtgtgatttctctgtggctggccgtgccacactcacccccagagcacttatgttaacttggaactgtttagagagaatttttttgctttcttgggtcacatggctcagtagccattagccatagcttgattttgcaaactgggcaagggcctgggcacacctttccttccaccagggcatggtgtttctggaagagtttgaagctagatcctggtatgccaaaaaagaagcttttttttttccttcttttttttttttt

SEQ ID NO: 49530 - DNA, 492 bp, Homo sapiens
tttttttttttttttttttactgccagagatttttatttagttggctagagtgagcttggtaatacacagtttcagtgcacactccaggcaattctgatgcacatggtcatgaagccccactctgagagtcatgtttttggccacctgatttctagtaaacaaggtctggcagggaaatttcccatcttggttattatttatttagagtgtctcaatctctcacaaggcagcggtgtgatggcatgatcacagctcactgcaaccaccggctcccaagctcaagtgatcctcccacctcagcctcctgagtagctaggactacaggtatgcgccaccatgctaggctaatttttgtattttttgtaaagacaggattttgccatgttacccaggctggtttcaaactcctgggctcaagtgatccacctgcctcggcctcgcaaagtgctgggattacaagtgttggcaactgcacccggctccatcttggc

SEQ ID NO: 49531 - DNA, 616 bp, Homo sapiens
ttgaagatgaaggtctactctttattgcccttgtacacaaaggaagggggtgtttggttccaggtagtgagagaggagcaccccttcaaggctggtcgaggaggcatgtcccaaaggaagagttcaaggcggtttccagagaggaaggaacagccagggccttgcctcaacatgggaacggatttgggcctccacttgtaggactccagaaacagaaagggctgtttgacggagctggggacgcccctctgctgcagtggaaatgaggacacagctttggaagaccgtagaggccccgaagtgtccatggtggggggggccctacaggggatctcaccacaggcatggggctgggacttcctgcactgcccagaaacaggccctgggcccttcacaccttcagttacccagagcgcaccccctcccctcgccccagctccacctcagtgtgctgaggggtcctgtgtgcccaggaccacgatctctgccaggacacagtttccctgctcgccagaacaggcctctggtttagatccagtgggactttgtagcgtcttcccacaggccacagcaggctgctcggacctcagaccctttgagaatcacctcgtgccgc

SEQ ID NO: 49532 - DNA, 531 bp, Homo sapiens
  misc_feature (1)...(531): n = a,t,c or g
aggtcgttcggctcgggtaccatcctccgcgccatggacaccagcgacctgttcgccagctgcaggaagggggatgtgggccgagtgcgaccatgaacccgtcctgacccaggctctgacctccttcctgcccaggtacctgctggagcagcgagacgtggaggtactatgcctgcttgtgtgggcacgaggagctggtactctaccttctggccaatggagcccgctgcgaggccaacaccttcgatggtgagcgctgcctctatggggcactgagtgaccccatccgccgggctctacgcgattacaagcaggtcacggcttcctgcaggaggcgggattactatgacgacttcttgcagcggcttctagagcagggcatccacagtgacgtggtctttgtagtacacgggaagccattccgggtgcatcgctgcgtcctgggtgcacgtaatgcctactttgccaacatgctggacaccaaatggaagggcaagagtgtcgngtntnnnangnnccnnnnnnctctgt

SEQ ID NO: 49533 - DNA, 1226 bp, Homo sapiens
tttgctttttaaaatttattttaaaacatgaaacccaagctgaatagaaaccacagaaattacattgacgagatttttagtatttgccaagaaaaaaagcccccaaagaaataaaaatcagcccccaaacccagttctaaaaaaacaaaaaaacacagcgacagtacatacagccatggccctacagaggctggaggagggggaaatgcaaaatggttcaggcctcagttcctgggatgttaaaatcaacactggggtggggggaggtcagatgcccaggccgggggggtaaacccaggaggctgagtcttaaggagattatatatatatatattatatataacaaatatgaagtggttcagtacacaaccattatggttaaacacaaaacaaagatcccacaggagaggccctggtcccccgcctgcccccttgtctggggttctggggtccagggggctgcctcaccacccctctcagggctggggcagagctggccccagggcaggagcaaatgttgcttggaactcgaattgcatagtgagatgggtgggtgggcaatgggccaggggctgctcccaaccaggcccattcactaccaaccttgccatgacatgtggggggccctggggtagtggatgcctgcttggggagcactctcagtgaggtaagcccctgggctcctccctcttgtccccagggccaccctgtcctcccaacgaggctgtgggcctgggggctgcaagaccccctgtgcagggtgagagtgggggctggccatggcagcaggcaccagccagatgccccagtaggtgtggcgaggtcatgggatggagtagttaggaacacggcaccgaaaactcagaacaaaaatacaaccaatggcaggcgctcccctccacctactgaggtggggtttgaaccccttttgattttccccgtttcctttcttcaaccttggtgagtagaaagtcacagatgggcacacacgcacaccacggtcaggagtcccgagacagcacgaggctggaagccctggcctcaccgcctctcacgctatgtccattcacctggcaggcacgtcacggccatggacagcatttgtgcttctgagcggtcgcagggcgtttggcggcacccacgccagggtgccagggcctctctcctgcctaggcctggagaactcctggcgggtcaagcccagaggaaagactgggcaggttggc

SEQ ID NO: 49534 - DNA, 430 bp, Homo sapiens
gacaaacacaaacaccttgctgagctctctggcctccccttcctctctcctcctcccctccccaacaccctctttatctttgtacccttccccagctgtggaaaacattcggttaccagaatggaaaagattcttggggcagcatctggagcctgaggcctcagactgcctctcatacctgcctgaaatgggctcacagatgtgatgtgtggtaggggtggggatctgtggggcgatgcaagtggcctcttgagagctccattataggtggctggagctagaataagggcttccttcctcaaagacagctttccaaattgaggcattaatggggatcaatggaaatgaaattgccttgtgatcacccatctccaagagcaggggagagagggggtagtgtgagatgttaggatttgaaattgagtaggaa

SEQ ID NO: 49535 - DNA, 1309 bp, Homo sapiens
  misc_feature (1)...(1309): n = a,t,c or g
gccagggcagttccccaaacacagcggcttctgaaacagtcaatgaccagtaccccccaaacctgggctgtgcacaacagaccaagaaaaaggtgttccagtaagaaaacagatatatgcggtattttaaaaactgattttacaaaatccagccatgagatgtacaactcattccctaggaaacagcccaggaatggccatcttctccagccccgtacgctctccccagtagcccagggcacccagcaaccatcccctaggagaacaggcaaggaccctcgtgggaagatcccaccacagcaacacctttcttcagggcgggctctctccgcaatgtgtgagtcaagacaatccattccattcaagaccaatttactctcaaattttgccaacacagaaatattatccttaaagaaatgtgcatttaaatcttttaattcacttcatcctgtattttaaaataaatgttttccatatagattttccccttgggggggaaaagaattcagggtcttaggttccaggcagttcaaaaacagccacgcggttcttttttctccaccagaataccacaatagcagaacttaagaatcgggatatgaaaagggaggcgtggtcctggcagtggcccctggccggcaggaatacacagcaacacccaggcaggggcagcggctgcccccatgccagcctgcccatccctgtaatgacagcagggcaggagatgcagctgtggccctgggggcaggtgggctctgaggctgcaaacaccctgagtgccagtggtcccagagggggtgaggcctctatctgtacctttattccagccagcctcctggcacagggctgggcccacatcctggcctctgcatctggatcagggctggtgctggtcagcctggtcactctggccagtgctcacactggaagtccatcacaggcgaagtcacctccttcccgtgttaaataacaagaatgccaacaccccacgcacgtgtcatctccagtgagcagacgtccaggcttcccgaagcttcctggctggaaaccgcgcagggccggcagcgccctctccaccaagggacacagcagcggcgcctcctccgcggcccgggcccccatcccgcgctcgctcgnccaggacgccccaggtcggagcctgcccccaccccgcacccggaggccagcagcccagtcccctaggccgcgcagcgccagcgagagcgaggctgcagggcgaggcccggtgaggcgctcgagaactggccgggaggagaagtcaggcggcccacccgccacggcagcctcc

SEQ ID NO: 49536 - DNA, 365 bp, Homo sapiens; identical to SEQ ID NO: 11562

SEQ ID NO: 49537 - DNA, 734 bp, Homo sapiens
  misc_feature (1)...(734): n = a,t,c or g
gggaaactgaagcctggacacgtctccccaagggctcagtgttcatgggtgtgtaagatccattgactggaccccagaaagcaccctgaggggcagtgcagagagagcccaggaagcccctccactagaggaggcccttggtctggctgaggaccacgtccaccctgggcctccaggcctgcttttcacattaaaggcggggcagtctcctctcaaaggagttctcccttgagcactttgggctctggggcagagttgggctaggagatctgggtgaatcctttagtcacagctagtctcatgttcctcttctgtcaaaggggtcatggccccagtgtgtcctacctcagagttgtcagggtcaaagtaacaggcactgggacaaatatgaagcctagctttgtgcttcctttcaaattcagggcctcctttctactccattccagcctttttttcctgtcagaatccctcaggaaggacctttatcttctggagtgagtggcagttccactgggttcagtgaaagagtcgcccatggggttcttgttccccagggagtcctttgtattttgggtgaacaaattcttaccaaagcatgagattcgggactgttaggaagttcagactgcctcagtttcagactgcctcatggggcattttggaagtcagttggtttttggtgttntttancaaaacattgcggangtttttttagagcaancttggnttgggtg

SEQ ID NO: 49538 - DNA, 543 bp, Homo sapiens
gcggcacgagactgcccgagcggagacaagtgcccgctggtcggctcctccgtgccctgggccttcatgcagggcgagatcgccaccatccttgctggagacatcaaagttaagaaagaacgggacccctaggctaccactgcctccaggctactgccctctgcccctttgccacccaccgctgccgcggataaattattccctccccgacccagcccagtgccacctctatctgtgtacatactcccttcttccacccagatgggtcccctggggtagatgcattgtgggtggggggagaaagcttgtggctcctgtccgagggggtgtttggggtcccttggcccctccagtttccctctgtcctccttggcttggctttgctgctgcttgtagttgggggagaggtgcccccctcctccttgagaagggacctcctgaaaactcgctctttataaacgaggcaaaagcatttaattccacccccccaccccccgctcccttttgctccttcaataaaccgaaagatgggttttttttttc

SEQ ID NO: 49539 - DNA, 3538 bp, Homo sapiens
gagaagccaaggaaggaaacagggaaaaatgtcgccatgaaggccgagaaccgctgccgccgccgacccccgccggccctgaacgccatgagcctgggtccccgccgcgcccgctccgcttcgactgccgtcgccgccgaggcccccgttgatgccgctgagctcccccaacgccgccgccaccgcctccgacatggacaagaacagcggctccaacagctcctccgcctcttcgggcagcagcaaagggcaacagccgccccgctccgcctcgggggccaagccggcgagtctaaacccaagagcgatggaaagaactccagtggatccaagcgttataatcgcaaacgtgaactttcctaccccaaaaatgaaagttttaacaaccagtcccgtcgctccagttcacagaaaagcaagacttttaacaagatgcctcctcaaaggggcggcggcagcagcaaactctttagctcttcttttaatggtggaagacgagatgaggtagcagaggctcaacgggcagagtttagccctgcccagttctctggtcctaagaagatcaacctgaaccacttgttgaatttcacttttgaaccccgtggccagacgggtcactttgaaggcagtggacatggtagctggggaaagaggaacaagtggggacataagccttttaacaaggaactctttttacaggccaactgccaatttgtggtgtctgaagaccaagactacacagctcattttgctgatcctgatacattagttaactgggactttgtggaacaagtgcgcatttgtagccatgaagtgccatcttgcccaatatgcctctatccacctactgcagccaagataacccgttgtggacacatcttctgctgggcatgcatcctgcactatctttcactgagtgagaagacgtggagtaaatgtcccatctgttacagttctgtgcataagaaggatctcaagagtgttgttgccacagagtcacatcagtatgttgttggtgataccattacgatgcagctgatgaagagggagaaaggggtgttggtggctttgcccaaatccaaatggatgaatgtagaccatcccattcatctaggagatgaacagcacagccagtactccaagttgctgctggcctctaaggagcaggtgctgcaccgggtagttctggaggagaaagtagcactagagcagcagctggcagaggagaagcacactcccgagtcctgctttattgaggcagctatccaggagctcaagactcgggaagaggctctgtcgggattggccggaagcagaagggaggtcactggtgttgtggctgctctggaacaactggtgctgatggctcccttggcgaaggagtctgtttttcaacccaggaagagtttgctgcaacagggtgtgctggagtatctgtctgccttcgatgaagaaaccacggaagtttgttctctggacactccttctagacctcttgctctccctctggtagaagaggaggaagcagtgtctgaaccagagcctgaggggttgccagaggcctgtgatgacttggagttagcagatgacaatcttaaagaggggaccatttgcactgagtccagccagcaggaacccatcaccaagtcaggcttcacacgcctcagcagctctccttgttactacttttaccaagcggaagatggacagcatatgttcctgcaccctgtgaatgtgcgctgcctcgtgcgggagtacggcagcctggagaggagccccgagaagatctcagcaactgtggtggagattgctggctactccatgtctgaggatgttcgacagcgtcacagatatctctctcacttgccactcacctgtgagttcagcatctgtgaactggctttgcaacctcctgtggtctctaaggaaaccctagagatgttctcagatgacattgagaagaggaaacgtcagcgccaaaagaaggctcgggaggaacgccgccgagagcgcaggattgagatagaggagaacaagaaacagggcaagtacccagaagtccacattcccctcgagaatctacagcagtttcctgccttcaattcttatacctgctcctctgattctgctttgggtcccaccagcaccgagggccatggggccctctccatttctcctctcagcagaagtccaggttcccatgcagactttctgctgacccctctgtcacccactgccagtcagggcagtccctcattctgcgttgggagtctggaagaagactctcccttcccttcctttgcccagatgctgagggttggaaaagcaaaagcagatgtgtggcccaaaactgctccaaagaaagatgagaacagcttagttcctcctgcccctgtggacagcgacgggggagagtgataattcaagaccgtgttcctgtgcccagttttcaaaattccttcagccaagctattgaagcagcctttcatgaaactggacacaccagctacttcagatcccctctctgaagagaaaggaggaaagaaaagaaaaaaacagaaacagaagctcctgttcagcacctcagtcgtccacaccaagtgacactactggcccaggctaccttctccatctggtttttgtttttgtttttttttcccccatgcttttgtttggctgctgtaatttttaagtatttgagtttgaacagattagctctggggggagggggtttccacaatgtgagggggaaccaagaaaattttaaatacagtgtattttccagcttcctgtctttacaccaaaataaagtattgacacaagagatctcttcctgccaaggtttttagttcattgccagtttagtctttttgacccatgtgtaattaatttttctcaacccaaagtaagattgagtcccctttgagatgcattagagcagtccaacccagaatggcacacactgctctgctgtagcatcatgtcagggcttcctggactcagtacacctctcagtttgtcttttaaaaaacagctgaatctttactacctatttagttctccttgttaaagaaacaggggtgggaataaaatggatttaggacacccagtttgaattgcagtttttttttttctgacacatggccagggctgtggtgccagcttaatggagtaggctgtccttggcacttgcatgtgtgaaaggagggttttgcctcttcttgagcatggcttgagttggtaaggaaagctgtaactcacgaagccctgagacctgctacccctaagatcgagcttgttttcagtgactggcttgagtcataggaggaggagtctggtacagctgcaggagagcagggccatctgaagcggtagcattgccaccatctccctctcatctagagcagttttcttatgccttggtttgagctgaatttgatgtgaattcttttgctgcttaataaagtgacctctaggtgcattagaatgcgaaggcaaatagttgcaataaatcacctgcacaagcaaaaaaaaaaaa

SEQ ID NO: 49540 - DNA, 2137 bp, Homo sapiens
  misc_feature (1)...(2137): n = a,t,c or g
tttttttttttttttttcattgtcatatagattttaatagattttctgattaactcatcacagtagtcgtttttactgtaatgatatgcagctttactacactagtataaataaaaacagataaatacagctctaggcaacattacagattaactaagcattcttcgtgaaccaaaactgaaaacaattaattattaagaagaagagatgctgacacccttgcccattctcatcataccttctcaaaaagggtattcaaacaaggcgctacacttattatattggtaaattaatttgccaattagccaggcacaacaatttcatggtctccactatttcattattttggttgaaaaggagacacacttcaatgtatgaaaaagaaaaatggaacagataacaccaaagaaaaccactaaatgcattaaaaatacggcacttttcctgtattttagcagtaagatagaaatactagggatagaaatataccaaaaaacaaaattaatgctttaattaatatccaccctgaaatgtcagtctctgaagcaagatgggcaattaaaggaggagcagaaataaaaaagggaaatatgataaaataaactccatgtgaagttttacgaagctatctgcaaagaaaccgatttgtcctttgaaggctattaactcaggacaattaagttatccagcagccatgctgaggagttcatagtctagcaatacgttgcacacaggcaaatacacttaagacgagttgggagatatacagaactatcatttagaaatgattttactctggatggctcaaaaaactttgaaagggctatgaagaaaacttgaagtctgtcaaaggagagaagtaataaggaataattttaggcagatagcacagctaaggaatgtttcccaaaatcccgaaaattttgctcaactttcaatcctcattcttatatggcttcatgatcttatgtcttcaggatcttacagatcttaataggtatactataattaagaactaggaagtgaagaatcactttcaaaatgtaaaaacagctcattgccagttgtgtttcagaaaatgtctgtctgggccaggcgcagtggcccacgcctgtaattccaccactttgggaggctcacgcaggcagattgcttgagctgaggagttgagaccagcctgggcagcatggcaaaaccccatctctactaaaaatacaaaaaaattagctgggcatggtggcgtgtgcccgtagtgccagctacnnnnnnnnnnnnnnnnnnnnnnnnnnnnnnnnnnnnnnnnnnnnnnnnnnnnnnnnncaagaccaggccccactgcactcccagccaaaaaaaaagaaaatgtctgtttgcaaaaatttcattttcctatcaaaaatgcataattacagaatatttagcccagtcctttgagtaaactgcctttgccaattgtgaattaaggctgtgattaaaacagacaattccaaaaacaaaaatcccaaatataatccagtgcattttaactcatcctgcaaaaaatgttcaaaccatcactgaccacttcaaatatggacataacctagcccgagattcaaaggttattttcagattaaaattttaactgctatctttgcaattctattgttttcacatttttggtttgattttttttttaagaaggtatacacgaactttcggttttattctccaaagtaatgtagtttttcaactttccagttaatgtagtttttcaactttccagttaatgggtcaaaatggacaggtcagaagacataatccagaggatggcagtgaaagatcagagaaaggtttatgtgcacactggatcacagagagagaaccacaacctttttttaaacctttgttcccactgtaaactttgttcatatctctgtatttgtaagtctgaattattctataaaaatcacattaaaaaggtaaaattacttaagtgcaatattaactgatctgtattttataaattttaatccataaaaatataaataagaatggtaaatttttaagaaaaaaaaatatacatttagtgcaagttatgaattacatttcttcttcagtgtcagccatgagatatcttgagaaaagaaaagaatga

SEQ ID NO: 49541 - DNA, 1337 bp, Homo sapiens
  misc_feature (1)...(1337): n = a,t,c or g
aagaacatggttaaatcacagaaaatgaagaaagggagaagctgatcatgatcttgtacaacattatgacagcactaaggtattacgtatccaatacaaggatacttaatagaccaaagaatttaaaatcccagggaactggaataaccagccacaaaagaggcctctctttgttgtggttcacaacacaaaaggccatcaacaaattaggaaatattaaaattaagagagcagcaggtttcttcttggtagacagctcatgctaccatccacaaagtgagcagtggaaggggtatttaatgtcaaggctttattttgaatttctgttccagatgcctctccacagcattcatcacaccttccttcacacttgaagggaaaagtccttaagagttcaccacattttggtgttatttttagcataaacatttgtttttctataagaagtatctctctggattcaaaccacagaaatgtcaatgaatgttatttccattgtataatcatttaaaagtcacctacagaggctgggtgcagcagcttgtgcctgtaatctcagttactccaggagggctaaaggcagggaggattgtgnnnnnnnnnnnnnnnnnnnnnnnnnnnnnnnnnnnnnnnnnnnnnntcatctctacaggaaaaaaaaaaggcacctacaaattgaaactgacttgatagtttaggatcatttatcaccagtcccatgtacttgtagttgatttcaaatgtttggtacaggtgactgtaagacttcaagtattccatgaaaataacattcatgctgggatcataaaattacatttctgggacagtatttttaaagtctgtttttaacttttgtcttcaagagctactttcttcttgctgttctgaccagtgacctttttctgtttatccttagctttttctaagaaacattttggagttgtactaatgctctccctttccaatggtttcttaatcatctttttcttttgtttgcttagtagtttctgaaaaccttttatgtattctggtacaggacacccagcctgctgtataacattagcaacgcttcttaataatggcttatcatcctcagtgaaaaatgtaattgcttttcccttattccctgctcttccagttcgacctatcctgtggatatattccactgagctagttggaaagtcatagttgatcaccaagttcacacctttaaaatcaatccctcttgctagcaaggctgtacaaatcagaacccagatttttcctgctctgaaactgtggactgtgttatctctctgttgttgtgttctctctgcatgaataacatccacattaat

SEQ ID NO: 49542 - DNA, 425 bp, Homo sapiens
cctggcgacagagcgagagtccgcctgggcaagcactaccggaagccttcctattcccagctctcggtagatccaggatccactgctcgtcccagttctccagctgacagatcatctcaggtttgggaaactgaaatcccagcaagaccatgttcctgtagttctccaacatcacatctcggtagaggtccttctgaccccagttgaggtggccccactcctctctggtgaagtacatcgccacatcctcaaacgagagcagctccttccccctggctggtgggaacatggcttccacggcctggtcttttgcaaggggtgggatcctggacgtctggctgagctgctgacggctccgaatctccgccaagccgcctccaccaggggctgggctctcctctcggggttcccgggcctgacccgag

SEQ ID NO: 49543 - DNA, 1044 bp, Homo sapiens
ttttttgcttgctttccgcataaatattgcttttattacaagaaagaagagaccacctctgaagtaaggcacaacacaattccattgtcactgtggcagaagtccctgttgctcatccctttgatctcagccaagactgtggtccacgggcctaaggcacttgagcttttccctcaactgaagtgtagggggtgcctgagagctgagcctcgtgggagtgtccatggtctctgggacctgcatcgaagttcatgtgtttccactggtgctgaagatgaacatcaagaattactagacatgtaaaagtgtctttaagtgtctttcctcctgagtccacctttggcaatgggtccccaaagcctggccccttagagatgcagctccagatcctggccaccctcagggttcaaagagactggcccaggggtacacaattgctggaatattctctgcgagtcatgcacacgtgcgggggtgaggtgcagttatatggtgacacacacagtgttactgtgagctctcagggtgcacagagggcagttgaccaaggggcatccagctaaatctgttcccaccctggtcccagcccatccagttcaggggcatcaagggggctgaggccccggtagccactgtagaccctgtgactatcaactgacaccgtcactgggctccattgggcaaatgtagtccgtcgattcatcgaacttcttttttcttatgtttccgaagtgtgaaaatcctagtttccttggccggactttggctgtggtggtcagtggtgtgtaagctggtgaggccattttctctcgcttttcctgttcaagctccggaccaatcaaggcattgaacttggtggtcaggtggcgcctgaggagcgtcttttgtggggggatgttgagaagcatagcccagggtgtccccagtgaagcgtggctccaggataatgaggcctccatggactccactccctcgaagattgggtgcatactctgccaggtccacagatcgtaaccactccatcaccctgtggttggaccactg

SEQ ID NO: 49544 - DNA, 858 bp, Homo sapiens
  misc_feature (1)...(858): n = a,t,c or g
tagtaggaatgttttattagcaaagaagtttcagagagtgggtggatcagggctctatcacttggtccccacctcaccttggtggggccagagtgagccccttcctgccacagtcaccccaactgaaattgcctttctcttcggccagtgttagcctctgagcaggggaccctggacccttctgtgcgccaaaggctgaggtgactgacgaggagatctccccacagctaggtgtagtgagccagacgaggcagcttactgaacctgggggttctctccattgtcaccgcattctccttcaccaggtgtggctgtctgggagccagggggtgactcgctctgggtgtcgggctggcccgagcttcaggtgggcatgtagcagagcggccacctcatcctgctcagcctccagggcgatggccagggcactggtgcctncattgtctaggatggcaggggtcacagcctggctgggtgagcagcagccgcacggtgtccaggcgcccatactcactggcacacatcagcgctgtggccccatccgcatcctgcgcattcacatcagccccacacgccagtagggttgccaccatgtcctgtcggccatggctgatggccagcatgagggctgtctgccccgtctgactggccttggcattgacatcacccatgcagaagagtctctggaccacagccatgtcctcctcttcctgcctcacagaggtgagtgcagccagcatgagggccgagtagccggctcggttctggcggttgacctcgcaggcccccgtatccaggagcaggcttgcgatggccaggttcccgtgggacacactgtagtgcagggccgtgttcccg

SEQ ID NO: 49545 - DNA, 741 bp, Homo sapiens
gtttttaaaacctgaaggaaattttatttttcttcccactgaggtgtgatccaccctcttggtggggcctggagagcttctttaaacaatccacgtttaaaagtgccttgcgctagaatttctgacaccccgaggggcagacagtgttgggccaattgggtgggtgtttggggctgagagatcagggttcctcactggaacatctttctcaatcaagtgggcaaacctgatctacagcccggcccaggtgtcccggattcccactcattctcaggcctgccggggagagcacactctcgatttctgcccgttgttgtcctggactcgaagggacagggaggggctggtcacttcctccgtgcctgggcctggttactctgtcccttctgatgctgctgcttaacctgggccaggatgtctcggatcttccgttgagccatctgactggcatagaaatgtccgatgattttcacgatgacctggtcgttctcatcaggggtctggtctcttggtactaccacctcagctgccgtcaaattctgcaactcgttcaccgtttttccacctttgccaatgacccggccagctgctgatgctggcacacgtatgtgggtctccagcttcacttcctccttgggaccaaagaagttctcctccttgagtttgccatagattcttccctgagccttgaattgggcctctggcggtccagtgatgcccacgcgtccgcccacgcgtccg

SEQ ID NO: 49546 - DNA, 401 bp, Homo sapiens
  misc_feature (1)...(401): n = a,t,c or g
gtgcagctgccaaggggccaagggatgagctggggccctccttcccaatggcatctccccctggtctggaactgaagacactgagcaatggtccccaagccccaaggagatcagctcccctgggcccagtggccccaaccagggagggtgtggagaatgcctgcttctcctcagaggagcatgagacccatttccagaaccctgggaacacgagactgggcagctcacccagtccccctgggggtgtctcctcactgcccgatcccagcgggatgatctgtcccttcattcagaggaggggccagccctggaacccgtgagccgccggtggattatggctttgnttccgcctcgntttcctggngagtgggaatcttntggnggngacagcatacccatcc

SEQ ID NO: 49547 - DNA, 525 bp, Homo sapiens
ttttttttttttcggtcataagtttaatgaagtctgaaaggtaagcgccatcgtggtcagagatacggaggcccggtcagactctccctctgcacctcaatggaaacgatgtggtgtccgggtaccatggccaggcccagcacacggggctccccggcagagaaggaatccgacggcttgaggaactcctgcgccgagcccaggatgacattgcagtcacggtcagtgcagaggaagcagccgaccagtgtccgtccatctgtcatgcgaatgcgcatagtcttgttgagcagcgcctctagctgctgtcgggcgcgctcagccgccgagtcctcgcgctctccgtccgaatccccagcactggagctgctctgacgccgactgcaacagccattctcttctcgtagcagcatggtcggtccagctccggccatttgcccggaggcctcctctgggcctttcaacttcctaagcacctttcaggttgggtggtccgagatctcgcgagcgctcccgacctctttc

SEQ ID NO: 49548 - DNA, 330 bp, Homo sapiens
  misc_feature (1)...(330): n = a,t,c or g
gaaaaagattacttgaattctgtctgattaaataaagtatattgtgatttttttattgcttgagccctagtgcttctgtttctccttgtgtagctattaagactcaagtatatcctatggaatctttgtgtatttggaaagtattaatttgtttttaaaaacttgaggcattaaaatgaccttttgattatcacttaacagtagatggttccttttcttcctttttctcttttttttttctttttttttganacagggncttactctgnggcccatgctgnantncannggnnccannnnggctnanngnnncctngacctntnnnctta

SEQ ID NO: 49549 - DNA, 365 bp, Homo sapiens
ggtcacactgaaaagacaatatcttaaagatttatctgaaaaagcatggtagaagacttccactgtgaccaagatggagtaacgggaactatatttacccttcttcctgaaacaaacaaaaaagcaggtaaaatgtgtgatactgcaatgctcaaaaccttggacatcaggcaatgactcctgagagatgggaaacaaatgagatgcccctctgagaagtgcccctgccttgatctctcaaggccatggcccaggggagagggaaccgcaggagagcctgacagactccctgggttgggaagacagagctgagagtctggaagaccgaaacagccactgttcacaaggcagataccagtaaggag

SEQ ID NO: 49550 - DNA, 767 bp, Homo sapiens
caagactgtccgcatctgggtacccaatgtcaaaggtgagtccactgtgtttcgtgcacacacagccacagtgaggagtgtccacttctgcagtgatggccagtccttcgtgacagcctctgacgacaagacagtcaaagtgtgggcaactcatcgccagaaattcctgttctccctgagccagcatatcaactgggtccgctgtgccaagttctcccccgacgggcggctcatcgtgtctgccagtgatgacaagactgttaagctgtgggacaagagcagccgggaatgtgtccactcgtattgtgagcatggcggctttgtcacctatgtggactttcaccccagtgggacgtgcattgccgctgccggcatggacaacacagtgaaggtgtgggacgtgcggactcaccggctgctgcagcattatcagttgcacagtgcagcagtgaacgggctctctttccacccgtcgggaaactacctgatcacagcctccagtgactcaaccctgaagatcctggacctgatggagggccggctgctctacacactccacgggcatcagggaccagccaccactgttgccttttcaagaacgggggagtattttgcttctggaggctctgatgaacaagtgatggtttggaagagtaactttgatattgttgatcatggagaagtcacgaaagtgccgaggcccccagccacactggccagctccatggggaatctgccagaagtggacttccctgtccccccaggca

SEQ ID NO: 49551 - DNA, 980 bp, Homo sapiens
  misc_feature (1)...(980): n = a,t,c or g
gaggattttacagctggatgaaatcttagaaataattcagtttaacctcctcttttttaaaccacctcactgtaaaaatagaaatccaaaggctctaggtgccaggctggcctgcccctgtcctctgctgttccctctgttgacgaattgatgagctgactcaccctgcccctccctggacctcagccctggggcttggccattgtgagcctcatctgttctgtgaagcgtgttcaactccagctgaataccagaaatgcaatgtccctgtttacttccaattcaggtagaattgtatatacttcccttatacagcttcccacactgagctgttctcaccatctctgggacagatgagtaatttcgtggcctgctctcccttctcagtttgtcttctgtgtgaactggccaacatggtctctcctttttagaaagtcacataatggtgagtgcaactttgtggaagtcaatgtacataaacatgtgaaatgtgcatccagctactgtagataatgaggcagctgtatatgtaatgttgaggaacaatcaccaagataatgtcagtgggaaagccagcacagaagaggctgaggagcacgctgccatgtatcctacgcatagtgtagctctagcaggattcgcgaggagcaagtgacagcaggtgcctctgcagagaggaactgggcacagtggggttaattatagtcgcatanttaatttagatacgcgatggaattcgattataaaaatagaaatttacggcatatgccagccgtacaccactggatggaacagtggcgtgtggttacaccctggaaaaggcctctcaaaaataagtcttatgccgcgctcttagtgggatcttcagcgcgtcacatgtgcaatgccatcattgacattggggtatagcgccctctactgnaggagctcgcgaggttcgtggcaccagtcctacgcgaagagtacgcaatggatattac

SEQ ID NO: 49552 - DNA, 498 bp, Homo sapiens
caatacgacttcatcagtctccagtgccagcaggtggtgcggatagcgctcaacgcagtagacaccatttcctacggagaattccagtttccccctaaatcgctcaacaagcgagaaggttttgggattcgaattcagtgggacaagcaaagtcgtccttccttcataaacagatggaatccctggtctaccaacgtgccctatgccactttcacagaacacccgatggctggcgcagatgagaagacagcatctctgtgtcagttggaaagcttcaaggctctgttaatccaagctgtcaaaaaagcccaaaaagaaagccctttgccaggacaggcgaatggcgtgctgatcctggagcgccccctgctcatcgagacctacgtgggactcatgtccttcattaacaacgaggcgaaactgggctactccatgaccaggggcaaaataggcttttagccgctgcgttctgggagcttcctccccctccccagaagg

SEQ ID NO: 49553 - DNA, 1923 bp, Homo sapiens
ataattttgaaccaatttattattgtgtactgaggataaataatgtatagtagaggacagccttggtttgtaaagctcagttccactagttcatggttttgtgcaacttctgagcctcagttttctcctttgcaaattaataattacatacctttatagattttgaaattaatttaaatattagtatttggtacatgaaggcttaatgttaagtttcctttaatgatccacaataatccctttgatcacgttaatctaaatctagatgtctttgtctaattttttttgaatagcagttataaatgtaaaggactcaaagtttaagtaaaaagtgatactccaccttgtgtttcaaagaatttagttccacctcttcataccagtttaacacttaatatatttcattggattttagacagggcaaaaggaagaacaggggcctctggaggcccttggttatttaaatcttggattatttgtgatagtaatcacaaatttttggctaatttttaacctgaggttttgttttttttttaaaggaaatgcagcctagtcttgagaacataattttatataatcaattactaaatgttaaactattaccacacagcccataaaacagcatttgcgtttattgagagagaggatgtgccatcatgattaatgaaaactatcttttgagtttgaaaagaaattaatttgcagtgtttggattgtatatatggtgctaaaaataaattaatttactttataaaccttatctgtacattatacgatgtgatgaaatttgctttttatccaaatattttgtatcttgtaaatatggctaattataggaatgcctataatacatcttagattccttatatctaataagagttcaaagagttatgagttgaagtcttgaatgcaggaaactatctgatagtgttctaaaatttggttacttggggtttgggataccccttagtgggatgatgtaaatagaggctagctacctaggcttgtctatagcaaccataatgttgatgtaagtaatgcggttactgaatcataagaaaatgccatctctttttagttgaaggaaaactctggaagtaggtgccattggtcattctgcagtgcactgcaaccattgtttcccctagtgccctcttttccctagggcattgctctcctattcccacgccttaacacagctctatacctagaagcagccagcccaggcatgcagtcacatttaatcacatcccccttctagagtgcttcaaaatgatgtagtccctcaacttggctaaagaatctcaatctcttgaaatttatttttttaatgtcatattcatctggtaaatatctactgtttgccaggcatttaagaatatggcaaagaacataaaagatggtgtcaccagattttggtcaccaatgagtacccgacccgttgccatgattaagagagaatgctttctattggagtttcaggaaatataatttgagaatactttaaagggaagtggaagtataagtgaatgatatttttcttttacatgtaaacaatgaagttatttcaaagttaagttttaaacaaaatacatgaagtagtgtctgccatacatgttaatattctacattcttgcttccttaaattaatatgtttgtgtgtatatatgtgcctcacacctgaattgaaaattaaagactggtttaaaagtggtttaaaagtgacatttaatgtttctccattacgtttggggtaaccagcctaagtggaatcttggaaggaaagtaagggaaaaacttgtatttgccttcaatgaattaaaccagtgatatgtgttaacgtatgaatgaaaggattgatggtgattttataattatatatattgccgcagtaaccagttaataaattgatagctaccatta

SEQ ID NO: 49554 - DNA, 326 bp, Homo sapiens; identical to SEQ ID NO: 11674

SEQ ID NO: 49555 - DNA, 546 bp, Homo sapiens
ggaaagcctttgcactacagtaagaacaacgcaaatagaactttctgattatagtccatcaatggcattgaccaccgaaaagtacttgcatgtcatctttgtattgccaaacaataccttgattttgaagtctgtaatctttgataatagttaaacacttttcttgggcatgaattgagacattcagttcattcactatacatgtgttttgggtccagtctttggctttacttatgtctctgtgggcgtcagggcaaatcagggtaacttcttacttacacccttgattgtaaaacagattatacttgtcttgcctactgacctagtgtggcaatttggggaaacatcttggtgcctgaattaggttctaggctcagggcacctaaacatgatttaaaacttgatcatttgaactagaagccaagtacaaccttcaagacaactctgtataaggtcataggtataatcactattttacagatgaggaaacgagattgactacaaatttggttttgaaaataaatcacatgctcaacagaagcagtt

SEQ ID NO: 49556 - DNA, 436 bp, Homo sapiens
  misc_feature (1)...(436): n = a,t,c or g
taaccgttcaaagtgtttgttaattatttattaagataaacaatttcttagcccacatattcatgtttcacagatagttcaggaacacaggtacagtgacaaacttctatgtaattcaacccaaagaaatactttatgttccaaaatcactttgtactctgagagatattagccttcctcacctcaaattctttaattcaattataatttctgtagaaatctgcatatgccttctttcttggtcaggccacagcagacttacagagagctgcaaccccagggttataaggaatgctccagcaatatgaaatgacagatgcctggccagaaggccacacatcccaggttttgtcaaagcactgagagccatggtagttattgtccttgacagggatgncancancnacnctaangtctttnncggttgatgganaaa

SEQ ID NO: 49557 - DNA, 326 bp, Homo sapiens; identical to SEQ ID NO: 11683

SEQ ID NO: 49558 - DNA, 1403 bp, Homo sapiens
ggccgggaggtgatcaccatctactcctaatgcccaacagcatcacggcactctgggacaggcacggaggacggcgtgggcagcctggccctgggcttggcccagggaaacagacggcagacacacctgtcccccagtgatgccacccaagctgcccatggggcttactacggaagtttctaggcccgtcacctagggctctcctgttcagccttaacaggctcagcaaatcagggcgtggctggacgatttccttgcatctgagggcagacgctgctaccggagtgacctgggacgtggccagatcttctcgcaggtcacaagaagccagtgagcccttgccttggtttctggaagttcttttccttggctggatttacccagtggttaggttgcatttctaccccatccagaacattcttgggaagagcacccggagctgaagctgtccctgatgatgaaggtgaaacgtcagccctggccatggctccgctcagggccccggtcacctccgagtcactctgttccttgactgtctttgtgtttctgtacctcaaggcactgaagctggaggactctgtccatgcccgtgtcaccctcgtgtgggagcctctgggctcgggcaggtccacatttcatgagctgagggcttggggccagggccatctggaaagggaactcggcttttccagaacgtggtggatcatctgtcgggtgtgtggtgaacacgttcagttcatcagggcctacgctccgggaaggggcccccagctgtggctctgccatgccgggctgtgtttgcagctgtccgagtctccatccacctttagaaaaccagccacttcttttcataagcactgacagggcccagcccacagccacaggtgcgatcagtgcctcacgcaggcaaatgcactgaaacccaggggcacacgcgcgcagagtgaacagtgagttcccccgacagcccacgacagccaggactgccctccccaccccaccccaccccagggagcacgggcacacagttcagcctctgagctggctcacacgtgccatccccaccccggtgctccagggaaggaggacacggacccgacgtgggaggtcctcaggcagcagtggcgcctggtgtcaggtctgtctggctgagtcccgggcgtcccctgccatggcctgtgccttgcatgggaggcggcggtggcactgaagagatagctttcaagggcccaacacttttgcactttcggctggctgtgagtttctgctttgtaggttgtggtcacatttgcaggctgcgggcagtggcaccgacttgggcctccctttctatgtggcatatttatttatttaaacaccccagggagttacgtggtaacaaggttgtccataaagaagttgct

SEQ ID NO: 49559 - DNA, 489 bp, Homo sapiens
  misc_feature (1)...(489): n = a,t,c or g
ccttcaaaaaatagtttattctgcacatttcctagtaggctctctgcccaccgttccagggtagcagctactcataacttgtctttctctccaaaaccaagagggccttcccaacagaaaaaccttcagttcccaaagcagcatcgattcttcccctcaccccagcaaacctcggggtgggaataatggaatcattcaccttctcccacccctcactgccccgccccaccttcatttgccagggactgtcactgggctgatgggtcaggattttgtcttttttcaacttgggatacccttcaaggcatcccaggcttttgggagggctttcctgggggcaacctcatggggcttccacattgaccggggattacattcagcatccttgggacaaaccacccattcagaggcagtggggttgtgggccaggttccctccattccccgatttccgncccaatgggagaaaccagagggtcaaaggggcctt

SEQ ID NO: 49560 - DNA, 1205 bp, Homo sapiens
tttttacgttttatcaactgccaagatcctttattttttccaggccccttcctgcccactccacatcggggcagctccagcataagggagatgacatgatgaaggggctaagagtagggcctggccagcatccactgagggcccaaccagggaacagttgctagccgctctcttccatgcagctggagcactagcaaggccttccagaggctcccagggcgacctccacatcactcccgcttgtctctgccctccagggtgctccgggcctcctctccctgtgtaccctagaggtgtgagggccacagtcctcctcaggtgaacctccctccccaagcccagggccctagcacaggctgcagttggacggcttcgagctgcggctctgggcctgctgccgctggtattctgcctcactggctgacagtgcttgtgctaaagctaggtcttcttcctcctgacaacttggaaactggggtttgggttctgccagggacatttccagggcccgctgcagagcttcatcctcactcaggccattctgcaaagcaatcactggaggggctgtccaggacggagatcgggttgtggctctgctgggagaggtacaggaaggcatggtttgacttgggctggggacagtgcttgtagaagccacagcttgtgctctggagatggcagcaagtcctgcccggctggttgggtgcccctccccagagcaatcatggtccagtggatgccggtgcttgatgcagaagtttcggctacagcgttcacaggtcagtttcatcatttctcgctgccggcagccagcgcgttcacacttattggtgaagatcttacgtttttgctgtgctggatcagagcgacagtctctgtcaatgtgctctcccacagcacggtcagggggctcccctctggccacaggcacaggcacattacagagagggcacacaggtacctggatatccttttggtaagcagatccacagtgatgctgggcgtaggccacatggtctgcgcagaagatgcctgagcaggcatcacacttaagcggcagaaaatccaagcgctgacagctcggctccgaacagtgagcgccgaggctccggaaactccatcgccaagccgggcagggtctgctaggagaagcgacgagtgctgagcgtctttagggctcgtgctcgaagtccgcaccgcgaccc

SEQ ID NO: 49561 - DNA, 1129 bp, Homo sapiens
ttttttttttttttttttcccggaaaaccattttaattataatagcttacacaggctgcagagagggagacgcagagccggacctgacgggctgtgctttcaaaactgtgcagtctccttcctggctctgaacaggttagcaagagttccaagaggcctcaggcctcctaaccacaaaggcagagaagttagccccagaaagctgacagctgaaggcggcggaggctgagagtgcttggtgtttgacagatgagtgttgtggtgggaggagtatggagtcacacagaggctccacccagcaaggcctctggccaggggctatgtttaaggctggggtcaggcagaggtgggagccgcaggggagagaagtctggccggcaagccccaagggaaggacaaaggcactggggcagatgtgaccgtggacaaccgcagtgcaggcagggcccctacaacgctacagcaagcaaggccgtccacgaagctccctgagctacattctaacagaatgtggatgtggggctgggtcagcatgtggccccaccatctttagctcagtggcagttctgacagcttgggtggcaaggaatcccatttaccctgcagcggcagcccccgctggtgtctcctgggcccccagggccccagcgtgggcccttggtgacccagcagatctcggtgtggcagacggtgcagcggatccagtcgcagccgtccttcttctgtaccacgatctggcactgggggcagcgcatggcctcgccctgctgcagcatcaccttcagcatctctgtcgtctgccgggcagccacatcgttttgagcccgcagggccaggtcctcctgatactccttgcagttcatctgctcatggatggccttgcagagcaggcagttgacgtggaaacacacagggcaggtgaactcattgacatcatcctcaaagaagcaccatcccttgcaatctggggtcttgcaatggtagctgaaggcactgcgggttttcagcaatggagatgcccaggtctagaaatcgctggtaatcctcaggggtcaggagcgccttgatctccctctccagcagcttgcccgagcacgagtaggtgttgtcaatgaaggggcaggagacc

SEQ ID NO: 49562 - DNA, 413 bp, Homo sapiens
ctctgaagacctagatggtcacagtgatccagaggaatcctttgccagagaccttccagacttcccttccattaatatggatcctgctggcctggatgatgaggacgacactagcattggcatgcccagcttgatgtaccgttctccgccaggggctgaggagccccaggccccacctgccagccgggacgaggctgcgctgccggagctcctgcttggtgctcttcctgtaggatccaacctcaccagcaaccttgccagcctggtctcccagggtatgattcagctggccttgtcaggggcctcccaaccaggcccttctggagcacctgcccagagagcaacgagaggcttcctccggtcccccagttcagacctggacactgatgctgagggggatgactttgaacttt

SEQ ID NO: 49563 - DNA, 830 bp, Homo sapiens
gcagcaaagcgcggaactggggttgcggcgtctaagtgtttccggtggattcccagggactgtcggaggtgtggactctgcctgcctacctggtctgggaagatgttctaccatatctccctagagcacgaaatcctgctgcacccgcgctacttcggccccaacttgctcaacacggtgaagcagaagctcttcaccgaggtgggaggggacctgcacagggaagtatggctttgtaattgctgtcaccaccattgacaatattggtgctggtgtgatccagccaggccgaggctttgtcctttatccagttaagtacaaggccattgttttccggccatttaaaggggaggtcgtggatgctgttgtcactcaggtcaacaaggttggactcttcacagaaattgggcccatgtcttgcttcatctctcgacattccatcccttcagagatggagtttgatcctaactccaacccaccatgttacaagacaatggatgaggatattgtgattcagcaggacgatgagatccgcttaaagattgtggggacccgtgtggacaagaatgacatttttgctattggctccctgatggacgattacttggggcttgtaagctgagcctggtggcctcctacccttggtcctactctaggaagtgtgattgtcacacttatcatgttgtccagaggtccagtctggctgctgttgtggaggcaaggaaggcaactcatcccagaaggcatctggtgcttcttgtagcttaactactgcctcctcatttttcagtatgtgttctaagtataaaaagtccttggttctcaaaaaa

SEQ ID NO: 49564 - DNA, 945 bp, Homo sapiens
ttacattctttctctatatagctttatatttagtgtcccaccatagaaaacttcatcctcaatatagcaagtacatgaggtggaggggagtctggcccaggaagacacttgcgaatggaggagcagagagagggactattgacgtaaacctgccacgtgacacgactcggctttgtggaaaccatacgtgatttcgaagggattgaaaatggagatttcaagagttctcctcgctcccctgggggcatgtgtgccccctcctcccgccctgtcctcagctcgcacgcatccgttcagttgcttctaccactccccagtcggttgtcgctgggtgtcactcagttgcggagccggcagaagtgaaagctggaaggaagaggggcgctccggcctggggaagggggcccggctgggctgcaccgagaggagggggagggcagttctcgcttcttgccgctgctgtgtctgcacagtcgtccgtgccttgccgaagtttgactttcagaccatgatggaatactgaggtatattagtttcgcggaaagtttaagaaacataatcaataatgtgatcaccagactccacccaatggtgcaggagacaggacggcagggcctcccggaccctcctactgctgcaggttgagcgtgaacttccactgctgcgaaagggccgggccacacacctccacgcttaggcccccgctcttggccgtgcgactgtccaggcacaggttgctgcccacgtgcctcagcttggagttgccctcgatctgttcccatttctgtctgctgtcattttctcggcagccctgcagctttataagagagcccggtgcccggtccaccacagtaaggcacaaatccatgtgcttcaccgacttctccttcgtcaaggcccattcctggaacacaaaaccagaagtcagaggcgtgctatgcaccg

SEQ ID NO: 49565 - DNA, 546 bp, Homo sapiens; identical to SEQ ID NO: 11708

SEQ ID NO: 49566 - DNA, 1462 bp, Homo sapiens
aggtttcatgtttgttttatttaaagtctggttgggtacagaaaacacacacacacttaacaggttaaaatatccaaataaaatttactgcaacttttgtagaattttatttgtgctacaagacacgttgcataggaaactatttaaagcccctgaggaaaaaatatccatggtttaaggtgcaactggttttgtttcttctttggggaaaaggtgatagatggtctctgggagaaattatggggtggagttgagaagcacaatcgaaggttatatggtgggatgattggcgaattgtgtgtcctggttcttgcagcataaaatagctaatgtttgttctttttttcagtccgttggtcttcagtatctgaataagtagctatacaacgtttcaggccagtaagggagtatacattgattatactaaggaagtaacatgtttcaagaaagcagttttagagaatgagattcgggatcccaaatggtccctgacaactgcaggcacacaggaagtgtcctggcacgttgctaaggatcacctcactctactgatttgccagtatcagtccttcctcctgctcccttccaacacgcgacatctacgacgcattgtgagattcacacagcatgtctgcaccctaaagttattaatgcaacactgtgtcaagttcctgattttatgtgagtcacattttcatttttacaaaatgctcatcttgctcagatgatctttacattgtacaaaaaatggtttcatctaaactatgacttccttccgaggagacacaggtacaccaggaaggaagaggggttaagccttagatgaaatgaaatgcagagtttggcaaatggcagctggcacctctgccacatcagcataaggcgttgcttgtgaggccaaccacagcatctgcaataagcacgagagtcagtggccaccaaggctctgattcggtcatgaagttttcttccctgtccacagaagaggcagcaaactctatgggaagcactgctttgacctcaaggaaaaaacagtacaatggcctcgtagcagcagggaccacctcactctcaaatggcattgttcttgtcaatgactaattgcacactggcaggggccctaaagactgtcaactcatggctgctttctaatctattggcagaaacagctcagggcacctaaatgctaatgcgggacttcactctgcccactgaagctcaccaaagattcacatattctatggatggtcatttactacgagtgaggcaaagcacggaagacaatcaaatccgaggagggagcaggacctggggccttctcagaaagaatgagctgtacccgtttactgaaaagccactttttcccacgtgattcaccttcttacacgcagggagtgaaagaggtccaacaaccgaacgagcatctttccgggctgagtgttgaaatgcaaagtgtggccgg

SEQ ID NO: 49567 - DNA, 424 bp, Homo sapiens; identical to SEQ ID NO: 11713

SEQ ID NO: 49568 - DNA, 364 bp, Homo sapiens
gcgggtataagggagatagctcatggcccttgtgatgcaggaaaaatggatgtccttaaaaaatttaagtatgtagcctgtgagatgagattggggcattgagaggatccagtactcagaaatatctcctgctggccctgcatggtgcctggtgtcccactactaggggacacctttgggttaggacactgtctctaggaggtttcatcacccaagagtcaagcatctctgccaaatgacaccacccaaaccaatgaggaactagtctgtgccaaagtgctcatagtaactactgtagttatctattgctgtctaacaaaccacctataacatagggctttgatgattatctcccagggttctg

SEQ ID NO: 49569 - DNA, 1837 bp, Homo sapiens
tttttttttttttttcaaatattccaattattaaactttaatgtgcaaataaatagaaaaggaaaactacattcaaaacagctgcaaaggaaggacaagccccagaacagaaattcctcaagaacggaaaagaggcgctccctagaagcatgcggggatgggaatactgggaggaggggctcggcggggtctccggctgcacctggggcccagggtggctctgcccgagacggccgtgggcctggtacaggaatcttgaatggcaagttcccttcttagaaaaccaggatgtgtacaaagtgcctgtgtgacacttggggagcgggggtggggagcccaggaggacgggtcagcatcggaatcgcccagcctggagtcaaaggcgtcaggagcctccaggttccacaggaaacttctagaaacacatctccacttcctggaaacttgagtccagctgttgcaggatggcaagggtggcggttattctgggcctactggtgtgcaggggcccagggccaggggctctcatggtcggggagagaggcctggagaagtggtccccagccccagtcacttgggattcttggcacagaaagccttggatgcctccatgggacagtcgcctcagcccctcacaaaaggacaacaatgatccctggagtggccgcgtgggtcccagggtgggtgggcggatggggctccttgggtggcggctgggactgtcaggcgcggctctcggagttccacaaagggagatctcagccccagggagccgcaggacttggctgctacagaaataacaaccactaaaagcgaaaggaataaatatctgtgcgtgtatacacatacgcctagggtgcccactgcaggaacacgactgggcccgcccgccccacagcagggtcgtgccggctctgagggaaatactggctggggtccctccccttgtgggcccagagtccagctgctggagttggggttgggtgtcttatccagagcggggtctccccaggcactgcccgcctgctccagctctggacttcaaaatgggatcccaaaggtttggctgaagggttcttctcacttccaaagtgactgagggcctgaacaccagcccaggcagagctgatgccccaaaccctcagatgatgtttctggcagctctgagaatattctggaaggactcacttttcaagcaagcctacccagggctcaactccttccttgtcagggtctcttggacatggaccccctccaaagtgtgggcctcaggagggctgtcacctgtgacttttccaagacacggcaagaatatggggcaggagccatctgcctgccagggatttggcacatgtgacggacggggacgcaaacatgattgcttgttcctcggccagcacgtccacccgcccctgtggtggggctgagccccagggctcgggtgcaggtagctcaggtttggcacacagcaggcccacaggagaccgggagccacgggggcggcgtcctgccctggagtgcgctgtccggcagcagaggggctgggagatgcctctcacgtcgttcaagaaaacggccccgacacgaccaaggccgagggcacgtctgtgctctgtgaggcgcctgcccggtgcccatgagggcgggtcagggcgaggccgggcggcggctgtactgcacgcggtagcgggtcacgggcaggccgtgcacgtgcactgtctcacacagcgtcttgcagggtaccatgtcctcgtcctcctcacccatcagccagtcctgcaccaggctagccgcctccaccgtcacattgtcctccagccagcggctgtgccactcc

SEQ ID NO: 49570 - DNA, 2300 bp, Homo sapiens
gactgtgtcatcaccacctgcctcgggaaccgaagcacgaaagccccagacagggccagggtggtggagcactggatcgaggtggccagggagtgccggatcctcaagaacttctcgtcactgtatgccatcctctctgccctgcagagcaactccatccaccgtctgaagaagacgtgggaagacgtttccagggacagtttccggatctttcagaagctgtcagagatcttctcagatgagaacaactactcattgagccgggagctgctcatcaaggagggcacctccaagtttgccaccctggagatgaaccccaagagagcccagaaacggccgaaggagacgggcatcatccagggcaccgttccctacctgggcacgttcctcaccgacctggtgatgctggacactgccatgaaggactatctgtatggcagactcatcaactttgagaagaggaggaaggagttcgaggtgatcgcccagatcaagctgctgcagtcggcctgcaacaactacagcatcgcgccagatgagcaatttggggcctggttccgggccgtggagcggctcagcgagactgagagctacaacctgtcgtgcgagctggagcccccatccgagtcagccagcaacaccctcaggaccaagaagaacacagccattgtcaagcgctggagcgaccgccaggccccccagcactgagctcagtaccagtggcagctcccactccaagtcctgtgaccagctcaggtgtggcccctacctcagcagcggggacatcgctgacgcgctcagcgtgcactcggccggctcctctagctccgacgtggaggagatcaacatcagcttcgtcccggagtctcctgatggccaggaaaagaagttctgggaatcagcctcacagtcatccccggagacctccggcatcagctcagcctccagcagcacctcgtcctcctcagcctccaccacgcccgtggctgccacacgcacccacaagcgctctgtctcagggctctgcaactccagctccgcgctgccgctctacaaccagcaggtggggcgactgctgtatcatccgcgtcagcctggacgtggacaatggcaacatgtacaagagcatcctggtgaccagccaagataaggctccggctgtaatccgcaaggccatggacaaacacaacctggaggaggaggagccggaggactatgagctgctgcagattctctcagatgaccggaagctgaagatccctgaaaacgccaacgtcttctatgccatgaactctaccgccaactatgactttgtcctcaagaagcggaccttcaccaagggagtgaaggtcaagcacggagccagctccaccctccctcgcatgaagcagaaaggactcaagattgccaagggcatcttctgagggcatcctcccagggtctggctggctggtagccaagcacttatggaccagagtggcccaggccagctgggcgccttcctcccacctgccagcccagggtaccccagactccagtttcatcctgaacctctcccgctgctgggattgacgcctgccattggtcagctgacctggcctcccgtggaaccactcgctgccttaggtgccttctgctctctggaaccagaggactagctgacttttgccaaggagcagtgccaacgggcatggcatggtgccctgccctcccccgggcaccacctctgtacacttccctgacaccttcccaggtgtgggtcactgccacctgtgcccatgggccacccccagagcacccactgtgaccactgcagttctctcatgcccacaggcactggcctgtgaccttcgcaggggtcccggcccctcccaccactctagcctttctcaggctgcaccaaagattccatcatcagggccaactgagagtgagggagtctcacccaccgcttaccccagccctcccctgggagcagagagagaaaccctcttcatggaccagactctgcacccggtgagtgaggacagtcccagctgagtcccatcgatgttgaatctcatgccactgcaagtgccattcaccactgcgtcctgggctttacgagaccatgcaagacgggggttagtgaggaaggaggatttggggtgggggtggggtgattgaatatttgtataaaaagcaaaaagaaaaaaaaaatgtttgtttactgattggggaggggcaatatttatttgttgtaaatagcaaatgctagacttgaatattatattaaaatcctgtttctactataaaaaaaa

SEQ ID NO: 49571 - DNA, 332 bp, Homo sapiens
gtcagcttgctgggtctgcttggagagatcacctacattgtgctgctggtgcttcatactgtctggaacggcaatggcatgtgggtcactgggcttaccccccatccccttaacactcccctccaactcaggaagaaatgtgtgcagagtccttagctggggcgtgtgcactcggggccaggtgctcagtaggcttcggtgaatatttgttggctgatttattcagaaattctgtccagcccctaccttggatggatttatcacctctccaggccacctcttctttccaaatagggccacctaggtatagaccaaagacacgaaatcttctg

SEQ ID NO: 49572 - DNA, 524 bp, Homo sapiens
taaaaatagggttttatggtactctgtaggttcctggtgagccagggttccagggaaaagctgagaaaggatttggatggtggtgacggtgcaggctttggctgctacaggaagcggaggagaccagaatcccaaccctgaccttccttctccttaaagatgcatagacttcctggaaggctcacatggcctttctcaagtagccgatcctctttaggggagacctgccatcttccagccgcgtcatgttgcctttcagggcaagccttggccagtttgcagcgttgctgtttcttttgcagggcggggaggcaggggccggtgtcaccggtggggtcttggtgaagttcctccttcctccaggcagatggctccggtgaactgcaagaaggacagactgtgtggactcctggtcctcacccgatccggatcctggacagtgctgccagactgttcaacaggctgcacctacacaggcagaatctttataacaacgagaccttccgctgtgctggaccatgttg

SEQ ID NO: 49573 - DNA, 847 bp, Homo sapiens
aacatcgcatggcagatgggtgttggaataattactttctccacaatctatcattttaatagtttataatagtgcagttcatggaaacatgccaagtccaacaaaagcacaacagattagattacagtcagattgagaagactggtgtgcgttggcagatagacgtgctggacatgctccacacgcgacctgcagacgggacatgactgggaaagaaaagccaacagtctctgttagcatgcaagcctcggtggggggcctgtgtctctgtgcacacccctggtctctagtgcatttaattttctaaatcaattgtgatcacagtgatttctagctttcaattggtagagatctttgccgtctcacaggttgaaagtttatactttacaagggcttaaaaataaatactatgacatagtataaactgaaggaaattaattacatttttagtgaaacgctaaagaaggtacattgaataaagcaattactgaagacgtctttctgtgcagaatgtggtctctacatgagtagactataacacttcaggcagcaatgcaggagacccttcttgaaattgtgtgtccttaggctcagctgactgactcaggccaacatttctgggctgatgcccacatggccagggagggtggctctgcttctagccgtaggtggcagctccacattcctggctgacttctcagaaagcccgtgcccatcatcagccctcaggagagacttagggatgagagtcagaataggtgggcagaaaaagacaagcctatgactgcttctggggaaaggacacaggggtcatttggtcttattagctctgaaattagcagcttcc

SEQ ID NO: 49574 - DNA, 810 bp, Homo sapiens
cgcgaacttcctcccggcgcggcccgtgccccgccggccgcctgcgaacacctcggcctccgcctcccctcaggttgatgccggcccaggatggatcagacctgtgaactacccagaagaaattgtctgctgcccttttccaatccagtgaatttagatgcccctgaagacaaggacagccctttcggatgatccagattccagtaccagtacattaggaaacatgctagaattacctggaacttcatcatcatctacttcacaggaattgccatttagactggccttgtcatgttgcccaggctggcgtcgggactcctgggctcattcgatcctcctgcatcagctagaactacagtagtttcagattttgaagtgtgtatgtgtatgtgtgatatgtatatattccgtgtgtatagaaatggagagtatcttatttgagttgttgttttcagtaatgctgtcaagtattgttagagggtgataaatgataacatttgtttttatttgagcttatgaagaatttcttgactttctagctaaatgatcagttcacttctcttagcctcaattttattgcgtctaaattccaaaagttcttgattgctataagattccttcagctttaaatattaatatttgatattgattttgtttctgcccaaacacattgtttggtcaccgccggtaatgttagcaaagagaattttttttggccaacaaatgtctcataccacattcagtttttataagaaaaacttttatggtatgttgttattctgagttcattaaacattcgctttaccttat

SEQ ID NO: 49575 - DNA, 280 bp, Homo sapiens
gcctggttttgtgaacccatctaaaaaaaaaggctttcctaaggcagaaggaaaaaaaaaaatcactagatttagggcatgttctgagaaagcactccctagaggcagtcatgagcaagacaagtgttttccaagtctgcttctcagtttgcccacatcaaaatcccctgggatgctcatcacaaatgcagatttctgggctcagtcttacagaagtaagtgtctggataggagcccaggattttacgtcacaacagggtccccaacttatgcacacaca

SEQ ID NO: 49576 - DNA, 823 bp, Homo sapiens
gcataagggatacttttagttaatttaatatctatagaaacaatgctaatgactggcttgctgttaataaatacatgggtaaatctctgttctgggctctcagctctgaaggctgtgagacccctgatttcccacttcacacctctatatttctgtgtgtgtgtctttagttcctctggcgctgctgggttaggatctacccgactgagctggtctcagcactgttatttgaaacaatgtaaataaacctatagggtttattatatatactaagtgaaataagccagacacagaaaaaaaatgttgcatgatctcacttatagtgaaacttaaaaaaaaacccaaatacatagaaatagagtagaatggtggttaccagagatgaggaaaatacagagacacaggtcaaaagatacagagttgcagttacaaagggtgagtatgtctagatatctaacatacagtatgaggactataatagtattgcactgtgtactgaaaacttgatgacagattttagatattcttaccacacagacaaaaagaaatgtaagtatgtgagatgaagcttatgttaattagattaagtgtatgtacataaaaacatcacattatacacatcaaatatatacaataaaaaagcacattgggagatacatgataaatttctatctgcagttgctatttgcatttttaaagggtatttttattttttaaatttttagctgacaactgtataattatgggatacatgtggatgtttctggtatatgtgtacactatggaatgattaaatcaaactaacatttaaaaaaaaaaaaaa

SEQ ID NO: 49577 - DNA, 487 bp, Homo sapiens; identical to SEQ ID NO: 11755

SEQ ID NO: 49578 - DNA, 1410 bp, Homo sapiens
tttttttttttctttttttgtgacagaagcatttgtttgtttttatttatccaaatggggagaatgcaacatgtcagggcattacagacaaactgcagcagccagacaagagggtcagtctatggcagagtccaacatactcagtgcgaaggagccacagtgcgggtgctgcctggaggacttgtggcagcagggtccctttggatgaaggccaggtatctctgggcgaggcactgatgaccatccacatgtgcaggctgctgcttcagtcacgctgaaggtttaaagttcagagtcctacatgtaataattgcctcagaggggaagggcagtccatggtggtcacggtttccagtgtttttaaacataatacacaaagttattgccaaggattttgcactggcaaattatactatttacacttgcgtattcagaaaaacacagtaaatagatacatgatagatattttaaatagatttctaaaaaccaacttggtcttcagtagacccgagtgagctacagccaggagtcccatgccatgtgtgtaaccgtgcggtagggaaaggtttctatccacgactacgctcagcctcctcctgcctcccccacccttgggcctgacgaagggctaaggctgagcaggcctaccttagtccttagtgtgagggcttcaggtctagactggctgcacctcccaccttcccagacagagttctgcttggagccgctgagaagcaagtcctacaggctccactcctgcaggaccactacacggcgggtaaaccaggacacacaggcatggggctgcagggctaacggtatgatgaacctggccctaggccagccccttccccagcaccccctgccaaagtacccttgggaacaggcccatcagcctcactgttcctggaagtacgattgccctaatttatggttacctcaggaaaccttcttttgaagaagtggctgggaccaaccaaccacttagaccaaaggctcagcacaacaggccagacagatgggtccaggatgaaaggcctgagtccaaggatgctttggggaaaacgggataaacactgctaggagctaaaaagtatatggtgtctgcccaaggaaaggacaacagtagggagttcccacgtggaccagctttcattttgcctccataagccctggtatgctggaaaggacgtccacctggaggctggagacagctcctcagagagccagagctacccttggttcctgggagatggagagagcgaggccctctggtcggaggcctacaatttggctccccagtaacatttctaaaaatgagccctcctccctcggaaaggtagtaagtagtagcaaagcatctcccacagccatggtaggtcccatccctgagaagctgccacatgaagt

SEQ ID NO: 49579 - DNA, 864 bp, Homo sapiens
tttttttttttttttttcaaacataccaggatttttttatttttcagtgtaaaaatcaaacatgataaacctagaaaactatcagcagggctatttcttacagggttccagcaagggttagcattgttacatttcagaagctgactttctttaaaccatctttacagaggagtaaacttcacagttccacacatggctgggctccaggtagaactccataggagtgacgagggaaagtcaccactgggcagggagggcatttctgagaaatgcagatgagaggagaggctgtgagcacaggctgtgtcaaaacccagggcaagggctccctcccgccttccctcccagtgggaaggccaccctgagccccaaaccacattctgttccttcctcgtcattctgcagacaatggtcatccacagaccacacgtgtggtggctttggcaaccagaaatttaaaataaagctatggtttttccagtagccaaaatgatcctgcaccaaagctcatagactgagaaccttgagcatgcaaaaccacagtctgggtgaagggatgtctgctttgtaaatgacctgctaattctttgcaacccacagtaatttggtttctgtgaacccacagaagcaggcccaccaaaaagggccttgtctgctagcctggagtatacatgagtcactggcggtgggatcagtcattttttaggctgccccattttcctaacatgttaaaatgtgtgttctcagtcttttcaagagaggaagaagcaaagcggcacttacagagtgtgagatagacacagatctgtggcgagggattggggaaggtgggtggcatcttgggactctctccaggctttctgg

SEQ ID NO: 49580 - DNA, 324 bp, Homo sapiens
  misc_feature (1)...(324): n = a,t,c or g
gtatccactttggaaatgcatgaacactttacaaagaacatgcccgggtttttacattttaaaagttattctagacaatcactattggcttttttcttttatttttaaaaaactcacatagaggagacaatcagaaatttactatagtcccaagaattcagctacatgatgactcgaatttaaatttagattaatcaaatggtctcctgttctctgatttctggtggcttttagacactaatttttgagaactacttttttttttttaccaaacttcagggacactctgctagttttgaataagtaaccatcaangttnctaaa

SEQ ID NO: 49581 - DNA, 604 bp, Homo sapiens
ggggaaatggttgaccccatttgaccctgtcttcaccgaagtcgacactttccacctggacaagtacaagaccattaaggtgcccatgatgtacggtgcaggcaagtttgcctccacctttgacaagaattttcgttgtcatgtcctcaaactgccctaccaaggaaatgccaccatgctggtggtcctcatggagaaaatggggtgaccacctcgcccttgaagactacctgaccacagacttggtggagacatggctcagaaacatgaaaaccagaaacatggaagttttctttccgaagttcaagctagatcagaagtatgagatgcatgagctgcttaggcagatgggaatcagaagaatcttctcaccctttgctgaccttagtgaactctcagctactggaagaaatctccaagtatccagggttttacaaagaacagtgattgaagttgatgaaaggggcactgaggcagtggcaggaatcttgtcagaaattactgcttattccatgcctcctgtcatcaaagtggaccggccatttcatttcatgatctatgaagaaacctctggaatgcttctgtttctgggcagggtggtgaa

SEQ ID NO: 49582 - DNA, 1521 bp, Homo sapiens
ttttttttttttttttaaagatatgtcgttcatttattctgaatcttatattgatagataataccagaagatttcagccatagcagataaaatacagcaaatcctaaccagcacaggttttagtgacaaacgggcccgttccatggacatagatgacttcatcaggtaattacatttttgttttcctaagtgtttacatttctttactgtgacaccttcagattggagattttaaaggcttttaagcggtataaggtgctacctgggagagttattgcatagcacttccatggcatggaatagtatttggtgtagaagatggaggctagttagctgcagcagaatgaacattttctttaagaacagtagtaaagaacagtccgagccagaagattgcctttgtgttaatgtggtgtgcaggttccaatgtggtgtgcaggttcctcccttcctgctccttccccaactctcattcatagtcttagtcttaatagcttatccctccaaaatagtccataaggtagaaaaatcataatacatgtaactggatctgatttttaaaatttccttactgggaatagctgttgttaaatcaatcttaagcatacaataatgccagttagaatcctacctggttatccatttaggaataatacagttttgtagcctgaagcaagttctacacttctcaagtaaaaagctgtcataattatctaggtaatttagaccaaaatttgttttgcttgaattaagcaagtaagtcttatgaaaacagaataaggcttcaattaattacccaggtaattactaacctgtacttactgtttttaatcattaagatgttaactttcagaaggtcttgcctatttagccaattcacttttaaagcttccatgttctagaggctgaataaaaaatgagagtagattgttctaaaagtcattggtttgactttttctaagctggaaacacagttctatataactaagacaaatggagtttatattttattggctggctagcagtactactgagtcattttagatgttaatcctaggcattgaatactattcataaatatctactttgcttttttagaaatttatctggacctgtttctatgggccagccctaaacataacctcaggtcctaaagagaaatattttctctttttcttcattttcactaaatttccctcaaagttattgggcatgtgcagtttactaactagaatctattaagtacataggtatctacagagagaaacaatgtgtatttaatttgaatataaacaacagctcaagagaggaagaaggggcatgtaagattggtttttcatctgacttctgccaattccaaacagcttcttgttcagttaccttgaaacaaatgccagtgagttcttaggcctgggataatgaaagtctaagataattttagtcaaattcattacgacataaaggctctaatgaaagaggcaccaacatggcatggttttaaccaatacatatcttataaat

SEQ ID NO: 49583 - DNA, 317 bp, Homo sapiens
gcataccgtaagtgcttttagtaatactgctgttattggtgatggtgatgattagttcctgttcagcaaaatgagagacttgactgaaatcactataacatctcttttagagaaggaggcaggtgatcagatccacagcctctgaggtttttaaccacacactaaaatatttaaatgggcaggggacaggggaagctgtcacttgggccacagaggggaaggtaggaagccgaataacatcagccacccctgaggcctgggcctaccagtacagagccatgctcagccatctggagatagaaatgctcaggggtccc

SEQ ID NO: 49584 - DNA, 1077 bp, Homo sapiens
ttgccacccagcttccccccgccccaccggcagtgctccagtgagcccaacatcaccgactaccctgacggactggaggagggggccaggggcagccaggagggctcggagctgaactgtgcttccctcagctgagtcgccacccctgggcctttccatctcctgttttgcaaccaggatgaggacccctccatctccgtggattactgaggggggctcttgctttatgcgatgctgccttatttcctttagggtactgtcctggtcaaaatgacctaaggggaaaccgttgttgtaaacctctttattttggtgactgtgaccacttctttgtagccaccaattgtagtgaccagttgcctaatggtcactttctgactccagccttgccagcctgactcagatcctcatctctgggcctttctccctccgatgttggactgcctgatgctcccaatgacatatccaatgctcctggcatttctggagcaggaggtttgtcaggacaacacatataaccaccaaggatgtgttggcctttggagttcccctttaggttcctagtgatgtggaggtttatgggtgaaaaattagtggagagggaactcctctcccccattttgtgtagagtgaaaatagcctgaagcccctactcagcagggctctgggaatgtgccttccttattttagtttcagaattgctgggaaagttatccccactggtgggtgaggatctatcctcaacctacatccagatcctatgtgctgcttgcacagaggcctttggcttttgacccaggagggccgcgaggctggagctgccctgtctttcattgagccttagcatttccctctcaggcttcctctcaagctcaaggaactcacccccagataagaagctggtgcctcttgtctctctcatttcagaaacggactttctcatcatgctttcctatggtgggtatgaggggccagctgataccaaccaactggcctgtatctatctatctggatttgacttgaatttttaaaatgtgtatcgtttaaaaaaaaaaatgtttgcaaattttgcacgta

SEQ ID NO: 49585 - DNA, 900 bp, Homo sapiens
  misc_feature (1)...(900): n = a,t,c or g
atttttctattgtttttaataaagccacaaatatagaacttttaaacggatgtctcagactgtaagcgaaggacaaatttgtgagattcggggtctatgaactcttcagagagtatgatgaatggaattttcttcacattgactacgaggctgaagtccaagcacttaaggacgaacacaattccatcccgtaatccattagtcacagcctcatcactgacaagcctccactgtgtagagagccagcggtccttgtcatattgcagggtggggcccgcactgaggtacagttctaggaaggccttgggggtcatgccgttggtgatgcagaaggccacgtgctgcaggatgctctccatgctgtggtagttctgctgccgggtgatgcgcaggtacttctggagagccctggccatggaggggaaaatggcctgggcggcctccctagggtccatcacctcccctggggctttctgctgctcctcagcctggagacgctgaatgtggatgaaggcctcttccactgcaaccaccagccttgctttccgcttctttactcgccgttcatgttcggcctcttcataatacaactcgttgtggcttgagtccctgcgccgagcagctgcagcaatcatggcccgggactggccagtggcattgttactggggccatctacattgtagactttcagcccggccatatgcttggctgctcggaatttggaggctgttaggaggtttgggttatagatggtgaaatctttgtagtaattttctaggaccaccaatgctgctcgctttgccagctccttttcctgtgagtcctctgggctccgggcgcaaggctgtgggcagacgccgtgcgagggaagccatcccagctgtagncgctggcaggag

SEQ ID NO: 49586 - DNA, 876 bp, Homo sapiens
gttcctccaaaatctactttggcttcagctccgggtcctgtaccagatggaaaatgttttggtgatctggctgctgcttaaagccagttttccctaagaactccaaaggctaaactctactaggggcagagtgtgaggatagatttctaatcagagaaaagtggcctccaggagctttcatttatgtcttctccagaccaggttttcctgttatcttcctttaatcccctttcaaccaacaggtgaagttcttccagcccacagaggtagtaatatcatcttttctatctcctcctctcctttggccatgtaatgaagcaaaatattatttatttagcccaggcttgagagccactgtttgtggacagtcttcatctagattccataccctggcctaggcgaggtaaggctctctggttattgccaggatggagcccctctaccccagtctgctgtagggaataccctaattagttgaggcatgcttttggaatcctggcatgttggcatatggctggtctatcctttttaagatctctggttgggggtatctggatatggattaggagggacaaggagcctttttcttggctaatgttttccaatacttttttgaatggtgccagcccctccaggcatcccacccccaaatcatcatctttagtactaacagggtgtctggtcttagaagcctcccttcagatcccagctgaccctggtgactgcctggccttgatgttggctgcagccttctgatagaaccacatggattccacccacagctggccaggcttgttacatgggtcagggaatacaaatggcccccccccaggagcaggtgttggcctcagttttcagggacccttggtgttgctc

SEQ ID NO: 49587 - DNA, 374 bp, Homo sapiens
gaaaaattcatatgtttaggtcatagggaaggaggagttgttggctgttaaaaaaatactgcaaatggcctttgaaagtctagacatcttcatcataaacacaaacattcctcttcacaaagggacttcaagtaaccttaggctggagggcccacttgagtatgtttttcttctcattctttcttaccttccctccagccaacccaacccacattcagtgaccaagtcacgtgggttttacctcctaaatcttttcagatccgttcactgctcagccactctcctgacaccaccataaaccaagccaccatcacctccagctgtttgactgcaaaggcctcctcactggcctctgtcttcccctggccctgtga

SEQ ID NO: 49588 - DNA, 1458 bp, Homo sapiens
tttttttttttttttgctcgtaacaaagaaattttaatgcataaggcacagtgagaggctggaatcattaagcatcctcaaacacaaagggcccagcaggctgagcaaaagaacagagacactctccctcactaccactgggcgccctggacagtcccctgaggagtagggggcatccagtctttggcacggtgcctgggggcaggaagtgactagcatgatcccagctacccctctgtgggaatactgccaccaagaggcagctctttggtctggataaagtcagtgcaaatgtccaggggtcaagctctggaggaatgagggtggcacagtgccctagggctgggcagtctctgaacagtctcctcagccctcatgggcaacatgtgggcttcttctttgctggcagttaggtagaggttgctgtcatcactgttgatgcggacaacatccccaatgcgtcgagcccccgatttctccagctcagccagcacattggcctcaaaggtcagtgctgccacacggaagaagaattctcggacattctcaccagtgagagatgagactgcccagtactcagccttcatctcctgggccacctggagggcgtctttctccatcagcgcatactgagcaggggtactcagatccttcttggaacctacaaggaagagaagcacactggaagggtcattctccttcagggcatcggccagccactgcttggtatgttccagagatgccacatcattcaggttgaagacaatgatgatggcttgagctcctctatagtaggttgaagcaatgcatttgaacctctcctgcccagcggtatcccaaagctgcaaactggaagggaatgcccagcacctcaaatcgttccatctcgaagtccactccaatggtggccttgtaattcttatcaaaggtgtctttgcagaacctattaatgaggcaagtcttccccaccgacaggtcccccaccacaatgaccttggagatcttaaatctgcccacggtgcctgtccggtgctcctggcaggcgcaggtgacgcgggggtggaagtctttgtgcccgtgcaaagcggcctccttcctcaggcactggggcagctccgccaggacgcgatccctccgcacgggtgccagaatgttcatcctgcctgcggccttgcagggcgccctgagaaggcgccgaggccggatccgcgtcagcgacccgggcgcgtggagacccgacgatcacccgcgggccggggtgtcccgactacaactcggggccacggggaccctacgggagtccgcggtctcggagacgctacgaccaccgcgggccacggagatgaaacaatcacccggggccgcggcgagcccaaaatcacccgggccctgggcgtcccgaagatgactctggggcgaggagactcttcggccgccaattgggggcggggagtcccg

SEQ ID NO: 49589 - DNA, 1076 bp, Homo sapiens
tttttttttatgtctttacagctttaatctagcaggccagagatgtggccagtggggcagccagagaggagggctactgccagctgctgacggaacctcctccctccccccaccccagcccagaggggacaaacagtagggccccagccttcctggctgggatcttgggagcagagggactatttgaaaacaggcactgtgacccaggctgtcatctccctcccttgcccccagtaaaaatagcccataattccaagccctccccccaacccctcatagttctagttcagctcctgttccacttccctggggctctgtccccagtagggcccagggcttggcttggtctggggcctggtggctggaggactcctgccacccccagggaccagatgcaggtacaggatgagggcatctcccaaggttggcatcactgaaggggcagcagagacatggctggttcctcaggctcccgggtaagagggctgtggtggcatatagggaggaggagctgcagggttgtagactgggggcccagctgggtagagtggatattggggagcaggacccactaggtgggtacatgaagccaggctgtgggggtgcagggcccagctttggggtccctgggggttatgggtatactggctgcactgggatgcctgtcattggaatctcctggccttcaaatgggctctggagcctctggcgccggcggtacaggtagcaacaggaacagaggaagcagcagatggtggtggcaaccacagcaacaaagaggatcacagctgaggcgatgcctgctatggtcttggggctgaaggcccaggcagtgcttctgctgcctctcggtgataagcaaggtcaggtccctgcagcagtaccgatggtagcaggtcccgcagcagaaggtgaagaactcgcagttaaaccccggatgccaggagccattccggtccaggtaccacaggcagtcctcgccggccagcactagcctctggagctgggtgcccctcacccagcagagcactgccctgctccccctgtccccgctccgcggtggttcctcccatccg

SEQ ID NO: 49590 - DNA, 825 bp, Homo sapiens
ccagcaccagtggaatttcttctgagatgctggccagtgggcccattgaggttggctccttgccagctggcgagagggtgtcccgacccgaagctgctgtgcctgggtaccagcatccaagtgaagctatgaatgcccacacaccccagttcttcatctataaaattgattcatccaaccgagagcagcggctagaggacaaaggagacaccccactggagctgggtgacgactgtagcctggctctcgtctggcggaacaatgagcgcttgcaggagtttgtgttggtagcctccaaggagctggaatgtgctgaggatccaggctctgccggtgaggctgcccgggccggccacttcaccctggaccagtgcctcaacctcttcacacggcctgaggtgctggcacccgaggaggcctggtactgcccacagtgcaaacagcaccgtgaggcctccaagcagctgttgctatggcgcctgccaaatgttctcatcgtgcagctcaagcgcttctcctttcgtagttttatctggcgtgacaagatcaatgacttggtggagttccctgttaggaacctggacctgagcaagttctgcattggtcagaaagaggagcagctgcccagctacgatctatatgctgtcatcaaccactatggaggcatgattggtggccactacactgcctgtgcacgcctgcccaatgatcgtagcagtcagcgcagtgacgtgggctggcgcttgtttgatgacagcacagtgacaacggtagacgagagccaggttgtgacgcgttatgcctatgtactcttctaccgccggc

SEQ ID NO: 49591 - DNA, 366 bp, Homo sapiens
gagtttgagaccatcctggccaacatggtgaaaccccatctctactaaaatgcaaaaaatttgccgggcgtagtggtgcgcacctgtagttccagctactcaggaggccgaggcaggggaatcccttgaacccaggaggcagagattgcagtgagccgagattgcaccgctgcattccagcctgggcgacagagtgagactccgtttcaaaaaacaaaaaaagaagcttctgcctttgcctcctttccatctggattcagtgtagtttagaattgtgctttcttcactaattagatagacataagactcttgacctgattttttaggaaaacttgagtcaacgattgtgaatgtcatggagtcccc

SEQ ID NO: 49592 - DNA, 285 bp, Homo sapiens
ggagagctagcaccatgacttcaataccctgtatttacagactcaatgtatcagaaaggttacaaagtctaaatgcattattttaattctctgatgaaatggaaataatcttgaatagatctagaatacaatatcctaatcactagtttcaaaagacttgagagaataggccaagtgaagaccaaactgagttggtctagttggggctggagctaagtaactaaaccacagagattggttttgcttgctgggggtatagaggggattttcaggaaagtaagaggt

SEQ ID NO: 49593 - DNA, 424 bp, Homo sapiens
gaagaagggtgttgtgttacccactctatcgccatttcaagctggtgatgaaggcctacagggacactataaagatattgcaactgggtaaaagtgcagttttaaagtgtctcctggatattcacaaaatttttcaggaaaatgacccagcgtacatactgaatgatctctacatctcagactactgtgtgtggattcagaaagtcaaatccaaaaagttggcagctcttgcagaagccttaaaggaagtctcccttacaaaggcccagctggggttagaactggaagaactagaagcagcagcactgcttgtccaggaggaagaaactgcattaaaagcagcccattcagtttctgggcagcagacactttgctccagctctgaggcaagtgattcggaggactcagacagcagcgtgtcatc

SEQ ID NO: 49594 - DNA, 364 bp, Homo sapiens
gccttagtattttctggatgactattattattttatctttctaattcactagttatcattgaattttttccactgaactatggaaacaggtgcagcaagtgggtcctttgagcctttaccttccttttgagacatttcggaaccagtctctcaaggctgggtctgcgggaacactttgaatctacaagtgcagattgtctgtattgggattagagtggaaggaaggcatttggaagagggaacttagaaaatggaatgaaggaaataatcaataaaacaatttaagaaaatttctcagaaccgaagattctgtaatgaaagggcctattgagtgactccagcacaacataagaaaatagaatca

SEQ ID NO: 49595 - DNA, 2242 bp, Homo sapiens
tagggaagcgcgccgcgcacctcatggttccggggacagttagggcggcggatggagggtttggaatcacttgctaggagtcttgtctctctgccacccaggacatcatggcagctcacctgggtaaagcgatgcacgtgcctcctgagagaagctgctcgtcaggcccctgccatggctccagttggccgactgagacttgcctgggtagcccataagactctgacttcctcagccacctcacccatttcccacctcccaaggttccttgatggaagccggtggagaagggaaccgagcatctactccctacatagagaaagcaggtggaccacctcatcaagaaggccacaaggccagaggagctcctggagctacttggtggcagtcacgacttggacagcaatcaagcagcaatggtacttatccggctctctcacttgctgtctgagaagccagaagataaaggcttgctcatacaggatgcccactttcatcaacttctctgtctgctcaacagtcagattgcctcggtctggcatggtaccctctcgaagctgctgggaagcctgtatgctctgggcatccccaaggcctccaaggagctgcagtcggtggagcaggaggtccgctggcgcatgcggaagctcaagtacaagcacctggccttcctggcagagtcctgtgccaccctctcacaggagcagcactcgcaggagctgctggctgagctgctcacacacctggaaaggcgttggacagaaattgaagattcccacacattagtgaccgtcatgatgaaggtgggacacctctcggagccactaatgaaccgcctggaagacaagtgcctggagttggtggagcactttggccccaatgagctgcggaaggtgctggtgatgctggcagctcagagccggcggtccgtgcccttgctgcgggccatctcctaccacctggtgcagaagcccttctctctgacgaaagatgtgctcttggacgtggcctatgcctatggcaaactcagctttcaccagacccaggtgtcccagcgcctgggccaccgacctgctatccctcatgcccagcctgacttctggtgaggtggcccactgtgccaagtccttcgccttactcaagtggctcagcctgcccctgtttgaggcctttgcccagcacgtcctgaacagagcgcaggacatcaccctgccccacctgtgcagcgtacttctggcttttgcgcgtctgaacttccatccagaccaagaggatcagttcttcagcctggtacatgagaagctggggtcagagctgccaggcctggagccagccctgcaggtggacctggtgtgggccctgtgtgtgctgcagcaggcacgggaagcagagctgcaagccgtcctccaccctgaatttcacatccaatttctagggggcaagtctcagaaggatcagaacaccttccagaagctgctccacatcaacgccactgccctgctggagtaccccgagtactcgggtccccttctgcctgcctcggctgtggcccctgggccctcagcccttgacaggaaggtgacccccctgcaaaaggagctgcaggagacgctgaaggggctgctggggagcgccgacaagggcagcctcgaggtggccacgcagtatggctgggtgctggatgctgaggtgctgctggacagtgacggcgagtttctgcccgtaagggactttgtggcacctcaccttgcccagccaactgggagccagtcaccacctccagggtctaagaggctagcgttcttgcggtgggagttccccaacttcaacagccgaagcaaggacttgctgggtcgctttgttctggcccggcgacacatagtggctgcaggcttcctgatagtggacgtcccattctatgagtggctggaactcaagtctgaatggcagaaaggcgcctacctcaaggacaagatgcgcaaagcggtggctgaggagctggccaagtgacttgtgccagcagcatggactgcgtgcctctccgccggaggtctagctgtgggcggccaagaagggtcacccttgaggacaaacctctgtgcaggaccttggccagagtggggagggtggccagccactctgagggacagaacgtcctcttgtgtataataaacctttaattttggtgttggacccctggggccttcccaggcttggtcaccctctgcactgtcaaaaaaaa

SEQ ID NO: 49596 - DNA, 368 bp, Homo sapiens
gcttgacttacaatggcttcatcaaagaggatttcttgatcatatacaaataagcccagagagagacagcctggcccagttctggggcccagtagggccattcaggaaccagctacctctgttcactgctcagtcattcttagcagtggcggttgtgtaatccagcttcgcacctttgttttgggaaggcagattaaaggaatgggaacgggggcacacaccagcattgtctgcccccttttaaaaagcattcctggaacccctactccctgagttccactcccagctccttggccaaactttgttacatggctacctctgagtgcaagaaggctgggaaaatgggttggttttaaaccaggaagatt

SEQ ID NO: 49597 - DNA, 352 bp, Homo sapiens
gatctttttttttgcatgaaatgacactttcactgtcagtctttctaggagtctggcagaatccaggaccgggattacccttatttatgaagcgaccttagactaacagtggctctctgggtctccagacaattggccagggactctaaaaaccagaaacaaagttgagagaactccatgctggtggagaaaaacagctggcctttatcaccagaatgtgccccatagaagcagcaaagcagcaagcgacgttcttaaacaagggcctgtgggcctcgtcaagatctggaggaatcatctacgactcactgctgagtgagagggctaggcagtgtctttaaggtcctgccag

SEQ ID NO: 49598 - DNA, 1344 bp, Homo sapiens
cacgcctgtccctcccgcatggccaccaaggagctggaccttggatgcgcctaccctgctgaggtgggtgacaggggccccccacctccagggccttagaaccaccgcccctctccccaccccaggcacccctctttttactcaaaggcactgactgtaatccagggggactgggacctgcctccccccaacctctggctcccacaaggcccggtgttgaccgagccacaggccacggacaggggccggggttggggagactatgtcgccagatgccaggacgccctcaccccgtttgcatatgcaatgctagcatgggaccccgaaaatagacgctctgctgcactgagacttcttgtcaatgcccaaccggcgggggggtgtctccctgcccccgacccccccatacccccttctctgtgacacacacatcttctcgtctctttttctttcattgttaaagggaagctttttaagaaggcaattttcatattgtttctacgggatggttttggttcccttcccttcccacccccccttaagcctgtcagccccctccaaatgtctcaggatcccccctctcccctggggctgggtgacagcaccccggctgcgttcacaccccagtgtcacagggcgagctgttctggagagaaaaccatctgtcgtggctgagcggggagcttgaacacccaggccagggacacccctccccagctcccagagaggccccctgaggggtgagccctctttccacctttcccctattccatggcacccccttcgcaattaaaaccaactctaaaatcacagctgtcgtcctagccagtgggggcgaccggacttggggggtggagccctctgggacttccgtagaacaagggctgcggccaccgcgaacacttacacagacctcggggattgcactaaaccctcgttcctagctccgcactcagcttcgcctgtcctgcccgcccactttgccttaactacccgcccgtcctgggggccacagcctctgcatgggcccagagccgggacccccccagcccagccccgccctccccagactccgcgcaatcacatactgtatatagacgtgaatcgattttatttttattctttaaattaaggtcgtgataaaagtgttgccaaagatacctgctgaattctcgcgtttcaggaaacaaacaaacaaaaaaaaatgatatttgaggagggtcgtgttgactccatatgaaaggacacagctcaaagcttttttgtttggttgtttggggttttttgtgttttctttttttggggtgttttttttttaactgcctggtaacaaaaaaaaaagag

SEQ ID NO: 49599 - DNA, 420 bp, Homo sapiens
  misc_feature (1)...(420): n = a,t,c or g
gcagtttttaaaattaaactgtggtgacacatcagtggatattcagctaagtattttaaacacctgtaagagaagaatgtaacctattttggtgcaaaaaaaatattggaccatctcttacttgttgaaaagcctaagccgattcgtgaaggtcctgttggtgcaggtgacagtcttgccctgaggcctagactgttttgctgcagggtgccacccccgacgccaggcagttagactggcgctcctgggccagtggtgacacctggtggtcagggcacttgtctacggggcttccttcctacctcagttatgtttatttggcttacttcccacaagtcacttattctttcgttgtaggcagcatttattcaacaaatatgngntggcttctaaatatattatcttatttaattctcatag

SEQ ID NO: 49600 - DNA, 544 bp, Homo sapiens
aaaaacatttctgaggcctttgaagacctcagcaaactaatgatcaaggctaaggaaatggtggaattatcaaaatcaattgctaataaaattaaagacaaacaaggtgacatcacagaagatgagaccatcaggtttaaatcctacttgcctgagcatgggaatagctaacccagttaccagagaaacctacggctcaggcacacagtaccacatgcagctggccaaacaactggctggaatattgcaggtgcctttagaggaacgagggggaataatgtcactcacggaggtgtactgcttagtaaaccgagctcgaggaatggaattgctctcaccagaagatttagtgaatgcgtgcaagatgctggaagcactgaaattacctctcaggctccgtgtgtttgacagtggcgtcatggtaattgagcttcagtctcacaaggaagaggaaatggtggcctcggccctggagacagtttcagaaagggggtccttaacatcccgaagagtttgccaagcttgtgggaatgtctgtcctcct

SEQ ID NO: 49601 - DNA, 759 bp, Homo sapiens; identical to SEQ ID NO: 11856

SEQ ID NO: 49602 - DNA, 759 bp, Homo sapiens
tgtaccaaaaaatgtaaactatctcaatttttatattggtgaaatcaatatgtcttggtatagtggcttaaataaaacaattttagcctttctcagtttatttttctgcaaaaagattaaaaattgtacatgaagctcatgttaactttcttttggtcagtgctattttaaaggaagtatgagttgaaaaaaaattgaaataaactatatcatattactaggacttaatatagtggcatacccaggaaatgcttagtaagtgttcccttcacattttaaaatttgagtatacaatcatgtttgacaatatagaaatttaatttttagtgaaacaattctaaaccccttttccatagacacaagaaagatggcaaatttatgctattcctggaaaaatacattgtggcttagcaaataagcaagttcccacgttacttttgttttgcttcaagtaatacttctgccagttgtgttttatgaattaaacagggaacggcatgctgaacttgaaactagatttgttcctgcttttttcacaatgtgagtagttttgaaaagtcagatctggccatttgtctttcctagaatagcataactttgttcattgttttttttgtttgtctttctgacacagaaagactgatgatggtgtccactatgtattcttcaaaacatttggcacatgctgcactaacctagtctatcttttctatcttggaatttgctcatacaaaccctatagcctagactagatccctt

SEQ ID NO: 49603 - DNA, 610 bp, Homo sapiens
ttctaggtgatgctatttcttctatatctcctgtcttctttatcccaaatcccactcagcatatcttcagacctaggttgtaagaccaactttggattggatctagccagtgaattattatttccatggttggttccctttctgttaactctggtaatcaacagattgaaaacggtggaagaacttcttctgaaaattgcagtgggagcaaattcttgttggttttgtgctgcttgcctttctagatctgctcatcagcacttaaccttccctcctctaaaggttactaaagaagcctgaagtaggtaaagagtgctcctcagcttcttatccttccactctttacccagcagatttcattcaatgccttagccaaggagtccagcacctgtctcccctgctaataattgtccttagagatgctagtactttaatccaggtatagcagtttcccgttattttcttgcttgtcgttcccctacatttcctcctgatttcccaagactctctttgtggcttttgagggtcagccaaggagcaggcaagtgagtgaacaatcctcaggaaaagaaggaccattttagcttaacacttcctttttttttttttt

SEQ ID NO: 49604 - DNA, 1612 bp, Homo sapiens
ttttagaacaaaatatattttattttaattataccagcacagtaaggcccagaaagaccatggagttgcacaaagaatgttcagcaccagcaagataaaacagatactggcagtcagtgctaacggctagcacacaagcccctgccgcatttgtatgatctggagcagagcctcctgaacatcttcatccatgtgaccctgtgcagcactaagaaggtgtgtccgataaattgcaattacttcttggtgctgtctgtcagcatcggccagctgttgctccagagatttcacttggtgctgcagagtgtcaatcagctggctctgcctcttggtggggttcccacttgtgtaggtgagttgggaaaggccattgagtgcctgttttaatctttccacatcattaagcagttcagttatcttattatcttttgcttctatttgtttagcagattcttgtattcttctttgtaactctgtgattgttgttaaggacttatcacatcgttccttctgatccttaatttcttgctcaatgctgaaatgcagtaattccttctcatcttttgcagatatttccttctttttggcatgcaaaacttcctcacatacttcctcatactttctattcagattggccaatttttcatttaagctagaaatctgtgtctccaaatcactttttgttgctttatatttagacaagtcaactacctctctagtctctaatttttttaatgcttgtttagtattctgaacctccgactgaagtttggagacttcttccattttgttttggctttcttcttccttttctctcaagctggcttttatgattccaacttctttctcaaatgcttctttaatctggcaaatgctctgccaggggtacagaagagttcttttgattctccaacaattgatgcagtttggtcactgtctgctgctctttctcgtaacacctttgcatactcttcagttcttcctttagattttcaattgtgccattaagagattttttcagagcctcaacctgttccaatggaacatgttgtttttgcaaaagattttgcactgcaagtatctcagaagtctgtttggcattttcttctactagcttctctttcacattctttacttccgtgtatttctgtgacaagtcttttaactgtttgtttagctcgtctgtttttctgcttaatgctctttccatttcatgagacttctcaatgagaactgtcttatctctcaaatctttctgaagggtaaaaatctccttctttaacttgtcattctcttgcttgtttttcttgacttcttcttcactgacactatacttttgtgtctgctctgataactggtcttttagttctttctctgttgctttaaattttctctcgcactcctcaaagctgacaattggggcgtattttaccttaatgcattcttgtattgtgtcgagctccttcttctgggctttaatttcggcatgcagtgtcacaatctcttcttggccttttctgtagttggccaagatttcagcattactatcctggacctttctcatgctctgacttagcgagctcatctttgcctcgtgctctgccaggctgat

SEQ ID NO: 49605 - DNA, 1525 bp, Homo sapiens
tttttttcacactgaaacacatctttttattatatactaaatttaaaaatacaaatcttattaaaaatgcttatcaaacattgtatacataagtactgtcaaatactattgggttttgacattatgtacatttgctaaggttaattagaaacagaacaacgtaatatcactttgctgacactgaatttcagcagttaagtgttttaaaatttggcaactatgaagtagtgatctgcacaggaagatgtttggagaggtaaaataataagaaaacaaacggaataatgcagacatttctgcagtaagtgttaataagtagatttcttcctcatcctcttaactcattgtaacagaaattaaagtgcacaagaccaccaggaatacctgatttggtgtaccctaaatatacactacagccggctgtgctgccatattgagggtttcaattctttgtactgttcctgaggttttggaagttaattttgaatgtggctagcggaagggaggccaacactttctaaattgcaccaaatggccttaaagtgtagaaataccaaagaaaaaaatattaatttggaaatagattcaaggaaataatccctgtctactttgccctaggaataaaattagaataaggacacagttttacctctggaaaatgcttactaaaatctgtttcaaaagaccagacatgtacagcaagcacaatactgtcagttattgttcaccacttatatactgcatcataaataccaggtataaatacctgccgctaaagggtcactagaaatacaggtagaagcatgttatcactttacactaattttactcattaggtataatttgtaaaaataggtcaccaccccaccatacaatcaagaaagaggaaaagaaaagttgctattctacaaaagtgctccttttagctttcaaccccaatagcttaattttgggtaaaacaagattgtaaggtatggccatcagttctaaataagctgatgatgccatatatacatcctcatatatatatatgtttaaatttcagttctggtttaacactaatgtactagtacaaaccatttataggaaacattcctatcggccttatttacaaacacacaatgaatgacaaagatatggaaaattttaaaaattgcagataaatgtagtcatagtttactaaagataagacaaatttgcataactttttttaaaaccaaagaaaaatgtttagaaagaaacccctaccatatacagaatacctattggtcatcggacctaagaggcaaatcaacgtaaggatcgtgataaaatttttattactgtttcttttaataacatatcaatgagatctatttagagtactacctacaaatacacattctctcatgattcagtgagaatattaagttattgaatacatttttttactctcatggcacttacatttggtaacactaataaggtaaatttagataacacttaaatcgtgattatgaatgtttaattgaatattttgtcgacc

SEQ ID NO: 49606 - DNA, 536 bp, Homo sapiens
ggtacggctgatcaacaagttcaatagttccagctccagtttggaagagaagattgctgcgctctttgatcttgaatattatgtccatcagatggacaatgcgcaggacctgctttcctttggtggtcttcaagtggtgatcaatgggctgaacagcacagagcccctcgtgaaggagtatgctgcgtttgtgctgggcgctgccttttccagcaaccccaaggtccaggtggaggccatcgaagggggagccctgcagaagctgctggtcatcctggccacggagcagccgctcactgcaaagaagaaggtcctgtttgcactgtgctccctgctgcgccacttcccctatgcccagcggcagttcctgaagctcggggggctgcaggtcctgaggaccctggtgcaggagaagggcaccggaggtgctcgccgtgcgcgtggtcacactgctctacgacctggtcacggagaagatgttcgccgaggaggaggctgacctgacccagggagatgccccagagaagctgcagcag

SEQ ID NO: 49607 - DNA, 633 bp, Homo sapiens
gtcaataaagagagtgccgtatttcgcagattggagctgagctgtggctgccagaagatagcgaacgaatggaaactgaaagtggaaatcaggaaaaggtaatggaagaagaaagcactgaaaagaaaaaagaagttgaaaaaaagaaacggtcacgagttaaacaggtgcttgcagatattgctaagcaagtggacttctggtttggggatgcaaatcttcacaaggatagatttcttcgagaacagatagaaaaatctagagatggatatgtttgatatatcactacttgtgtcttttaacaaaatgaaaaaattgactactgatgggaagttaattgccagagcattgagaagttcagctgttgtagagcttgatttggaaggcaccagaatccggaggaaaaaacctctgggggaaagaccaaaggatgaggatgaacgcacagtgtatgtggagttacttcccaaaaatgttaatcacagctggattgaaagagtatttgggaaatgtggcaatgttgtttatataagtataccacattataagtctactggagatccaaagggatttgcgtttgtggaatttgaaacaaaagaacaagcagcaaaagcaattgagtttcttaacaac

SEQ ID NO: 49608 - DNA, 2206 bp, Homo sapiens
cagcgctcggccggccgcgagcccgccggcgggggaacgagcgtcgcagctcatgctgatcgctgtcctcctcctccccctcaggcggcgctggcggcgagccctgggacccgcggaagccggcatgctggagaagctggagttcgaggacgaagcagtagaagactcagaaagtggtgtttacatgcgattcatgaggtcacacaagtgttatgacatcgttccaaccagttcaaagcttgttgtctttgatactacattacaagttaaaaaggccttctttgctttggtagccaacggtgtccgagcagcgccacttgtgggagagtaaaaaacaaagttttgtaggaatgctaacaattacagatttcataaatatactacataggtactataaatcacctatggtacagattttatggaattagagggacataaaaattgaaacatggaggggagctttatttacaagaaacatttaagcctttagtgaatatatctccagatgcaagcctcttcgatgctgtactccttgatcaaaaataaaatccacagattgcccgttattgaccctatcagtgggaatgcactttatatacttacccacaaaagaatcctcaagttcctccagctttttatgtctgatatgccaaagcctgccttcatgaagcagaacctggatgagcttggaataggaacgtaccacaacattgccttcatacatccagacactcccatcatcaaagccttgaacatatttgtggaaagacgaattatcagctctgcctgttgtggatgagtcaggaaaagttgtagatatttattccaaatttgatgtaattaatcttgctgctgagaaaacatacaataaccctagatatcacggtgaccccaggcccttcagcaccgttcacagtattttgaaggtgttgtgaagtgcaataagctggaaatactggagaccatcgtggacagaatagtaagagctgaggtccatcggctggtggtggtaaatgaagcagatagtattgtgggtattatttccctgtcggacattctgcaagccctgatcctcacaccagcaggtgccaaacaaaaggagacagaaacggagtgaccgccgtgaatgtagacgccctaggaggagaacttgaacaaagtctctgggtcacgttttgcctcatgaacactggctgcaagtggttaagaatgtatatcagggtttaacgataggtatttcttccagtgatgttgaaattaagcttaaaaaagaaagattttatgtgcttgaagattcaggcttgcattaaaagactgttttcagacctttgtctgaaggattttaaatgctgtatgtcattaaagtgcactgtgtcctgaagttttcattatttttcatttcaaagaattcactggtatggaacaggtgatgtggcataaggtgagtgcacggtatgttcagatcacagtgccttatgtccgaatacagcaatatgtcaccgccgcagccggggcgcacgcgtgtgaaacaacaccgagcttgaatgtggaagtctttgaaccttttaccaaatcagtttgttttctttagatttgtcaaaaagttgtaatttgaatataaataattactttaaaattgtaatgacacttttacacgtaagtgttttgttctgggctaccgtgtcaacgaggctgctttacaacagctttatttatttttactttcatgcaatttttttacacatcttttggtggagtaaacttcaccacatccatgaataaactctcagttattttgaaatggcaaatttctcattatttaagtttggatctggaaaggacatgacttctgaaatagccgctgctgggttttaaaagctgaggtctctcaaagtgtggaggagacgttgccgtcaggcgggagccaagtgccgggaagatgtctattttttttcttgtgtattgaaatgtaaaatcatgatgtttgttatgactgctgatgcgattgtttttgtaaattttattgtggcatatacagtattgtcatacagttgaagagaaacaatgtttcctaatgtaagtgctctgaaaatgttgacactgtatatatatatatgaggatagtttgttttttttttgttttgggtttttttttttcagattgaaaaattaaaatagatcctactatctaaagaaaaaaaaaaaa

SEQ ID NO: 49609 - DNA, 403 bp, Homo sapiens
gcctagtttacactgtttccagggagtagttgaattactataaaccattagccacttgtctctgcaccatttatcacaccaggacagggtctctcaacctgggcgctactgtcatttggggccaggtgattcttccttgcaggggctgtcctgtaccttgtaggacagcagccctgtcctagaaggtatgtttagcagcattcctggcctctagctacccgatgccagagcatgctccccccgcagtcatgacaatcaaaaaatgtctccagacattgtcaaatgcctcctggggggcagtatttctcaagcacttttaagcaaaggtgagtattcatacaagaaatttagggggaaaaaacattgtttaaataaaagctatgtgttcctattcaacaatatt

SEQ ID NO: 49610 - DNA, 1072 bp, Homo sapiens; identical to SEQ ID NO: 11882

SEQ ID NO: 49611 - DNA, 598 bp, Homo sapiens
acagatcaagtcttttgctcatagacttttctgtggggttattaaaatgcaaaagctttattttttttaataatgccatactccattagtgtcagatgatggtatggaatttgttcccttgctttcccccactgttactgcttcagtttatagattgccagcagagttcagaaatagagcagggatttacccgttctttgcttggacatcccattttcttttgtccagacccatgttgggcaatcatgtatgaactgtgttatacttctcagtgctttcttttttctttttgataagatggatatcaaaaatagttgctgtgcaaaagttagtagtcttcttcaagaagaaaaccaattctttttctaataatatcctgtgaaattgcttcattcattcatttatttttaagccaaatgtcagcagagtgctgctgcttttatctagtaattttgatatgtaagtattaatgcatttttaaaagatgtctacattgaaacatgttcttcccagtgtcctgcttatgatgctttgttcagattttttgtaagagaccagttagtacactgggggtgtatattgtgtacatgtgtcattt

SEQ ID NO: 49612 - DNA, 6242 bp, Homo sapiens
  misc_feature (1)...(6242): n = a,t,c or g
attgaaaattggagataaaatttttattacttgtaaacaaaattctgtcaaaaacctgacaaattaaacaatacaattaatatgtttaatagaactaattacatatgagaggcatccaaaatccattttttctatacaaacatggtttgatatacagtcattttatctgtgtattaattggtttatgaaataacaaatagaaaaatcaagtatgcattatcaagttaaagaagcaggagagatggagctataaaaacaaagagagaagaatgttgtaaggagggcttaacaaccaggataaatgttgtagagagatcaattaaagtgatggcctagagatcacgggcttcctttggcagagccatgttggtgaagtgaaggaagtggaagccagaccacaatggttgaagaatgaatgtaatgtaagagccaagacatttatttgagtctgatagtaatgaaaaaggacgagaattttcttcttgctgttgtttttgtcatttcatgttcaaaaccctttatctcccatgtgggactgaaaactccaagatgggatctctgtttctgtgaggcctgtagtgcttagtacatccttgaatgtgtgaggctctcattggtataagtttaattcctgactgtggatgaaatctttaaaactttgcgggcaaaatacagaatgaatttcagtgagttcccatgtattaaacaaggtggcactggctggagacatgctgtccctgtgcccacaggagtagcagtgctgtgctcatcttcctgacccgctcttcacagtcttcaccgcctttcttcaggagtctcccctttggcttttccacagctatgaaacccacgtagtcggacaccctaatgcttctcctttcctgtttgggcgagatttataggaagtgtttcttctgctgaagcctggttcatttattctgccaaatgtatgcctggtattgtgttttttggtcttgaaacacgtttcacaaaaatcaaagtcatcacagtttctgcatttgaatctggatccattgataggaaacatctgacatccatcacacctttcacaacccccacactctgatgagtcacagatccccatttgtattttggtgtggtgacagaggctttgacccgcactttatcaccaatcttgatgtgagaagaacttcttggtggaggatagcctataagttccacatgaatgtacctaaaccagtagatgccccctttctgctgccagtcacactgcacattgagatcatgcaatccatctctgtccagcttgatgactttgccaacatcacatcaccttcgcacacttcttcgtatgttcggcagcatctaaccatcattcccacctgaatattctctctcacatatacagcataatcatcattacccaagaaaccagctcggtttttgtacgtctggctctccgtcacaacagcaccagtagacatggagtaggcggcatcatccatgtcctccaccacctcctcgtcagaatactcgtcggacaccgtgtctgcatctgagagctccgtgacctgtatgtcggagtggtccagcagccacccgaccaaggcttccacaccaggcaagccggacgcattcccggaagcaccagtgagagacttcagggcaaactcgatgttccttctgggaaatcccatctccatgagctgcaccacgatcggcagagcgggaacgggtgactgcttgcgcctcttcactctggcagggcggatgtgctgcacgttgacaggcgtggtggcctcactggagctgcagtcttcaaatcctgggctcgaagggtgagtggactccacaacggccagtgcagcagtctcaagttcctgtttatcaaatatggccttcacaggagacggctgggtggccgaggccagcagctgctgcaagaggatcatggggggctgcggcccttcaggagacatgtccccaaggtcaggtgataccactgctccatcatctgtgtgaacagttccagtctcctgaacagctggctgagacaggatctgccgcagtttatcctggtgggagaacagcgcccgacctgctttcaggatgtatagcttcaactgctggcaccgcagcaggtccaggtccacttgtcctgcaaaggcctgtttagtcgatttctttattttgtgcttttctaacttgcttccagcgaggttcaccaactgagcccagacagacagcatgggctctgtgaagggcaggttgttcacattaaaggccacggcagggagtggtttcagctgattcaatgggcaaacgcgacacgtccgcatgtcagagaactgcacggtgattttgcccttcaggttgatgcgagtcatggtgacttctccaaagtcatcgtgcacaacttggccgcccagcgacaggcgaccatcgatgcctccaaccacagccaggaccgccatgaggccccccacttcagggttctcggaatcagggaagtagtcatctaactgggcccctttggaaggccttcccgcaaagctgtgggtgatggagcggagctgggagttgatgtacttgttgatgaacccattccaccgagtcagggagtgcagcgtgtgcagcagtgccaccacctcctccgccagtgtgctgctgtgggtggcagtcagcgaggcctgcgggcacaccctgcgccgcctcagcgtggactctgaggaggaaaccaggggagaagctgctgcaccactcttcaccagggcacagggaagggagacggccactcacctctgagtgacggcactacacggctcttcaccaggacacagggaagggagacggccacccacctctgagtgacggcactgcaccgctcttcaccagggtacagggaagggagacggccacccacctctgagtgacggcactgcaccgctcttcaccaggacacagggaagggagacggccacccacctctgagtgacggcactgcaccgctcttcaccagggtacagggaagggagacggccacccacctctgagtaacggcacgtcagaggagcacatagtgagcaagctccccaagaagtcaaacagcttctccatgaggcatttcatgtccctcaccctttcggtcttgtcccatgacggaaggactgcttgcaacaaatgcacagctaagatctgcctctgcagcgaggtggcagtgaagggtgcgtgcccttccacaaccttcatgagcagcgtgatccactgcggggagctgagggcgccgcacacctgcagcgtgagagcgatgctctgcacaaaccccagcgtgcaccagctccggtgttgctccctgtacaccagcctgtttggagaagatgtcttgtccgtcgttccgctttccactaacattcgcagcagtccgcataaagtcttggtggcttcactctgcatgatctcagcatgaactccagcagacagacaaagagtctgcagtaagttaatagtgctggtaaacatcattgcagtggggtgaatgttcctttcagtttgttcggcttcagagtcgtcctctgtgtccgaatcctctgctgagggctgtgcaggggctggcagctctgccagcttgaggtcgtattttccttctttccccatcctgtaggagttggtgctgcctgtgtcccactggactcttatccacccgtcctctcccagctcaccaatcactcggcctaggcctggaggaggcccatctgatcgccccatttccagtccacacctctcatgacccttgttccaatcttcatcatggcagccagttctggccctgaaacagggagctgcacaggagccgtttccttccttgtttcttccaaaactgtggcagaagcaccttgggcagaagcattcatatcttcctcaacgctgtcacaactggggccaatcaggcgcagtgccgtctgagcgagggccagcgtgccggaattgagcaggaggtcaaggttgtttgcgctgtgctgcagggtgagcatgctgagcatcaccaggaggaagtgggcttgcgggatggtccccaggctcggtcccgatgggttctcattggtgatggtttgcaggggaaccggctggataccaagctctttaaatttggcactggcatccaccaaaacatttcgaatgttctgaacagcccaagcgtacagcttgccaaaggtgacttccagcagcatccgattaaaaggcgggatcaaatcaacatcctttaaacaatcagtaagaggttcccctatatcgattccctcaggaataagtctttgccatccacaaaacatcgcatacggcacagatggaagtaagaaattcttgctcaccagatacaattttaaaattgtatctatcccttccaggcgaacctctgctctctccaactgttttagtaggcactttctcttttccacatccactggctcttctttaagggcaaattcagcaattgtactgaggagtggagactgcggataaagaccctgcacattctgcttcaaccacttgtatttgtgaacatctgtaacagtactcaacagcggctgccatttgtccttgggtgatttaattgcaatgggtctcttgtccacatttattggactatgaggcaaaatgcaagcttcttctaaatcactctcttcgtttccaattttttcttcatcatccgtagattctggcttcttaggaactctctttttccttggttctcgaattatcttctgagctatcctcctccaatggggcaaagaacttaacaatttaaacttagacattatagagaggtcattacaaacagcaggtctcaattcattaaagaggaatctcaaacgtttgatgacaggagcgcagacctccttgtaagaacggccctgttcttgatgagtcttaatgagcgaacattttgcttggtagacaactctacaaacatccaccactgacttaggcaacgttctgtgctttacttgctcaatatcaagtgcacctgcatgaactaaagataatgccacatgacctaaatcttcatgttttaagaggcaacataacagcaagcgaccgacctcttccacgggatgctcggggggaaacatgatcggtgtggtcaaatggcactgcctacagtacctttctatttgacacaaaaagtccttcacgttgtgatcctgaatgttgttgtctgcaatggcttgcagaaatgcctgggaatggtcccccagggcccgtctgtgggagcagagtcgagatttgctggcaggtgtgccccctggggagctgcagtggtcctcgtctttctcctcgttgtagctgtagtggatctggctggtctgcaggcctccagagaagatggatgactgaagccatttggcacattcaatctcgacaggagacagcggtgtgctcattgctaaataggaagcgtgtaatccgagaagcaggcccagattcctctctgtgtctatcagaggtgaggagagactccccagatctggtatggtgacgccttcttggtcaggctccaaatactggccaacacaaaatgcgtgcatggattcccgggtgtcttcaaactgcaaagcagcttccaaagctaccactgggtcttcccctgcaaactgagcaagaatactattttctgttaacgactgtgtctggaagtcctttatatcatacactttcccgtcaatcacagtccagaagcctccatcgttattatggttctccaaatcagctatgcgtacaaatgtcactttctcattatttctacagttctgacctgtaaaaaatgactcttatgagacgtcggagagctacacagaggaggcatctacagggtgtagccagacggtctaaatgggccatgacaacaaccgccgtttgttgcagatcaatggcaagcctgttgtcttgtggaagggtgaggtacctcaggaaactctcactggggctcagaggaccagacaaaagcttttccagggagggagctatccgttctgggttgattctgttccagtgtatacaatttctccatctttaaccatttcattccacagaccacagagcccatctcttgtgaatgcaaggaaggaaaaatgacacgtgggtcggggcgagggtgggcttcatgctttgttcatccccagcactttgggggagggccgagcngggggcacatcacggggggatccagggattttgaggccagcctgggggccaacacg

SEQ ID NO: 49613 - DNA, 447 bp, Homo sapiens
tttaatcatacacataaactttattcatcattgtctttatgttatagtaggaaaattaaggcatttcataaaatatgaaatcaattgtacaatgcatgatacagtcaaagatctggacatggaattggtgtcttaactatcatttctcacctttaatcaataaacattattcctcttgaaagatgatgaaaaattactcatattaaatacagtaaaaataaacatcattaatcaaacactacatttctaacctctttacattcattaacagtgtggaatacaaacaatgatggtttttgttatggctttgtgtttctttaaaatgctaactaggccaggcgtggtgggctcaagcctgtaatctcagcactttgtgaggccaaggtggggcagatcacctcaggtcagaagttcgagaccggactgggccaacatggtgaaaccccg

SEQ ID NO: 49614 - DNA, 609 bp, Homo sapiens; identical to SEQ ID NO: 11889
  misc_feature (1)...(609): n = a,t,c or g

SEQ ID NO: 49615 - DNA, 1012 bp, Homo sapiens; identical to SEQ ID NO: 11891

SEQ ID NO: 49616 - DNA, 300 bp, Homo sapiens
ctcccacttaccttataagtaaaaaggttaatatcaagtaacttattagctcttaaagtaaaattgaacttattaaaagctatctatgatttaatagatttaataaaattccttcacgacctggtacccttgtgaaactgtaaaatatatcatatggggggagttttttaactcttattttttgaaaatttactgtagcttctatttcgtgaataagaatgttttgattttgatcatacaaataacttttgtagatttttgtttacttttgggggggttcccttagaagacattaaaaaa

SEQ ID NO: 49617 - DNA, 381 bp, Homo sapiens
tttaactgtgtgaacgccaaactaaagtttacagtctttctttctgaattttgagtatcttctgttgtagaataataataaaaagactattaagagcaataaattatttttaagaaatcgagatttagtaaatcctattatgtgttcaaggaccacatgtgttctctattttgcctttaaatttttgtgaaccaattttaaatacattctcctttttgccctggattgttgacatgagtggaatacttggtttcttttcttacttatcaaaagacagcactacagatatcatattgaggattaatttatcccccctacccccagcctgacaaatattgttaccatgaagatagttttcctcaatggacttcaaattgcatc

SEQ ID NO: 49618 - DNA, 1536 bp, Homo sapiens
tttttttttttcagaatatttatagatttatttataatgaaattatggtctaaatatttacaacatataggaaaccagaggataagtttatacaaagccagcctgcaaagtattcaaatgtgcaaaaatgacagttcaatatctcaaactattccctggttccagcagactagctccttcactttcacacatcaatatttgatacaaaaagttattttggcaaaatctgtaatgcccaagaaaaaggacaatttgcaatttcagtcattaagtccaaaatcctatagccagcagtcagatctctctgttttagctgcaaccagttctgggagagagagaccactgtatttcatttctgtgatgagttctgaccagttttagtcaagaagttttctctgacccagctgaagacaggatcttagaagggcaataaaaacagtaatggctatgagaccaatgtgcctgaaggtgccagctttggatcaccccaattaaaaaacacaatgaaaaaataatttcattttcctatccaggatccagctatatccaacagttttaaatgagacagcattttccaaaacagaaataatccaaaacaaaacagggatgcagatctgtcagaattaaatactgaaaaggacggtcttaaaatcatttccccactaataaatagtaaggctctgtttgtaaccagttatatatcaaaattgaccaaacagtagtaaaatacaaataaaactttctttatgtcagaactggggctattcacctggaaaaggctgaccaggtcaaatgtgtatgggaacgaccctgttaggatgctttgttggacaagcacatttcaccaactgttaaaaagcttctgagataaatttgtgattctaattaaattttaacagattctatgccactgcagaaataaggatttttgtggttgttaagggaacccctttaagaaaggggggcactgaatctctaacttctgcaaaggtccagatggttcccagcacaggccccagagtcttgttaaatcaaatgcatgcattattgctaagaagagtcactgagggtcaaaactctgttccactgtttcctagggagccatccagaatggcatctgttgtttagctcgtggttgtgatgaaggatattggtatcccaaactccagccctgtggaaaactacttgcatttttatgacctccatgttcctcctcttcatcagatgaatctgcagcataagccaccaagccaaatcccttctctgtagttttcatcttcttggctggataatctagaatagagaaaaaacaaccccaaccccatccccgccaagggaaaaaaaaaaataccataaattcgttaattaaaaaaaagatgttaattttaagtggttagttggacaccattttgaggtcacagggtcaatggtcacccaaaaacgttgaagatcacacgaaaaacagcaccagcatcagcaaatgtgaatccaccagaaccatgtaagaaaacagagaaagaaaaaagaaacacaaaa

SEQ ID NO: 49619 - DNA, 445 bp, Homo sapiens
ctccgccttctgggttcaaatgattctcctgcctcggcctcccagggtgctgggattgcaagtgtgagccactgtgcctggtctggtttgggtctcttgattgttcttcaggggcatgaggaagaggcgcttcctcccttcccttgggtgagggggcccagggtgattgggtggctgtttacccggcagccagtcgggccttcccaggtcaaacagttcccatctgggtttggaggaaggacccaggggcccttgtggctcactcccccacatcctgtctttgcaattgtcagaaagtgagaaacgaaaggatggctgtgagctgtgacctcagctgggcctgggctgcagaggtggcttccgctggagtaaagcaagagggcccagggttcatgctcttccctggaaggtagaaaaggacagaccaccagggagcctcaccgca

SEQ ID NO: 49620 - DNA, 975 bp, Homo sapiens
  misc_feature (1)...(975): n = a,t,c or g
tgagcatgtctttcagatactcgctaatggagaaattcactttagacctctagaccccaaaaccaagttaggcaagtgacaaaaagtaaattattaatagtctgtaaagtgggatgctggtcttacaaagctcctattcacatgaaccctatggttaattagaaagaacttgctgtctccagaaaagggaatggaaataataactatgtatcttcttttcatgtaatttggtcacagaataaggtattcaagttaagtctaatccaagtcttagagatctttaagtatcctaaaatagcagcctaagtagtcatcatgtaaagaagttgactttcaggaatgtcagcattgacctctccttgccactgttactcagctaaacataacttgccattcttaaaaataaaaaagctcccacccagaaactctagtgatactcagttttgacctcttactgcttccatgtgggacttcttttcagcttttaaccattggaattttctacctgctatgttcctctctggaaaatatcaatttggaaatgctgcctttcaaatcaatgccatgatcatccatattgttgagtttgttgttggtgttccagaagtgtccccattttacaactttatgcacacacctggcaaatcattaacatgagcattcaacagtactgggatgggtggggtgggggtagggggctcaccaacagaactggccagttgacattgcctgaaaaggcaccacctttaagggccagttgtggggttggtaagcacagttatgaaaatttctatctagcctccgttttgaatggttttaagaaattttgtatatggaggatggaaatgcttatatatttattgaaaatccttttatttgaaattaaaattatttggtatataattgtttgatatttgggggagggtttgganggganataatgncactgatnaantaaaaacctgtgatttgcaa

SEQ ID NO: 49621 - DNA, 1308 bp, Homo sapiens
taacagtattatgtatgtactggaaagcaaagaaatcttagagtcttggacattgtttatttgtgcaacaactagaaaggagcaatgaagtttatttcagttgtatttttccctaagcacaatctgcaatagtttatgtatgacagagataattcaaaaaggaaaactatatataaaagttgtatataaagtttgtctctgaaatatttctttgaagtttttaaaaaattgactcatgtttaaaaacaaaaacacatattcagagcattggacttttttaacttgttttcatctgtttatcatgacttttttatttctggtgtagagtccacattatttagtttgttgtacttttaaatttcaaagttcaaatctgaagaattagcgtttgtgatttcgggataccatgcagtggttttaatcccaggaaaaaaactatcaacaaaagttcgtttgattctcattatgtaactttgtagaaccatcctttctagatgggtccaccacagtgaatttgtaactttgaagtcaggatagaatatcattagattatctgtgagatagcattactatgttaggaccagcagagtttgggttggtaaaaataatgtttgctctattactgggttacagacatttcagcatttttaggttggttttaaatcactaaaaatatttattcggatttgcaagggatttaagtgactaaaaatcaatccatttcttgcccttcaataattgtccatgcctggccttttgttgtttacatgctcttctgcccagactgttagtaatctagggaccccctttggagctgataagtacagttcagccttttctcctcaaatatataatgactttaacattcctaagaatataggtatttctgaatgatttaaatttgaggaattttaatacataaaatacaatgtacaaactttctgcccactcagatctcttctccatcatgtacttagtatttcccattaacctacacactgatttttatgctactccttgtagaaacaaaattctggtttgactcagtttttgtgtttataaacttttggaatgtgtaccccgtttatgtgaagaattatgacctatcagtcatagctaaatagtgaacctcaaaagtgttaacttttgactattcatgtgaggtttggtatcttgcatttatgtacatggctgtaaattatgtgcatttactctgtatttatgttatctagctgacttttacttgaattgttcaaattttaaaaattaaaatacgctcatgaaaatatggctttttctgtaaaaaaa

SEQ ID NO: 49622 - DNA, 2137 bp, Homo sapiens
  misc_feature (1)...(2137): n = a,t,c or g
cggcctaccggcacgcgctggacaagtacagcggcgagctctgggccgagagcgtgggctacctggagatcagcctgcggtgcaccgcttgctgcgcgacagaggtccttctgccaccgcaactgcagcgccgcgtcgcagcccgagcccgccgccggcctcgccagctatcccgagctgcgcctcttcgggggcctgctgcgccgcgcgacctgcctcaagcgctgcaagcagggcctgccagccttccgccagtcccagcccagccgcgacgtgctggcggacttccagcgccgcgagccctacaagttcctgcagttcgcttacttcaaggcaaataatctcccaaagccatcgccgctgctcacacctttctactgaagcatcctgatgacgaaatgatgaagaggaacatggcatattataagagcctgcctggtgccgaggactacattaaagacctggaaaccaagtcatatgaaagcctgttcatccgagcagtgcgggcatacaacggtgagaactggagaacatccatcacagacatggagctggcccttcccgacttcttcaaagccttttacgagtgtctcgcagcctgcgagggttccagggagatcaaggacttcaaggatttctacctttccatagcagatcattatgtagaagttctggaatgcaaaatacagtgtgaagagaacctcaccccagttataggaggctatccggttgagaaatttgtggctaccatgtatcattacttgcagtttgcctattataagttgaacgacctgaagaatgcagccccctgtgcagtcagctatctgctctttgatcagaatgacaaggtcatgcagcagaacctggtgtattaccagttaccacagggacacgtggggcctctcagatgagcacttccagcccagacctgaagcagttcagttctttaatgtgaccacactccagaaggagctgtatgactttgctaaggaaaatataatggatgatgatgagggagaagttgtggaatatgtggatgacctcttggaactggaggagaccagctagcccacagcaaccaaagagacttcctcttggcgttcaggaaacacagattctttgtccttttcccaacagcccaggctgttgatacctcagagccttctctttactctccaaagtgaaaaggaagcccccgtctctctaaactgcatgtcatcaggggtgagcctgcctttcctatcttcacacctgccacctcatgtcacacctatctttctcaccnnnnnnnnnnnnnnnnnnnnnnnnnnnnnnnnnnnngctgggagtgcaatgggcacgttctcagctcactggcaacctccgcctnttggggttcaaggcaatttttgctgncatcagccttcccgagtacctggggattaacagggcatgtgcccacccgnnnnnnnnnnnnnnnnnnnnnnnnnnnnnnnnnnnnnnnnnnnnnnnnnaaggntggtcctcgaactcngtgacttngggatgaccnnnnnnnnnnnnnnnnnnnnnnnnnnnnnnnnnnnnnnnnnnnnnnnnnnnnnnnnnnnnctttctcacctttacacctgtcttcttatcctcacatctgttttcacaccttcatccctgtcttcctcatgttcacacttgtcttccccatgttcatagctgcctttcttaccattttggtttgaagggcagtcttctctggcttgtttttttgtttttcccagaaaatcagtattattttttaaataagaaaaacattcctagaagatgataattgtgaaaacctcctttggcttatttgcttttccagattttagtctcctttctccccatccgggaaagatggtggaagacataggctaaatttctccagcctcacaatggtcttcacttggtctgacttgtaccaattctagcacccactgaaaaacaagttgagtagagagtgtagagtgcagaaatgtggcttttgccccactttgcatctccaaaattacaacggttggccgatcccatttgaggacaatgcttagttataagtctccgagttggaaaaggaagaaagccagagctgtctagtttcattcattctttcagtaaatattta

SEQ ID NO: 49623 - DNA, 1554 bp, Homo sapiens
  misc_feature (1)...(1554): n = a,t,c or g
tttttttttttttcaggttttgaggtttattaaagtaaagaattagcaaacaatatgcaaaaacaaagttcttaagagttatggctttcaaaagcacaatatagtaaaacctaatacattttcataagtatcaaaataacagaattgaagcatgttgctagaatttcagcttctacaacataaacagaagcaaaacaaatacaaataagcagcagacctacagtgcagccactagcttggtcttcattatctgtatatgaaatatctttttaagaaaatgtgggcaggtagatacaaacattctatttccatgattacaatcctcttcgattttaaaataagtgaatttcaaaatacaacttacgccaaccatatttaaaaaaaaaatcacttgcctaaccattatcttctagagttcctatagttaaaatactttatgaataaatcaatgcaacatcatcttcaatgatattagaagggaaaatctgaccctaaaagattttttttttttttccacaaagaacttgggattctttggccttactggagttttgttatagctaacaccagtctgtattaattaagaaggcactattaatgagggacggaaaaatctacctgtacacaaaattctgtactttaacagcatcttcaaataaacctttaaaggataatggtttacgatcattttaagaattttaagaactgagttatttggacaagaaccatacaaacctttttcactctgccatgaatgatcgaagaatcctgctctaggactggatcttttcagagaaaataacttatcacctgttttactgcagttgctactagcaattattatatagcatgtgctcttcaaaacagaaataaaaattgatgtgtgaaatccctttcattggttttggtaaaccatccaattttgggctgtcatttcaattataatacagttgtattttaagagagaagataatccaatataacaaaggcttgataaatattgtcactctgtaatcaggacatactaaactgtaattcagcgaattccaaagaactttccaggtttctgtccagcaggtagaattctttgtttatgcagaagaaatgccttcaattctcacattcgattcaggcatcttgtgtgataagaaaagctcctaagaatcttacttatatcaatgagaaaaatgctgctgctctgggagacctgagattactccccaaaaagctgccctaataatatctgataccacctataaaccaccacttaggaaaactctctccataaaaatcaccaaacacttctaaaaccaccaggctacctactaccctaagatacttgctcatctagctgaacaatataacgatgacacacatttatattcatacccaagagattaggtgaggatttaactagtaagacaaagaagggatctgacattctttaaagttaaaatgtaagtccaaaatataagtcatcacaaaaggctgaactcagtaattatcaaaaaattcctcctncctcatgaagtaaaaaggatatttatatatttt

SEQ ID NO: 49624 - DNA, 6432 bp, Homo sapiens
  misc_feature (1)...(6432): n = a,t,c or g
caaaacaaaacaaaacactaagacatgtagccaggcatggtgggcacctgtagctactgcagagtagctgggactctgaaatactctgaaatagctattaatactgcagaatagctgggactttgaaatactctgaaatagctattaatactgcagaatagctgggactttgaaatactctgaaatagctattaataccnnnnnnnnnnnnnnnnnnnnnnnnnnnnnnnnnnnnnnnnnnnnnnnnnnnnnnnnnnnnnnnnnnnnnnnnnnnnnnnnnnnnnnnnnnnnnnnnnnnnnnnnnnnnnnnnntagataagtaaataaactcagatccagcaccttgcccatctccccgccgtgaagtgggtaggaagcagagagcatgggctagtccttctatattgactggtcttgccaatgacactccctctggggcctcttgcttttcttctgacaggtcacctggagcctgggggccggcccagctctctcaggattcagcagacattggaggtggcagtgaaggatacagtggtagtcaatgttatttgagcagggtcagcaggccctggagcttcctgagtgcacaatgcagaaggctgcttactatgaaaacccaggactgtttggaggctatggctacagcaaaactacggacacttacggctacagcaccccccaccagccctacccaccccctgctgctgccagctccctggacactgactatccaggttctgcctgctccatccagagctctgcccctctgagagccccagcccacaaaggagctgaactcaatggcagctgcatgcggccgggcactgggaacagccagggtgggggtggtggcagccagcctcctggtctgaactcagagcagcagccaccacaaccccctcctccaccaccgaccctgcccccatcttcacccaccaatcctggaggtggagtgcctgccaagaagcccaaaggtgggcccaatgcttctagctcctcagccaccatcagcaagcagatcttcccctggatgaaagagtctcgacagaactccaagcagaagaacagctgtgccactgcaggtagctccctgaggtggcctactgccagaccaagccccctccagattgacccaaggaagcctagtcagggctggaaatgcaaccttggaggtcatatgtctaaactcctactcacgtcaaaatgttcttttttttagtgttcctgattggggtcatgaccttgcagtgacagggtgctcccttccattccaggctgctggtgctgttgctggacaggtcttatagctattaatagagagtgcttccttatatgggcatatctgttttcctgggctgctaattataactccattccctcttccacccaacagctcttcaagatttgaagatagggtattacaatccccaagcctaggtgattatatagcccatatcacacgaatctcattcccttaaactcataaaaactaaagtcttagaaagtaccatactaagtactttctaagcattatctaatttaatttttcaaagaaccttttgaggtaggtatatgataacatccccattttacagataagaaaactgttagagaggataggcaacttgcccaagattctgaaactgcaaagtggtggatttgaatccagtcagtctggctttaggggctgctaagcataaccatgagtctctatttggcccacctcagcccaattctcccactccagcaaatccataatggggaggtgcctgtcctagtaggagaggatattctgggagacagtaacagccttggatttctctaactggaaggggagcccctccagttggggccttctctaggtccacccagggcatgtagaagataggcatggccaggaactctgagggctgttccttctctctgcttagactgcttggttcctgaaattttctgaccttgtggtatctgatgtggtttatcttcaggtagatgaacttgcttccaggtccagggcaagtttggggcctggggtgtggcttgctatcagggatctggtttgcctgatgttttctggggctgctgctcctagggagagggtattatcctgcctgcaacctccttttcctgcccctccttcctcagctgcaggctcaggccctccctcccaggagaaatccatttgtcttccctgggagggagtggacaagcagctgagaggtggcagggtagtaaaagccagtgttgaggctgctgctcctagcactgtgaatactcaaaatgcttccagcctggccttggactccctaaaatacccaggcagtgttttttttttgtttgtttgtttggttggtttttttttattttttatttttttgtttgtcacctccctggctttgagtgcagttgggctgcagtggggcgccaagatctccatccccatactttgctgggggttggtggggggctttgcccagaggccagctcctaagcaaggcaggctggagctatttcctcttcctttccttctccataccccacccctggcagcagaggctgggaggagtgttcaaaggagtctggcccttctttgacagagggaggccttaccagctgctcctggtctctcattaaactctttcatggcctttgggtgggtatgggatgatggactaggctgcaggggagagggtgggcagagtgaactggatctcagaaggctgatggaggtttcaggtgcgactgataggtaggcctagtagggggttggtaggtaggtgaattcccccttggaatcatacctctcaaacggcccttcccctccccagccaggattggaggtggggggagggaggaggaaaagagaaccagggaagcacccctctccagtcctgagggtccccacccaactcactcagcgccctccctctctccctccctgcccaggagagagctgcgaggacaagagcccgccaggcccagcatccaagcgggtacgcacggcatacacgagcgcgcagctggtggaattggaaaaggaattccacttcaaccgctacttgtgccggccgcgccgcgtggagatggccaacctgctgaatctcacggaacgccagatcaagatctggttccagaaccggcgcatgaagtacaagaaggaccagaaggccaagggcatcctgcactcgccggctagccagtcccctgagcgcagcccaccgctcggcggcgccgctggccacgtggcctactccggccagctgccgccagtgcccggcctggcctacgacgcgccctcgccgcctgctttcgccaaatcacagcccaatatgtacggcctggccgcctacacggcgccactcagcagctgcctgccacaacagaagcgctacgcagcgccggagttcgagccccatcccatggcgagcaacggcggcggcttcgccagcgccaacctgcagggcagcccggtgtacgtgggcggcaacttcgtcgagtccatggcgcccgcgtccgggcctgtcttcaacctgggccacctctcgcacccgtcgtcggccagcgtggactacagttgcgccgcgcagattccaggcaaccaccaccatggaccttgcgaccctcatcccacctacacagatctctcggcccaccactcgtctcagggacgactgccggaggctcccaaactgacgcatctgtagcggccgccgccagcccgaactcgcggcaaaattacctctcttgctgtagtggtggggtagagggtggggcccgcggggcagttcgggaacccccttccccgctcttgccctgccgccgcctcccgggtctcaggcctccagcggcggaggcgcaggcgaccgggcctcccctccatgggcgtcctttgggtgactcgccataaatcagccgcaaggatccttccctgtaaatttgacagtgccacatactgcggaccaagggactccaatctggtaatggtgtcccaaaggtaagtctgagacccatcagcggcgcgccctgcagagggaccagagcttggagagtcttgggcctggcccgcgtctagcttagtttcagagaccttaatttatattctccttcctgtgccgtaaggattgcatcggactaaactatctgtatttattatttgaagcgagtcatttcgttccctgattatttatccttgtctgaatgtatttatgtgtatatttgtagatttatccagccgagcttaggaattcgcttccaggccgtgggggccacatttcacctccttagtccccctggtctgaactagttgagagagtagttttgaacagtcgtaaccgtggctggtgtttgtagttgacataaaggattaagaccgcaaattgtccttcatgggtagagtcaggaagcccggtggcgtggcacaacacactttggtcatttctcaaaaaccacagtcctcaccacagtttattgatttcaaattgtctggtactattggaacaaatatttagaataaaaaaatttcccagtcagaagtgtatctgtgttaatcatgcacacttcgaagcagatcactatgcctttatctcgcacaatccccatggaaggccccgaaacagactgacactttgaaaaaaatattttatttatttggagtctagtgcataaattggttctcgggatacttgattactttccagctattgaaattaggggagggggaaatgaggatgcaaacctaagaaggttctgggcgggatgatttggggcagggctttttgaaagcaggcgcctgctttgctgtttttactgccttctttctagacacaatcgacttttacactggggagaccagagctcacttttctgcattaagtaacaaaaaataaactttgaaagaaaactgacaatcaaagaaaaaacacaagagaagttgtaagaagaattgagctatgaaaaagctaaggtgtagaaaaagaaaccatcatttggagacgcgtacctaagctttttctctaggaaatgctgtcatgaattcttcctttgtagtgatcattagttcatttctaaagaaaacaaacattccccaagatgtaaagtaataatatttcattaatgaaacataacaagtataaacaccttgtttactcctgtttcttatacaaaatgggcaaaaatgtcttcaaggatttataaccattttgtaaatattaatgtggcttctgctaggggtggacaacttcccggcttctatgggaggggccacttagaaaacgccttcagataaggttcaattcttttgtatttcagcaaagtcagcccacgcatctctatttggtttgacaaataatgcaactcctactacatccccgatgacacgaagtgaaattcctattgtgtggaaataatttaacttctaatcttctggtggaacaacaatcgtttctatttggatgtttgtatttcactaagtaatgatggctcaaaataatatttagtttccttgttcctttgtgctgtttttaaaatggcatgttagatttgggggtgggaggggatatccttttgctaaatttcactttatctgagcaggtttaaaatatatatgttgtagaagtgtatcaacagaataaatgacttcaatcgaaggcacattttacccactttcaaggcttaacattgttttctatgaaatttgcatccataggcagaattcctaattgtcttgtaagaaattattttttaagctattagagaaatcaaaggagagctcactgccttgcagggattacaaccacctttcttaactggctaaatattaactagctgaattgtcaggctgcttagattcagcccgattttccctcatctcctcttcctaccataaataataataaaaatacataatgtgtcatggctccaggcgttttccagcacagtgtgttaccgcaggagtatctgctgagtctgcgggtgtctgcaaagccccaagtgtcatttgcggcttagggtttcatggattagactttaaacggtgtctagcccggctgacattagcttcctctcacactcaggctccaaggaagtgtgggatcaggggctccctctccaggcagccacagctttccccgacgccctcctctcgagtggggtgagggcttggaccaaatctgccaccttctgtcatctctggaggttcccgagacttctaatagctcggatctgttcctgccattggcgtgagactcatctgaggggcgtgggtgggggtgggcggcgagccgtgggaggcgcgtttccgcgcggctgccagcccaggagaaagttggggcccgcgcacagccatttaaaacttcataaattataaacaagccgccttggccttcgcaataaattccgctccttttgagcctgcaattagtgttagaaagc

SEQ ID NO: 49625 - DNA, 478 bp, Homo sapiens
gggggcctcccaaagtgctgattacaggtgtgagccaccatgcccagccatgtcatttcatttaaagtcacaatttccatgaatctcaacaagtgaggacctgctatattttgttgcatgcagtttttctttacggacactaaaaggccccatacttaagattccatctactttaagtttaaaggattttcagaatcaccttaagtgtcaaatttgttagcaggattaattgatatgaattcacttattaaacagtaaactcaaataacatagacatcaaataacagacatctgctctagttaatgataaaatgtttatagattttatcaggtggttagtttgaaactaaatggtttacatctaaattaagggcaggagctgtctttcagacattcaaaacgcatttgtgtaaaatgacaggtgtttggtattaccaggaactcataatgacattttaataattattgtctaaatttc

SEQ ID NO: 49626 - DNA, 1961 bp, Homo sapiens
  misc_feature (1)...(1961): n = a,t,c or g
cttctgtgcaagaggcagcagccaggaccagaatgggccttgaacatgtgggagcttatttcactgtcacagttgaaactccctgaattgactccatgacagctgcaaatcggctacataggtcatagggagaattgggtcgaatagttggaggctctttcaagacgatgatttctgcagaaggatctagaagtctgggtagaaactcccctaggcacagctgcagattttctgcaatatcttgcccaaggtaagagcacaaatgatgatcactccgtaactgagggcattaatgtgatgaatgaactgatcatcccctgcattcaccttatcattaataatgacatttccaaggatgatctggatgccattgaggtcatgagaaaccattggtgctcttaccttgggcaagatattgcagaaaatctgcagctgtgcctaggggagtttctacccagacttctagatccttctgcagaaatcatcgtcttgaaagagcctccaactattcgacccaattctccctatgacctatgtagccgatttgcagctgtcatggagtcaattcagggagtttcaactgtgacagtgaaataagctcccacatgttcaaggcccattctggttcctggctgcctgcctcttgcacagaagttcgttgtcatagtgctcaccttgggaaaaggattaggtgggcacataagattccgatcagaccccaaccatgctgcatgtgtaaagaaggattgaaaataaaattgcactttttaggtacaaaatcataaaagctgtttcactaggaaaaggcagaaagcagtgtattaaggtgttgaattacgccagaagacctgaaatgccttgtacctacaacaatgcttaggcttttctaagcctcttgccacttttaaaattatccttcaggcataaatatttttgacagcagaatagaagaatgattcatgagaacctgaaccagatgaacagctactagttattttatcaaatacagatgacatttaaaaattcttaactacaagagattagaaatataaaccttgcctggctcttgccaggagataacaaaatgggttgctgatgaactgcacccttttacatgtgggtagaatataagctcacatggcagtgagatgttgaaaagtcaaaagagacctgtctctctcctttcttttctatctttaaaccagaaaacctcatactcagtcctcagtgaaagaaagtaaagtattaaggactttagacagaagagcattgtgtaacttgactgaagatcatccattaatagttattaggcatttaggtaaaattttctaatacctaaaaattgtcaaaaacagtcaatagggctactgctggcccaaagaccatttaggtccaccccccctttttggctctttttttttttcctgtgaaaagtttcactgtgttgnnnnnnnnnnnnnnnnnnnnnnnnnnnnnnnnnnnnnnnnnnnnnnnnnnnnnnnnnnnnnnnnnnnnnnnnnnnnnnnnnnnnnnnnnnnnnnnnnnnnnnnnnnnnnnnnnnnnnnnnnnnnnnnnnnnnnnnnnnnnnnnnnnnnnnnnnnnnnnnnnnnnnnnnnnnnnnnnnnnnnnnnnnnnnnnnnnnnnnnnnnnnnnnnnnnnnnnncctcagcctcccaaagtctgggattgcagacaagtcatcgtacccggccttcttttttgcccttaaaagtaagggatgtgggtttgtacaaaaaaaaaaaaaaaaaccagcatacatatgcaaaactatatatatatgtatatgtagagaaaaatacttcccattgatcatttttaaaaggcttctgattggatattgtgttttaaccaaattttaaagattaatggaatcatgaaagggaaaaaaattgatacaactatgcagattttataaaatgtgccaataaagtatttgtttt

SEQ ID NO: 49627 - DNA, 2199 bp, Homo sapiens
caggaagccgctgcatctggtcatttcatcgcatcagagtcacagcagacgtggaagattccatgtggtggggaataaagaaataactttatgctctcctgaaaaacagcgggagcctatgtgtgtgtgcgacactgtaatctcaaggagattcactcagagctgtctcagtccaactcctgcatgaccagatcttcccttagcatcttttctgtgatgaaatattatcttgtgttagagttaggaataggaactaacctgtaggagcatgtccccaaatggacatttgaatggactaacaaaaacaactggaaagactgaatttccgacacaaaggaatgatgggatcaaaaagaaagcagtgaggagttcttgagtcttgtagtacctattcttattttaacttgcttcatccttgatctacctgagacactaagaaggaaattagttttccaagagctctttgaacctgtctaggactgtagttaaacctatttgccctatgggggttcttcacactcgaaaaactatttccttatcaccaacgacccacccagaaaggccaatgaggccaaaatgtaacaatttttaacatttaaatataactattaaaattgcattaattgtgaacagtgaattaaagggttgtcttctccaggagacagtatgtggcacttttccgtaaatttcatttaatatataaaaatttaaaatcactcactgcaacatgcatttaaaatcttccaagaaggtagaggtatcattttctgttttgctttgttttaaaacagttgcctcaagcttctgtcttaagagtagtgacttagaatccagatatcttttgttttagaaaaacaagcaaaactatgttgcaagactgacagttgtaatgtttatttgccacagatcaaaggttcacaaagtatatcaaatttacatctacttggggtaccttgatagattattattgtttttcttttatctttcccttcaggaatttggaaactcgttgtcactttttttaattttaaaaatactaaattgtaatagttttcttttgccaaatgtgtgcgtacatattcaaagcaatgaaactatttcaagccatacaaccacaggggtgggaacccttttcacaaattttaatgtgtttgtatgtaaatagatgtttgtatgaaatattttcatgatagaatgaatatatttaaatgaagttgaattattccagtgctacttaaacacattacaaaaattttggtgagaattatctgagtctattgagatgtaatgcagatcaattttgatttttaaaaatcaaaagcctacaataactctgactctcagcaacttcctcggcgttgttgcacctgacgtggagagagctcgtaggcttccccagtgcctcagccgcttcctggtggaagttaggtgctaatggaggtgtgttcaccttttagtgatatcactgcaggcctttgaggggcctgagagtgaatcagaggcattagagacaccggtgcagttatctggagcacaatttctttgcagggcagcagaatcagaagccagacttggccatgtgaacctcgaaactcggtttcccggccgccatcaaccgccacccttactgcctagtcacacacgtcagggaggctgccctcagtggagttggggttgagaccccagggtgggacttcacagttttgccagcaatctctaccttctgacttctgcctcgcagagaggaaggagaggggagcatctggcaaggggcccatttctcagcacagtacatttcctgtctcagctctggaagactatgcacccaagcaccaaacttccaaccagagagagagacgtcctccgataacaaaaatccttgcttcctctgtctgtgactttacacacagttgttcaaagttgttaaatgtcaagagtcaatcacatccctaggacatacctcccaactctcctgactcttatgttattgaaaaaacagacaaacaaaaactcctttatgatgatattcaacttgagtggggttttttttccactttggtcctggatataatgaaatgatacatattaggataaattttcactgtgtatagtagcaatacgaacacacatgccaatgtatcaacatatctacttggttacattttggtttatgataattaaccttgattcatgtattgg

SEQ ID NO: 49628 - DNA, 1443 bp, Homo sapiens
  misc_feature (1)...(1443): n = a,t,c or g
ctcatgaataggtgaaagtttgctatttatttagtcttagaaaaacactgaaagaaaaaggcaggaaatgtagtacgcagtgtggaagaatggagctggccacatgtagttttagcagctgcagaggaaactggctgagtctaaggttacatatttctgctcagtaagggtatccatggtgataactctcatgatgacggtagtcatcctggtaaccatcctggtatccttggtggtaactatggtaaccatagcctgcatactcatcttctgggcagcgcatccccagtgactgctgaatcgccatttcctgtctccgaagttgcatcgaatcaattaaatcgtacacaatcaccatggaccacattggggaaggataccaggatttgacatttccgtcttttccgactagaagcatggagaagtactccgggctcacttgaaaatagttacgaatgtctttcaccaaatgggctggtacgtcttctcgctcaacaacagagctcccattaattgggaacagttctaacactcccccaacttcctctccaacgcctaaaagcttcagaatggttatgtggcgcagaccaaaattgcacgcctgaccactgagggcagagagctgctgtgaataggcccagtcttcatcgttaggagcagagatcaccagcaacctcctcctccaccggaacctggataggaagttctccagggactgctttttgtcctctttgcaaacaatgccctccttcttctgcttctccatatctttgattcgggactggaaagtatcgatcagatcaaacacagacttcattgttattggtacctcatagtattgcttgactctcagatccacatctgttagcaccatgaagaagtcattgtaggtcattccgtactctttcctcagctcgctgatgagacgctggtctaccaagtcttcatcatccaccactcgcatgggcttctcattatctagctgaaagtggtcgattttcatggtgctgttgttgacagggccgaagatggtgatcacagagattttcctggtagccatcttgcagaaactttccagatattcatcacgttgttgcacatacatattgttctcagccttgggagcagtgatcagaaggagtcttcgtttgccttcaaaggaccccagcaggtcggccactgacttcttgggactctgcgtgaagtgtttgttggtgggtttctgatagccatcctgttctgttttacctccttttttcttcttgctcttctctttctcttgcttgctctttttctcagacttcttcatttgcttttcactcttaagtaacttgtctgcgttctcattcttcatcttttttttcttctccttctctggtttctcaancttttcatgctttttagactcctttgcttttttaaggggaacattcccnacctgca

SEQ ID NO: 49629 - DNA, 495 bp, Homo sapiens
ctaatgggctaaaacaccataaggtattaagctccaagcctctgccccttctagccattctctaatccctactccattcagggaaataaaaggaagaaaggaagagagaattacttaaggtaaaatttttcagatacaaaaaggtgatctgtaagtaataatggaagcagtgagtcctcagcttctgctggtgggaaggttcatgctgaatatttagcaggcgctctctctaaagagaacagccaccacacttatggcagggactttgctgtcagtagctcaagaggcaaaatgaactacagactgggacaaaaggtgtgaagtctctcgtttacatagattggattcatcacaaatttaccaggtcaagaattccatataaagcgtttcagccttcacttgcagatcatgaaaaatatgacggagatccacagaatcctcagaaactgcatattgttaccagaataaaaaagtacaaaaaggtgtccatattgc

SEQ ID NO: 49630 - DNA, 627 bp, Homo sapiens; identical to SEQ ID NO: 11929
  misc_feature (1)...(627): n = a,t,c or g

SEQ ID NO: 49631 - DNA, 683 bp, Homo sapiens
tcgcggccgcgtcgacagtttataaatatttatgctcaaaatacagatcaactgaatatttttggtcttgtttacaagataaatcatactttaaaatgatacaggcccctcaagtgtcttaggaaaaagtcattggtgctataaaacctttcagtatcatttttgaacccattgttcagactttgctaggttttaatctgattccttgtgatttattataatgtagcagcatacttataaaagtggtctgtgctgagtcagatagagagcccagcccattagaaacacatcataatttaagaatatgatgcagaatgcccttacacttatttgtgcccagcttcccaaaaagaaaattgttttgttaagaggaaggcagttaatttggctagaatccaaaaactcattcagcatggctgttttcccttatttcaaatgaaaaacttttctaatactaaaatatgtaatcctgctttgctttaaattcccatgtctgtcactcaacaggaagcatagtgattcttaaatatttacggaacatttggtgagttgtaaagagaagtattattgcattgtaggtttttgcattgatgtgtcgatttttttgttttgtcccaagatttccttccagcaccttaatgaatgttcatatgatagaatgaaatcttgggacaaaaaaaaaa

SEQ ID NO: 49632 - DNA, 567 bp, Homo sapiens
cggacgcgtgggcggacgcgtggggtttggtttggagcaaaactgaggtagtcctaacatttctgggactgaatccaggcaagagaaagaagaaaaagaagaagaaaaagaggaggaaaaagtggattacacaatgacatggagaatgggaccccgtttcactatgctgttggccatgtggctagtgtgtggatcagaaccccacccccatgccactattagaggcagccacggaggacggaaagtgcctttggtttctccggacagcagtaggccagctcggtttctgaggcacactgggaggtctcgcggaattgagagatccactctggaggaaccaaaccttcagcctctccagagaaggaggagtgtgcccgtgttgagactagctcgcccaacagagccgccagcccgctcggacatcaatggggccgccgtgagacctgagcaaagaccagcagccaggggctctccgcgtgagatgatcagagatgaggggtcctcagctcggtcaagaatgttgcgtttcccttcggggtccagctctcccaacatccttgccagctt

SEQ ID NO: 49633 - DNA, 1248 bp, Homo sapiens
  misc_feature (1)...(1248): n = a,t,c or g
tttttttttttttgcaggaaaagagctgggaaagcacttgtctcctttattgaacatctgcagggggcacctctgcactgaccaggcagccagagaagcaagcaggcaggtggtggggggcaggggagcatggggcaggaagacgcccaccctcatttccagtccttgaaaaattgcttgaagatgggactctcatggccctgaggcagaatctccacctgagtgttcggggcgtactgcatgcgcgagatgaagccctcggccacctgcagggctgcctgccgctccttctcattcgcttttcgccccttccagatatagatcttgccacagagcccgttgtccagcacaaagcagtcatcagatatcagcagttcaagggcaaatgggctggagtcagccaccttggtcaggttcatctgtccagtggcatcagagaccttatacagagctgcggcctgggcatttgccttgtcagctgtgaggtcttcctcagggttgccctccttcagagcaggcttggggcccaggacctggatcatctcagcaggctcctccccatcagtgacaatctccacctgggccttgccctgtcgctcactgtcccggatggccagggccaggtccctcgccttgttgcgttccaggatgttggactttccaccacaccaggcgaagatgttctggcccaggtccaggatgaagcagtccccagtgttgaagctgtcccagttcagtgcccgctcggtggcacggatgttcttcttccccttcacctggtagagtttcttgatggcagctggggctcctgtggaggtcttgtgaaatgctgactccacaccaccttcctggtacttgaggccccgtgggaagtagctcatgaagaggtcagactcattgcncncttgctcgcggtgctgcacaggccgctctcccagcagcgtgttgaggtgcacagccagcacggcacaggccccctgctcatcccgggatgactgctggcctatccacaggtgcagatgggaaacctcttctgggccattgtgcagcactaggtaggagtcccccgagaagaagacgccctggttctcttgcgccacaggcaccggcttcagcttctccacccgccacacatgcaggcctggatcctgcactgagcctgggaatggagagccactctggggaatggctgtgtacatgctgtcttcagatctctgcttcgtaggttcgtcttccttccagcctgcg

SEQ ID NO: 49634 - DNA, 1220 bp, Homo sapiens
ttttttttttttttttgtaacaaaattcagatgtttaatttttttcaaaacttaactatactaatgaaaataaattatatgtatgaccaccttcaatatttttacatcatctttatacaactgtaacagtgctttcaaaagacattttgtgaaggacattaatttcacatttaaaacgtgtttcaaaaataagggaacattaaagaacatcaaattagtctgaaatatatctcacaatgctgagaggcatactcttctttatcaaattaactgtatgtgtgctcaagataacatggcttttaactaatgacatttcttgtccatttcagtaatttcttggatccaaaacaaaatctgtgtatttatttctttgaaaacatcatttgtcgaccgtcctttcactgccatggaatgatttgccttctcaatccagtggattttatggggagcttgcattttctgtgccactttctccaacaagttcttttcacacatttcatctgctgagcctgacacaaacagtacaggctcttttaaacgaaagaggtcttcatctctgagtttatgctgctgctttggatggtgcagtgggtaagaaatacaaatgagaccccgaacaaaatcatcaccatcatctggctcaatgtgacacattacagaagcagctgctcttgagcccattgaacgacctccaagaaaaacacctgcaagtttgtattctcctgatgtcttcaggtaattcaaaactgatttatacgccttaattctatgtacaatattaaggcctttacaggtaaatctcaggcagaaaaacccatgagatgcaagatgggatgccagtgacatcaaatgaggaagattcatatctcctgatgctccatgtgtaagaattattccatatgttaagctcttgttaggtaccaaacaaacagcatctagtaatttatttccaaaaggtatttttaatttaacctctgtatgactcattttcactgttgaataacaaacttaaagtgcatttacatctgagaagcaaaggacatctccctgaaaagaagattctgttgtgaaaggtgagttggcagacatggatatgacacaaaaactatgaatgaacacattcagtagctaaaataaacatttagaattacttccctaaaatctggtgtctttacatgtacatttttctacgggcactcagaattggttagagggccagg

SEQ ID NO: 49635 - DNA, 1280 bp, Homo sapiens
catgcttccattttttttagttttaaaccaccaaaccaatatttttcctttaaattttaatcttataatatagaaatcttatgtaaatgaaattttgtcatgtttcaaataaagagaactgaagtagaaaatagaaatgccagtaaacaacataatgtttaatttacaacttacattaggggtttgggggaatgctaattatatattgagaatatacattagaactcttcaaaatgggctcttctaatgaggtcactactgaacaaaattgttccctcttctgttaaatagaataggtttaaatgactagtcaaatgaattattttcttcttgttaaataaattaaatcttactttcttttaatgaccaaccttaggtaaaacaaaaatattgtaatcctagaaattatcctccagctttctcacctgaaaatctattgaagtgatccctggtcatcctaataatgggatgagggaagtttccagcagatttcaggctgttcttaaagtttttgttggtcattttctcaatagtacatgaaatcaagatgcttatgagcatggaaatgtatttaaagtttttgcttgtgtcctcctcagtcagaatagaaaagtaactgaaatactcttacctttctgtccttgataaaatagtaaagaaaaccaaacaaacccaggcctgatgggaaaaatgattcctttattctagcaacttactttctgttggtatgggaaatgttattaatttctattactaaagttcatatcacaaaatgatatttaataataaccttggggtaaatcatgaatttttttttctacgtgtgagtataaaagacaaaagttgaacagcatggaatctcattgccaaattattagtgaatgtatagttcaggtattctttgagacacacagtatcattaatttccgaattgtatttcagtgttattttttgtttgtgaccactaagcttctgtcttaatacaaagctgttaccttctacagaatttaagtctgaagatgtaaagagagaacaggccttgtgtaacagaagatactcttttttatgctccttactgtgatcacagaaaaattaaaaatccaagtgctctctagatttgttgataaacattttatgcttgcatttaaacttgaaatgtatgagcagaatgagacaatcagttaaatcagaaatgagaagtattataatgtaaaggccttgttttgctgtagcaataaaatgaccaagtgcaatgacttgatttaataaaatcatatttt

SEQ ID NO: 49636 - DNA, 1741 bp, Homo sapiens
tttttttttttctggcattaaactctatttatttagtatttgaaacatggtgtacatgtatgtatttgtataaacatttgttacatctaaaatccacaacaggtaaacaatctgtgctttcttttgtgtacaagtttggggtttacatctggatattttggtgttgtggagactcagtctgtgaagctaatcagattgcctcatattaccataataactgtgacagaagtgatttgctccttaaaggggctgttccttgcccagaaaaggtgtcacacttttgaactaataaaccgggtgtcacggaatcaagagaaacacagctgacacgatggagaaggtatgtgcaggggactcctggagatccaagtcaatgccgtaggggaccaacacaagccatggggtgacgctgggaattgagctctcccttttcaaactgttggatgtgaatatcaagtctccccaaccccacctggaggggtttcatccagcaagagcttgccttctgctcagcacactcctgggagtaacctatgagtgtcacagctgcaactccgaggtgccaaccaagcccagggctctggcttcttctggtgtcaggccgctcttcagggttcttcgcaaagatttccggttggcccgggatcgtttcctctccctcggcaccactcgctgactgggcacttgggtggctgaacttgacgatgcggtccatgatctcatcagctgcatcatctgtgacattgggcgagtcatcagttcccatagtccaggaactagtggatcctcggcttgctcggctgcgtgtgcggacgcccagcgcgggggtggcgtcctccacggagggggacgaggttttcagcacagccttcatgttctcgtgctcagccgcgtcctccgcatagctcagaccctgcggctggcttgggggcgccggagaactgccggagaacttgccagaatcggtgatcatcttccctctggtcttatttctctctctgtggttggcccgtttctgtttctgctgcaaaaccctttccctggttgtgcgatactctagtgcaaattcactaataatcctgcagaatttgtttatgttcacttcccgaattgcataaggtggatggcccataaagagtaaaaaggagtggaatctgttgattatccttctatggacaatctttaaaattataattcgctctgcacagtctttcaggaactctgacatccgttgttttaaaactggtttcatttcatgttttgcaattgccttgaggtgatcccatgaagctttgcatcttctctccatctgacataaattatcctgaagttgatcaaagtcaaccttggctgaccctggtgatggccccgatctccgaagtacagaatcggagctgttctgggaagttttctacccaccatggtgcacacatggtggagaagcgactgcttgtgcactgtgtctttgacttctggaaccttctcgaggtagcttaactcaaacgctttggcattagttccatttagaaagttcccaatggctaagagagtagacaggataaagcccaaggttttattgttctccaactggtctattccttccttcaggtccaggagtggttctgctacttccttttctgtagtttcataatccattttgaatgcccagaggtgaagtcgtgcagagagctcgctgatggaggacagggtgaggaggaactgctctgcactgcccaggggg

SEQ ID NO: 49637 - DNA, 616 bp, Homo sapiens
ctcctccttccctcccatcgtcctcctccacctgcgcctcccttgtctgaacttcccaacgccttcctattcctttccaactccttttcccccaaatttcactttccttctcaggtctcacctcagccccccccttctccctgatttctcggcctctctctctgtgtgaaggggcctctccctaatgtctcctccttcccccctcttctctctcctgcggcccagcctccctctccctcctccattcctctctccctgcccttttcctgcctgaagagcagaggtgaggacctggggacccctgaggggcaggccaggaggagctcgggcgcaggccaggcccccttggtgaagcagaggctgaaggaaaggggtctgggtcttgtccctaggaattctcctccctcaggagattgggggttgggggaggcagcgggtgatggctctgaagctgaacccagggcctggctgtggtcttcttggtcttgctgccccctgtgacccaaaggcatgggatggacagagatgcctgcccccgtgaagctggttggggagggcagttcaccagcatccatagagtaataaagtcactgtgtgtagaaaaaaaaaaaaaaaa

SEQ ID NO: 49638 - DNA, 1818 bp, Homo sapiens
gcggccgccccctcgcccgtcacgcacggcgtttacagactctcctgcggcaggcggtggaactacaaagggatcggtgcctatatcacaataccaaacttgataataatctagattctgtgtctctgcttatagaccatgtttgtagtaggaggcagttcccatgttatacgcagcagatacttacggagcattgtaatgaagtgtggttctgtaaattctctaatgatggcactaaactagcaacaggatcaaaagatacaacagttatcatatggcaagttgatccggatacacacctgctaaaactgcttaaaacattagaaggacatgcttatggcgtttcttatattgcatggagtccagatgacaactatcttgttgcttgtggcccagatgactgctctgagctttggctttggaatgtacaaacaggagaactaaggacaaaaatgagccagtctcatgaagacagtttgacaagtgtggcttggaatccagatgggaagcgctttgtgactggaggtcagcgtgggcagttctatcagtgtgacttagatggtaatctccttgactcctgggaaggggtaagagtgcaatgcctttggtgcttgagtgatggaaagactgttctggcatcagatacacaccagcgaattcggggctataacttcgaggaccttacagataggaacatagtacaagaagatcatcctattatgtcttttactatttcaaaaaatggccgattagctttgttaaatgtagcaactcagggagttcatttatgggacttgcaagacagagttttagtaagaaagtatcaaggtgttacacaagggttttatacaattcattcatgttttggaggccataatgaagacttcatcgctagtggcagtgaagatcacaaggtttacatctggcacaaacgtagtgtactgccaattgcggacgtgacagggcacacacgtacagtaaactgtgtgagctggaacccacagattccatccatgatggccagcgcctcagatgatggcactgttagaatatggggaccagcaccttttatagaccaccagaatattgaagaggaatgcagtagcatggatagttgatggtgaatttgggagcagacgacttctgtttaacttaaaattagtcgtattttaatggcttgggatttggtgcaaacaaacatgattgatagctggacagacatgctcgtcatgaaaaaagaaccatttctgaagcccgattggggccaaacatttacaccttgcttcatagtaaccagttgagatgaagcacgtcgttagaacgttgttggacaccatgttgaattattcccccatcggttgtgaagaactgtgctacattcaggcttacccattgaactcagtatatatatttttttccttcctgtcttttgtctggcaggataccattcttgttgctcttctgtgtaatgaagtttaaatgcttgtttggaaaactttatttaacagtttagaaggcttgatagaaagagtgcattagtctgaagagtatacattggataggaaagaatttccttcttttgtttctccaaatctttccgccttatttagcttgagatctttgcagcttggttcatggattctagccttgcccgttgcgcagtatatactgatccagatgataaaccagtgaactatgtcaaaagcactctcaatattacatttgacaaaaagttttgtacttttcacatagcttgttgccccgtaaaagggttaacagcacaattttttaaaaataaattaagaagtatttatagga

SEQ ID NO: 49639 - DNA, 1452 bp, Homo sapiens
agagatgtcgctgctgcggtcgctgcgcgttttcctggtcgcgcggaccgggagctacccggctgggtctcttctgcgtcagtcgccccagccaaggcacacattttatgctgggccccgtctgtctgcctcggcctccagcaaggagctcctcatgaagctgcggcggaaaacaggctactcctttgtaaattgcaagaaagctctggagacttgtggcggggacctcaaacaggcagagatctggctccacaaggaggcccagaaggagggctggagcaaagctgccaagctccaagggaggaagaccaaagaaggcctgattgggctgttgcaggaaggaaacacaactgtattagtagaggtaaactgtgagacagattttgtttctagaaatttaaaatttcaactgttggtccagcaagtagcccttggaaccatgatgcattgtcagaccctaaaggatcaaccctctgcatacagtaaaggtttcttgaattcctctgagctttctggacttccagctgggcctgacagagtaaggctcactcaaggatcagttggctttagcaattggaaaactgggagaaaacatgattcttaaacgagctgcatgggtgaaggtgccatctgggttctacgttggctcttatgtccacggagcaatgcagagtccctcacttcacaagctggtgctggggaagtatggggccctggtcatctgtgagacgtctgaacagaaaacaaaccttgaagacgttggccgccgccttgggcagcatgtggtgggcatggcccccctctctgttggctccctggacgatgagcctgggggagaggcagagactaagatgctgtcccagccgtatttgctggatccctccattaccttggggcagtatgtgcagcctcagggggtgtcggtagtagactttgtgcggtttgaatgtggagaaggtgaagaggcagcagaaactgaataggttccagagacttttggcccaggaggaatatttacttttagctctggacatcattacaaaaaggaatatttcccaaacctcttcagaccgagaatgcatgggtaaaattattaaatagttgtataataaaaataattttttccttgtttgcgtaatactggatttagcttttctgtgcctttcaaaaacaacaggtgggccttattgacgtgatagtgtcgtggagaacaggcatcaacaatactgctgctcccttcaacatagatttattatggtatttctgaaatttctaacttatatgttctgtcttacaccttttatgacatagaactcttttgttctgtttttgctttgcgacactgtgaaccgtgcttctgcctcggaacctccctagttatattacttgtgccacatggatttctttaggattattgattcaaacctagagttgtctggaaaatgtgggttc

SEQ ID NO: 49640 - DNA, 4010 bp, Homo sapiens
attacaacggtgatggcgggcaagcggtccggctggagccgggcggctctcctccagctccttctcggcgtgaacctggtggtgatgccgcccacccgggcccggagtctgcgcttcgttaccttgctgtaccgccatggagaccgttcaccagtgaagacatatcccaaggacccctatcaggaagaagaatggccccaggggtttggtcagttaaccaaggaggggatgctacagcactgggaactgggccaggccctgcggcagcgctatcacggcttcctaaacacctcttatcaccggcaagaggtttatgtgcgaacagaacttttgaccggactctcatgagtgctgaggccaacctggctggactcttccctcccaacgggattgcagcgcttcaacccgaacatctcgtggcagcctattcctgtgcacactgtgcccatcactgaggacaggctgctgaagttcccgttgggcccatgtccccgttatgagcagctgcagaacgagacccggcagacaccagagtatcagaatgagagttctcggaatgcacaatttctggacatggtggccaacgagacagggcttacagacctgacactggagaccgtctggaatgtctatgacacactcttctgtgagcaaacgcaacggtgcgcctgccgccctgggcctcaccccaaaccatgcagcgtctcagccggctaaaggactttcagcttccgcttcctcttcggaatctaccagcaggcggagaaggcccggcttcaggggggagtcctgctggctcagataaggaagaacctgaccctaatggcgaccacctcccagctccccaagctgctggtttactctgcgcacgacactaccctggttgccctgcaaatggcactggatgtctacaatggtgaacaagccccctacgcctcctgccacatatttgaactgtaccaggaagattctgggaatttctcagtggagatgtactttcggaacgagagtgacaaggccccctggccgctcagcctgcctggctgccctcaccgctgcccactgcaggacttccttcgcctcacagagcccgtcgtgcccaaggattggcagcaggagtgccagctggcaagcggtcctgcagacacagaggtgattgtggccttggctgtatgtggctccatcctcttcctcctcatagtgctgctcctcaccgtcctcttccggatgcaggcccagcctcctggctaccgccacgtcgcagatggggaggaccacgcctgacaaccactcagcccccttccctccacctcctaggggaggtgggctgggccctcgctcctgactgttgctgctccccagcccatggacaggagatcctgggttgggcctccctctgatgaccccagccagatgagcgagtggggctcagcgtggcccatggtgcctgtcactcagcattcccatgcctgatgtttaccaagtgctgtgttggacactggctttctccaaacaggatttgcctcctccacgctccctacacacctgagatgtaaactggcagtcagtgttcactcaggacctaggattagaaaatggcagagttggtgctggatccaccttgcacttctatcaagccctgttctttttcctccagcctgaagtcttcggcaaatagctcagagggacacggtcttgcctctcagtgcttattttagtgggaaaaacagctaataccaggggtacaaacattggctcccaaggaactggatcacccaacagccagccagccacatttccctgtgtctggctagagccaccattagactcagacagaatgcttcaggaatcgttgtcaccccttcaactggagcaggacggaaggttgtctgtacttgggagggagtggggagtggtgggaagggagttgcttgtcacacgaatcaggaaactgctctccctcagctgggctggggtctccagggacctgagctacatgcaggttgtgagctggaaaagaaagttctagactgtggcccagaatagggctggggcagctcccagagaatgaatagtgctgtttcctattggactgatagtgctgtttcctgtgctttttcttcatttctgagacgcaagaagctctctgaccaggtcacttctggaagatccacgcagaagctcagtcggtatggttttattggccatatcaaaagtgagcacaaatcaaataactgcttgatccctctgctaccacccactgagaggagaaaagtcatttagttccaagataaccttggttccaggctagatacagaggggcccttgggacagctgtgtcaccaactctggagcagtctctggaggcaagtccagagcattaacataaaagtgtcccagtcccacagtgccccaggtcccagcacccctgctccaaccctaaccttggatacttttggccctttaacaaatcgccacctctgcttgcaggacttgatcccatgtgtgggctccaaggccttgtctggcccacaccttctttagtgtctctcacttccgtgtcctggcttcctcctggctccagatgagaatgtggtaacccattgcagaggccagcgtgtcccccatgggattgaattcattaagcgaactgatgccagaagattctgggtcatagagctgacacatcatcttccctgagtttccatcgaacacgtcgatcgtcctcaattcataaggggtacaacttttgaaattaggatctgggtatcggcccacaacaatgaggttgtagcgaggatgccaggctgccttgatgggtgtgaggtgctggaagtgacggtgagggtgcgggatcaggcccagggggcagtcccactgggaagcagagtaaactcggatctcgctcttctggtccgtggtcaggagccgggctccatcgggactgaaacaagctgcgttgacaggatgcctgtgcggcagcgagtagaggaagctggctttccctctaacctggcgcaggtcccaaattttcactgtttgatctacggaggctgtggccaggaaccaatcacagcatgggttcagggccacatgcgtcactttctttttgtgcattctgagattccaaagctctttgccgtccatgttcagcaggatcacgttccccacgttgtctcctgtgaccaccattcggctactagcagacacatccaggctacaaaaccagatgttgatggtgtctgagctggcaaaaactcgtagaatgttgcctttaaagtcttgcagcctagttgttccctccattgaggaggcgtaaaactggttggtattgagagggttaaacttcagcccagtgatgctccctccagctccaatccctttgatgaaggtgggtttgtccttgatgccaaaattccagagcatgatatctccccctttggaacccacagccacggtgctggggtgagttgggtgccacgcccaaggatgtagccctcctgtcaaagggggcagccttttgtaatatccggtaagaatccagagtgtgcaaaaaggactgctggagcccctgctggacagatggccaggaagctctgcccagcttatgctggtggagggtcctgacgatgctgcggcatggtggcaggatctgtgggccagccagccccacccagaggcagtctgagtcacatcttctgctaggaccggagcccttcgcacagagcttcttggcctcgggctccagctccaggggactcctgctcctcttgttcctggggcgtaatacaatctcggaggtcttctgggtttctgggcgtttcttgggagccatcgcgtcctccgtgtgaaggggtactgtgctctatgcgaagatcatggagggaggattgagaggcctctggggagaaacaaggcggggactacaaaactgcggggccacaggtagccgagctaagccaacttcccgccaaacatgcccagggcttgttcaaaccagcttggagctc

SEQ ID NO: 49641 - DNA, 477 bp, Homo sapiens
  misc_feature (1)...(477): n = a,t,c or g
gaaaaataaaaaactcttactgctgtgttattatatttggaatatcttggatttttaaatttatagtctatatcgagggactacaagaaccatgtagaatattgttagacgaactaaaactccatctatgacctttgttctaatggtatgttttcagagaagagttttttaggatgtccagctacttggctgtttcacaaggtccccacagttaagaaatctcaagtatgtaattgtgatgggtctacgtgtgatctgtggcaaaaccatctagaccacctgaaccacatgccgtgtaggtttgtgctaaccagtagctcttgagggcaagcgatagggacagaagaagctctgcctcaggcgagtttaaggaaagggagaatggcactcctaactaaagtttctttgtatgcttgtggcgtatttttgcaggtttaggaatctttaaaacccngctttcttggatacaaacagggg

SEQ ID NO: 49642 - DNA, 986 bp, Homo sapiens
  misc_feature (1)...(986): n = a,t,c or g
ggggaagatgacactcagcctggaccttgtgctaattcgccactctgtggccacaccacgatattgagatgacttttgtggggcctggggtgtttcattcagcctggtggatatggaggcaaataaggtcaccttgtgagagtcactaggcccgagattgacggccaatgggtctaggctttgaatggagttaggaggacagaagaaagtcataatttctgaagataacaattgcagcacagaagtggaatagggccatgaatacctgaaaacactaacgttcttttttcctgtggatttatgcatggagggcttcgtataatgacttggtactaccactgctattaggaaccattggaattctgtgataattttggattgctttttaattcaccaagactactgtggatgatgtcagccacattatggtgtgagccctaaatttaaggtcaatatcatgtgctaccttcatatctggtgatactagtattacctcaaatggtctgagtacaaatcccccttcccactctgctcttttgtataatgtgtcctagcctaactacccttttaatcaagaggactaagcagagttcctgtttattatttatttgtagcaagtttgaatttcatttctacacacagagttaattcaaacaagccagttacagctgggtgtggtgtcgcacacctatggtccccagcccnnnnnnnnnnnnnnnnnnnnnnnnnnnnnnnnnnnnnnnnnnnnnnnnnnnnnnnnnnnnnnnnnnnnnnnnnnnnnnnnnnnnnnnnnnnnnnnnnnnnnnnnnnnnnnnnnnnnnnnnnnncaagccagttgcatcctttcaagggaatcaggggctatcacaccttcttgattcagaaaagcttacataccacagtccctggttgctctctcttatgcatagtgcaacccccatgtggctatctgtggtgagtggtgtcctctntttnacgagttgtga

SEQ ID NO: 49643 - DNA, 676 bp, Homo sapiens
gaaaagttgaaaggctagcacaatgaatactcagatacatactctccacttggattgaatagttgttaacattttgccagatttactattctctccaccccatgcatgtgtacatagaatgacatttcgacccctgagtattaccacatagatttcctgagcacaaagacaccgttctacatgattacattaagatgatcatgcctaaaaatataaacagtaacttctttatagcctctaatacagagcccttaatcagtattcaacaattgtctccagaatgtttgtctttaaaaacaacgacaacaaccaggtcccatcaaggttcatacattcttttggtttcaactctagtcactttcagtctacaacaaccccgacatattttcccatgatactttttgaagcatccaggccagctgtcttagcaaatgtcctctattctgactgtgtctgattgcttccttaggcctatgtctacactccactcgtggctcatatccctgcagagttgtaatctcctctgggccagggactcctgaatatctccaggccgagtgttctccccgggcctggagaaaaccttcatgcccaatcccttgctgcatgtctccacccctccttgcacatcctgcctctatgagtggacgaggcaaatctactcaaccccacatcc

SEQ ID NO: 49644 - DNA, 1027 bp, Homo sapiens
gaatgagactctttaaaaattatgcacatacacatgcacacatatatgtgtgcgtgtgtatatatatatatatatgtgtgtgtgtgtgtgtagttcatcagccagctacacatgaggaccaaaatgcttcagtctaaaatggaagatacacatttttttccttcaaaatgcaagtgagaactgaagtagcttttttatggagttaaatgtaatctttctgtgtaccagtctttgttgtattttatatttcttaggacacagatttctagttgaccacttaacatttgtaactgatgatgtgctgacctttttttttttttttgccaaactagagaaaatgtccatatacttttgctgtaaatgtgtttatatttatttgaaatgaaacaaatggtgaggaaacatccattatttgttctctattttaattgctatgtatcttatttagaataacaaaaaaaaaagtgaaaaaaaaaacacttgaccctgggctagccaaaagcccaagggccaaacctagcatttccactgctaaggtttccagatgaccctcaggttcttccgcgttggttagagagggctacgcatcttctactgctcagccacagtctgtagcccagcttagagcttagaagacattgcagtctggatgcccttctgcgagatgaaaactcagatgtgtagtggatcatatacacaaaggcagcacaaagaaatatctagaaattaccctaagtacactgaaaagctcacatagtctcagtaacctgatgagaaatgatggcagtgtgtgggcacatgtgccaaaaggagaaataaaaatcaccagctcaagtgctattttctacttgaggaagagacagaaaagaaatgtgtcgaattagagcagtactctctgacgttttataatgagttccatttccaccctggaaattgctattttatagtgtatgtgagatatttcaaaaataatgttctatcatatctggatcaaagacagataactgtattatatttttcatctagc

SEQ ID NO: 49645 - DNA, 343 bp, Homo sapiens
gccactgctgccttgggggcctggatgggatccagcgggtctgagtccagcctcgggagcccctgcggtggagctctgagtggggcaggggcctgggagatgccaggaggatgagagcggcgcccccctggtccaggggacagtaagaggcagccggtctcagagaagctaccccaaaactgttacccgtggtgtgcagagcgtcctgcaaccccagccctcaccaggatttcttgcgtttttcaggaaatcggttgtgattggcatgttccttaagcgtctgcaggaagccgaggcctttttggtatttcaggaggggttgctaacccccctccttgtagga

SEQ ID NO: 49646 - DNA, 1060 bp, Homo sapiens
ggaaattacagttaaaaaagatgatttaaaaccattattaaagtaagattcttgtgtataagagtgtacagtctatgttgcaagcttttaacctattgtgatcatttccacagtttagattttgaagaatgtgctcacaaattgctggaaaatggagtttcctgaaagccaaacaaaagaactctgcaacatgatacttggattgctgtgccccaacagaggacataccgaaaaaattttttggcttattagctggggcggattttgcatgctaaagaaagagtacatggaatcctttgaaggtatattcaaagaacagtatgataccatccatcgcttggaaacaaacaagttgcgaaatgttgctaagatgtttgctcaccttttatacactgattcacttccatggagtgttcttgaatgtataaaactgagtgaagaaaccactacatcatccagtagaatttttgtcaaaatatttttccaggaactgtgtgaatacatgggtcttcctaaacttaatgcaagattaaaggatgaaactctgcagccattctttgaaggattattaccccgagataatccaagaaacactcggtttgccatcaacttctttacttctataggtcttggaggtttaacggatgaactgcgggagcatctctaaaatacaccaaaggtcattgtggcgcagaaaccagatgttgagcaaaataaatcctccccatcctcttcctcttcagcgtcctcctcttcagagtctgactcatccgactctgattctgacagcagtgatagcagttcagagtcttccagtgaagagagcgactcttcatccatcagtagtcatagctctgcctcagctaatgatgtaagaaagaagggacatgggaagaccagaagtaaagaggtagataaattgatcagaaaccagcaaacaaatgataggaaacaaaaagaaagaagacaagaacacgggcaccaggaaacaaggactgagagagaaagaaggtcagaaaaacacagagatcaaaattcaagaggttcaaattggagagat

SEQ ID NO: 49647 - DNA, 599 bp, Homo sapiens
gctcatcaaaacggagagagtggttacatgaggcaggtgtgagggacccgagcactcctgaggagggaagaacactcctcttggccatgagtgtccatcccaaagctgccctgcatcctagcccaatgcagattgaatcataaagccaaagccccttccacccgcttctctcaggcaagctgcctgcaagagagaaaagtgtattagtgcaggagcttgtgtctgctgaggatggcacctggccctctcctctcaccacgtccgggtcctcctgaggaccggtcccctgtccccggtccccagccagctcagcctgaccaggcttttagaggctccgcaccccagcatcggccagtgctgacccttgtacggctgtttgggtccccgatcactctcataacagccctgcccttgtcctataccctctactcagagaggatccagaagggtccaaggaggccatgatccctccctgagctttttcacgcgggccccctccttcccctacgagggtccgtcctgggtcttagctggtctaagccctacacaagtcatggagagggctgtgtgtctgggacttctcgggggaaaagtgcact

SEQ ID NO: 49648 - DNA, 537 bp, Homo sapiens
  misc_feature (1)...(537): n = a,t,c or g
tgtatgtgccggccaggttttactggagaatggtgtgaaaaggacattgatgagtgtgcctctgatccgtgtgtcaatggaggtctgtgccaggacttactcaacaaattccagtgcctctgtgatgttgcctttgctggcgagcgctgcgaggtggactactgagtggtaccagcttgctctggttggtcttcattcctgagtagttccattgtcctgaatatttatttgcctttgctatagaattcgcatcccaatgatttcaatctttccagttggcagatgacttgatctccgacattttcaccactattggctcagtgactgtcgccttgttactgatcctcttgctgggccattgttgcttctgttgttcacctccaacaaaaggggcaactcaggggaaccttacaggccccagccgttcaggagnaagggaggggttcccgagtgggaaatgtgggaacttggatggccacccctggcaatgggagagactgattttagggagcattgtgttcccttnggagatggggg

SEQ ID NO: 49649 - DNA, 982 bp, Homo sapiens
gcggcacgagcgtggccataaggtccggctggcagtgggcagcgggctgcgcccagatacctgggagcgttttgtgcggcgcttcgggcccctgcaggtgctggagacatatggactgacagagggcaacgtggccaccatcaactacacaggacagcggggcgctgtggggcgtgcttcctggctttacaagcatatcttccccttctccttgattcgctatgatgtcaccacaggagagccaattcgggacccccaggggcactgtatggccacatctccaggtgagccaggggaagttgctaaaggatgtcttccggcctggggatgttttcttcaacactggggacctgctggtctgcgatgaccaaggttttctccgcttccatgatcgtactggagacaccttcaggtggaaagggggagaatgtggccacaaccgaggtggcagaggtcttcgaggccctagattttcttcaggaggtgaacgtctatggagtcactgtgccagggcatgaaggcagggctggaatggcagccctagttctgcgtcccccccacgctttggaccttatgcagctctacacccacgtgtctgagaacttgccaccttatgcccggccccgattcctcaggctccaggagtctttggccaccacagagaccttcaaacagcagaaagttcggatggcaaatgagggcttcgaccccagcaccctgtctgacccactgtacgttctggaccaggctgtaggtgcctacctgcccctcacaactgcccggtacagcgccctcctggcaggaaaccttcgaatctgagaacttccacacctgaggcacctgagagaggaactctgtggggtgggggccgttgcaggtgtactgggctgtcagggatcttttctataccagaactgcggtcactattttgtaataaatgtgggctggagctgatccagctgtctctgacctacaaaaaaaa

SEQ ID NO: 49650 - DNA, 264 bp, Homo sapiens
gctggaatttaaatgattcaaatgttacgttgccaaacaactgaacaagaaatggaattattacaatagactgaactaatggattgttactcacccacttgtatattgagaaatttctgcaaagaaagaagatgcggaatgagcctcttcactgtcttcttgaacctgagcaaggggtaggcctgaaaaagaaattctgcaagatgaattatgtatttgctattcagtttacaaattagactttaatttcattgttccaagaca

SEQ ID NO: 49651 - DNA, 819 bp, Homo sapiens
gcatggactgcgcgtcttgcagggcgcgaccgcacagcgacttctgcctgggctgcgctgcagcacctcctgcccccttccggctgctttggcccatccttgggggcgctctgagcctgaccttcgtgctggggctgctttctggctttttggtctggagacgatgccgcaggagagagaagttcaccacccccatagaggagaccggcggagagggctgcccagctgtggcgctgatccagtgacaatgtgccccctgccagccggggctcgcccactcatcattcattcatccattctagagccagtctctgcctcccagacgcggcgggagccaagctcctccaaccacaaggggggtggggggcggtgaatcacctccgaggcctgggcccagggttcaggggaaccttccaaaggtgtctggttgccctgcctctggtccagaacagaaagggagcctcacgctggctcacacaaaacagctgacactgactaaggaactgcagcatttgcacaggggaggggggtgccctccttcctatgatgcctgggggcccaggctgacttggggggcagacttgacactaggccccactcactcagatgtcctgaaattccaccacgggggtcacccctggggggttagggacctatttttaacactagggggctggcccactaggagggctgggccctaagatacagacccccccaactccccaaagcggggaggagatatttattttggggagagtttggaggggagggagaatttattaataaaagaatctttaactttaaaaaaaaaaaaaaaaa

SEQ ID NO: 49652 - DNA, 780 bp, Homo sapiens
gaatttattttataaagaaaggaaatgctgaaagtcgtattagtactgagtttagttggagaatttagataagtatcttttaggtaattctaaaattaaaatcctacccacctcactacagggttcctcatgaaggtgggcggccacctggcctgggccaccagcagcacatggagcagacctgaggggcctggcagggggcactgacctcaggatccccaggtgggggttttaaccatgggtgggatctcagcttctgcgcatacactgacaatctcacctgttcctcagtgtactcctctgaaaagaagaaaggataatatttatccaatctgtgttctcctgagctccatcctaggggtttttaatttaaccaacagccatgttgacaaaagccaacaataagcatgtcttattctagccctgatcccaacactgaaagcgaagtactttataaagaagccagcaattatgagggtttctttatgttagtaggggaaaaaatggtaataaaagtaccagtgtagcaagtgaagaccaaatttatagcactgtgcattagatagcaaaatcaggttcttaacaatgaaaagtaaacctcaagtttctaaatccatatgcagatggttaggctgtccctctcttagcaaatctctcagcctccttctttcccaagtgccaagggtccctggactaaagctcttgggtctttgctctctttctgtgaggggaaggctgcggccctatttgcccctctctagcaacacccctacaccttcc

SEQ ID NO: 49653 - DNA, 369 bp, Homo sapiens
gtgcttgagtcaccagcttgccatcctgtgtcattcaacacctcctccagactcttcgcagaaaggtgacccagaaaccccttgaaggacatgatactgtccctgtgctctgatgtgccccctggtgtttgagtggagtgatttttagatagcggtttgcctgttaaaaccttccctttgttccctatattattgcttgcattttagggcttctcagttgaaggatgtggttgaaagagcccagttcctcagctgctcctctgggtgactagagtgtgggtaactgatgttttaggtcctggagaaagcagtgatgatcacaaatagtagaatggagaaatggttatctcatattgatcttcaggtttg

SEQ ID NO: 49654 - DNA, 817 bp, Homo sapiens
aggaatttttttttttttttttttgagagtgacaaaaagtttattctgtgcttctcgcagcattaggcaggggataaaactggagagagggcctggtgtggaggtggagggactctgtgggcttcactctggtaggaggagagcatcagggcaggcctttaggctgttgctctgggcagggggtgggggtgcgggggcttacagtgggggcccttagttggcacaggttcggaagggccccaggcagacatgaattctcctgagacttgaggtaaggttgcttcagccagcccgggcggagaagaagggcagagagcgaacataggagtccagtcgggagcgaaagagctcactttgcacagtttggcccagcgggcacaggggattcttcaccaccagctccacatacagcgcactgtagatgtggtgcagcacatctcggatgggtcccacgcccaagtcagtaattcatgacaactttgatccccagtgggcgtctcgtagtaatggagtttgtaacggctagtttggaaggccaggaagccatccttcatgtctagcggggacatcttgctgacaaacgagcggatagagaagagcatcccgtacatcagcttatactcctcctccttgggaatcccctgcttgcttcttgcggtgccattcgctgtagtgcagacacactccattccggtcaaacaggtacaggttgtggacagtcattctgcagggcggggagtgtgagcctcgctccggggccgcccccactccttgggctcgggttcccggacccacagccttccaaccaggtggggac

SEQ ID NO: 49655 - DNA, 846 bp, Homo sapiens
tttttcattatttaagaaaatttatttctacttctacagcagaaatacggaaatggtacaggtttgggcaaatcatactttatgaaatggatcctcataccacatcctttttaatacaggcacgttataacataattcctggattttcaaaatccagccaacacggatacctctgctactctgttttggccttcatagctgcttcctctttcagacgagctttcttttctaagttcaagcttgttaaagtctcgtgtctttgggcagccttcttgccctcaataaccatgaagatgcatcctaccaccgtcagggcaatccattagatagctgatcttcactcgcatcttgttctttgcagcatcaagcatctccaacgagacagtctctgggatttcatcttcctttttgaagcgacctgaccatatgaggatctttttctgccaatccgtaggtttgtgtaaaggcactctgttgtaagtgcgggatggagctccgggactttcctgtggttttgtgcaaaatccatttattctcttcaaatcagagcttctggtaagccttagagatgaggaaacatctctttcacataacctaaaacagcttctcataattgcactggcaaacagttcttataagatacttaaatctttgcgaagagatagcccccttcttttcccacgtgctctcaagtcaagcctgatctctctccctgtcacccataaaatctcacttatgttccattaaccaggatcacatgaaccaacctgctgccaggcgcagaccgctgaggctccccatggccacttgctactccgccgaccagcgcagaacttcccggggacg

SEQ ID NO: 49656 - DNA, 772 bp, Homo sapiens; identical to SEQ ID NO: 12034

SEQ ID NO: 49657 - DNA, 4009 bp, Homo sapiens
  misc_feature (1)...(4009): n = a,t,c or g
tgccaaggctccagcccggccgggctccgaggcgagaggctgcatggagtggccggcgcggctctgcgggctgtgggcgctgctgctctgcgccggcggcgggggcgggggcgggggcgccgcgcctacggaaactcagccacctgtgacaaatttgagtgtctctgttgaaaacctctgcacagtaatatggacatggaatccacccgagggagccagctcaaattgtagtctatggtattttagtcattttggcgacaaacaagataagaaaatagctccggaaactcgtcgttcaatagaagtacccctgaatgagaggatttgtctgcaagtggggtcccagtgtagcaccaatgagagtgagaagcctagcattttggttgaaaaatgcatctcacccccagaaggtgatcctgagtctgctgtgactgagcttcaatgcatttggcacaacctgagctacatgaagtgttcttggctccctggaaggaataccagtcccgacactaactatactctctactattggcacagaagcctggaaaaaattcatcaatgtgaaaacatctttagagaaggccaatactttggttgttcctttgatctgaccaaagtgaaggattccagttttgaacaacacagtgtccaaataatggtcaaggataatgcaggaaaaattaaaccatccttcaatatagtgcctttaacttcccgtgtgaaacctgatcctccacatattaaaaacctctccttccacaatgatgacctatatgtgcaatgggagaatccacagaattttattagcagatgcctattttatgaagtagaagtcaataacagccaaactgagacacataatgttttctacgtccaagaggctaaatgtgagaatccagaatttgagagaaatgtggagaatacatcttgtttcatggtccctggtgttcttcctgatactttgaacacagtcagaataagagtcaaaacaaataagttatgctatgaggatgacaaactctggagtaattggagccaagaaatgagtataggtaagaagcgcaattccacactctacataaccatgttactcattgttccagtcatcgtcgcaggtgcaatcatagtactcctgctttacctaaaaaggctcaagattattatattccctccaattcctgatcctggcaagatttttaaagaaatgtttggagaccagaatgatgatactctgcactggaagaagtacgacatctatgagaagcaaaccaaggaggaaaccgactctgtagtgctgatagaaaacctgaagaaagcctctcagtgatggagataatttatttttaccttcactgtgaccttgagaagattcttcccattctccatttgttatctgggaacttattaaatggaaactgaaactactgcaccatttaaaaacaggcagctcataagagccacaggtctttatgttgagtcgcgcaccgaaaaactaaaaataatgggcgctttggagaagagtgtggagtcattctcattgaattataaaagccagcaggcttcaaactaggggacaaagcaaaaagtgatgatagtggtggagttaatcttatcaagagttgtgacaacttcctgagggatctatacttgctttgtgttctttgtgtcaacatgaacaaattttatttgtaggggaactcatttggggtgcaaatgctaatgtcaaacttgagtcacaaagaacatgtagaaaacaaaatggataaaatctgatatgtattgtttgggatcctattgaaccatgtttgtggctattaaaactcttttaacagtctnnnnnnnnnnnnnnnnnnnnnnnnnnnnnnnnnnnnnnnnnnnnnnnnnnnnnnnnnnnnnnnnnnnnnnnnnnnnnnnnnnnnnnnnnnnnnnnnnnnnnnnnnnnnnnnnnnnnnnnnnnnnnnnnnnnnnnnnnnnnnnnnnnnnnnnnnnnnnnnnnnnnnnnnnnnnnnnnnnnnnnnnnnnnnnnnnnnnnnnnnnnnnnnnnnnnnnnnnnnnnnnnnnnnnnnnnnnnnnnnnnnnnnnnnnnnnnnnnnnnnnnnnnnnnnnnnnnnnnnnnnnnnnnnnnnnnnnnnnnnnnnnnnnnnnnnnnnncctcttaatattctggagtcatcattcccttcgacagcattttcctctgctttgaaagccccagaaatcagtgttggccatgatgacaactacagaaaaaccagaggcagcttctttgccaagacctttcaaagccattttaggctgttaggggcagtggaggtagaatgactccttgggtattagagtttcaaccatgaagtctctaacaatgtattttcttcacctctgctactcaagtagcatttactgtgtctttggtttgtgctaggcccccgggtgtgaagcacagaccccttccaggggtttacagtctatttgagactcctcagttcttgccacttttttttttaatctccaccagtcatttttcagaccttttaactcctcaattccaacactgatttccccttttgcattctccctccttcccttccttgtagccttttgactttcattggaaattaggatgtaaatctgctcaggagacctggaggagcagaggataattagcatctcaggttaagtgtgagtaatctgagaaacaatgactaattcttgcatattttgtaacttccatgtgagggttttcagcattgatatttgtgcattttctaaacagagatgaggtggtatcttcacgtagaacattggtattcgcttgagaaaaaaagaatagttgaacctatttctctttctttacaagatgggtccaggattcctcttttctctgccataaatgattaattaaatagcttttgtgtcttacattggtagccagccagccaaggctctgtttatgcttttggggggcatatattgggttccattctcacctatccacacaacatatccgtatatatcccctctactcttacttcccccaaatttaaagaagtatgggaaatgagaggcatttcccccaccccatttctctcctcacacacagactcatattactggtaggaacttgagaactttatttccaagttgttcaaacatttaccaatcatattaatacaatgatgctatttgcaattcctgctcctaggggaggggagataagaaaccctcactctctacaggtttgggtacaagtggcaacctgcttccatggccgtgtagaagcatggtgccctggcttctctgaggaagctggggttcatgacaatggcagatgtaaagttattcttgaagtcagattgaggctgggagacagccgtagtagatgttctactttgttctgctgttctctagaaagaatatttggttttcctgtataggaatgagattaattcctttccaggtattttataattctgggaagcaaaacccatgcctccccctagccatttttactgttatcctatttagatggccatgaagaggatgctgtgaaattcccaacaaacattgatgctgacagtcatgcagtctgggagtggggaagtgatcttttgttcccatcctcttcttttagcagtaaaatagctgagggaaaagggagggaaaaggaagttatgggaatacctgtggtggttgtgatccctaggtcttgggagctcttggaggtgtctgtatcagtggatttcccatcccctgtgggaaattagtaggctcatttactgttttaggtctagcctatgtggattttttcctaacatacctaagcaaacccagtgtcaggatggtaattcttattctttcgttcagttaagtttttcccttcatctgggcactgaagggatatgtgaaacaatgttaacatttttggtagtcttcaaccagggattgtttctgtttaacttcttataggaaagcttgagtaaaataaatattgtctttttgtatgtcaccc

SEQ ID NO: 49658 - DNA, 323 bp, Homo sapiens; identical to SEQ ID NO: 12043

SEQ ID NO: 49659 - DNA, 497 bp, Homo sapiens; identical to SEQ ID NO: 12050

SEQ ID NO: 49660 - DNA, 2553 bp, Homo sapiens
agccgtctacctaaccagaacgggactgttttaccctcagagtctgctggactagctactgccagttgtcctatcactgtctcttctgtagttgctgccagtcagcaactgtgtgtcactaatacccggactccttcatcagtcagaaagcagttgtttgcctgtgtgcctaagacaagtcctccagcaacagtgatttcttctgtgacaagcacttgtagttccctggccttctgtctccctctgcacctaatcactaagcggggcaagctccccacccacatttcctacctgcaagtacttcctcaagcacagctttcttcacaaaagatggagtctttctctgctgtgccacccaccaaagagaaagtgtccacacaggaccagcccatggcaaacctatgtaccccatcttcaactgcaaacagttgcagtagctctgccagcaacaccccgggagctccagaaactcacccatccagtagtcccactcctacttccagtaacacacaagaggagcacagccatccagtgtgtctgatttaagtcctatgtcaatgccttttgcatctaactcagaacctgctccattgactttgacatcacccagaatggttgctgctgataatcaggacaccagtaatttacctcagttagctgtaccagcacctcgagtttctcatcgaatgcagcccagaggttctttttactccatggtaccaaatgcaactattcaccaggatccccagtctatttttgttacgaatccagttactttaacaccacctcaaggcccaccagctgcagtgcagctttcttcagctgtgaacattatgaatggttctcagatgcacataaacccagcaaataagtctttgccacctacatttggcccagccacacttttcaatcacttcagcagtctttttgatagtagtcaggtgccagctaaccagggctggggagatggtccactgtcctcacgagttgctacagatgcctctttcactgttcagtcagcgttcctggggtaactcagtgcttggacacttggaaaacatggcaccctggataactcaaaggcacctgggtttcagaccacctttcccaggcgagtttctaattagttccagttgggttaccatccattgacccatcaggcagctccccatcttcctcttctgctcctctggcaagtttttccggcataccaggaacaagggttttcctgcaagggccagctcctgttgggactcctagtttcaacagacaacatttttctccccatccttggacaagcgcctcaaactcatgtgactctcctattccatctgtttcttcgggatcatcttcacctctttcagccacttctgccccaccaacgttgggccaaccaaaaggagtcagtgccagtcaagatcgaaagatacctcccccaattggaacagagagactggcccgaattcggcaaggagggtctgttgcacaagccccggcggggaccagttttgtcgctcccgttggacacagtggaatctggtcatttggtgtcaatgctgtgtcagaaggcttatcaggttggtcgcaatctgtgatggggaaccatcccaatgcatcaacaattatcagacccaagcacattctcccaacatcagccaatggagagagatgattctggaatggtagccccctctaacatttttcatcagcctatggcaagtggttttgtggatttttctaaaggtctgccaatttccatgtatggaggcaccataataccctctcatcctcagcttgctgatgttccaggaggccctctgtttaatggacttcacaatccagatcctgcttggaaccctatgataaaagttatccaaaattcaactgaatgcactgatgcccagcaggccagtctgcttccttcagtccctgctctcaaaggggaaatcccatcacctcagctaaccagaccgaagaagagaattggacggccgatggtggcctctcctaaccagaggcaccaggatcatctacgaccgaaagttcctgctggagtgcaagaactcacccattgcccggacacccccctgctgcctccctcagattcccggggtcacaactcctccaacagcccctctctccaagctggaggagctgaaggagcaggagacagaggaagagatacccgatgacgcacaatttgaaatggacatctaatccagtgcagatgacctggcatgtggagttacagagggatccctcatgccactgctgccaccacctcttcctggggcatccaaaggccagctggcctcatctaatctggaagggagtgacttgttagttccaggcctcctttagttctgaggcagctagaccagggataggagtgggcaacttgccaagcccttaactctacttcctcttcagtctgtggtactcctcctaaccctaaaccctctatgctcaggggctggaactggggaatggagtaagtcaccttctgactgcttagtaaacattcaaagaaaaaaaaaaaaaaaaaaagtcgac

SEQ ID NO: 49661 - DNA, 500 bp, Homo sapiens
  misc_feature (1)...(500): n = a,t,c or g
ctggagaaaggccatatgcgtgtgaggtatgtgggaaattatttggtaataagaactgcgtgactatacatcagaggattcacactggagaaaggccgtatgaatgcagtgaatatgggaaatcgtttgctgaaacatcccgtctcgttaaacacaggagagttcatactggagaaaggacttatgagtgctgtcaatctgggaaacatcagaatgtctgctctccttggtcttaagagacttcgcattggaacggagtctcattctgtcacnnnnnnnnnnnnnnnnnnnnnnnnnnnnnnnnnnnnnnnnnnnnnnnnnnnnnnncttttttcttcataaactacagtttatataggcaaaactttcagtactaagcaattttagtctctgcaggctcttgtcttgaattaatacaacttttgttaattctcttatgaagttaaatcttcctgcttgtatgcaacttatatgttgaaatttttttgtacaaaagaaaa

SEQ ID NO: 49662 - DNA, 281 bp, Homo sapiens
gggcctttgagaatcagactgaacacagtgaaatatgtgcccaaagttcagaaagatgaagtttccagaaactaagaaggtagcacaatatgtggcatcatactcagaaaggaagaccatgccatggggccagaaattcagaaacgtaattcttacattgtgattgcaatggatactcatggaagaaagtgggtagtggccgatttgacttcagagtgacaggtagagaagggaagagcgtgtagaactgtggccagactttaggagtgtgagggatgctg

SEQ ID NO: 49663 - DNA, 758 bp, Homo sapiens
tttttttttttttgaatagtttaatagttattatttaaataaggctttggcgtgcttttccacatttttaggtttttttctctatgtgtacaccttgcaagatgtatcattaactcatgaaaccaccagctcctcaggcaacgaaaagggaggtagaaagaacgccagaaaggtgggtctgtgtgttctggggtgcgtggggcccgcccccgaggaaggtgccaaccgtccctggagagcagaatcaccaggcctgggaaagccatgcgggttcgagagcctgcgccatggccatgctgggcagggcccaaggggtgcccaggcgtctgcccactgagaacactgttagtgcggagggatccacaggaggggagagcggcgccagggtcccggacacaggcaagggtctctagcccgccacccacccactgccctgggggtctctgtcaggcttctaggagacacagagactctgaggtcatgtctcgagggtggctacctggggaggctgggcagagtctggagacatttctggctgttgtctgactgggagctgctggctaggggtgggtggaggccagggatacctttaagcatcctacagtgtgcaggacagctcccaccaaggaggacagcccgccagagacacagcaaagtgggctgggattggggaggctgcagcctggtgccagcctcacattggcaggcgggcgctgcaggaggcttgcggagaacacggcgaccgagggaggtttggc

SEQ ID NO: 49664 - DNA, 329 bp, Homo sapiens; identical to SEQ ID NO: 12069

SEQ ID NO: 49665 - DNA, 872 bp, Homo sapiens
ggaacaacagtggaaaagacaactacacagcctcattgaggggagatgggtactgtatacttactggtaactggacacgggtaaaaggacaaggtctgtcatctctttagggacctgttttatatgccccaaccctgtccccatcttattgtttttttttgaatgtacttaaaaaaggaacaacaaaaaactagggttgtagaattataaaactgcttcaaccttagaaccttaagtaggaggccctcaaatggacttacgttagtccttagggagtcaatgtgtgtgttgctgcttatttaaatacagttcagttggagccccgagagtgcccatgttttccccacacctcttggatgccttcctcttcccaaaccccagaagaggtgggcacctgagcggggaatctcaggtgacttagtttgccagtgcctactctattgaagaactgggttttcatgctcgagaagaaactcgtggaagggcgtgtttcccatcacaggttcacatactgattgcttttgttgaatttccttggtgcgacttatgccaagtaattatgacgattttttgttttgttttgtttccttgctgaatatttcatgaaggctacgaagttagaacaggcacgtcctgggtgtgaaagctttaatttatctacctcatttattttttattttttgtagccatagtgtctattttcctattttaagaccgctgaagtattcccaggccctgtctaaagcctaagagttgatgtattggtgggaagaggtgaacgttcaagatgattttgtgatgccttttttttttgtagtttcctttgtaaatgtgatattgagcaaacgaaacattgctcttggtttaacaaa

SEQ ID NO: 49666 - DNA, 1174 bp, Homo sapiens
gattgaaaaaaataagagcactactttttagtgacatagacggttgtttgaaaataaattatttaagaatagatcctctatcaagctcatgttctctttttaaatatgtaggtatataagccataaaaaggaattttttaaaaaggatagaaatatttgaaagagaaataattcttttaaaagaaaagtctgcttcttggttcttcagccaaaaacagacatgacaaaagaactaacacaactacagaaaactttgtatcaaatgtattttcagcaagacttgaagatttgacacaggcacagggaaaaggaacaaacttaaaaagagtataaataaggtcagttcaaactcacttctatttgaaatgtgttttaaaaacaattttagtcttatattttaaaaatatgattgagaattttttttttctttaattcaagtcttctcaatcatcttaaaatacttgtgagctgaactgatacattaaggcaaatttttattttaaatactcatttcattgatgaactctgtttcatttaaactgctaatccagggagaaagttttcgtaaaaaacattttattgctacaaagggaaacatggtcacaaagagcctttaagcgtatcttaacgcaaattactattcaatgtctaatgcagtaaaaaaatacacagagcacaaaatacttgcccagtttatatcttccagggtaagtattcaaaaaattgatgcacacttgaatattcactcccaagagcagcatttaagataaaatgattagaatagatatactaacaatacacatttgttatccttaacaccaataaagtaataaaaattaagcttaaaaattatacaaacaatttatcggatctaagtctggtagctataaaaactaaactaaaatagttttgccttcattttattaaacaaatgttaaacatttagaaattatataaaacaaattttaatatgtggaatgcatgcaacatgggtgttaattcatattttaagctattaaatttcttacccttttttacattagaaccgaaatgtaaagctccttttaaatctaataccttatatttaattttcttcaggttgctcaacagggaagtcagcaggttcttcctttgctgtctcttcctctaattcctctacttcctctacttccgc

SEQ ID NO: 49667 - DNA, 1199 bp, Homo sapiens
ttttttttgtccaaagagtgacggattacatacgtagtctccgacctgcaagacgatgagatggtttaattatctgccttttctccccccacccccacccagcagcttcctgtcggacagactgaagcctggctgggctagtgacggtaaaaatcactgacagcaccagcaaacactgtctgtggtttcaaaaccatggagggaatgcaagggacgggtcagtaaataaatgaactcagcaaagctgcttcttcctctttttctttttctttttttttttttgagaggaaaaaaaagcccactggaattgtctaaactgcaatgcaatctcttgctcatttaaaagatctcattttctaatcatgtgctttgagacatttaatactatttcaattatgcagaggaaataatataattcctttatttgaaaaatgatactgaacctcagagatcagttaaatctactgctggaatggggattctttctaaaccgtgttgttccctctcttcaaacagctggagctgtacacagatggaaaaacatttggtcagaaagcagcaaattagtgtttttcaggaccgaattcggctcccgcagctcctgcatctccattcgtctagattttatttcttctttgcattgacatttttgcagacccagttcatgccatcctgaacgccctctcctgtgagagctgagcaagactggatctgccagactcggtcgcggatggtatgcaggttcagtccttctgcaatttcagaggcaggggctgctgtgagcaaatcctgcttattagcaaagatgagcactggcacacaacttagtttttcttcctccagtaattccgctagttcctgacccgtctcttcaaatctttttctgtctgcactgtcgattacatatataagaatatcggtattttcaaaataattcttccagtatggtctgattttcctcgtgtccaccaatgtcccatacattcagtttaaaaccttgtgattgtacacttttgatgttgaaaccctgtgtaggtgtgatgtggctgatgtcttcagatgcaagctgcttcagaagagtggtcttgccagcattatccaagcccaggagaagtattctcacctcctggtctggtgcacttttcaacttgcgcaaaattgagagcaagcccatcctcccgccgagtccctcctcctcc

SEQ ID NO: 49668 - DNA, 428 bp, Homo sapiens
  misc_feature (1)...(428): n = a,t,c or g
ggatagggttctcaatgcagatctcccttttctagttagctatattcttgactgcatccgctaaaaatgttaaagcttcttgagagacagacatgccagattttcttggtatctcccataatacgacctacagtccatggtctacagatgttttaaatagaattgctattctcgatacatacaaagacgtaattgctgacccacaatcagtaacatccatattgggagatttttcaaaggatggtgaccctgcttgtatttatttaccttggtattttttcttgcatccttctgtgattcaaaaaagtaaaatgtggctttctgaaatgatgggataagggtctacatctttctagganaaaatacattaaaggggtagtttaaggctcntgtaaatgtggccncgggctcccacacggccntcgtgg

SEQ ID NO: 49669 - DNA, 447 bp, Homo sapiens
ctctgtgtgtgtgtgtgtgtgtgtgtattgaggggacgcggctgctggccaccttctgtcggcacaggttggcgaggcttcatgactgcccagcccatgcagtccaagagtcccacagcccagcccatgcccaggctcatccactgcggcgggtggcctctgccaggggaggctaggaaaccccagtgggtttcaaagacaacctccacgctgtgttctgcttggctgagaactcggtggggcccaatgcgacaaggccagatgacatccacctgcctgtactcagggaagacggtggaaatcaacaacacggatgccgagggcaggctggtgctggcagatggcgtgtcctatgcttgcaaggacctgggggccgacatcatcctggacatggccaccctgaccggggctcagggcattgccacagggaagtaccacgccgcggtg

SEQ ID NO: 49670 - DNA, 859 bp, Homo sapiens
gcttggtgggagcagacctctactgtcctctgtaacttgctgctattgaggacaagggagtttttctttctttagcgtcttcagtgaaggatacaatacaacaatgcctaatgtatttgactttttagcttgtgtctgtgtgtataggaaaagcctaaaacaagttatttgcatttcagtggttttgtgagacaaagaatgggaaattctgtagcccttctggcttaccctgttgattataaacctagcctcaaaagagattgacaggcatgactcaagtgagtgttcacatatacaagcctgcatgagccctctgtgggtaggtggtcacacttgggcatctgcagcattgacgtggccccgctgggtgccttgagcatgccctcttcctgctctgcaatttgaatcaccaccgtgccccttccaccactgttccccatgcaaaagctctgcttccagcagcccccactgaccgctctctgtgtggagcaaagtgctgtcgtgcggtgaccaccaggtgaagagcagcttgtattcagacatctagagaaggttaaatcttagtgtccctgggccaggagcatatcccaaggctcctgcgagccagtggcgaccctgtccactgccgctcttggttcactgctgtgtcctgccccaccctcctctcctcctgcctgttggttccttgacctgcactatgggttagttgagttccttacgatactacggtgaaagccgggtgctagagcccctcttgtttacaagacataatgagggatttgaaatatgtaaaaataaacatgagaagctaaaatgttcttccatcataagcttaaagggaaaaaaactaaaaacttta

SEQ ID NO: 49671 - DNA, 359 bp, Homo sapiens
gtaaaaatgtataaattttatacatctacaacatttttttgagacggagtctcactctgttgccaggctggagtgcagtggtgcgatcttggctcgtgggaacctccacctcctggattcaagtgattctcctgcctcagcctcccaagtagctgggactacaggcatgctccaccacaaccagctaatttttgtattttcagtagagacggggtttcaccatgttgggccaggctggtctcgaaactccctgaccctcaagtgatcccgtcccacccttggcctccccaaagtatgtgttaggattacaggcataagccaccgcacccagccctacatctataacaatagcaaaatag

SEQ ID NO: 49672 - DNA, 334 bp, Homo sapiens
gaccagaactgggttctgacaggtgggagccagcagctcctgaaggctgggggcagagggttttgaggggacccaggttagtggggcattggcctagccctgggccgtgggtatcactcagtgtcttgcagtaggtgttgatactttcgaagccacattgtttcttgggttcttacacatctttatatcacgtttttataaccatcaccctttccaatcaaaatatttattgccaattttttcttttaaatattttcaattttcaaagtgtgtagtgcgtgcattgttttaaaagtttggtagtactttttggccgtttggatatttaactccg

SEQ ID NO: 49673 - DNA, 853 bp, Homo sapiens
ccagagccctggggggtggtctccatgcctgccaccctggcatcggctttctgtgccgcctcccacacaaatcagccccagaaggccccggggcttcagcttctgttttttataaaacacctcaagcagcactgcagtctcccatctcctcgtgggctaagcatcaccgcttccacgtgtgttgtgttggttggcagcaaggctgatccagaccccttctgcccccactgccctcatccaggcctctgaccagtagcctgagaggggctttttctaggcttcagagcaggggagagctggaaggggctagaaagctcccgcttgtctgtttctcaaggctcctgtgagcctcagtcctgagaccagagtcaagaggaagtacacgtcccaatcacccgtgtcaggattcactctcaggagctgggtggcaggagaggcaatagcccctgtggcaattgcaggaccagctggagcagggttgcggtgtctccacggtgctctcgccctgcccatggccaccccagactctgatctccaggaaccccatagcccctctccacctcaccccatgttgatgcccagggtcactcttgctacccgctgggcccccaaacccccgctgcctctcttccttccccccatcccccacctggttttgactaatcctgcttccctctctgggcctggctgccgggatctggggtccctaagtccctctctttaaagaacttctgcgggtcagactctgaagccgagttgctgtgggcgtgcccggaagcagagcgccacactcgctgcttaagctcccccagctctttccagaaaacattaaactcagaattgtgttttcagc

SEQ ID NO: 49674 - DNA, 927 bp, Homo sapiens; identical to SEQ ID NO: 12100

SEQ ID NO: 49675 - DNA, 1034 bp, Homo sapiens
gcgtcgacttttttttttttttttaaagtctcttttgtttttttatttttcacaaaggatttgctgtaagtcttcaagtcattttgtccaatccaaaagctgtatttaagcgtcgtggatcccagccagggatgcaagaatctgactttctcaaacagataacaacagtcgaagaactggaaccgaaagcaaataactgcactaaggtattcattacacttgtgctgcccgacctcgagtgtcaccatgaagagtgcgctacccaagctatttccttccccttcaggttctcgtgtggcacactcggacagagaaggttaatctagccaacgagccaaagtaccacctggacacagtgaaaattgaggtataaattgaagcagcaactggtgcagtttgtccagccagtggatccatatggaagaggatgtttggagtttaggctacagagcattcaggtattgtttgttttacttcagtacagcagcctttcttgtcatctgatggacatctgtttaaatggagcttgtcagttaacataagctaattggatggttggtacaaaatgtatgttttgtcttcatttgttctgcatgttttctctacaacaactaaattggaagatttttttgtacagtgccgatactgcaagataccactcttgagtatatattttttctttttctccaatttgcccttataattggtagacttgaacaggttggtagacttgaacaggtttttaaaacagacaagtattttgtcagctaaacgttcctgatgattcctgactttgcaatactaagtaatttttggaaggttagtggcagtatacatcataggaaataaaaacccacaaatgaaaaggtctatggagtcatgtttaatgtagggaaataacattttgtcaatactaggcaccataaaatgtaaacacaattactgtcataaacctagatataccttcaaggattgaagattgaaagtggctttgttttagttagttaccctgtttgcatatagtgcagaaaaag

SEQ ID NO: 49676 - DNA, 2019 bp, Homo sapiens
ccctggagttacaatggcggcgcccatgctgcgctggggctgccgtggaagacgttgggctttcgcccgggttgacggtggttcttgccaccgaagaggggctccgactgggtccacatccaaccagattaggggagagagctcagtggctcagcagcccctccacacggcccagaagacgaggaaaggtgaacacaaatgggctgctgtggtaggtttggaaattcatgcccagatttcctccaactctaaactcttctctggatctcaagttcgcttttcagcacctccaaattctttggtttctttttttgatgcatctctacctggaactttgccggttctcaacaggaggtgtgtagaagcggcggtgatgacaggcctgggctctgaactgccacataaacaagaagtccttgtttgacaggaagcactacttctatgcagacctccctgcaggctaccaaattacccagcagaggctcccaattgctgtgaatgggagcttgatatatggcgtctgtgcagggaagaagcagagtcaggtgatccccaagacggtgaggatcaagcagatccagttggagcaagacagtggcaaaagcctccacgacaacctgaggtctcagacgctcattgatttgaacagggcaggagtgggccttctggaggtggtcctggagcccgacatgtcctgtggagaagaggcggcaacagctgtcagggagctgcagctgatccttcaagccctggggaccagccaggcgaacatggcagagggccagttgagagtggatgccaatatatccgtgcatcaccctggggagcctttgggcgttcgaacggaagtgaagaatctcaacagcatcaggttcctggccaaagccatagactatgaaattcagaggcaaatcaatgaacttgagaatggaggtgaaattctgaacgaaacacgctcatttcatcacaagctggggtgcaccatgtcaatgagagacaaagaaggaaaacaggactacaggttcatgccagaacccaacctgcctcccctggtgctctacgacgccacatctctgcccgcaggtgcagacccacagcaagtgatcaatattgaccagattcgggagacactcccggagctccccagtgtgacccgagagaagcttgtccaacagtatgggatgctgctggaacacagcttcactttgctgaacgaagtcggcctactggagttcttccaaaatgtgataaaagaaactagggcagagccaaaaaaggtgactagttgggtcctcaacacttttctgggctatttaaagcaacagaacctcgctgtcagtgagagtcctgtcacaccctctgcactcgctgagcttcttgacctgctggacagcagaacaatttcttcatcagcagcttaaacaggtgtttgaggaactgtggaagagggaaggcaagactccagggcagattgtttcagaaaagcagcttgaactgatgcaggaccagggggcactggagcagctctgccactctgtgatggaggcccatcctcaagtggtaatggatgtgaagaacagaaaccccagagctataaataaactgattgggttggtccggaaagcgactcaaagccgagcagatccagtcatgataaaggagatcctggagaagaagctgtcattgtgagatgtttgggatccccttgcccaagggacaacaacaaacagtgcagcctgactgggaacaggatcctgtgaaagctgatgcccatgtgccctgagagctgcctctcaatccctgtcccaagccacagctatggcgttaatgtcaccagtgttctcaccctctaggccctgtgcctggaggtgcctccacagccgaccagcagccaccccgcctgcttcatccacatcaggagggtccggtgaggctgcagcagtggttaaggagtaacaccttcttgtattaaggaattttaaactaaataaaatgtatgttggagatactgttaaaaaa

SEQ ID NO: 49677 - DNA, 382 bp, Homo sapiens; identical to SEQ ID NO: 12107

SEQ ID NO: 49678 - DNA, 673 bp, Homo sapiens
  misc_feature (1)...(673): n = a,t,c or g
aggaaagaaggcgtcggtggattttacaagggaattgctcctaatttgattagagtgactccagcctgctgtattacctttgtggtatatgaaaacgtctcacattttttacttgaccttagagaaaagagaaagtaagctcaaagaggacaattccagtatatctgcccaaggcagcaacaagctcttttgtgtttaaggcataaaagaagaattctgcatagaaacatggctcatattcgaaattgctctatagtcattagaagccagagaactgctaagtctcctgcaatgtttttctgctttttgccttccccatatatatggaacttggctacctctgcctgaaatggctgccatcaacacaatgttaaaactgacacgaagtatagagtttcacagatttctacgttttattggtggaagctgatttgcaacatttgctaaatggattagatgaatgtacttctttttgtgagcttacttgcctggattgctttaaaattaacctttgtgcaataccaagaaaatagctctttaaaagaatgctttgtatgtctcaaggtaaattaaggatttactgaataaggtgttgaccaaatccagaccnnnnnnnnnnnnnnnnnnnnnnnnnnnnnntttgagatggagcttgctttgtccccagctggag

SEQ ID NO: 49679 - DNA, 907 bp, Homo sapiens
  misc_feature (1)...(907): n = a,t,c or g
aagtaacagaagatgtgtacacatccagaaagaaacaacaccagaccatgatgcattatttttgtgcattaaatactcttcagtacaagaagaaaatagcattgttagaacctctacttgggtacatgcaagctcagataagtttctttaagatgggttctgaaaatcttaatgaacaactggaagaatttttagctaatattggaacaagcgttcagaatgttcgcagggaaatggacagtgatatagagaccatgcaacagacaatagaggatttggaagtagccagtgatcccttatatgtgcctgacccagaccccaccaaatttcctgttaatcgaaatttaacccgaaaggctggataccttaatgctaggaataaaacaggcttggtgtcatctacctgggacagacagttttacttcacgcagggtggaaatttaatgagtcaggcccgtggggatgtagcaggaggcctggccatggacatagacaactgttcagtgatggctgtggactgtgaaaacagacgatattgttttcanancacctctttcganggaaaaaaatcttcaattttgcaagcagagagtaaaaaagatcatgaagagtggatctgtacaataaacaacatatctaaacaaatatacttaagtgaaaatccagaggaaactgctgcacgagtaaatcaatcagctctggaagctgtcactccttccccatctttccagcagaggcacgagagcctgcggccagcagcaggacaatctcggccaccgacagctcgaaccagcagttcaggatccttaggatctgagtctacaaatttggctgccctctctctagattctcttgttgccccagacaccccaatacagtttgacataatttctcctgtgtgtgaaga

SEQ ID NO: 49680 - DNA, 1098 bp, Homo sapiens
tccaagaataaagtcgtttattattttcagagcggcgggagtagggctggggaccctagggccgctccagtgggacttccctgaacccggttgtagaggatgatggcgcctttggccgaggggcagagttcagcccacatctccgtctcgggcaatctccgcacgttctgtgtctccacaaagaagattcctgtagactcgtgggcctcgggtcccccactcaggtagtgcttcctcacctgctcagaagtcaggctgcactggacatagaactcggcactggctcggccagcactggtctcatttcgggcgatgcccaacagcaggggctggctcagggtgagcagcggcaggttcacctcatcacagatctcctgaaggacactggaaaagagttcatgtaccaccagctgcccagcgaggtcctggtgctgggggctgccaccagggcacagggcctgaggctcagggtgcccaccaggtacgtccaccagcccaggggcctcagccacctgccgggagcggcgcaggaagacaaggaagtcatcggctgtggctagtgcagcgcccacccccagtgggtccgccagataggccctgcgtgtcaccccagtcgggtggacaccctgctgtcgcagcccaggcagctgagctggaccagttggtgcccaggaagtctcggtaggaagtaaggcccaggcgcaggagcagctgtggcccccgagagccaataggcgccagggtggctgagtgcaggcggaacttgggggcgtcgaagagccagggttgggcctttagccggggtctcccagatggcagtgatggcctcgtccccacctggcagtgggcgacggtcatgggcggggctcagctcggcctgtatctgctcctggggcaggcccccgccagggcactgcagcagcaaggtcacctcaggatccatggtctgaacggggcagctcatccagaggtcttgggttcaggcgccccaaatgcccatgtcccccaaacccaggggtctgcctccgacccggggcgcgcggggacccctttccagggaccggaagctacagcctccagcgggcgcccacgcgtccg

SEQ ID NO: 49681 - DNA, 621 bp, Homo sapiens; identical to SEQ ID NO: 12117
  misc_feature (1)...(621): n = a,t,c or g

SEQ ID NO: 49682 - DNA, 629 bp, Homo sapiens
atttgtcctcgtgcaccctgatgttaagaactggatcaagtatgcccgctttgaagaaaaacatgcttattttgcccatgcacggaaagtgtatgagagagctgtggaattctttggggatgaaccatatggatgagcacctttatgttgcctttgccaagtttgaagaaaatcagaaagagtttgaaagggtacgagtgatttacaagtatgccctggacagaatttcaaaacaagatgcccaagaactctttaaaaattataccatctttgagaagaagtttggtgataggcggggtattgaagatatcattgtgagcaaacggagattccagtacgaagaagaagtgaaggcgaatccacacaattatgatgcatggtttgattacttgcgcttggtagaaagtgacgcagaagctgaagccgtgagagaagtctatgaaagggccattgccaatgtcccacccattcaggagaagaggcactggaagcgctacatttatctttggatcaactatgcactctatgaagaattggaggcaaaggatcctgagaggacaagacaggtgtatcaagcctctttgggaactaattcctcacaaaaagttcacattttgcccaaaatgtgg

SEQ ID NO: 49683 - DNA, 408 bp, Homo sapiens
caagcagcatggctgcaggttgctcagaggcgccgcggccagcggcggcttctgatgggtctctggtagggcaggctggcgtcctgccttgcctagagttgccgacttatgccgctgcttgtgcgctggtgaacagtcgctactcatgcctggtggccgggccgcaccaaaggcacatcgcgctgtcgccccgctaccttaacaggaaacgcaccggcattcgagaacagcttgatgcggagctccttcgctattctgagagccttttaggtgtccctattgcatatgataacatcaaagttgtgggagagcttggagatatttatgatgatcaaggacacattcatcttaacattgaagccgattttgttattttctgccctgaaccagggcagaagcttatgggta

SEQ ID NO: 49684 - DNA, 2473 bp, Homo sapiens
ttttttttttttttatttcattcattaaaatttttattttgaatagcttcaatcaaaaaaggtttcataagattatttacaatgctgaatgtacaattatgaatgtatgcctttttgacaagagggtaccattcttgagcagcaatacaattttaaaaatataaagatgcagtatcatttctgatataaagttacttaaaaaaatccaaggtcttagggaattcacaaatcataactagaagtaacttttattaatttaatgtacacataattaccaaattttaatacattaaaaatgtgtaaatgcccacagactgtacaaaaattaacaccccattttgttaaaagttcccaaccacctcccaccataaatatacaaaaacctatttttagatatgtcaaaattgcatgcatgaatattttctaaagcttgaattttgctcttcactggataatgttatctatagctgtttctgtaacagactacataaacattgatatattatttaccatgcctttgaaactgtgcaggactttcataaacatggggaacaaaataaatagagtaaaaactgcaacagttttgtttagatgcaagtgcaattgggaaagctttcgaatttcaggattataaaactactataaaagtatttattctgttgttggcttagcccacttgtattcaagcattatttgcagcattgctttacagcagttggtgcctagaagatacaaaacatatagttaccactatttatacttgagggagaaaaaaaactttaaacaaccctgagggagacacacattaaaaatcttgttatttatttaaaaagttaaaaagttacatatcatttatttaacaattactttccccagacatttctgtcctttaagtatgtgcataaataaaatttaaatcagcaatattcatcttaatacatcaaaataatatatgtacagattttaaaatttaggtctgtataaactcaaataatttaatgtgaaattcagaatcaaaattactatgtaatggtgacctacgagagaagactcagtctatctatggcactgagtagaacccacacctggcttcacaggcattcttcaaataacattctcaacgtgaataacccaccttgtctatattcaaatctaacttcctacaaatgcttttccagccacctaaacacctcattcctttgaaaacaatatggacagaagagatataaaacccttactaactctaaatgttaaaaaagtggggggggggtgtcaaaaatagctctttatgatcatgctcttaaagatgttaaatacaatcggataattgaatttttaagctgctacttagcaattactttcattatatgcttcagtacttaaaccaaagaataaaatgcacaattgtggaaatcactgaagaataacacgagcatatttgaaattaatatggaaattataaaatgatccagagaataagtaactatagaaaatagtgctaattcacagctcaagaggtctaagatgcatagcttcatagaatcattcatggaacaactgttatcatctaatgtgtattaatagcatattatacatttgatggaaaacttcgattatatttttgcaggaatcatcagtggcaatagcagtaacagtgatcctgagtgtaatttctatttttctatagttaccaaacatcatccaggtctttgcagcataaagagtgagaaccatttggtcctaaaattctaggtaaaatttggtaaatttgtaaatatatgttgggaaaagaatgatcagctagaagtagaaagcacgagcaagcatgttactggctctggaagaacagagaacaatgtcacactgttttcatagtttagcgtccattttatagcacgatcagttttctgtgttgtggtaactgtgggcgttgcccagactgctggatccacctataaaaggtgttttttaaaagttaccttaattttggcaagaatttaaatgttaatcaggccaaacagaaaggtgaaaaatgtttctccacatctcttttggctcaatgaatgtcaattttttaactttatttcctcaattttttttctcccagaaatttccgcatcaaatatgctcatttgtaacgatccaattcaaaatagacatgttctgacctctggcgccacctaatggcataaaacaaactcatcaaattcatattgctttgaaaaaacggcagccattcaaatccagtattttttaagcctcattattgataagacagagacatacatcaaacctcaaaaaattttatgaggtaaaattctaacttaaaaaaaactattatcctatgtctttaggtaattgaaaacatagaagaaaattttaaaaaaccatttaaaataacacaaagcctgacagaaacaaatttgaagaaacgttaaaagatgaatctacatctactgccgaaagaaatgaa

SEQ ID NO: 49685 - DNA, 1839 bp, Homo sapiens
ttgcattttttgctttagcctgataattgaaactttcaacaatctctggagtgactttttctcctcgaattgaaacaagtctatggcaaaagaagctgcattttttttcacaaaagggaagatggtaacaatggtcacttcaaacttttgggctaaattatatgtacacagaaatgttcaaaatcatagttttaatgtgttttgaaaaggccacacaattatactttatcttttcttaataatcctgcaaatctctgccctgaatccgaaatctgaaaatgtactggcttgaacaaaatttgttttgtgtgttagagttataaatcattaatctttatttcgggtggtttacgtttatgccagttcctttatatttaaatttcttgttttatatattttgaatgtctttatagatttctttaaatttccttatagaaccattaatagaaaatcattacatttaaaatataccttacagcaaaagcatccaaataagtatagggtttatgtccttatttttctttcagctgaatacgaatgagcacagtggtggaatttctgaagggaagtgatgaaattatatttatttcagtgggcacttttccattttaccactgtaccattatttggttcctggagttatacactaattttcagtatattactgttaaattaccaacacaaggcaatttatttgaaagattccgtttatcctgccattgctttgaaaagcagcaggaaacgaaatcctttgacttgtatcagcttctgcagagcatctttgctttcctttgtcctttgtttcctaccttttgaatcagattccgttttagtcaggaagacttcttgggaccattcttagtaacctgaaatttcttttttaattgcatgaagtggattgatcatgagcaaatgatgtgcttatttctccctcactgttgaatatctttgaacttgctgttttcaatatgggcagcacaaaggtgagagatacatattaatagtagtatgtattactcttatacattagatacctatatttaaatgaaaggcccaatttgtaaacatatacattcatattctctcttgccccaagttttaggaacatgttaggatataggagacttaatttataataatgagagcatttttttattttactaaagccatttttatagtcaactatcttttcttatttgtgtgattagaacttagaaaaatatttactagttgaagttattatcagtttttaatttagttcttaaactcatttcacttctaataatttctgttataaatttccagcattttaatgaaaatctaatgatgtaataggcattttctttatttgaacctacctcttttattttctgaaccaaagagaaagatggactggtgtttgtgaaacatttttaaaaatgtagtttcatttatattagttatgtttgataaatgtctcagtatttttataatatgataagcctgggattctacttttagggttatttgtacttttgagtaatatataaagtgacaatattaaggtacatgatcagctctttctatttttactcgtaaaaattatggaaatgaataattttgctaacaactttgaaatttcaaacttctggaaaatatgaaaatattcattgttcattatgaatttaaattgtaaggtatgaatgtgatttgtctgtacatcttgtatcttttccaaaaaatgattctgtatcttttggaaaaaagccgagagttgaagatagtatatttctggtagtactgaatatttacttacagtttctatcaaaaatatatatttgtttctaaaaaaaaaaaaaa

SEQ ID NO: 49686 - DNA, 2251 bp, Homo sapiens
ggatgattaggctgtgtgtgcgtgtgagaatgatcacatgtggcgtcatgctttgtacagagcctcagaccactgggccttgtccagtgagagtcctctctggcgacatcacacgcggagcaggccaggggccaccttagatctcagatctctcagagcaatacttttctgaactgccactgtgcctgggtggttgggtttggtgtcatgcttctgactagagtagatcgcgcatgtccaccagtgatacgttgagtccttacagttccccccatggagtcccataagcagctccatcgagatctgtcagcaagttgcaggaccccacaatgttctgacatgttaagacccccttacatgacgagtagagaggcagctgaggccacaaccgtgtcttcctcttgaatggagctaactcggaaccccccgttttctcttcctttctgcccaccactgaacattgccttttagataactcagtgtttcttctagatgtcatagcaatagactttcactttcatgaagtttgggtacgatttggattctcgcttaagtacatatatttatcaatatttttataaggcaaagttcatttaaaaaatctttccaagtagcagtgtgcctaagatggcaaaatactaaaaactggtgtttcctgctcctgttgtgtgtcacttttcaagccgattgaaatatttctggcttttagggcattactttttaactatctcctttaaaaacgatgttctgtaggtttagtgtctttgttcatttccaaaagagtccagacaactgtgtctgcccctgcagaggctgtttgtccaaaggcagcatgccgctttccacccggaacgcagacagcaggggagcggaattctaaagcagcgacttaaaatgaggaatccccaattgcactaaatggtttcaggattgactaatcattgtcttaacattaactcagattttcgatgtgtaaagagctgtgtgacttggcgtctgagagatccctctgctttgctttgcttcagagtcctcgcacccgcatcctcagaactgtggggcatggtgggctctaacgagcactccccttctgttttccttcattacttttgacctccttaagacttcagagagaatgtccgtcaagttcttttctccatcaagttctttaagttccttgaaaggaagggactgtgcaaacacaaagcaatattcttttgtatctgcaaatgcgtccgtggacataccaattggtatcaaatagaataaaatcaaatataaatgtttgagtcttaggttaaaaaggaaggttatttgtatagtttatagataatgaaggaaaaatttctttttcattgcaggaaatcttgtttactggaagatagagtcactcttttcatataagacaaatagtgctttaatgccaacttctttttatctcaacatttcaggatcatgctaggcacactgcccccttgaatagacattatatgcacagttgcaagtcagccaatgtttttattcagaagtatttccccccattatagtgcctgcctatcagagatacaaaaagcatccaacacactaccgtaataggcttctttggggatgagaaatttgagtctcaacaactcagagtttgagatgtcagcttttttggtaaacgtaggtgttagaggtatattttgctttcctacaacaattgttggcccttgatttcaagcatgttgcttcataggaagcaccagagtgccatctgctgcatttcaagagattgtaaatgtcatctcagctggctcagttatatctctaatgtcccgggtagcagcacctccctctaaaaatatgtttacttcgctgtttcacttgtattttgtgtatacgaaatggcagcttccgatttctagttggatttgtcttgcattgtttgtataacttgctggtcacccagggctatttgctttttcattgagaaatttggtaggggtgtctagttcagcttttatgttgatccatcctgacttattttagacattgaatttatctcaccacaagtaaaagaacatgtgtattgactgtctttgctaagtttcctaatttttcctaattatggcaattatggatgtgaataagaatactgatgctgtacaaatatttttgtggaaatgtaccttgttaatgtgactatttaaataatatgaaaataagaatactcttgaagaaaaaattaaaatatttactctttggaaaa

SEQ ID NO: 49687 - DNA, 415 bp, Homo sapiens
gcgccgggctctagctgtttccctcaggcggcctgttccacgccaggattagttttgcttcgcagatgggccgtggtggtgagaggaagcaatcagtatggaaatggagaaatggcttaccatgcatgtccttctccccaggagggaggtcgtggtgcaggcgagcagacgccagactcctggacacttgccgcctgcgttatggaggcttagctaataaccttgcaggggtcttcaggcttttccactggctcacctttaggcttctgacacttttacctacgattgaaaaaagacgagattccatgagactagaaatgtaggagcatctcagaccttcacagaacgctctgttagaagatgagaaacataacgttgcttgtgagaggtgaagccagctggacttctgggtccg

SEQ ID NO: 49688 - DNA, 1295 bp, Homo sapiens
  misc_feature (1)...(1295): n = a,t,c or g
tttttttcaagattctgaaaactttttaattcacatatagcaatttgtacattatagcaaaatttgcattattcaagaataagttacttgtacagtacataaaacaatacataaaaatttgccaaataccttctgcctataatgatacaagatgaatccactttatgttatcacaatgtgctgtatattctaaccaaacacagggatgtcagatgtgtcccttgttaatatactcgcaagttcctctagcttgtgggagatgttagagctaacacatttgcagtaagggacttagtcctgaatagaaagcatgaaggaatctcaggcaaccctcagggaagagtccaaggccttgactttaggttaagaaactgttatgtaaaaatagtgttctctggcccaagattttaatgattgctattcctttttcctacggtccagaaatgatcaaaggcagaagatttataccagataaagccatatggattgctggtctaaaattcaaggcaggttagttgacttaattctttggtgctggtgactgttagtttgtaaaagttccaaataagtcagatgaaaggaaagggatggtgccgggagctgtcaagctgtactggtggggtctgtaattagagctaactggagggatcatgatgtctactgtccagtttggtgttgagccatggctctcggtagaagttgccggctggggcctggtcaggactggaaggagagtggtgggatgtgctgtgcctatggtgggctagctgcagccagtggggtgcctgccccacactgctgcccaccccttcatcagctgattctgctcccacataaagaaaggtgttggcttagtgtcacttcttcctagagccatgggagttttctgtcagcatgtttttgagctgtcctggtaacttggacgggaagcagtctggaggtgggtgccttccaaatctctgccacagaatctgaacttgcactttgcagcctgttagtcagagctgctaagtttgctctacnctggtgcctcttggcacccacctgagagatgtatgtagagaggctgcctaagaaatgaagtcccctggcatgaagacgtcatatcccagatgtttaacttctggctggagggagggaacttaatttggttcattatctactgggtacctttcctgtgcggaggggaggaccagtgactttccataataagctttctcctttaaaaaaacttcagactcttacttactcttttggttcacactaattagcattcattttccagagaaagctgc

SEQ ID NO: 49689 - DNA, 1249 bp, Homo sapiens
aagcagttggaggaggcatcagccagcctccgtgagcggatcagacacctagatgacatggtgcattgccagcagaagaaagtcaagcagatggtcgaggagattgaatcattaaagaaaaagttgcaacagaaacagctcttaatactgcagcttttagaaaagatatctttcttagaaggagagaataatgaactacaaagcaggttggactatttaacagaaacccaggccaagaccgaagtggaaaccagagagataggagtgggctgtgatcttctacccagccaaacaggcaggactcgtgaaattgtgatgccttctaggaactacaccccatacacaagagtcctggagttaaccatgaagaaaactctgacttaggcactcagaggcatacactttttacagatggacaaaagctctggaaccctgtggcttcaaatcctttgggaagggtgactgttgtttcccctacacacagtgtaagccggaatgggaatcgctgaggctctgatccacttctaagacaggaaggaaagtgaaggcagagtgagcaggtaagagagggatatacaaggtcacatttcagacacccactcggcataccctgccgtactgcatcatcatttgttttctttgtagacactgaaatcctatcaggaggattccttcacaatgtattttatttgctagactttggttgggagggaaaaggacattaatttgaagtttcatgttattcatgccaggattgtttgatagagcatgaaggttttgtttacccataaaagtattagaggcagcgtttctctgatacagagaggcctgtccacaagaagcatgggcacccagccaaacttgaaccctggaagggagggttcccggcctgcaggtgctctttcctcttggtcccaagcatctgtgcagggtcgtgggagccacactgagagacttgtgtgggccagacaagcttcattctgatgcgctagtcccttggtttaatttgtgccttatgctttcattggaccagctgaaatcactgtatttattcaacttgtgatttttttttctttctcactttaacttaaagagaattttatatgtcttggaaatttaataatttagtgttctcagtatcaattggtgtttttgttaaacgaatgaatcatctgttcatgcatgctctactttgatattataacctatgtcacatgtgtttaataaataccatatattttgttctact

SEQ ID NO: 49690 - DNA, 1543 bp, Homo sapiens
tttttttttgcacattctagcactttattggaacttggttgtgtacatcaatgagatcacatcaaagtaaaagcagcattttcacacaataatatcccgatatctgtgctatcttcttacataatttaataaatcccaagatgctcctgattttggtatcgaagagcttgagtggtccagaaatatctctacataaatataaatcatcacatctaaaataaccatcattgttttagtaggtcccaaaagtcctgggaacacctcttaaaatataattgccataggctggctgcagagctggtgggagggagtgaagggggtacacgtggagctaattacagcaggagctgggcagagggacacacacaaggggatgggggccagagatccccgaaagctgggcagggaactcagtcaccctgcattttccaacattgcttgagtgtcaaagctaacagatgtgagactccagtgcagaaagaagcccatcaccccaactcccttggcagtgccccaaagatggcacagccttccttcagattacacaggggccagagattctggaatggagaaggttctggaaagctctacccatcaccctccaaactgagaaaacatgaaggaatggcaccttaaagaaaatactttgggccaaagtgctgctggccccttgggaatggggacagggtgctcttggcttggtttgacctgaggggcactggcaaagtctgctctgcccccagtatctccctcaccacctttaaggccatcatcagcaatcaggttctctggttcttgaaagcttctcaggattcagcataacacccttatatctgtggtagctttactgatcacaaacagctttcacatccactaagtcaggtggttctcacatccctatgaggtagaaagggcagggatcaccatccccatttgaaagataaggaacctggaactcagagagttaggtcccttgaccaaattcacacagctggctcgtggcagaatcaaaaccagaactcaggtccatgccccaaagtccctcctgctgcttttctgaagacaggaagaggctggggataggatgcctgtcctcatccctcacccggccctcttgggaggctctcaaacagccccactaaggatcggatgagtccgccatgcggatagatgattactgcagtggctgggcacagcaacaacgaggtccatgaatgaacaatggtggcccaggatgatgaggacaaataacccagatatcccaggatgtgcttgggaagcacgacttccatggggacttggctgactgcatccatgttgcttcactcccagatggcggcgagtctgcggaaagttcctgggtcagggatggctcggtgcttctcagggtccccaggactgcacgggatctggcagctggaagcgacccccaggcctggaacctcagccctaggcagctcctggaacgtgccccggctcctccgagccccgggaggcgggagagcgcaggagcggccaggacgcgctgctgcccacgcgtccg

SEQ ID NO: 49691 - DNA, 1751 bp, Homo sapiens
ttaaaatatacaattaatgaatagtactcaaagtgtttttgttgcactgttactctgaatatggactctctatatctggtatggcgtgactgggcataacttctgtaatgtatttcagttatatgtttttccttttattgccagcttctgataatgaaattttccaaagggatgagatataagaatcatcttttataaaaaccagtggggagtggggtattataatctagttctaaactgtccatttgctttatataaaggctttgatttcaataactgaccatttgatgaatatttaaattacacagaataatgtctacatagaataaacttaagtattcaagagccttaaagtgaaaaaatgaaccttttgactgccttaaaatactacttgctctgtaattcaggcatactagttactttccttggggtctgtttaaataatgccttaatagtgttctaatgtttctgaaatacagaactcaaagggtcttttagagcttttaattttacatagtgaatggaaatttaagtattacattttaaaacctgattgtacattggtaatttaaacatccaataacaggaaaatctagatacagtgatgtgttatacatacatgactgttaacatcagtaatattttatgatagtttaaggttttttattgttttctataacaagttatccaacaggttggactttgtaacatgatatccaaggaccaagttgcatatttaacatcgaatgaaaatgtagttgtacagttccaaaaataattaattttttaagggaatttttcaagacaaaaggcaaatattttgtttcaaacctacaagcaaattcattccaagaagtgaatatagtagtaaaacataaagactattgcaataaaaagtttccaggccagtgacttgtttaattacattcacatttttacattcactttgcctttcaaagcaggagtattttataaaactgaaataaaactttaaattgtcaagctggtgcttaaagttatgtaaaatctgatttaagtttatttcatttccaaggaaaggaccctgaaaggaggggacagggagcttcctaggtctgttgataaactaactgatgctttgtcaagtcttccaagttttcactgtaaataatacaactaacaatgtaattttgctgttttctaatagagaatgaatgaatatattaatgtattacatttgtttcatgataaaacagttttcactgatactgtgaaatcctttctctcctttctagccttgcaaaataccctactaaataaatcattttagacatggagtgcaggtggacactgtgtgaactgtttttggtcagttattgtagaaattgatagatgtaccaaataaactctatgcacattaaacaagtgtctgtctatctctttcaagaaatacgaatgttaaggttataatatgccttaaaaaatctaaagcctttagtaatcttgtatttgaacaaggtaaaatttaagttttgataattaatattgaccttttaatgtatctagttttatgtaagtattaaaagtatatgaagttaaagattctttacccatggaattcaattataacaaaatgattagatttaatgaaaacaaattatttaaagttttaaaataggattcttttgtgaaaagatctactcaaaattgcctttggcaaaagttatcatccaaacacaaaaagtcaactatgcaaataaaaacactgtttc

SEQ ID NO: 49692 - DNA, 2751 bp, Homo sapiens
  misc_feature (1)...(2751): n = a,t,c or g
ccaagcagtgagaagtcacctgttatgacaccttttaagttctgggcatgggacccagaagaggagcgcaggcgncaggaaaaatggcaacaggaacaggaacgtttgctccaggagagataccaagaaggagcaggacaagcctgaaagaagagtgggaaaaggcccaaaaggaggtggaagaggaagaacgcagatactatgaggaggagcgtaagataatttgaagacactgtggttccatttactgtttcttcaagttccgctgaccagctgtctacctcttcctccatgactgaaggcagtgggacaatgaataagatagacctgggaaactgtcaagactgaaaaacaagacagaagatggaagaaatcattccagggagatgacagtgacttattgctgaagactagggaaagtgatcgactggaggagaagggcagcctaactgaaggggccttggctcattctgggaaccctgtatcaaaaggagtccatgaagaccatcagctggataccgaggctggggcccccacactgtggaacaaacccacagcttgctcagggatccatcccagaatcagcagacatcaaatccaacgcacagttcagaagatgtgaagccaaaaaccctcccgctggataaaagcattaaccatcagatcgagtctcccagtgcaaaggcggaagtctataagtgggaaagaagctgtgctcttcctgtgggcttcctttgggtaaaggagctgcaatgatcatcgagaccctcaatctctattttcacatccagtgtttcaggtgtggaatttgtaaaggccagcttggagatgcagtgagtgggacggatgttaggattcgaaatggtctctgaacctgtaatgattgctacatgcgatccagaagtnccgggcagcctacaacattgtgacacggctttcaagcttccggatcactcaccatttctttactgagagtgtcccctggcaactgcttaacaaaatcccaagctcaggggcttctcagcatttacctaatttctgaaaggctcttctgaaaggtggtatctgttctttcgtagcacagtgtttatgtttttcctgtttattgttttggttttttttttttttttgcatttgcacagtatacacaaaagaatatggggttgtaatgatcctgaatagctcaaaaaaggttttagcatggtcaaacaggcttatggtttaaaatgtgttattctcttctttgggaattagctaaatgatgcaataaacctgttttgttttagaatgtctaggaattaaacactttatgtttacagaattgagctgcagaaagtgcaagacatgccaatttgagacacacggtcttctaagactgaaggataaatttaatgcatttcagaaactaaacatcacagcaagctctatctctgagctataatttgtttttaatgcaaagacactagtttgataatatatactgtaatcctgaaacatttgtgttacttacctttggaggtagaaattataccaataaattattgcaccgttagtattagattctgtgtaccttggaagttatgtcattaatataggctggttcatcaaataaagcaaaaccttgcaatatcagctagatttacactccgggacgttgcccaaaggtaggaagaaagcagagggaaatatttcagtcatcatttccaaagtcattatcaaaatctgtgaggaagtttaatcttccaaagagtcaatgtcagacatcaggcctctgttgcctgcttctctcgaggcactagattaggagtcttcaataagagacttaacatgaggtatatgggaagatgagggcacccgagataagttcatcattaggtgtgaagcactgctcacccctttgctgggcaagttccccttaagggccctgaagcacaggtgtccaaaggaaaagcgttaagtccatcttaatagaatctatgtggtatatgatgtggtcagcccctgggtctgttgatccagccaagaacctacaggcacagattatgccctggcccacttcaatgaatacctactctcctccattctccatcactttttttgctatcaagaactccggaccttgcccatggagaagtttagagaggactcttgtggagagctggtttattttctgccctgtgcgacgagtttcagctggccaagaaaggagtcaagttattaaaaagcatcacaatgtagatctccaggctggttttttgttttttgttgttaagactggggaaagggggactatttattctgccttaaatcaatggcaaataagtcaagatgacattttgtgaatgtagactatggatacactcctaatagattgatgtagtcataaaagggggtcaagtagatgtttttctgttatgtaagcaataatttttccgtgtcttattgagtatggctagcgattatttattacatgctagatgggttctttgcatgtgggttccatataggtgcagaaatttcctcagccactggagggatttcgaccatatttgtcatttggatgagctgttattagattgaaatctacacatcatttcattaaaaattgtgccttagaaaacgcaaagctgttgcacatggcgataaattatggatgcagtacattgaagagagatgaagtcacttccaagtttccaagacttctcatggaggtgtttgctgttttacaggaaaaaataaaaataaaaaaag

SEQ ID NO: 49693 - DNA, 3085 bp, Homo sapiens
  misc_feature (1)...(3085): n = a,t,c or g
ttttttttttagagttaaaagggtaagtataaaaagttttactttttttgtgtaatttttaatacaagacatctaaagtcttaaacattaagttgatcccatcaggaacaaaatatggcacgaagttcagaaacaagaacatctttttttttttttttttgcacttaggcttttcagtcactatgcaatgattatcgattcgccaaggacagtaacagtcaaatactagagaaaaggagataggagaaacatcttttatttcttctaaagaggtgaaaataagatttttttaatatttctcactcataagatttttaaactcttaaaaatgcaatatcttcttttcaaagcacatgccatcttaaaaaaatcttagcaatgtacatttgcactcaaagaaaaacatgcagcgccattgtcttctgacaaaattctgcattaaaaaaccctatgcgactttctgcaaatatattccctctttattattcagggactccaaaccacaaacattcagtgcaatatttatcgtttcttatttccgtaggaaacacagaaccaatgatgtcttctgacaactgtttcctgatggttgagcaacagtctccctttgctttattttaaagtactttttttaacttgctgatgtaaggtataattggaattcattaaaacttgaggatccaatggagggtgaagaatgaaggatggaggaggaatacttaaggtctaccctgtgccataaacttaggaaaaaaatgtacacagaaaaaaacgacaaccaaaaaacctcagattttatcaatgcaccctttaaaaagtgtttttttaatttctgaaagcagcttaatgtgaatcaaaagcagttcctgagcaactgcagtaaacagtcttttaaaatatatatgtacatacacatgtacatatatgtgtgtgtgtgtatatatatatatttgcaacttagctcatttggttctgtcttaatttacctccccagcatttagtcccttctttcctttcagtctccaatgtgcaagtacaatagcatcagctctgggagttggcgtggagcagatgtttcttatcactcctgtgaggtcatctgcttgtctgtcaggccaggtttccagagttgctgcaggtcatagttctctcaatctcacaaaacctgtaagcatcatggccacctcacgttttcttcatcagacgccgtgactgccatgtgtggagcttgttgtaggctgtctggagcatctcttctatgtgacttaccaaatttgtgcttaaatactgtctccgaatcttttcttggaatggacagagcttcgtaaacttggaatcgttaccaattacttttcattttcactaccttttcttctaggaatggcgtattaacaggaaagcaggaccagaaatgtcgtagaagttctccaacagctacatataagtgtttcaattcagattgaatatcatttggcaccatctggtttatggcttgctgtgttcctccctgcataagtgcccctccaggtgacagtgctgtgatggtactactggcagcactacttgagagaacctgagttaacttgggtgtataagcttccatttcttgtctaatactttgaaaagaattaataatgtcctgacttgttgcatactgtagtgactggattggagttggaccatgataatacctatctgacttcttgaggtttagtgcaatcgtttttacagaattatttttccccaagtcttcatattcaatggactcttgtaatttcgcccttttgactgctggctgaaagcagtctgcatctccggaatttccatccatgttgctgggctcactagtttgttcattttgtgcttcttgttttctgagtccagctgccaggaccatggcactgtgatggttaaatctcttgatgatggcagcattactattctcttttatggatttagaattggaagcagatggcacagaggaaatgccatagccctcatctaatggtttatcttccaaagctgttaaatctagtagtgggtttttcactcctaatgaaaccattgtttttaggcctttttcatctattttggcacattctgcaaagagatcctttgaccctgtattcagccgatccctgtgaaaataatgggactggaaaaaacgtgtccagaattccttctctgtcatgttgtggggaacattttctgcatatttcatttttactgctggataggtcctaaatatggactcaatgatatcagaagttaaattatatcttagaccgttacagccatcagtttggggccggacatcagccagaaatgcagcagaaatgccaacatcctgcttatgattggatgtggaagaactatctgttgcattcacatttaaacgattggcccagaattcctcagcactgatcacttgactcacaacaaggtctttataaagctgaaacaaaacaggatcttcttgcagcattctgttcttctcttccagttctttatttgctttcctcttgaatttgggcagcagctgctgaagaaggtcttttactgcatctcgctctttcactgctgtgctttcattggaaaaatggaagttagttgtgtcccctgcatgtaggaccagctgaagctgaattttagcttttcccttctggactaattttctggcatttaatatctgcatacatatggctgattgtaaatctatctttgccttcaggtgcccaagcaattctttctgccatgaggtacagagctccatcctgcttcttttgacgcactttctttacaatcagcaaaacttcttcagatgaggttgccatggtggctagaaggtgcaggtggaagctacaactctagacaggaagtaactaactgggttggatccggtcgaggtgtctgcgcttcttagagccgctgctgggaagaggccgaaacccagtggccgcagcagtagccaccgcctctgttactagggggtctcgcctccatcgctggctgcgaggagtctgagggcacgtgaccggaagtagcaaggcgggccctgggcacgtgactccaggagcgcggncgc

SEQ ID NO: 49694 - DNA, 357 bp, Homo sapiens
cccacgcgtccgcggacgcgtggggtaaatttagaaaaagcttcagagtctttgaaaggaaacatggctgcttttctaaagaatgtgtgtctggggttggaagatctgcagtatgttttcatgatttcttcacatgagcttttcattacattgttgaaagatgaagaacgaaagctacttgttgatcagatgaggaagagatcccctagagtaaatctgtgcattaaacctgtaacttcattttatgatatcccagcttcagcaagtgtcaacattggtcagttagagcatcaacttatattgtcagtggatccttggaggattagacaaattttaattgaattacatggtatgact

SEQ ID NO: 49695 - DNA, 705 bp, Homo sapiens
gcaagaaaccccacatgtcctaaggtagctgctgtaagtaccatagtaaatagagggataacacccaaagcttttgtgttcagaaactatggtcattttcctggaatcaactctcattatttgggaggctgtcagtataaaatgtggcaggccattagagcctcatctgctgctccaggctactttgcagaatatgcattgggaaatgatcttcatcaagatggaggtttgcttctgaataacccttcggcattagctatgcatgagtgtaaatgtctttggccagatgtgccgttagagtgcatagtatccctgggcactggacgttatgagagtgatgtgagaaacacggtaacatacacaagcttgaaaactaaactttctaatgttatcaacagtgctacagatacagaagaagtccatataatgcttgatggctgttacctcctgacacctattttagattcaatcctgtaatgtgtgaaaacatacctctagatgaaagtcgaaatgaaaagctggatcagctgcagttggaagggttgaaatacatagaaagaaatgaacaaaaatgaaaaagttgcaaacatattaggtcaggagaaaacatctctgcagacaattattgattggataaaattaacactgatatgtatgaaggacttccattcttttcaaaattgtgatgagtatatctatgtctat

SEQ ID NO: 49696 - DNA, 414 bp, Homo sapiens; identical to SEQ ID NO: 12148
  misc_feature (1)...(414): n = a,t,c or g

SEQ ID NO: 49697 - DNA, 483 bp, Homo sapiens
cccacgcgtccgggtgcctgccccacggcgcctgactcaatttcgtattttcagtagagacgggggtttcaccacgttggccgggctggtctcgaactcctgacctcgggatgacagacgtgagccactgcgttcagtgtacagtgccatttcttagaaatcactcctcacgggaacacacacttagaggtgacgtgtagagattttatttatttagttagtttagttagttagttagttagttagttagttattatgtgcgcggggaggtggggggacggagtttgggctctgctgcccaggctacagtgcaaatggccctaggggacctcaaggagtcaacctatggcagagaggacacgtcattctgagcgtaagggccacaacgaaaaggttgcaagggcccgccgcttttaaaggctgaaatcccggcggctcaggcctgtcgtttccagcactttgggaggcccaggaaggtggatc

SEQ ID NO: 49698 - DNA, 630 bp, Homo sapiens; identical to SEQ ID NO: 12151

SEQ ID NO: 49699 - DNA, 303 bp, Homo sapiens
gaaaggctcagtgtcaggagacagagactgagggagactgaagacctgattctctgttccctgcttgttttttaacttcaaactcagatgaagccaatggacctgctgaaacacttgtctgtggaaactgggtcaggtcgggagatctactgaaatttggctttttttccatagccacgtgccttctgttgttgacagttcattcattaccaaagcctgtgtgtaactttgccttgttctgtggccatcttcttgctcatgttatttctcctgggaatgagcagtttgacttctgttcccacg

SEQ ID NO: 49700 - DNA, 508 bp, Homo sapiens
ctaagaggtgttccccattcggcagccagactccttgaaataccctttcagtaatcattcaaccaacgcttccatgtctctactctgtcgtaacaaaggctgtgggcagcactttgaccctaataccaaccttcctggtcagagttgcctctgaagctgctgccgctaaatatatcccaagccctggaaatggcattggaacagaaggaattagaccaggaacctggggcaggacttgacagtctgatccggactggttccagctgccagaacccaggatgtgatgctgtttaccaaggccctgagagtgatgctactccatgtacctaccacccaggagcaccccgattccatgaggggatgaagtcttggagctgttgtggcatccagaccctggattttggggcattcttggcacaaccagggtgcagagtcggtagacattgactgggggaagcagctcccagcatcttgccgccatgattggcaccagacagattccttagta

SEQ ID NO: 49701 - DNA, 924 bp, Homo sapiens
ggggttttgccttgcacaaaacaaaaatttattgggagaaagatggctgatgggaggcaagatctggattcaggaatcctcaattttagctctcgctctgtcaccaaaaccctccgtccctcccagagcctcgaggagtttccccttgtgtaaaccggtatcgcgtcccttccagctctgacatcctgcggttctagaatacccattgattgaaagagctgtggccaaacaggaaggacagagcaagagccgctgacaaaggattctgccaagacagaatcccaaggtcacaggagagaggcttggggcagtgaaagccctctcgggtcttggctttggaagtgtggactgtaccagcagatgggcccttgggaagccaacagggaacaattcaaggctggagagaaaaaggccacctttgacccagcagaaggcagaggcgggagaggagggtgaggacgtacaaggagcatcgcaggcgaggaaacaacacaacggccaggacctaactgtggtgggaactgcctttgtctccacacactcgcaatcaacatgcgtatttgctattctcaaacaactcccttccacccccttaggctgaaaggacaaactcatcagagttgaggagtacctacctgatgaagctgttcatgcttccagcatcaaactggacgtttactgtctgcccaaaagccagtttccaaaaggtttgcttccctctgttcagtggattcttgactacatataggtcatatatttcaaaaaataatgcctagctatttctactttgaaatcatgactaaagccaaaccacaaccacagcaaagataacctaaggatttgtttaccagaaatacctacaaaaaagtttgcaggccgggcgcgatggctcacacttgtaatcccagcactttgagaggccga

SEQ ID NO: 49702 - DNA, 887 bp, Homo sapiens
tttttttagtaagtatacatttaggtgtgaattttttattgaaataaacaacagcataaagaatacaagtagccaaaatggttttgaaaacccaaattaggtcaaagttctaaattaaaaatagcagttgtgtatcaatttaccttattctagcaatttaagttggtaacatacaaagttattctgatacaagatattaaagacacacttggttttaatcaactacctttgaagacaccaaatctaaacactactggaaacatcgttgacactacagccaaatggacttgagccaaattttctcaagcacaaatgcaaactcattaactatttctttcagtatctaagaatatctttattgaaaaaaattaaaaataaaatcagttcgccagaagcagttagaagtgtggctttgttcgtgtccaagcggattgttaaaatatatacataaagggaaatcttgccagatgtcacaaattatagcggcacccgttcagatttagggtgagtttctgatcaacctatcagtctccaattttacagaggccctactgtttctacttccactgttgcccaaaagtatcctgataaaactcctggttttcagatttgtaaccatagttaccagaatgatcaccaccttggagcggttgctgagcaatgggttgggagccccagttctgattattggtctggcgccgcttggaatctggctggttgtacccattcagctttgcgctttcctcctacatttccaccgcggccacccctcgcaccacgtaccccgcggcctctttgttgttgggcacctcctctcgcacctcgaacgcctcttgctgatccaggacctcctctctgtgaataaccggctctaccgcggggaggag

SEQ ID NO: 49703 - DNA, 650 bp, Homo sapiens
atgaagcagaggatgatgaagaggaagaagatgaaggcagaaaggattcagatactgagtcatcagatttgtttactaatttgaatttaggaaggacctatgctagtggctatgctcactatgaggaacaagagaactaggggagctgttctggtggccgtgtgtgagaggagcaggagtgagtgtgtgtgcttgatgaattgtgtgtggttgttcaaaagtaccttagcccacttagccttgtgcagaagactagttacacttaatgggccaagcaatagggtgtagcgtttttatagaactgataatcaggcttatggcataagaaaaatgagtttcaaatttaagatgtttattgatcgaagcaattgaagtatcatggattggattgttactgatttcagtaaagtatgttttgccaattagatacatatatacaagataaaggaataggatggtaatatatttgtttgaaattaaattactgtttttattaaaaaatactgcttcattgggctgattttgtaaaatgtaatgagtaaaatgaattactgtatttttccttttatgtccacagaatgagagtcatatgttgttatattctaaattttcattaaatattcatgtcaccttgagttgtcatgataagt

SEQ ID NO: 49704 - DNA, 1071 bp, Homo sapiens
agcgtatgctgccacggggactgaagatggcgccgcgaggtgagattccggaggtaaacggttgtcctccaccccgctggaaatcctgttctttctgaacgggtggtataatgctacctatttcctgctggaacttttcatatttctgtataaaggtgtcctgctaccatatccaacagctaacctagtactggatgtggtgatgctcctcctttatcttggaattgaagtaattccgcctgttttttggtacaaagggaaacctctgccagcgaaagatgccactcagtattagcgtggccttgacctttcccatctggccatgatggcctcctattacctgctgctgcagaggccacgtactccgccggggaggccatcatgaatgggcatcttgctccttcttctggtggctcagaagcttttactttgaaggtgctcaccttggctgctttctccagtatggacacgatttgaagtacagaatttcagccagcagcccatcaggctgacaccacacatattgcttctggtactttagccacaccagtgagaattggtggggcaagttgtcctgagaaaggctgtgtgctttttcttcagcacagacatttgggcaagcaactcagcataaggccagtgggtacccatcttctaaaccaggaccatcagccccaagagactcttctaaaactccagtatagggaggggcaaggttattcccatcctgccccttctcagaacccagtcccctgctgacctcaagttctcctccttgatcaccgtggccagagcatctcgtgtggaccatctaggctccttgggcttcaagcaggacctgagccacatgctccctgtacgagctgtgctatacctgtcccacatgagcacggagagcctcatgttggtgggtttccagagtgatgtgaaagcctctcaccccaatcctcggagactgagttccacaacttttttagtagctcatagtgttatttttctactctcttcatgaaactaactttattttataataaatatatattttctgttaaaaaaaaaaaaaaaaaaaaa

SEQ ID NO: 49705 - DNA, 941 bp, Homo sapiens
tttttttttttttttatttctatggtagaagcatttatttcagatatagaaaaataacactatttcaaagtcagagtaagtaaacagaagtatattttttccttgcatacccatcctcaaatgtcaacacacagtttccagccattcttacaaggaacaaatgcaaaattaaagtaataactgtcaacagaagagctgtattaaagctatgtatcaaccttgaaaatcagaaaacacaaagtgatctagtgcagtgattctcaactttagtgtgtatcagaatcacttggattgtggaaaaagcaccttcagagagctgaaggaaaatcatcaggtcaagcaagcccttggtctcagaataaatatcaaagagactaaagatacgtgctttgttcctcagggaagagggaaggacaaaatatactacaatatagaagatcagccatttactctgtgtcacttctctgagcttcacattcagaaataacgacagatacaactctcaagaattgttctacatattaggttagatagtgtaataagtgcttctccaatccataatacatacctactatcattatttcaacatcattattatttgatacggagtacatcttccccacctaccccctactcccaaatggctgctattacttattttaaaagtcaaacaatcagtcattgggttcaagctcatggactacaagtaccatttttatactggtatcatttttactagcttcaactattcacttataagatttcagtacattactgaaatgacatttttgtacccaaactaagacaatgactgaaagaaaaggaactaaagctttaaaattgcgtcttgcttctaaagcattaatagtgagaaaaagaattcttttcaaagtgacccattttagaaaatttctgatgttctctgtattgttttctgaatc

SEQ ID NO: 49706 - DNA, 2230 bp, Homo sapiens
  misc_feature (1)...(2230): n = a,t,c or g
tatttttttttttcttttttttaatgaatgaaattctttgtttttaatttcacacagtttaaaatacaatatgaaatcaggctacagtatataaaaaactctccagcaaaatgatgtgccagcatcagctactaaaataaacaaacaaaaaactccgccataagaatttttttgcatttttttttaaaaaaacatcgacacttacatcgctacatctctaagctacctcagttctgatttttaaaaagcacctgcttttcctttttttcatcttgcttctaaattttcagcttttaaaaaatataaattatatgaaaatacaagttggaaaatagtcaaacacaatataacatctttttcatccctatacttctcagcttaaaaaaaaagtattcttaaaaaaaaaagttcaataactgaggcagtattcctgataattttattttaatatatatattttatatatgtatatgtatacatatatttatggttccttgaaacttctttggaatgtaggtaagagttcaacaaatttatatagaccccaacagagtaagcggcatgcacagcatgactagaagagagatggtgtatttctcaccatgaagggttaggcaggttaatgctgtaaaacccagagtgttcatctccaaagtgaggaaaagcacatctgatctttgaatgctacctccaatccccacagccacaaaaatcagggctctatgtaggggaagtcccctctccagaatggagaagggaacaaaagtgactctgaaccctaaagccaaaaccaacaaaggttaaggcatctctgggaaaataaaggtttcacccagctagaccagatttgcccatccttcctctgaagttaacgtgtgtttttaaaaagcataaacgcaacatttccagtgtataaaccacccaccactcttcctgggatggtctctggcctttggacaaaggagaaaaaacatctggccagatcgacaaagctgtcttaactaatacactatctacaaatcttgaaaatggtggacttagagagaaagggaattttagcaaacaagcgggcggaggagcactaggaggcactttcttatatcttatctgctataggaactgcaggagttatactcacagaaggagagtttccggcataaatttaataggaacggtggatgatttgagaaagtgattttatgcctggttgcaaacagcaagcaataattgatacccggccctggttctactcttacccattattgaaatgtggaaagacttacctagaaatctaaggtattatttcagctgcagttttgcatgtttgnnnnnnnnnnnnnnnnnnnnnnnnnnnnnnnnnnnnnnnnnnnnattcacacacatgcacacattcacacacacaccttttgccagtgcccaacaaaaatcacataatctaagagaaatcaatgtagtccaaacagttccacccaacactccctgagcagctcctaaaatattttgagagcttcattaaggcacctgcatccaaaagatcaaaataatacagctgggataattctgcctttgctttccatatggatgctccaattcatcagtatggggacactcatgaatcacagagctatgttcctgataattctgggtctgcaagaggatctgggagtaaataacaatcaattttcttaaagatatgctagaaagtagttagtacttccaatttctcatccaaatcccaaaaagggccagccctgagaagcttacctgaaatatttctttccttctctcatggaagtccataaaagccacccctcctccttatcctttcaactgggcaactatagagtgagggagattctaattgtattaggcacttttcctcactagttagatgttgacttttcctctaaaactccattttcagattccccctcacaaccagcagaaagatgactaccttgcttgactatgtttgtatttaaaccttgggggaactaaaaatctattcaaatctcatggacaaccttattttcctcactgaacctccttccttagtttcctttgccttcaagtcattcctctcttctggaattaaccttcacttaccctgtgccaagacatcagacccaagcaagaggccctggcatcacctgtgccattcattttgcatacacagtctcacctgacatcctaccggactaatttaaattcttcaaaggaaagcctntga

SEQ ID NO: 49707 - DNA, 1186 bp, Homo sapiens
aaaaaccttaataaaaaaagtgttccccaccttggtccccaaattgtaaatgaaacaatacccaaatgccttaacccgggctacaaactgtacagtcaagttcctttcattttactattactactttattaattcactcctttactaatattttttaaatattacaaagaaatgacagagttgtactgaatatcatggataaagcaaatctacaaaaagtaaacaaatcagcactcaaaacaatctttataaaaaatatttattcaatcttcaaattaaaattataaaagttcatcattttaagctgttttaagaaagcaaaagaaatatgtctatattttccaaatgaactaaagtggtattcccctcctcccaactactcagataagaatggtaacaacccttttaatctttaaacccaaattagtttcaggaacatttcaaaaaattgttttggtgacaatgtctcaacagaaagcctctccgtttatatttcaaaagtttcaaatagtgtcaataaactgactagtacaaaaaatatacactgtatttttaaaggccttttggattgcgtttagtagtaagcaggctgctggtgtatcttgggagaggtcaaacggcgctggggaaggggaaaaggagctcgctttccattcctgtgtgcatgcaacaagcagcaaaacagcaaagttactccagttagcttgtactcagctgtgctttctgccagcagaagatccatttaatgaattctgaagacttggaatatttgaacctagggaaggatttgaggttccctgctgagaactcccattgactgggctcccattacctttcaaaataccagtacacttccaattgtccatataattagctttccacaatcttacacacccatcatctcctgaagatgctagcaccgttcctgttatattccaactcactcgccagacctgagaattatgattatcgaactgagccactatatggatttcaaactttgttggcccaccagaggaagtcagttctttcctcacaggctttaatgtaaaaattctcacatctttggtcgctattgctagaatatggaaagatcttcccaaatttggagcgaatgcaatatcatgaacaggatcagtgactgtcataagagtttcagcttttgcatatttcctggtgttttcat

SEQ ID NO: 49708 - DNA, 382 bp, Homo sapiens
tggtaaacattaaaggcttgaaaaaccatattttgttagccctaaaatgtacatttttcttcccattttaacttatctgaaattgggatgcatctcattactgtcaaccaggtgatagtcatgtaacgctcctaccgtgtgcatgtgtgaatttacagcttgtcatcgtgtcatccctttaaccaacatgtgttttgttggtatcaaatgtgtcaggtttaattgacattttaaaatgtcttcaaaaagatcacactatgattcagcattgaaacgaaaagttattgtgtatgcagaaaagcatggaaacagagcagcagggcgtacatttgatattagtgaagcaaatattcgtcgctggagaaatgatcgcaattccata

SEQ ID NO: 49709 - DNA, 1123 bp, Homo sapiens
gcccagggctctcggatgcagggagcctgggcccaaacagcagcttccggagtcggaaggagctgaggaagaagactgactgaaggagcttgcgacttaaccgcctcggcaatccggacccagcagcaagcaggacgggcggcgctctgctactggtcccgttaagccagagtagcccaagccctgaagtcactgctcatccggaatggaaatcccgccgaccaactacccagcctccaagggcggccttggtggcacagaactacatcaactaccagcaggggaccccgcacagggtgtttgaggtgcagaaggtcaaacaaagccaagcatggaaggatattccagggaaggagggacataagtattcgccttaaatttgctgttgaagaaattatacaaaaacaagttaaggtgaactgcacagctgaagtactttacccttcaacgggacaagaaactgcaccagaagtcaacttcacatttgaaggagagactggaaagaatccagatgaagaagacaacacattttatcaaagacttaagtccatgaaggaaccgctagaagcacaaaatattccagacaattttggaaatgtatctccagaaatgacgctcgttctacatttagcctgggttgcctgtggttatataatatggcaaaattctactgaagacacatggtataaaatggtaaaaattcaaactgtcaagcaagtgcaaagaaatgatgactttattgaattagactacaccattctacttcataatatagcatctcaggagattattccctggcaaatgcaagttctctggcatccacaatacggcactaaagtaaaacataatagccgtctgccaaaggaagtacaactggaataaacaaaaaccctaacactggaagtgtaaacatgtctattgatgtgtatgccaatttcactggcatctagcttatgaggccaaataatcccaaagtgtcactttatataaatgtcttgattacagtatagaactttatagagtccataatacaaagtatcactacataaaaatgtctttaaaacagtaatagtggtatgtatatccaaaataaaaagcttcaatttcagcctcaaaaaaaaaa

SEQ ID NO: 49710 - DNA, 960 bp, Homo sapiens
  misc_feature (1)...(960): n = a,t,c or g
gcgactagaagaaaaagagagggagatgcagcagctgctgagccagccccaacacgagcgagagaaggaagtcgtcctgctacggaggagcatggcagaaggggagcgcgcccgggccgccagtgacgtcctgtgccgctccttggccaacgagacccatcagctgcggaggacgctgaccgccaccgcccacatgtgtcagcatctggccaagtgtctggatgaacgacagcatgcacaaaggaatgtgggggagagaagtcctgaccagtcggaacacacagatgggcacacctctgtccagagtgttattgagaagttgcaggaagaaaatcgactgttaaaacagaaggtgactcacgttgaagacctcaatgccaagtggcagcgctacaacgccagcagggacgaatacgtgagggggctccatgcgcagctcagggggctgcagatcccccacgagcccgagctgatgaggaaggagatctcccggctcaacagacagttggaagagaaaataaatgactgtgccgaagtgaagcaggagctggcggcctccaggacggcccgggatgctgcgttggagcgggtgcagatgctggaacagcagattctcgcttacaaggatgacttcatgtcagaaagggccgatcgggaacgggctcaaagtaggattcaagaactggaggaaaaggtcgcctctttgctgcaccaggtgtcctggagacangattctcgagagccagacgccggccggattcacgctgggagcaaaactgccaagtatttggccgccgacgcattagagcttatggtgcctggtggctggaggcctgggactgggtccagcagccagaaccccctgcagagggcggcatcctggcgcggccaaaaaagccaaggggaccttcaggccctcactgcctgcagtgttcagtgacaacaangngaanactctca

SEQ ID NO: 49711 - DNA, 489 bp, Homo sapiens
  misc_feature (1)...(489): n = a,t,c or g
cttaggaacgggttgctaagctggtgtttttgctccaagacatggctgcagcttcccagggaggagcccaggggcatctccaacactcagcctttccctccggacccttttaaaagattcaacagcaccgtctctctccacttccatcctagaatgcagaatctgcaaagtgccttttgtaaagtttcttaagggacccatcccagccaaaatgaatcccagggaagaaaaagtaaaaataattacagaggagttcattgaaaatgatgaggatgcagacatgggaagacagaataagaactcaaaggttcgaagacagccaagaaagaaacagccaccaactgctgtccccaaggaaatggtgtccgaaaaatcccaccttggcaacccccaggagcctgtgcaggaggagcccaagacccgcctcctgagtatgacagtccggagaggcccacggagcttncctccaattccttcaacttncagaac

SEQ ID NO: 49712 - DNA, 473 bp, Homo sapiens
gctaaggaacacagtgctttcaaaagaattggcgtccgctgttcgcctctcctcccgggagtcttctgcctactcccagaagaggagggaagcacagtatgaagactttggagactcaaccgttagctccggactgctgtccttcagaccaggacccagctccagcccatccttctccccacgcttccccgatgaataaaaatgcggactctgaactgatgccaccgcctcccgaaaggggggatccgccccggttgtccccagatcctgtggctggctcagctgtgtcccaggagctacgggagggggacccagtttctctctccactcccctgggaaacagagtttggttcccctagtgagttgagtccctcgaatcgaggagcaagaactttctgaaaatacaagccttcctgcagaagaagcaaacgggagcctttctgaagaagaagcgaacgggccagagttggggt

SEQ ID NO: 49713 - DNA, 389 bp, Homo sapiens
agagttttcagattgctcttgggaaccatgccgaaagtagtgtctcggtcagtagtctgctctgacactcgggaccgggaggaatatgacgacggcgagaagcccctccatgtttactactgtttgtgcggccagatggtcctagtgctggactgccagttagagaaattgcccatgaggccccgggaccggtcccgtgtgattgatgctgccaaacatgcccataagttttgtaacacagaagatgaggagactatgtatctgcggagacctgaaggcattgaacgacagtacaggaagaaatgtgcaaagtgtggactgccgctcttctaccaatcccagccaaagaaatgctcctgttaccttcattgtggatggagcagtagtca

SEQ ID NO: 49714 - DNA, 710 bp, Homo sapiens
ctgaacaagaggatttcctcacatcatttccttgtgtctggacatcaggggtaacaactgtacttactttacaggaagaaattttaaaactgaaaactacctgggatcatagtgtttctgtgattttatttaattgtgtatagtaattatccagtgccagaaaaaccgtcacttgcaaaatactttgcactcaaaatgtttttacaatgcttctaaatgttactggtttctgctttcttttgactacttgactgacaaaatgatctgactactccatttaagagcaaaggtaactcatgtttaggtaattaactgcttgttttaagtgattatatttcttccactgtttttgaaaaataatcaaagatagcattcattgagagacagtgacagatataatttactacatatattgatttttaaataaagttgccttaaataagtgtatgtaagcagtagtagttgctatgtactgatttacctcaaggtgcaaaataattaaacctgtacatattccatttacaaaataaattcagccctgcactttctttagatgccttgatttccagaatggagcttagtgctactgagtaccctggccacagagccacctcaggatattcttttctccaccctagtttatttatttataggtatctgtttacaaagtctgtagtaaatcctgatgctgcccatctgaaatgtacttt

SEQ ID NO: 49715 - DNA, 1607 bp, Homo sapiens
  misc_feature (1)...(1607): n = a,t,c or g
tgacgcgctcctaccaccctgggcagccgagcagagtcgtccccagcggtcatccctccctgcctccctgactttgcaacaccgcgttccgggaggaccggcctcggcgagggaggaggcgggggagctgcgaacacccagacccaaaccctgacatgctctggggcggagaggaggaagccaggagctgagcgcgccggagtgggctgcttcgccctccggctccgagcgccgggctccgggcgccctgccctgcgcctggggcagcagcctttgctggtcttgggggcgccccccgctttcccgcccctgggggttcgcggccggcatgaccattgcttgctgaaaagaagtaccggatcttgcatgccgctcaccgtaagacgagtacaaaatttggacagctgtacatgattcagcaaacacagccatggaacagagtgaccggggagaaggggtggaggtcgtccagaatgagccctttgaggaccctcaccatggcaatgggcagttcaccgagaagcgggtgtatctcaacagcaaactgcctagttgggctagagctgttgtccccaaaatattttatgtgacagagaaggcttggaactattatccctacacaattacagaatacacatgttcctttctgccgaaattctccattcatatagaaaccaagtatgaggacaacaaaggaagcaatgacaccattttcgacaatgaagccaaagacgtggagagagaagtttgctttattgatattgcctgcgatgaaattccagagcgctactacaaagaatctgaggatcctaagcacttcaagtcagagaagacaggacggggacagttgagggaaggctggagagatagtcatcagcctatcatgtgctcctacaagctggtgactgtgaagtttgaggtctgggggcttcagaccagagtggaacaatttgtacacaaggtggtccgagacattctgctgattggacatagacaggcttttgcatgggttgatgagtggtatgatatgacaatggatgatgttcgggaatacgagaaaaacatgcatgaacaaaccaacataaaagtttgcaatcagcattcctcccctgtggatgacatagagagtcatgcccaaacaagtacatgacaatggatgaagtccgagaatttgaacgagccactcaggaagccaccaacaagaaaatcggcattttcccacctgcaatttctatctccagcatccccctgctgccttcttccgtccgcagtgcgccttctagtgctccatccacccctctctccacagacgcacccgaatttctgtccgttcccaaagatcggccccggaaaaagtctgccccagaaactctcacacttccagaccctgagaaaaaagccaccctgaatttacccggcatgcactcttcagataagccatgtcggcccaaatctgagtaactttatataaatatctcatggggttttatattttcatttgttgttgttgtttttttttaaggaatcttctgataggggaaaaagactgctttgtcattcaaacatgnttccttcgacctttcagtggtgcatgtggactcagtaaa

SEQ ID NO: 49716 - DNA, 1165 bp, Homo sapiens
ctggcccagagccttcgggggacttccaaggaagctgcttcagacccctctgactctccaaaccttcccacaccagggagctggtgggagcagttgacccaggcctcccgggtctatgcctctgggggcactgagggctttcctctttcccgatgggcaccggggcgtcatgggactgcagctgaagaaggtgcacaggagagacccctgcccacagatgagatggcaccaggcaggggcctctggttgggaagactatttggagtgcctgggggccccgcagaaaatgagaatggagccctaaagtccaggagaccatctagctggctgcccccgacagtgagtgtgttggctcttgtgaagcggggggcacctcccgagatgccttctcctcaggagcttgaggcctcagcacccaggatggtgcaaacccatagggcagtgcgggctctctgtgatcacactgctgcaagacctgaccagttgagcttccggcgtggggaagtgctgcgtgtcatcaccacagtggatgaggactggctccgctgtgggcgggatggcatggagggtctggtgcctgtggggtatacctcccttgttctgtagccctgggaccctttcctgcgtatgtgtctccttcctgtcacctgggaatggaatggccagtgaacaccatcccagaagcattttccctctgcaaaatgacgtttcttcccacgtctgtttctgctaatatttaaaataaactttccttcttccctcctatacccacctgtaaggtgaaatctgctcttcttccaaatatataaaaaaggaattgccctccaggtaatccctttcctttttcccgtctatataagggaatgtcttccttcctatctatctgcaaaatggaaatctagacctccttcttcatccataagtggactgtgccagtacaatacatgcctcagcccccaagcctagaaggacctctagtctccttcctgtgtggaatcttccccactccatccctcccaagttgcctgtattgataatgtactcactcatgctgtactaggtgctgaagcctggacacccttggtgggtgggcctgtggtgatggtttgcatccttcctcctttgtcccaataaagtatgggagttgaaaaaaaaaaagtcgacc

SEQ ID NO: 49717 - DNA, 1105 bp, Homo sapiens
ggtagcctcctggaggagaatttcggtgacagtctacaatcctgcctgctacaaatacaaagcccagaccaatatcccaacaaaaacttgctgccagttcttcattttgaaaaagtggtttgttcaacattaaaaaagaatgcaaaacgaaatcctaaagtagatcgggagatgctgaaggaaattatagccagaggaaattttagactgcagaatataattggcagaaaaatgggcctagaatgtgtagatattctcagcgaactctttcgaaggggactcagacatgtcttagcaactattttagcacaactcagtgacatggacttaatcaatgtgtctaaagtgagcacaacttggaagaagatcctagaagatgataagggggcattccagttgtacagtaaagcaatacaaagagttaccgaaaacaacaataaattttcacctcatgcttcaaccagagaatatgttatgttcagaaccccactggcttctgttcagaaatcagcagcccagacttctctcaaaaaagatgctcaaaccaagttatccaatcaaggtgatcagaaaggttctacttatagtcgacacaatgaattctctgaggttgccaagacattgaaaaagaacgaaagcctcaaagcctgtattcgctgtaattcacctgcaaaatatgattgctatttacaacgggcaacctgcaaacgagaaggctgtggatttgattattgtacgaagtgtctctgtaattatcatactactaaagactgttcagatggcaagctcctcaaagccagttgtaaaataggtcccctgcctggtacaaagaaaagcaaaaagaatttacgaagattgtgatctcttattaaatcaattgttactgatcatgaatgttagttagaaaatgttaggttttaacttaaaaaaaattgtattgtgattttcaattttatgttgaaatcggtgtagtatcctgaggtttttttccccccagaagataaagaggatagacaacctcttaaaatatttttacaatttaatgagaaaaagtttaaaattctcaatacaaatcaaacaatttaaatattttaagaaaaaaaaa

SEQ ID NO: 49718 - DNA, 1332 bp, Homo sapiens
cttttttcttcaatttaattgaagttacttagaaaaataatcaggcttgaatggcttttcctggaggaaggttcatgaacattttcacgcttttgttggcaatgtggaattcagctttctttaacagtacagcaagatacagggagcgttttctacaacaggctctctactgcatacaaatatgtaaaaaaagaaaatcacactccacaaagatgtgacattacatgtccatatgccatactgagcatgctcataagaaagtagtatgggcagctccttctggacctaacaaagtgtagcagactgaaatttgcctgttatcagccaagggttaagcggattctagaaggccttgttgcctgtagggttctaactggttgtgatggaaaaaggttggaggaaatgctggtggtgggaactcgggggagtgatgtggtcagtcctgctgacatagaggtgggcaaggaagggatttggtcactgggattgcacagaatggcgcagctgagagtgtgtgtgtgtgtgtgtgtgtgtgtgtgtgtaggggaggactggctaggaaagcaagcagagtgcctctgcttcttctgccaactctatctcagcactgatccagaccccaccagccaagcatttgtgggacccgcacactttgctctggagctttctagtagcctggattaatcgacccctgtgcttcatgcctttgccaccaggagaaccagtgcaactgaagtttccactgcctgctgctctcctgtggcatccacatcctgaataggcaggagggtgcagcccacctggtgcacagggaggaggaggaacgtcccctctgagataccacaggtcagcagaccacctcttcccagaccagctggggagggcagggaggcggggtctggaggagctgcgggaatcatctagagctttccaaccaaagggataaagtaagcaggaatgtccttgcaaatactgccctggctgtacctggtctttaaaacacagcagcacctttgagaagtggctgggagatgggacgcctgcctgtacttttctccagctaagcatgcatagaaagcagtttcaaatattcctctttaaaaaacacaaactttcattttccaggcacacttcacaagtggatttctttaaccaaggacacagaatactttctacattctgcaaaaacagttgaatccattttttttaaagtttcaatgccattagaaaagaaaatgtgaacacaaagcaaaacacggggagaaagagtccctcattccagaaacctattgatgtcatgtcccctgaaggacaatctttctcacttaagag

SEQ ID NO: 49719 - DNA, 1113 bp, Homo sapiens
tttttttttttttttttttcttgctgatattttcaatttattactgcagtagataattgctctgaaagtgcaacactaaatcactcttgtcatagcctctgctccgtttccactggcaaatacttggaaattcattcttcgagcattgtggaccacaagcttctctctgggtgggaaaattaattgccactggccaagtatcataagggaccacacacacacacacacacacacacgaaccagaaggtttcaaaaagcagacactggagaggagtaggggccaatttcaaacagaaaacccaataaagggctggagaggagtaggggccaatttcaaacagaaaacccagtaaagggctggagaggagtaggggccaatttcaaacagaaaacccagcaaaggagttagaggagaacagctccaactgtgcaaagtggagaccgactctccactctccagtggcaacctcacattctggtactgtgcaaagcggagaccgactcttcactctcctcacattctggttacgttggccctggtagacctttatccctttgcctctgtaacggtgataccataatcataaccgtgccacatctcagcatatcagaggcccatggagtaaaaatagatgaaaagacctctcaagctagtttggaaaaatagagggtttagataaactgactatttaatctcctacttaaacctgttaggcagaatatctgggagaacactgggcgtaagatgctgcctaacaggcataaccccttgctctaaccagcctagggccagtatgtttttgatggaaaagacaactgtcaaatactacaacgacaaaaaggaagggaaaacatgagcagctctagaaaacgtaagattcaaaactctgaacaacaacaacaacaacaacaaaactatggacaacacacctagccaggaggcctgaccactcactcactcctaagcacactctacacatacacactgactttcccacacacacaacagtcaggtagatgcccaaaggagggcaaatccaaatatctgctctctttggaattttcacggcaaatctgaatttaggcaaaagtgaagacctccctggggtcttc

SEQ ID NO: 49720 - DNA, 1026 bp, Homo sapiens
tacatattagaactcaatgaagaattatttaaaagagaggaaaggcagtgcagggctggaggtcctggagggtggcggcgggtcgtcctaactagcaggctgaaaggtgctggaggggatgccttcactcagaggaagttcacagccacctgccttgggaacatgtacctgttcatcttttcgtaatgttagtattcattttgctatcttcctgttgccatttccaaacagtgtcagtatgtttttgttaaatacgaacatttaaaacatatcgtatctgtaagcctatttgggtgtcttcatttcatgcccgcactgcaccataatgagtaccacacaaagccagaggatgacacttcctccagaggtctcactgcacatgggagaggttagccctggcattaagggtccttggaatctctcagcagtcatagtcagtcagatgcaccaagggcagctgagtcaatctcctttttgtaacaacaggccgttcctgcggttctcagtgctgccaacctgggcatactgaagagcctcaaccaatactggctctcagggtactttcctttttaaaagaagttcaacttttgctattcttatgccccataacttttaatttgcacaagatcagccatgcccactcactgaattctattatattacccacacctctggaaattcacaaagtctgaattcagatctatgcataaggatgcaaacggattagcaataattgctggcactgccatcaacacctcctgtcgatctcacctgatctgaggataaatgaaggcaaagaatgtggccccagcccctggattggagtggaggcaaggagggtggcgagctgtcttcagcagtcggcctcacctctctgctcctgtatcaacaagtgccatttcatccccacttccaatccccaacatttataccccgtgaatcaattcttcttcagcatgccagttgctggagacagcaccatttacatacaggcatctatagcagttatcttccagggtggaagca

SEQ ID NO: 49721 - DNA, 784 bp, Homo sapiens
  misc_feature (1)...(784): n = a,t,c or g
aaagaattttacactacatattttaatagtaaacagggatcacttttcctttagcattcagaatgacaccatattcttaaatatactccttccctgaagcgtgtttgtgtgtgatgccatatttctttttcaggtaaatgtagtcttccttataaaaatgaaattaaacctatgctctcaattcttttatattctaacaataaataaaagagaaaagattactgactgtgcattgtacctgtatttatagtttatggttatcaggaagctctgtaagaaagaaaaggtcagcctcccaggcaaaccagtagtggaggttttacatttgtttgcacatctcagtatatttctgttgaggtaaagtttgcacagtcatctgacttctgatcaagcattagattttaacttgtttagattttgtcttaaacaccagtaatatggctcttgtttatcagctaatcttgaatttattctgtggtaaatcttttgagttgttgagtatatttgagattgattggattcgacctcttgttgaactgaaaacttaattttttctctgtatttttggtacaaagccactgatacggtgcacaattgtaattaagtatgttgcagttgtaaatattagagtttaatctcatgctctacctttatttaggcaattacctaatttgccagtagctttataaatttttaaaggataaattgttccattattttgtccaatgttatttgaacntgggggtacttagggagccccttgtaggggacgtgcccgggtggc

SEQ ID NO: 49722 - DNA, 1332 bp, Homo sapiens
ttttttttttgatttttgattttttaatggcagcactctcataactacattcacggaccaaccaaagccatctccaagcctagaaaggatacatactacacgcagcgaaaatgccaaccactgatccagaattttcaagatggcacctttccccaaacttctataccattcattaaacatagactgcaaactgctagcctgtagaccaaattcaacctctaagtattatttgcttaggtgcctaagcatctttaaaaatttgatttagttggcaatacactgggaggtttcacataaatatctaggtttccagcttctctgaagaaatgagaaaatccattcccacatggcaacaaccagctggagctaacagctgttagacagcatgctgctccccgctactgccttacacccagccagcttcatgtgtgcatgttatctgcctgccattcacatcggttctccttgctcagcaaatgtcccacctcaacctcacactcaatacccttatacaggttccctaatcagagttcagtagggcacccacactatagctgggcaatccctggatgctgtgatatttgttaaccattatgttctttccaaccacgggaacctttccttaagagctcaagagcttcactgttggataaaaacagttcctgatcccggattctgacctttagttttccttttccagtcactgccccagtctgcctggccctgggctctgttccatattggcaatgagagcccacggcagggagacttccagcaggcttttccacagtgcagccaaactatcagtaaatagactttgttctccattaaaagccctgtagcagctgagttgctctaccttatcccacctggctcttacgcagtctgttccaagtgagaagttagcagagtcctgtaaacaaagaacagttcaggggccaacctgcgctcccaggtgccaggatgctctcagggtcttcactgtgctcccaggtgccagggtgctcccatggtcttcactgtgctcccagacacttggcttcattgttctcattttgatcctcatttggcatctctaaacgcaggcggtgcagggaatgcacaaagaagcgaggaagtttgcagaccaagttgagttcctccttcccggaccccagggcaggcaggatcagctgccgggcgtgcaggtgaagggggatgtagcgggccttcgactgttctagccccagcttcttcagggtgcccacagacagcttctggggggccaacctattccagtctgagtacttgtgatcaccaaggattggacaatccaatccaaaagacaagtga

SEQ ID NO: 49723 - DNA, 667 bp, Homo sapiens
ctaaagcggatccagaaggagttgcaggctttagatgacatggtgtcagctgacattggaattctcaggaaccggattgatcaggccagcttagactattcatacgctcggaagcggtttgacagggctgaagcagagtacattgcagcaaagctaggatatacagcgcaagactgagataaaagagcaactcactgaacacctttgtacgatcatacagcaaaatgagctccgaaaggccaagaagttggaggagttgatgcaacaactagatgtagaagccgatgaagagactttggagcttgaggtggaggtcgagagattgctacacgaacaagaagtagaatcaaggagaccagtggttcgtttagagaggccatttcagcctgcggaggagagtgtgacattagaatttgctaaagagaacagaaagtgtcaagaacaagctgtttccccaaaggtagatgaccagtgtggaaattccagtagcatcccctttcttagtccaaactgcccaaatcaagaaggtaatgacatttcagctgctttggccacatgaagttctggtattcttttgagctaatatggtattgagtaaagtatactttttgcagtagatcatgccctgacctccaataaaaacctctttaaaacaaaaaaaaaaaaa

SEQ ID NO: 49724 - DNA, 1224 bp, Homo sapiens
tcatcatgttaatagtgtatgtccgattctggtggctgtgaaataatgaatacagtcactggtaagggagaacctagaacccagtaggtgtatattttcaggaaactgagctcacagagatgtgtattagaatccaagtggaacttctgcctctaaagaccttgcaagaaaagagatgccctgaaaatgaaaggttgcacctcatttaatgaagcttaaccctatgtagaaagtctctttcgggggcagaggctttctctgggtgccaagccatatatattagggaatagtagattgttaatttcgttttttccctcccagtgcattttaaaaacagcactggctggggcattctcattctctgatggagccatcaatgagatttaacttagtcaacctgtgctagcaacattctgaaattccttcaaagaaggcagtcctttgggaaggtgtttttttttttttttttttttttgactctaatcaacattccttttgttggtgacatttgtgattttcagtaatctgagtttttgatggccttttaaacaagactccagtatgtgaaggttaattgctgtgctccacagatcttgtctattggcccctgtagaaagttaacctttgttgttttccttttataatttgcttattgcacaattgctttagggtaagtgaattatattaagatgccttgaaattatagcactccttgattaagaagctaaaatgtttctctcatttactccttaaacaaaagacttaaattagtttggggtcattattacttttattttgcagcatttggtttgttattagcgtaagagcaagtataggatatggagaggcccctggcttcatgagaacaaaggcaggcccaggttataattacagctttctcctgccccttctttactttctctaccacagttttctccactgtttgttttcctcttgccacaatttgctaacatttaaaaaattttcctgcacccagtagtttcatatcctgtagacatcctcttaggacattctcaaatttcaaaataaaaaatattcatctatgtagttaattaaagttaaagtttttgcagatcaactactcaaactactaaatacatttacctgagaaaaagtctctgagagcacttcattcctgttttagttcgtgtaaattctctgaggaatgttctggagatagataactcatttacagtgggttct

SEQ ID NO: 49725 - DNA, 1192 bp, Homo sapiens
gcaatgtacagcaacagaggtacctcttggtgtatagtatttacattctcttttaggtagaagaggcaattttacccttatttcacatggttagaaatttaaagcaagatcatttacccaaggataggtgtttggtaatgttgaaggagttagtctggcttcatgttttacatcttcaactaaaatcccatactatctgcttggatttggagagccaaaaaataaagctgattgtcatgtgattaaatatctgatcaacaggtatgaatataacttaaatcagcatatttttgccatggtaataaattgtcctataaactatttatatatttttgttcttcataattatcactaataagcatcagtttgttgtttttaaaaggatatttaagtgagcattttctagttcatatgaaaataaccatagtacaggatgatttctgtccacacaaaggttaaaattaggattgcacagttaattttcacttatatttatggtactattatgtgggtgatgcctttttcttttaagcccagtacatatattatgcctgcctaagttctgaactggggctgtatttcagtagttgtagaattattgatatttagttttgatagctaatgtttaattgtttggatctgcacagtttggtttttgcacaaaagtcatttaaaaaaatctgagtaattgtcaaatattaaaagaaagatattcttcctgtaaggaatacagtttttagtcaaagtggccattacatcctctttttaatttacataatacagatacttgagaaagttgttgtggtgttgtatgccaagaaaattctttttattggtgcctatattgtaaccaattatttttaatgcattgtattttgaagtaacggttcagttaaatttttcacctgctgtgtaactgaaacacaattacagtttataatcatctgtagaagtctggagataattttgcaactcatgttatgggttaaatgaatatttttgtaaaagtaaaagcaacaaatttataaattgattatttgaaactttacaacacaattgcatcccaaatacaaattgtattgcttattcattatagctattcgtcctgtaatctgtttctaggtgaagcatactccagtgttttaggggttttgaaaataaatatttaaatttcacagtcaaaaaaaaaaaa

SEQ ID NO: 49726 - DNA, 1538 bp, Homo sapiens
tttttttttttttgtcagttttgatccatgtttaatgaaaaagaagttacatgaatagaaatggacatataacaaagagttcaatttgagaaaatgtggtgataggtagaacaaggagaaattgtttcaattctgaatttactcgcatattcctattagctgttactgatctaaaacatctccttaaatccaaaacaaaacaatagttacaagttcactgatgttttcatgggcactcacccaagtaatgtccaaacaatatttttccatgtcccccctcccccagaacacacacaggcaaaggcagagatgtttactgtgaggtcacatggcatgaagcaaatgcagccttatctgtttattattacaacagccagttagcattggcaaatgtgctttggttacaaacatggtttctgctaataatttcatgaagaagcttttaggatatgtgaccatttattcttagtataatcaatcattgaaggataaaaatcagagtataaaagtttatactctggcaaatataaatacatgcagagaagtttctgacagtttaaatttgagcatatttgaaatattaaaggcatgaaatttaaaaatacacatacgtgaaactatggtgaacatgttatgggtttgtcccatggtttaactctgctcagcccacgattcttagctgggtcagtcaatagtctatttttatcattttctaccctgttgtacagcatgatcatatcttcctaaaaaagaaaaaaacatatatctttggaaaagaattctgatctccaaaaacatatactagtaatagtttcacgttaatgatctcatttaaaatatcccttctctcaagctagaagctggcaagcagtaaactcattatagacagttgtcatgtgggtaatacagagaagcaatagatctgactcactattcatttaaaataaaaatcttttggccagcacagggcagtcatcagcctcgtatgctcacactgaaaaatttaaagttaggacgagccctgcctcttctgatactgtattcgaagtttctccagttgttccacacattgagactgggccaacctcaacgtccgattctcctccgtcagagcctcgaattcccgaaccagctcagcagcatccaccttctccttttctgcctgatctaacttggcaatgagctccttcttcctttgctcaagcagggtgatttcctttttgacctcatggtattcttctgctatttggcagtgctgtttgaacacctccatggattcctcggagtcatgacaaggcggcaggggctgtagctgctggtctaattctggaaagaccaaaggaatggagtcttcagggggtgtatcatctaaaacaaggaaataaaatgattcttcacaagtctgaaagccaggcctgtatttcactgtttgatgccatctggtttagctggcatccctaccagccagaagtttcagggcttgcgaagctgcttacaaagctgccccaagttgatgtgtggtgtgtttacttttaaac

SEQ ID NO: 49727 - DNA, 486 bp, Homo sapiens
gtggaccacctgcggccccatggggtgctggataatacccgggtgccccacttcatgcaggacttggcacgctaccggcagcagctggagcacatcatggccaccaaccggctggatgaggcggagctgggtcgcctgctacccgactgatgtccgttgagggctgcagtcagaggccctggacagaagctccagataggcccctagaacatgaagcagtttgctctgtgcgtccacggcctaggtgtttcttgggggtgttgggagggcaggagcattccttgaggaggagtggcaacatcaaagtgtttgtgtcccttgccagcctccctggggtctggggacctgcagcagcatgtctggcaaactgagtcgccctcctgcctccagctctctgttgagcagagggaaggcatgggggcaggaagagagctgagcattgatggggatgggggtggtttgggaatagaaacttgttcttgcatg

SEQ ID NO: 49728 - DNA, 2380 bp, Homo sapiens
ttttttttttacattttggtgtgcattttatttttgactggaatcatatccatatgaagggaaattgtgaaagtatcctttactcttttgaaagcttggcctttgccttactgtgtcaaaggaaagcaaaactaagccagtaatgatggagatgtccctgtttccatatgcacactgacaggcgaggagctgcctaggaaatgctttttgattgatgaacagaggagggtctacacacattaaatacaaatggaaacacatcagcacacacaagtcattagcctggtcctctggcatccactggcatgcatctttccaaagtatcacttattcagtggtagcagcactatgtctcgttatgccttttatcagcaaatacctttttattccagaatggaaaacaaactaggaattaaatacatccaatattgatgctttatttccataagtcaccaataagagaatgaatttaattttaatacatttatttttgtgtgattcttaataaaacactttcaaaacattctgtacatttcaagccactcagaaccgcattacatttctacaaatgtgatttgttgggatgaggtgccaagatgtctctgtacaaagatgtacaatatgtacaatcactgtaagtgcaagctgtgcaaagcagagtctagaacactaattcatgccaaggcttacaaaaacatttcaacacataagactaaagcttgaaacagcgttgtggttttttccctgggcaaatgattattttataaacaagtatatgtatatgtcatacagaaagaagagtttgactcctcagctcagtcagtaccatgcagctgactggatacattacagggctgctctcctaggcctctttcttcaaggcgccattttgccacactcaacagttgtctcatcactgagtggctgccactgctgcctttggctgaaccacagcaacactaggagacttaaatttcgggagataaaggccaaatttgttttcgatgcctgcaacgtggctgtggcgagtctgtatccaccgatgtgatcagggttggcaggaggaaggtctgcaatgcgtgacttaggtgttggttctgaaccagcgggtttgaggcctccaaaatcaatgtaaaaccaccgctgaagaagttcataagtgaccaaggtaacaccaaactggggagaggatcgaaacactcgagctgcagtccctttccaaaatgctgagggcccttcttcccggagaatcttcctgaaacagtcgatgacaccactgtatgtcgtctggccagcgcgggcagccacctgcagtcttgtcttgatgacatcagcaggggtcaccagagatgcagctgggacaccctgccatggctccagctgcaagaagatttaaacctcccacgtgtccattttcatcagccagaagtagtttgcaatgagcataaacaggaaaatagattgcagagaagggaatgtctcggaggaaacacgctttggcacccttatacagaccaaaaattcccaagtcccggagcacattcagggcgctgactctgggtcccgtggtgatctctccagctacttgcagacgaatcttcactatctccaatgggttggtaaaaatgacctgagagcctccagcacagcctccagcaagaacttctgctggaagtggaacagagccatctcttctggtaaatttgtcccgaacaaaatcattaacagtcagtttaatggccttttctggagcaacccctataagttgtggtatcagacccctgtagagtccaaagaagccctcataacgcaagactttcttaaaacagtcaaagctgtttttgtacattagctccccaacaacagagccagagccacgctggttttgcattcgggtcttcaccagatctataggatacactgcagtggctcccacagctccagcaactgagcccagagtgaatctgtaagcagactcggcaatctggagccagataggcctgcctaacccaggagactgctgtctctgaagttctgccaggttgtaaggtaaggccccctcagccaatggggctattctctcaatatctgccaaagtcaagcgccctgaagcattatataagtctgcaagctgatatagaatatcaatttctagtggtgtgacttgtccatagcgtatggcactctgggcaaattcctcctttgtgacttcaacatctttccttgtgccagctagagtgctatatatcttacgaacaagctccatgttattcagtaacgagttaaatgcattgaagtaggagaagctaacctggtgtgagatacttcctccagctgctgaaactaagttctccttggcacgaggcctcgtgccaagctt

SEQ ID NO: 49729 - DNA, 1861 bp, Homo sapiens
aaagacgtcaataactggtggattgtaaaggatcccaggaggcaccagctggtggtgagcagccctccgagacctgtgaggcacggggacatggtgcagctggtccacggcatgaccacccgctccctgaacacgcatgatgttgcagcccccctgagcccccattcacaggaggtctcctgctacattgactataacatctccatgcccgcccagaacctctggagactggaaattgtgaacagaggatctgacacagacgtctggaagaccatcctctcagaggtccgctttgtgcacgtgaacacttccgctgtcttaaagctgagcggggctcacctccctgactgggggtatcggcaactggagatcgtcggggagaagctgtcccggggctaccacgggagcacggtgtggaacgtggaggagcaccgatacggcgcgagccaggagcagagggagcgggaacgggagctgcactcacctgcgcaggtgggacgtcagcaggaacctcagcttcatggcgagattctcgggagctgcagtggaggatgctggcgctgagaagtgatgactcggaacacaagtacagctccagcccactggagtgggtcaccctggacaccaatattgcctactggctgcaccccagggaccagcgctcagatccacctacttggaaacatagtgatctgggtttcgggcagcctcgctctggccatctacgccctgctgtccttgtggtacctgctccgacggcgaagaaatgtccatgacctccctcaggatgcctggctgcgctgggtgctggctggggcgctgtgtgccggtggctgggcagtgaactacctcccgttcttcctgatggagaagacactcttcctctaccactacctgcccgcactcaccttccaaatccttctgctccctgtggtcctgcagcacatcagcgaccacctgtgcaggtcccagctccagaggagcatcttcagcgccctggtggtggcctggtactcctccgcgtgccacgtgtccaacacgctgcgcccactcacctacggggacaagtcactctcgccacatgaactcaaggcccttcgctggaaagacagctgggacatcttgatccgaaaacactagaacaagagtgtggcaaagaacacccgtgctggggtcgggacgaggttgaagggtcttggtcaatgtacgtaatgagcagggtgggccccacgctgggaggacacgggctgggctgagcagggcctctagtggaacacatgggggtctcattgaaaagctctctgatgagcacctccttttgtgcaaagttaattttttctcgacaataaagatattccgtgtcttcacccctgaactaagacacagggagtatttcagaggccagcgtaggagtcatcgacaacgaaaagccgagaacccagggccagcagtggagcctcagcagaccagggcctggtccttgctaattgctgcagggtggagtttgatctggcagacccgatcctccttcatgaacacccagcaacctgagcaagtcccagccctgccctcagcgagcccggcaggcgtcctgggacagctcagtgttggagggccacctgaaccacgagccagggctggggcttgcatgtcattgtctatgacagcgtcaagactggcccttggcaccgtgctgtgtggaaaccctcccctctgagactccactgagacgtggctgagtgaaatcttcctcgtcagtggtcaaggtgtgtcatccatacagctccatgcctttgtcttttttaaatgtaattaaaaaaggaaccaactggcgtttgtaataaaaaaaaaaaaaaaaaaa

SEQ ID NO: 49730 - DNA, 620 bp, Homo sapiens
gggcaggtgtcagcgcccgtttcaccgccacgtcgcggacatggtgatttcagaaagtatggatatactcttcagaataagaggaggccttgatttggcttttcagctagctactcctaatgaaatttttctcaagaaggcactgaaacatgtgttgagtgacctgtcaactaagctgtcttcaaacgcccttgtgttcagaatttgccacagttcagtgtatatatggcctagcagtgacataaacaccattcctggagaactgactgatgcttctgcttgtaagaacatactgcgctttattcaatttgagccagaagaagatataaaaagaaaattcatgagaaagaaggacaaaaagttatcagacatgcatcaaatagtaaatatagatcttatgctggaaatgtcaacctccctggcagctgtaacgcccatcattgaaagggaaagcggaggacaccattatgttaatatgactttacctgtcgatgcagttatatctgttgctccagaagaaacatggggaaaagttcgtaaactcctggttgatgcaattcataatcaactaactgacatggaaaaatgtattttgaaatatatgaaaggaacatctattg

SEQ ID NO: 49731 - DNA, 407 bp, Homo sapiens
cggacgcgtgggtccagctgctcctggacctggtattgagaggtttttcccttgggaggggcaaacaaagtggcagtggggaccaggggtgtcccctgctgagaaatggagagctcttttcccctgtacttctctggggtttgccttgtggaaccaagtgcttgggggaggagctcctggcaggactccagctgttatttgtcagaggacagctaggattggttcacccttgctctgagttggccccaaagcgagctatgctgaactcttctccatctccaagcagacaacctttgtctttacatgcaagagggatccaattatgacaggctgacccagctggtttcatgtttggggtttatctactgagtaaggctgaccttacctgagtttctgtatgtgtattt

SEQ ID NO: 49732 - DNA, 1513 bp, Homo sapiens
ttttttttttttttcactatgtacaaaaacattttaattgaaatacctgtataaaaaaatatgatctccagacatctcacttttgaactgaaagaacccccatctgcgatgcctgcacacaccgcattcacacaaacacaggtactgaataaattaaacgctcaggctctggccccaccccagctttcagagcccacaagcagactgtacaaagtcaataatttaaaacccaaaccctgggcacagtgcctggaagtgtcagggtcacccactccccttaagttagccactatacatgttcatcttctgacaggcggggccaggacagacgccaggcacaggaatcagggcctggggtccctggaccacagccaccccctcccctgcctccccactgtcccctggggcttgggagaggcagactgctcagaggaaataacctcaacaaataaattaaacaataaatagccccggtgggccgagggcacctccagggggtcacaccataaataacagagttggcggcgggtacggctcgcgtgggcgggcgggcgcgaagccaggacttgcattgtgtgtgcaggacgtgcccagaagcacacgaggactgagggcggaagtgggcttgggaccctgcgccggcggaaagagctccgggtgggcaggcagatgggaaggccgcctccggacacagcagcacagaggggcgtctggggttcaagtatccacccagggcaggcgggacctcgaccggagcgtctttggacagacagagcttgagaaaaccaagtcccgcgggaccagcgttcaaaaggcactcaaagcgaaggtcaccaggggtcagaggtcactgcttccgcaggaggagacggcccacgcaggaaaaagtcagggtctgggggcgtcccaggtctggccaaggcaggtggtcccctagctcccagtcaggtgcagctcctcacaagctctcgctgctggacgtggtgctggccacgtcatcagggtcgagggtgcacagccgcaggtcacagctcctccgggacgcccccgtcagcccccagcatccagggatgggccgcaatctgatccagcgacggccgctctgagggccgcagggacaggcaccaccggatcagctgctggcactctggagagaccctcctccggaagagcaggcggcctcggaggatctcctcgtcctgctcgaaggggatgtccccacacaccatatcgtagagaagcacgcccagcgacacacggtgccgagcgcccgtggtagcggtggtagcggatccactccggggggctgtacactcgggtgccgtcgaagtcggtgtagaccgtgtccttgagcagcgcacccgaaccgaagtcgatgagcttgagctctccggagcgcaggtccacaagcagattttcgtccttaatgtcgcggtgcacgaccccgcagctgtggcagtggcgcacggcggccagcacctgcgcgaagaaagcggcgcgcagcggctcgtcc

SEQ ID NO: 49733 - DNA, 1497 bp, Homo sapiens
  misc_feature (1)...(1497): n = a,t,c or g
cggcacgaggggcccgcggggactgggcgggcggaggcgggcgtgccgaagtgtgaggggaggacccgagccgtcgctgctgccgccgctaagggagaggagcatgtctgcaactcgagccaagaaagtgaagatggccaccaaatcatgccccgagtgcgaccaacaggttcctgttgcatgtaaatcatgtccttgtggttacatatttattagcagaaaacttttaaatgcaaaacactcagagaaatcaccaccttctacagaaaacaagcatgaggccaagaggaggcgaacagagagagttaggagagagaagataaattctacagtaaataaagatttagaaaacagaaagaggtctcgaagtaacagccattcagatcatatcagacgaggaagaggaagacctaaaagtgcatctgccaaaaaacatgaggaagaaagagagaaacaggaaaaggaaattgacatctatgctaacctgtctgatgaaaaggctttcgtgttttcagtcgccttggcagaaataaatagaaaaattatcaatcaaagacttattctctgatacttgtttgcaaaatctgctgaaacttctgtcaggataacatcagcaaattctcaaacagttatggactctcaggagcattctgactgcatcaataagggccatcgattgtttctttctcgcctgtcgtttagcctgtgccacacttcgggagcaaagctgtgtaggcttggactgttctgggatttccttgtttaccaaggagtattgtcagtgttttgtgtttgggatataagtaagtgtatttgccaacaacaaaaaaaaaccaacaaaaatgctggatggatgttaaaggataaaaagtgcatggngtatggggtaggtatgaaaactagggtaataagatgcttgattgttttcaggtttgccaccagagatgcaatattttaaatactgtcagaaagagtgatttttaaaaatatatatttcagattttcagtgctaacagattgcatatatacagttcatttacttttattaaattggcaatcgatattttattgaatggggaattaagaatataaactgtaaattttgtcttaaattgattttttttcttggcctttatttttattacttaaggtatgagttatattttaggagatactttctagacagtttgaagtttgggtgctatatgaagaaaaacatttaatgatatactcagatataaacaccttgttttcttgaatgtaatttatttattagctaaaaaaaaaaaacaaactgctctcaagatggtgcctgttaacctaaacatgaaatatatttattacatgcaaaatatttcttagccacttttaagcagtaatgttttatctgaatggatatttgtttctatatcctgataattatttaaattgttactttcaattctggaagaaaaaataaaccttaatattgaaactaagtagattaaatagtgtgat

SEQ ID NO: 49734 - DNA, 657 bp, Homo sapiens
ttttatttgtgttataagatgtgtacaccttcatggtttattgtggttttccttaagttttatccttattaggattaagttcatgcatttctacactactcttaactaaggctcaagagacaataaaaacatagaagtaattttttaataaaaggaaataaaataatcaagtactctgagtattttcctccattctcttatccagaattttaaggcctctgaaaaataatgaaataataaaaatagtggttttgagatctaaatttattaatattttggattccttttctcagccaaaagctactatctgaattaagcttttcagtttaaaagcctggaagaccatccttagaagacattaaaaaattacttctgatacacacactcctaataatttagatagatatgaaaacaatctcaaataaagatcaaaaaataaagtccctgtaaaaataactttggttgctcccacccacacgtcatatgatgatttaaactgcaatcatgaattttgaaaaaatagacgtatcttatctataaaaacactaccatacaaacttgaaactaaaatgttatctgaagtgacacagatgttctaaatctcaaggatactgaaaaatacattttttattcgtaaaataaaatcggacgcgtggg

SEQ ID NO: 49735 - DNA, 5072 bp, Homo sapiens
  misc_feature (1)...(5072): n = a,t,c or g
gttggaaacggcactgctgagtgaggttgaggggtgtctcggtatgtgcgccttggatctggtgtaggcgaggtcacgcctctcttcagacagcccgagccttcccggcctggcgcgtttagttcggaactgcgggacgccggtgggctagggcaaggtgtgtgccctcttcctgattctggagaaaaatgccggtccggaagcaagatacccagagagcattgcaccttttggaggaatatcgttcaaaactaagccaaactgaagacagacagctcagaagttccatagaacgggttattaacatatttcagagcaacctctttcaggctttaatagatattcaagaattttatgaagtgaccttactggataatccaaaatgtatagatcgttcaaagccgtctgaaccaattcaacctgtgaatacttggggagatttccagccttccaaggctctactgtgacttcagagacactgccaaggcagccttagccctagtgtagagaaatacaggtatcaggatgaaggatacacctcctcaagagcatatttccccacaaatcacaaatgaagtgataggtccagaattggttcatgtctcagagaagaacttatcagagattgagaatgtccatggatttgtttctcattctcatatttcaccaataaagccaacagaagctgttcttccctctcctcccactgtccctgtgatccctgtcctgccagtccctgctgagaatactgtcatcctacccaccataccacaggcaaatcctcccccagtactggtcaacacagatagcttggaaacaccaacttacgttaatggcacagatgcagattatgaatatgaagaaatcacacttgaaaggggaaattcagggcttggtttcagcattgcaggaggtacggacaacccacacattggagatgactcaagtattttcattaccaaaattatcacagggggagcagccgcccaagatggaagattgcgggtcaatgactgtatattacaagtaaatgaagtagatgttcgtgatgtaacacatagcaaagcagttgaagcgttgaaagaagcagggtctattgtacgcttgtatgtaaaaagaaggaaaccagtgtcagaaaaaataatggaaataaagctcattaaaggtcctaaaggtcttgggtttagcattgctggaggtgttggaaatcagcatattcctggggataatagcatctatgtaaccaaaataattgaaggaggtgcagcacataaggatggcaaacttcagattggagataaacttttagcagtgaataacgtatgtttagaagaagttactcatgaagaagcagtaactgccttaaagaacacatctgattttgtttatttgaaagtggcaaaacccacaagtatgtatatgaatgatggctatgcaccacctgatatcaccaactcttcttctcagcctgttgataaccatgttagcccatcttccttcttgggccagacaccagcatctccagccagatactccccagtttctaaagcagtacttggagatgatgaaattacaagggaacctagaaaagttgttcttcatcgtggctcaacgggccttggtttcaacattgtaggaggagaagatggagaaggaatatttatttcctttatcttagccggaggacctgctgatctaagtggagagctcagaaaaggagatcgtattatatcggtaaacagtgttgacctcagagctgctagtcatgagcaggcagcagctgcattgaaaaatgctggccaggctgtcacaattgttgcacaatatcgacctgaagaatacagtcgttttgaagctaaaatacatgatttacgggagcagatgatgaatagtagtattagttcagggtcaggttctcttcgaactagccagaagcgatccctctatgtcagagccctttttgattatgacaagactaaagacagtgggcttcccagtcagggactgaacttcaaatttggagatatcctccatgttattaatgcttctgatgatgaatggtggcaagccaggcaggttacaccagatggtgagagcgatgaggtcggagtgattcccagtaaacgcagagttgagaagaaagaacgagcccgattaaaaacagtgaaattcaattctaaaacgagagataaagggcagtcattcaatgacaagcgtaaaaagaacctcttttcccgaaaattccccttctacaagaacaaggaccagagtgagcaggaaacaagtgatgctgaccagcatgtaacttctaatgccagcgatagtgaaagtagttaccgtggtcaagaagaatacgtcttatcttatgaaccagtgaatcaacaagaagttaattatactcgaccagtgatcatattgggacctatgaaagacaggataaatgatgacttgatctcagaatttcctgacaaatttggatcctgtgttcctcatacaactagaccaaaacgagattatgaggtagatggaagagattatcattttgtgacttcaagagagcagatggaaaaagatatccaggaacataaattcattgaagctggccagtataacaatcatctatatggaacaagtgttcagtctgtacgagaagtagcagaaaagggcaaacactgtatccttgatgtgtctggaaatgccataaagagattacagattgcacagctttaccctatctccatttttattaaacccaaatccatggaaaatatcatggaaatgaataagcgtctaacagaagaacaagccagaaaaacatttgagagagccatgaaactggaacaggagtttactgaacatttcacagctattgtacagggggatacgctggaagacatttacaaccaagtgaaacagatcatagaagaacaatctggttcttacatctgggttccggcaaaagaaaagctatgaaaactcatgtttctctgtttctcttttccacaattccattttctttggcatctctttgccctttcctctggagtctttcttgagtactgatttcatgttgaattgtatcccacacatcatggtctgcagcttctttttcacatgtagtgtctccttcaagttacatcgtgtgtattatttaatgtcactattggttagtggccatttttcagaactgaagatggaatggcctgaccagctattaagaatgtggggagacgcagaaattgtggtaaaattccttaatgtttaagggaaagtaactttaagagatttttggaaaagctttatatacattcttttcaaatttcagtacaaatgaaaaagtggttttaatcagtgatttagtagactttgagcaactgtgcacgcttcagtttaatagcatggtttggccagtgtattactctcaagtccttttctcaatcaacttctatcatcaaagcaattgtttcattatagataaataaggacattttttaatttaaaaattcatgtctgagttgactttcataagggatttcattttttcctcaacattcttaaagccttttagtatttgacggttcttttttcccaggacatttgctaggaataacaacgtttcaatgtttttaatctacttgagcaacactatcgtgtcttacaaaagttgttcatatgtaaatgatcatcacatttcgtgaattgaggccatgttcaggtgctaaggaagttcgccttttacacagaagattgagaaaatttcctagatataaatacagataaatcagacgttacagtggtgacgtagtaaccatcatggcaatggaaaggagtccaattcatagcctaaaacttcaaatgtattcttaggagtcagattttactgaatattttacccacaatagctgcctattttgttataataaaatatatataaatatatatataaaactttctttaaactgtaactatgggaattattttctttacatagttgcgcacacacacaaacatatatatatatttaaaatatattttgtttcttttgccacctactcctaactttttgtttggtttttaaattaaatattaattgaatagacttatcttaatcatgtgaactgaaaatggggggcatggtggtcatgaggaggaaacatttagggaaattagattataagtaaaagtgtgggcatattctcctcttttctacaaaggttttcaaatggttcctgaggttttttgttgttgtccgtgttgttactgttgttcttgtcatcaggtttgattttggtccttgccctttccttctagttctccttttattaataggaaggcaggcaaaagccccatttatgtgtgtgttttcccctcagacagctttcatccactgctctgcactagaattgcacaaatcttcatggtgagcaattttaagaaatgttagtgaaaggtagaaattatttcacaaatcagtttctctggtccttcatattaataataatatttggcttcccattgctctttggagttgtttattaaatatgtgtttttgacaacctcctcattagtttcttaaatgagtactggtttgtaaagaattatcaacattatccattccatttatgaagaagaggagaacagtttattagctgttctcctcttcttcataaatggaatggataatgttgaagaggagaacagctaataaactgtattgtaaaatccatatgttaagtgtgtcttgaattttgaaagaaaaaaatatattttgcaagctaacattttcttganacaatttgaggcatcatgtaacttataaccgaatccaagagccgttcgcgcaagagtgtgttaccacattgaaatacacagtgctgctgttagactaaatgtcgtaggttgttaaccacatagaaacacactagtatgaagaaaactgttgtaaaatctcaagagcttcagaaactgccttacaagaccgcagcataagctattttggaagtatttaccaatagtcacatggtggtaaatatccaagtggttataaaaggatgccatttatatnttaaatt

SEQ ID NO: 49736 - DNA, 568 bp, Homo sapiens
caaccctccagggttgtggtttgtatttttgcctttaagcattatctcctttccaccaagaagcctacttaggtttaacacatgaaagcagtgtctaaaaattagatcggtcctaaattggaatgggatgtcttccttgcatgtcccataccagggaatttttttaacacacagtgtagagcctttgccagagatgttgaaagggagattaaaggcttgagggatgaatttgatcatcattcttaaagtcccttccaatcctgtgattctctgattccctgagtctcgtttattattggacatgcctagcccatcaccagtgacctgcccgcatattgctggcttcccttggataacggagagcctatcaccacatgcctttgttgtcttccatcatatcaagtgagttgctttctggactttttccatctagagcctgctaggtttggttttgagaaaagatggtgaagtttcttttcatgagtttgtagggcaaaaaaaattctttttaaagatggtaagggtggaaattaatcatggtaccatctcattaaaaatagatacctca

SEQ ID NO: 49737 - DNA, 445 bp, Homo sapiens; identical to SEQ ID NO: 12241

SEQ ID NO: 49738 - DNA, 2552 bp, Homo sapiens
ctcgccagcctgggctccgcgcacccaccgatctgggcgcccacaagcggccggcatccgtgtcgagcagcgctgccgtggagcacgagcagcgtgaggcggcacaaggagaaacaaccgccgccgcctgcgcaccggggcccggccgacagcctgtccaccgctgccggggccgccgagctgagcgcggaaggtgcgggcaagagccgcgggtctggagagcaggactgggtcaacaggcccaagaccgtgcgcgacacgctgctgggcgctgcaccagcacggccactcggggcccttcgagagcaagtttaagaaggagccggccctgactgcaggcaggttgttgggtttcgaggccaacggggccaacgggtctaaagcagttgcaagaacagcaaggaaaaggaagccctctccagaaccagaaggtgaagtcgggccccctaagatcaacggagaggcccagccgtggctgtccacatccacagaggggctcaagatccccatgactcctacatcctcttttgtgtctccgccaccacccactgcctcacctcatttccaaccggaccacaccgcctgaagcggcccagaatgggccagtcccccatgggcagccctgatcttagtagcagacaatgcagggggcagtcatgcctcaaaagatgccaaccaggttcactccactaccaggaggaatagcaacagtccgccctctccgtcctctatgaaccaaagaaggctgggccccagagaggtggggggccagggagcaggcaacacaggaggactggagccagtgcaccctgccagcctcccggactcctctctggcaaccagtgccccgctgtgctgcaccctctgccacgagcggctggaggacacccattttgtgcagtgcccgtccgtcccttcgcacaagttctgcttcccttgctccagacaaagcatcaaacagcagggagctagtggagaggtctattgtcccagtggggaaaaatgccctcttgtgggctccaatgtcccctgggcctttatgcaaggggaaattgcaaccatccttgctggagatgtgaaagtgaaaaaagagagagactcgtgacttttccggtttcagaaaaacccaatgattacccttaattaaaactgcttgaattgtatatatatctccatatatatatatatccaagacaagggaaatgtagacttcataaacatggctgtataattttgattttttttgaatacattgtgtttctatatttttttttgacgacaaaaggtatgtacttataaagacatttttttcttttgttaacgttattagcatatctttgtgctttattatcctggtgacagttaccgttctatgtaggctgtgacttgcgctgcttttttagagcacttggcaaatcagaaatgcttctagctgtatttgtatgcacttattttaaaaagaaaaaaaaagccaaatacattttctgacattgtaagattgccttactgtctgtcattccttattgctggcccctttctcaggccggagccaaagtggtggagaaggaaaggaaatgatcgaacgggcatgttgtcaagtgggcatgccactgggaaataccaccagtttaccctgaaacattgtcctcagaggagtaggaaagtggattttgaatctctattttgctcaaaagttcagttcctgagatactgatgactgagagtgctgctgggaaattttcaggattgtgtggtcttttggggttttttgtttttttttttttaagacaaagttgaccgctgttcactgtccacgtgatcagttgtaagattacaatgctgcatgctagttggttacataagatacaattccagtgatggaaggcggttataatggatggtggtgtgtacaagatggcactgccatctttgagcagagcccagctctgcagcgccacttcatctttttaaacaccctagaggtctgtttgttgttgctgttgtcctttattttgaaagagttgcaagagaagttacagtccaggtgaacttggagattgtgggattggttttgtttctgttttgttttgtttatcatttacctgtagtgctattgctgttgatactatcacctataccctgtttctagtgagtgctgaatacagtatggtacaatgacagtaacagccgcgtggtgctgccaggactgcccttgggcatatcagtgacagcccaaatgtgggtggaggaaacctgtaatttccttcttaacatgtgtttgaaataccaagtgaataatactgttctggaaaaaaatgataaactagtggaaattaaagaaattaagggttttatataatagacaggccccacctctcaaaatatttttagaagtctttttgtaaactaatttcttttgatcactattttgcatcagtaaaatgatttttttaaaaccaataaatcatcaattattagaaatagttgtctcacagtgatactggtttttcttttgtgctgttatgatttaacattgacagggacactatttt

SEQ ID NO: 49739 - DNA, 1349 bp, Homo sapiens
gcgtcgactttttttttttttttttctgtcacaaggtaaaattttattttttcaagttacaaaaataggagcatgtcaaaaatacagtctagtccttatacgagtagttccagccatttaaaagttatacagagtttggaaaaagcagtttatatacaagtcttaaaacacaacaatcatgaacaatgcacaccgttcaatgtaggttattgctaggttatatggcagcttttaggttaccattgttcttctctgtaagggaaaggacaggcatttggggacattctggattgttgctgctgaagctgtggttttggaaaatcaatccaaaataagaataagctcactatgagtagaataaaacgtgtaagtttcaatcagtactacaagaaagcatggtttaaatttgagttccatacaattctacataactctattttgttactataacagaaatacagtgtatagttttgggcaagagtaaatgaattactggttttataattaagtgaaaagaaacagtttttggttgcaatgtagaaacaaagctggcatatctagcttacaaacattaaaaaatggaaaagatatttaatgtttaagcaaaagctgaacctaggttatttacctttagaaattaagagataaagttaagcattttgttcttttgaggattatcatgaagatttgctattctctattttctttttaaaaagaagagttatcccacatagcgggaacatattttgaaacagatctatttgctcaatgtcatatggaagaacaaatcacaaaattaaataattctacctttaaataattaaagataatgcagttgacagtacaaagcactgggaaaaaatcacttatttgggggatgtgtgatacataagaaactttgggcctaaagttcacatggaagactggaagacttaaaatttaagggtgtcaccaaaagataacaatggctttgactccaactctcatgttagaccctgttaaaaggttaggtttattgctgttattttaccccagtaagttattgaataaatggagatatacattggtgataagtatgaggtgaagtaaaaagatctaaaaatattagtcttagaacaaaaatgacactcatgatcacttggcaaggatacttatttacttagtgatttaaatcctaaaaataagctacatttttaggaggtagaaaacaagtaccaatagtttaccatttggccaccctccttacttttggcttcagccttggatttctatttctcattccctattctcctgttaaagctattagttctactaccattcattacctaaatgtatagacctggagctgc

SEQ ID NO: 49740 - DNA, 1621 bp, Homo sapiens
tttttttttttgaaagtcataagtcatttattgaatgaatagtatatgcaagaataccaataaaaggaaactaatactacaaactacaattttgaaaataaagccaatataacaggaacaaaatatacataacatgagaggaatgtttgatttttgacccataatgcattccttatctttacaattaacctaaatgtctgttagaacaaaactgtataccttggtctaacttcagcgctttttttaaaaaagcaacaacactctagaacactttttcttttgctttgagatatttgagattcacacatttgttcaagtacacagattctgattcaatagcagatctacagatcttgttatctcttaatatcttgagtagcatgtacttctgagcaagtactatctgaaattctaaaactgctgattcttgaaataaaatttacttcagttgtgggtttttaataacttgagatgaaagtaaaattcaccccctgcccccctcccccaggaacaaagagctcttcttaaaagtatagaaactcaagtctatctttctactctaaagaacatttcctactaacatttctggtaaggcaataaatgctccagaataatcttcaatatacgcttgcaaagattacactgtttaatatcaataacaaaaaacaaaacaaaaaaagaaaaaagaaagaaaaaagacgcttcaaaatttcaggctaaaatatgcataaaagacagtaacggcagtattttttgaaatgatgtaaatgttatatacttatcaaataatgtcatgcttattaaaactacagttaaggacttaagagatgtacagtaaatacactgctgaggtccatttttctaaatattaataccacaatgtaattactacccagaagatgatgatgctacttgggaacataagtactgtacaatttttacattgtaaggcacttttactcagcatgtgacgaaaacatgattagagaatcaaaacattggaggtttacaaccaaacatgatttttcatgtgaattcaatttacatttgaatttttaatgcgagattgtttagccaatcacaccacaatgagaaaaacaggtagtcagccacttatctagccaaccaaaaggtaaagtgctattctggttgctagtggcagaaaaagggctgaagaaacccatacaaagtcatacattttactacataacaaattcatcaactgacagctatagtatttgaactcctttatataattattgactggccatgattacccccggcaccttccatttttcctaaaaaaaaaatgattacagtagttgtccaaaaatgaaggagctctgttgtcccatgggtaagtctatggcacacaatgtaaaaaatgatctagacacagtgatttaaggattttaaaataatgattttcaagctgttgtaaggaaagaaagtacagatcctttgggagaagtcacatagcttggtaaacaaacatctagatctgtccttgcacttcaagtcatgaattttgaaaatcacatacacacaaaaacccaatggcatattaagagcaaaaagagaaaacatacagggcaacccactactaaagctagtttccttc

SEQ ID NO: 49741 - DNA, 2149 bp, Homo sapiens
  misc_feature (1)...(2149): n = a,t,c or g
ggaaaggaacaagtgactctgatgtttacaaagcacctatgaaaccctgtacacacctagttcataatcctcataatttatcaacaaacacgaaaaagtgtcttacttgagagtgagtgtgtgtgtgtgcgtgtgcacgtgcacacattgtgcantnttggtatgtatggaaataaacttataaatggggacgtattggagaaggaaatacatagacctacaactttgagcaaatagcagtgatgttttaggaactgaaatgtcacacttaaagtcttcagcccagctacttccctatttttgtggggagaagagggcctgattagaactgttctggttgtgtttggcgggaggggaataatttttgttcagtccttcttagtgaccaaactttaatttttaagaataatatattgacttactgaactgaagcattctgagttgaaaggagctccagagggtggagttctgtgttgctcacatgttaaaatcttgctcaccttcagagcagagggaatacctatcttcagatatccgtccattttcatctcttaattgtagtcaaaagtatgacttgagagtgttgctctggtattctgggttctgaagtctggtattctggtattctgggttcaaaagtatgacttgagagtgttgctctggtattctgagagttgctctgtattctgggttctgaagattatttgaaaaataactcctactacattgaaatgcagacttaaaaatttaaacattggattaggcagtcaaaaaaaccaagcaagcataaaaggtcaataagttgtaatcttgatagtaaaggtggaaaacttattataaatggaagaaaagttttgatttccttttttgtttgatgggcagtatgccatattatatccaaagttggtttaaaaaatacttccatcaactatttttatttaaaataaacatttgagggaagttaccaaggcagcttttttcctcaaaagtaacctgttcctctttggaacagcacattttaggggcatggttaatacctgagatttttactcagtaaatcctgatggttactgtgtgtaaaatatctttaagtaggattgaaggcctctgtgggggaataaaatattaccaaagtctataaaaataaattttacatgttctcttttatgacagagagcagcactggttctgttatttttaaaatgaataattgatttcttgataggtgtttaatatttcttccctcactgctgattcttagatagaaaccattctttatatttgatagactgctttcagaaaacccttatcaacaagtgtacaatacttatctaaaactatacatttagaatggagcagtttaatactagatctcagaagttttgaaaaatagcaaagaagactggatttggaaagcatggtctacaattggttgttaaattctgaagctatgaagaataaatgtttcaactttggattatgaaaccccatttatgattttttaaatacacttgaaataaaaatgattaaactaaattttggtccagtgacattactttgcactgcataatccattatacgttgtacgacttttttttttttgttttaatttattactgagagttttgtgtgaagctacagcatatctaaccagagaatttctgattccttatactgtgattatattatattgaggcatttgtagtgcagctgaagactgaatttatgccttttgtaaacatgataggtataaatgtcttataaacattctggagtatgtatagctttaatgaatgaaatttaatggacctgattaaaatgaagggatttaatcgttgttaaagttaagttagtcaaataaattacctactggaatataggcccaagccagtaaaggtttaatatttgcattttcgtgcttttattttctccttccattcataagtatatacttgaaagtacatctgtagcctatgatttgagtctcttgaagttctaggaagaggcaaactacaaactactaggattctgatttcagatgtagtcattccagaaccttctctttatgagttcacctgctagtacaatctccacaacttgaatggcattggttgttctgtaattcctgccaaaagcatcacaagttgta

SEQ ID NO: 49742 - DNA, 437 bp, Homo sapiens; identical to SEQ ID NO: 21639

SEQ ID NO: 49743 - DNA, 408 bp, Homo sapiens
gtgagtgagacccattcatgacacactagaaatgtgtacattcttttgttttccatcacgggtataggtcttctgccatgaaagagaactatcaaggaaattcctgaaaacaagatttgtaaattcgatttgaccctcccaaattcagggctgctctttgcagtggtccctggcccagcaggtggccggcgtggctcctgttggctcatgccagtgttgtgctggaccctcgagtatgtgactgtcacccttgtccaagactggtttttaacagtcttgatttgtcattttgatgctttgaatactataaggaaaatgccacgaataccatataaataccacaccaatctgttgaacatatctgtgttttctgacatgggacctgcagaataagtatttcttttaaat

SEQ ID NO: 49744 - DNA, 453 bp, Homo sapiens; identical to SEQ ID NO: 12263

SEQ ID NO: 49745 - DNA, 775 bp, Homo sapiens
ccaacagctatgacatgattacgaatttaatacgactcactatagggaatttggccctcgaggccaagaattcggcacgagcgtgaagaaggtgaagatggcggtggccaggcgccggggtcttgggagtccagtggctgcaaagggcatcccggaacgtgatgccgctgggcgcacggacagcctcccacatgaccaaggacatgttcccggggccctatcctaggaccccagaagaacgggccgccgccgccaagaagtataatatgcgtgtggaagactacgaaccttacccggatgatggcatggggtatggcgactaccccgaagctccctgaccgctcacagcatgagagagatccatggtattagctggggaccagccgggcctgaggttgaactgggggtgaacccgatgcactggcacctagacatgtacaacaggaaccgtgtggatacatcccccacacctgtttcttggcatgtcatgtgtatgcagctcttcggtttcctggctttcatgatattcatgtgctgggtgggggacgtgtaccctgtctaccagcctgtgggaccaaagcagtatccttacaataatctgtacctggaacgaggcggtgatccctccaaagaaccagagcgggtggttcactatgagatctgaggaggcttcgtgggcttttgggtcctctaactaggactccctcattcctagaaatttaaccttaatgaaatccctaataaaactcagtgctgtgttaaaaaaaaagtcgac

SEQ ID NO: 49746 - DNA, 1756 bp, Homo sapiens
tttttttttatatataaaatctttattacaggcagtattggtccatacactaacacaataccaacagtacaggtttaatctttcaaaatcatcatttaaacagcaaaagaccaagaaataaaatttgagtcaattatttttcaaaatattctcaatgcacattatccttaattcccttattatagtgaaacatacaaatacagaaaaataccccatttaacaaatactagtgttaaatggttatttggcttaaaatctgagttaagaaaatcctttttagcaacctacatacagataagtagcaaactttattatattaaacaaattcattctgctaaaacatgtaaagaatttcatccatcatgtattctgatcccagtacaagtgtttattctcttaccgtcacgattcttatatgaaggaccaactcaaagagttgtcctagatataaccttatcctcttccccaacacacttcatccaaaagtctgttcaacagatggcaaccgggtagcagtcacttcaccatctgatgccagtggttccgtgagagcgtggcccaggccctgtgaaacagcccattttcctacctactgtgggttgctgctcaggaggaacgatatacgccaatacaagcaggaaatctgcagctcctctgctatgtgcctcagaacactttcaatttttctggtcaatgctctgattaggtatcatacataaaagccagcatattagtttaaatctttaaacaaaaaactatattttcccaaagtcattatcatttgggccaattaagtgatcttttcgtgctttgttgagcttcatctttagggcatctcttctttcttcccattcatgaagttcggcatttccatgtgcaaatttacagctgtttccttcctgggcaggtgcccattcatatacctatcacaaatactgaaatagcctgttgggaagcggtgctgccagcagtactggtcgtcctcggtgtggaaaaccttctctttgtgcttctcggaggagatgtggccctgccactgcttctcactgttgcagtttttcccacacatccagcagtgaaagtccactgtaacttcagcataatctgttggcatgtgaatttgttttccattttccttgtttgactgactggctatgtcttcacttttttcatttttttgactcttgagccatagttcgtaaaattgctccatatcttgtatcccattctccttcatgtaagtccaaacttctctttcctcaggactatgagcaaaggaacagtttcccacatattgacattttttcccagaagcaatatggttgcacagctgtataaaaaaataggaatatgattaagacaaagtacacctagtaaaacggcctaatttttacatttaagcaaaagaagcattattatccatgctaatacttagtaatcaaattctaaagtaagattaatttgactctactcaaattaactatatgctgtaaatatatgaaatgatattaaggtttctatctcaaaatttttcaaaagaaaatgtccaaaacagagtaaagcatggaacattttcttacaagaaaatgtctacaaactcacttactcagaacatttaatctccacaatgaacatccctggccctctcagtctgacagctcctgtttccctgcccaacactaatgattcctccacatcagcacttgaaagcagtaaagaaactgcaggctactccaaaggttactgaacagtgccc

SEQ ID NO: 49747 - DNA, 503 bp, Homo sapiens
ggagtcaggaacatatcagatttatagataatatgttaatggggtcaggagcttttgtaaagaaaatctctctttctcctttttcaaccactgattctgcatatgaatggaaaatgcccaaaaaatcctccttaggtagtatgccattttcatcagattttgaggattttgactacagctcttgggatgcaatgtgctatctggatcctagcaaagctgttgaagaagatgactttgtggtggggttctggaatccatcagaagaaaactgtggtgttgacacgggaaagcagtccatttcttacgacttgcacactgagcagtgtattgctgacaaaagcatagcggactgtgtggaagccctgctgggctgctatttaaccagctgtggggagagggctgctcagcttttcctctgttcactggggctgaaggtgctcccggtaattaaaaggactgatcgggaaaaggccctgtgccctactcgggagaatttcaacagc

SEQ ID NO: 49748 - DNA, 1961 bp, Homo sapiens
  misc_feature (1)...(1961): n = a,t,c or g
gtgatggaatgcagcatagtccaagatataaaacgtgctgcaggtgctgggaatgatatcaaaaaagcataccctcggggcaagtctggggtacagaaggacatctggaaatgaattacaggattaaacagtatttttgtcgtacttcatttggggacatcttgcttaaatcccggagacctggtgttagggtttgatttggccaacttgtaacttaaatgatgagcatgtcaacaaaatgaactcagatagagttccagatgtggtattaatcaagaagagctatgaccggaccaaacgtcagcgtcgtagaaactggaaattgaaagagcttgcaagagagagagaaaacatggatacagatgatgaaaggcaataccaagattttcttgaagatcttgaagaagatgaggcaattcgaaaaaatgtcaacatttacagagattcagccatccctgtggaaagtgacaccgatgatgaaggagcacctcgaattagtctggctgagatgcttgaagaccttcatatttcccaagatgccactggtgaagaaggtgcatcaatgctgacataatgagatgttgtagactgtttccatacatgggcttaagaagttggacagagttaccttaagtgtctctactatctttgcctccagatttcaagaggagaaatttagttttaaacctgaataaacatgtttgttttcagtgctcactcaaaccactaaaacagatggatagctttgaggttttagataaggaaagattatggagaatgtagttgttactgatttttgggcaattttacatttgggaattttatccactgtggcttttttatatgaggcactgtagtattttccacatagtatagtactctgggatgttaaaagctcaaaaattgtgattccttgaacgttcactaaatcttcaagcaaaaacacatttttacattatttttacgttgattattttagtgaaagaccatatgaagaagcatttttaatattaacttgttacatactttgatccactttacatcatttttatgttgttgagttaagggaattagggttcagtttatcactggacattcagggggcaagtcaatcttttttatttcccttataaaattaactcttcaaaagctgttaaacagagagttatcttaatttttattgcagtaggaggaaatatatctaaaatatttgtagatttatagcaaatagagactcgttatttaaaggttaaataacaatttgttcttttgttgtttttgccagtttagggcagtagctgcttttgtcataaatatcttcctaccacatcaaaaatgctgcttttaaaatttttgtttataaattgagaaggaattttctctctataagtttctgtcattgaacagatcaccattaaaaagaatattagaatccagcatgaagataatggctaataaaaatgaggtacatactttataaaaccattaatcagatttgaatgaggaatgcttcccacatccttgaaagaaaaactgtggcttacgttttgaagtattctgagaatgaagtattaagatccaatttctataagcaagatcagacttgttaagtatgccgcaagtaagagctaattcattcattccatgtgtgccactaaataaagagattgagcaagtgccactgtgtggaacatttttcttttttttaatattggactttccaattttgaaattatggataaagtcctaaattttctatagtggcttcttttctgtctgcatattttgttaaaattgtggatctaaaagccatatcctgtctttggtggtggcctggtaggaatggcttgtcctagttcttcaaaggtaagattgaccaaagcaagttctcattggtggtctgtgtttacatcttccgtgtcaagatattttaaagcatnaaaataaagccattcttgccc

SEQ ID NO: 49749 - DNA, 494 bp, Homo sapiens
ggccggagccgagggcgccgctgggcggcagtcggagctggagcccgtggtatcgatggtcgacgtccttgaggaggacgaggagctggagaatgaggcgtgcgctgtcctgggcggcagcgagctccgagaagtgctcctactctcagggctcagtaaagagacaagcactatatgcctgtagtacctgcaccccagagggagaagaaccagcaggaatttgtttagcttgcagttatgaatgtcatggaagtcacaaactatttgagctatacacaaaaagaaattttcgttgtgattgtggaaacagcaagtttaaaaatttggaatgcaaattacttcctgacaaagcaaaggtaaattctggcaataagtacaatgacaacttttttggattgtactgcatttgcaagagaccttatcctgatcctgaagacgagattccagatgagatgatccagtgcgtagtctgtgaagactggttccatggaagg

SEQ ID NO: 49750 - DNA, 726 bp, Homo sapiens
ccacatcagtagcaactgagtcttcagaatcaagcacttcagatttgccttcattcgaagttggaattagagcattgtgtgaggtgaataatgctgagggtagttgtatagaagaaagaaatgttgacctaaaaaataattcactggaaattgatcaaacagaaaatgttaaaccaatgttgagaggtcgcttccaaagacctaaacccaatttgtcaagggctgggaagaaatcagttctttcacaaggcaaaacagagtcagagagcaagaattcacattcaaaaacttcagttgaaaagaaccacgtggaaaaagataaaatgaatacattggacattttgagaatggagactacagagagagagaatccagaagctgaaactgtatctgttttgggtgaaaaaaaattgtctgcaggaagggagtcaactaaaggctttaagacctgtacaagtgaggggccgattgcaaaagccaaagccaaatgcaggtaaagctgctgaaagagaagaaattctcatatcacaggaagaaattggggccaatgtagagaagaatgaaaatgaatcctgtgctgatagagatactccttcaacacatggaagatcaatcgcgtaaagattttgaagaggaagatgtcatattacagcctgagaaaaatgattcttttcaaaatatgcagccagatgagcccaaggttcttaatgaatgtctaagcgttca

SEQ ID NO: 49751 - DNA, 860 bp, Homo sapiens
attttgtgaaggaggatgaagtaatgtgtagtcattcaaggttgataagaactagtctttatcaaccttgaatgactacagattattttgtgaaggaggatgaagtaatgtgtgttcttgtaaaattaaattttatctttatttcttctaaaaatctgtataccaggaactgaaaatctttgaacagatattaaaatctacgtaagtatacaaactagttgagggatacactgtttgcttttataaaataactttgattacatgaatataataaattatgtgcatataaatgtgtgtctatatgctttcctttaaatatgtttgaaaagatgtttgaaacttgattatactatttataattggcacagtactttgaattatgccagtactacattgtaaaacagagttgtattttttgatatttaacaatgcttaacactttaaatgccacttctgaggaatggacctgggtgttaacacacttgaatatgtgtgatgccaaactttttaaaatacaatataaattatgcttatttattattttctttagtttaatcgtggtcatgttttggtgtgtatttttaatttttttcttaaattaacactttggcatgaacattactgcaggtttttgatgaatataatgaatgtatggaattcaattgaatttgcatggtcttcggaattttttctgtgtgtataaatttagctgctattaacagaagagagaactttctgtgagtagccatgtgtgttgatcagatacagtttttctgagatcttcaattaatctcactttaaaaatgaccaaaacatgtctttcttgaattaactttgaataaaagtttgtatattaaaaa

SEQ ID NO: 49752 - DNA, 1574 bp, Homo sapiens
  misc_feature (1)...(1574): n = a,t,c or g
gacaatcaaggacttttatgtgagtcttcctttatgatgtttattaatgttatgcattccatttgttttgaagtgagtaccaatgtgctaatttgtattgtctgaaagtatgtaatgtttttacagcttgtttttaagaatctgtaaatatgtacaaacaaatcacagtactgctttatgttagaaggcatatgatgttgtactgtatgtaagcaataatacatagcagtgctaactttacaagtagcatcaggaaagttctaaaaacatttcagagttattaattatccttatttcatttaataatgattatctttaatcagtttttataagcaaattccattgttcctcctattggaacgtaacactgtttacacagcataattgaagttgcaggggagacaggctaaatctgacttcatctgtactcactttcactaagcattgaatggccttaccactcttctgcaagatggaggaagaccgcaaaacttagtgcccatcacactgaaggaagggatgtggttttttttcctgcttctgtactgctacctaactttgtgatttgctttggattttaatatttgtttctgttttagattcaagcccgtaagttttgaggtgacttcagctccattgtgaaatagatagttctcctcatatttcataactacatttcaataattctaaactttctacattgatttttagatacttatttttcaagcttggtttctcagctgatcagatgaatttattcaacttcaatacaaagaaagacaaacctattatagtttcaagtgagtagatattatactgtacaggacagctatttgaacacacacatcactgctttagaaataaaaccgccaatttataaatgtatatgacctacattttataggaaaaaatgtttttaaatgctagtcatttatataatgtgctttgaaggatttgctagtccacttctgtcactttttagtacactggtatcttttatatgtaatgtatgctttttattattgtagcaaagccatttcagtagaaagaattttgcaacaatatgggggaaatttttcattgttggatttgaattatactggattttatctgtgtagtcttacttgtctttattttaatgctgtctgaagggaacttggtatccaaataaagcaggtaacctcattttacttcaagggcatactgtgtagtgctgaatttaatctgaaaatctgatgattttgaaaagaaaaacaagtttataaacattgtacagaagaaattaaatgtgtgtgatggaaatcctgatggtggagcacgttgaattttctgatatatagtgttattttcctgggatcccctatgccttctttgtatttcaactaataaaggaaaaaccctgtcattaaaactggtaagataataggatattctgattatacagtattactattcctatcccattttctgacctttttctcaatcactgtaaatttttatttttctatttcccattngataatttaaatatggtacataatattaggncaccgttggtataggacccaaatgga

SEQ ID NO: 49753 - DNA, 410 bp, Homo sapiens
cggacgcgtgggcggacgcgtgggcggacgcgtggggaaatggaccacaaatctgagagggatagagtaaaaagaggcattaatgtatgtactcacaagttagacctattttgctgttaaaataggtctggtcttgtcataggtcataggaattgtgtagtttgagttgctgcgagaaagagtcaagaacttagacttgaatgggaaggccaactggtgagggaagtggggtattatctactcaaatgttctaagctaatacaaaacaattacctggcaagcatccccctctgcccttcttgagattctgaatgaacttagaatcagatcaatggtgagacccagttatgtaactttcctttgaagttctaaaggataattgaaaataaagtagtatggcatgtttaaca

SEQ ID NO: 49754 - DNA, 1503 bp, Homo sapiens
tttctgctttttaataattttattttttttctaattttgttaatttcccatagcaccttggcgatgttgaaaacaaatacaaatacaaggatgtactcattttaacattttatgcatgagcatgtgtcacaccaattttgggggtaacagttttgacaacaggaacaaatctaagcaatcgacaaaacagaagccggataactggctctgacccccacccccaacatttaagagatgcaaaggacacctgaattaggttaaaaaaatcaagttgatatggatatttcaacagtgttctgtgctgcaaaactgaaaataaaaccatttaatacacagcccattaatatctgagttacgcttttaggaactgtcaactcgaagattcataaaaagttgtcagcttttaaaaataaactttaagttatctaataatcaggtgaatttcaaaggaggatttactcacaacttgaaaataaattctctttcaacttcttaaaatatcctcattcagctaatggaaaggggaacatatatgtatcttttcggaagctcagactagcatatgcccaaaagcctaaagttaaattaatggccaccaaaattgtaaggaaatataaaaaattaggaaaaaatccatcatatattatagttaataatttataaaagcccctcagaaggaatacactgttctcttttgagttttatcttttctgtaaaaacaaaattggtacttttaaaatatggttaatatatatattgccagcctaaataccagagacttaaccccagtgttgttcaactgtgtcaaagtaaaaccagtggacatttaagccaagagactaattattaaggccataactaagaaaactagagaagtgttcattaacttttaaatactattttacgttccagcaacattctttttgttcttctttaccctagtgaagatgctaacattccatcattaagcctttccaaagcaaacctgtttatttaaaaaagaaaaaggaatgtgaaataatattcaagctatcttaattttaggaaacaaaaataaatcagaattctgcacagcatctgatcatctgcaaattcagcacataagacaactacaacaaacctttatcattgaaagctcttatattcctcaaaacccagctgaaaaaaatttagatggatcactattttaaatgtcagtgtatttggcaaaattaaaattactcagagacaggccctaggtattatgaaaaccttaattatcaggatagcaaatggagacaggttttgcaatgtctctatgtaccttctctatgaagtgcaaagtggtgaacttgtgtgactcttgttctcttcatgcagtaagaactatggcagagtatcactatacccaacattcaatatcatttatacctacttttagcctccaacagatcaaggaaatgtcaagtcataaaggtgaagagaaaaatttgattttttaaattcctccatctaaagaaccaa

SEQ ID NO: 49755 - DNA, 1144 bp, Homo sapiens
gcagcaaacttctagtagttttgatatgtccttgatagaacaaatagcaatggttaactattaaatgttgacctagccagcgcagtggctcatgcctgtaatcccagcactttgggaggctgaggcgggcggatcacctgaggtcgggagttcgaggccagcctgaccaacatggagaaaccccgtctcttctaaaaatacaaaattagctgggcatggtggtgcatgcctgtaattccagctactcgggaggctgaggcaagagaatcgcttgaatccggtaggtggaggttgcagtgagccgagatcataccattgcactccagcccaggcaacaagagtgaaaccctgtctcaaaaagaaaaaaaaaagttgaccttgagaatttataatattctgagaaaactggaagcatgcataaagcccctctgctgtgcactgaagtatgggtgccttgaggaaaagcagttacacagttgagttgcaagctgaattggctgtgttcaaggcatgccctttagaattgaaagaactagcagattacggtatttagacttgaatatttggctgatattttctggaaattaatggaatgagcctctcacctcaagggaaacaactgatagtgttgccagtgataaagctttcaagcaaaaattggaatttccgaaaatctgtactccaccatgagctttattgttggggatattaacaaatgtgatttgtataatgaaatgcatttcatttggaagaattcaatgaaccatttttccaagtgaccagtacgtgatgttacaaaatcatgcatggctcaaagattgattcaaaagtgtaagacaggccagtggattttaatgtattaacaatataagagtgcattaagttttcggagtctacattgcctttaagaaactatgacttgtgagccaccgggcctggccaacacactggattttaaaatgcaagtgttaagtggaaatagaaaacacggtaacaatcagcagacaaggagggtttggttgaagttacttgacaataagaagaatatcatgcacattactgcaaccctagaaagactgattaacaattatatgaaagtatatcagaaatgagtttgtgagtgaaaattttagcacataaatag

SEQ ID NO: 49756 - DNA, 701 bp, Homo sapiens
gcaaaaggaaaatagaagcaactggagtgatacaatcttgtgccaaagaggctaaaaggattcttgaagatcatggctcacctgctggagagattgatgatgaagacaaagacaaggatgaaactgaaacagttaagcagactcaaacatctgaggtgtatgatggtcccaaaaatgtaagatctgatatttctgatcaagaggaagatgaagaaagtgaaggatgtccagtgtctattaatttgtctaaagctgaaactcaggctttaactaattatggaagtggagaagatgaaaatgaggatgaagaaatggaagaatttgaagaaggccctgtggatgtccagacttccctccaggctaacactgaagctactgaagaaaatgaacatgatgaacaggtcctacaacgtgactttaaaaagacagcagaaagcaaaaatgtcccattggaacgagaagccactagtaaaaatgaccaaaataactgtcctgtgaaaccctgttacctcaatatcttggaagatgagcaacctttaaatagtgctgcccataaggagtcacctcctactgttgattcaactcaacagcctaaccctttgccgttacgtttacctgaaatggaacccttagtgcctagagtcaaagaagttaaatctgctcaggaaactcctgaaagctctctggctggaagtcctgat

SEQ ID NO: 49757 - DNA, 1040 bp, Homo sapiens
gccggggacggaagacgtttaaagacgccagggaggaggacggtgtggacaccatttgaggaagacctgacacgggccggggaggaagacggtaaagacaccagggaggaggacggtgcggacgccagcgaggaagacccgacatgggctggggaggaagagggtgcagactccggggatgacacagaagatcaggatcctcatgaccagccaaagagaagaagaattaggaagcataaatcaaagaaaaaatttaaaaatcccaataatgttcttatagaacaagcagaattagagaaacagcagagtctgttacaggagaaatctcagcgacagcacacagatggcaccacaataagcaaaaataaaaaaaggaaactgaaaaagaaacagcaaattaaaaggaagaaagcagccggcttggcagcaaaggctgctggtgtcagtttcatgtaccagcccgaggacagcagcaatgaaggggaaggcgtgggagaggcttgtgaggaggatggtgtggacaccagcgaggaagacccgacactggccggggaggaagacgttaaagataccagggaggaagatggtgcggacgctagcgaggaagacctgacacgggccaggcaggaagagggtgcggacgctagtgaggaagatccgacaccggccggggaggaagacgttaaagacgccagggaggaggacggtgtggacaccattgaggaagacctgacacgggccggggaggaagacggtaaagacaccagggaggaggacggtgcggacgccagcgaggaagacccgacatgggctggggaggaagagggtgcagactccgggtaggaggacggtgcagacgccagcgaggaagatgatacaattaccaatgaaaaggcacacagtattctaaattttttgaagtcaacacaggaaatgtatttttatgaccggtgtctccagagatgcagcttcagctgcccttccgcagattgccgcttgaggaacttgcttggaccgcttcggttccacacagcattgct

SEQ ID NO: 49758 - DNA, 1129 bp, Homo sapiens
cagaatccgacattcctaaaaagttatttcaagggatggcataactgtaagaggtcagtgctagaataaagtcctgtaggtttattttggaagggactgtggccagggtagttctcaggttgtgctagagcagcactttgttatgtggaagacaggttttttaagcaacctttgaatccagctctagtcagtctaagcaggcaaaggtaactgatgactaaatttcagtagctactttcattggattgaccctacaactgccctgggacatttcactgtaccagtattaactgcaaacagcaataattgtcattacagcaagggcagtttgggggtaaagcattttggaggaataaccttaaaaagttaaaaagtcattgtaataactgataaactgtatacattgtgctcctttctgtgggagaagaaagatttggtggagggaagctttctggtttaaaaattagtaaggtgtgtctttttgttttttttaagatagcacttgaatagaagggaaaactgcatggcagatacgtgactgccacaatatgcatcgaagacaaacttactataaagatgttgtgggtatgcagcaggagtctcagtaatcaagccaatggcctttgtcaggaagggaaggggctcaacacagtgatggactgatccagatggctcccggggatgaatgtgggtgggtagcttctgcagtatcaatgcttagagaaatatcctttccttaaaaagaaaataacttttatatttagagtacatagggcatgatgtggatttattagtctggtagataaaatgaaaaaccactcaggtaagaacactcactcatggcagtttttaagcatgaaaattgttttctgaaagtatcatcacttttcctttttaaagaaggctgctaattggattttggtagttcttacctcaagaaaacttgaattatttgggggaaagtaggctcaaaagagaatatatctttcacattcacattcagaacccagcaacctggagtccaattttcagtattttaactacctcaataatgctatgaatgtaagatattgggatagagatcccaacttgaaacaacagccagtgcctgtggtaacttaatgtcttg

SEQ ID NO: 49759 - DNA, 1551 bp, Homo sapiens
ttttttttttttcagtacaattcattttattattttagtgcaacaaaacatttccagatttatttccaatttcagtttcaaaacaaactgacctgaaatttttagtatttactatctgtgacaatgaccaataaaatgtgtaagaatataaaaaataaattcattcattgttggtagtactccaaattcaatgcataagaaccttttctatctaaagcattttcctaaaactgcaaactaaaaatctgatatttaaaacatttatgtggtaaaataatctcatttgattatggatatcataaatagaatataaaagatattacatttcttcaaataccatttggtttcactggtggtttcaattttgagtttcctaacatccattctacaggtcaatcaaaatacaaaggcgtgcaaatgaaacaagctattgaaatgaaataaaattcaagaataaaagttagaattaacttatgaggtaacttttatgtaagcaaacatcacagttgtaagaaatgcctctctttacaaagagtcattaagatgcgcattttcctagagctattatttcatgtgcccaaaatcaagcaaaataaaatcccatgcttcctggaatattaaataccatgcagtgtactatttaagaaaagaacaaggttaactaactaaaagcagaactcacttattttttgctccttggcccatttaaaattaggtccattaaaggcacttgaaattatatatttaacctgaaaaaaagttgctaaaattccaatataaatgtaaatatctttaacttgcttaacccagctatccccaaaacagtgtagtggggcaaaatgttcaaaagaaaaatcatccagtgcacgtagatgggcaccaagaagctaagcttccctgagcgcgtacagagccgccaggcgactcaattcacgtgctccttttctggggatgaaaaggtgctcaccagatctttctatgcaactgagagctcctaaatcaagtcaaaggggaccatcgtactgaaatattccatattttccagtggtccaccagctgggctcagaggccaggagctgttccccttgcccaggctgcagaccaacctgaatttcagcttttaatgttcttatggtacagagtggtgcaggatggaagccattcagagcctgatgaaatggaacagaaaactcccattttctgtcacctgtcaacttcctgtaattcaaatcacccttgaataaaattaaatgtgccttctgtagttcagcatataagtcaggtgcaacctgaggcattgcacagtactcatgaggcagagtccaaaatatatgattgtggtaaacccatttacccattttaatatactcttcccagtcagccccacacttggacatccacttatgattactgtgttttacctgttcaattaaccaattaaaatcatgtatagtagtatcagaaacaaaccatggaattgtttttccataaaaatgaacctcagtagccagttcagaggacaacaagaagtcggctaatattaaatctgta

SEQ ID NO: 49760 - DNA, 1502 bp, Homo sapiens
gaattaggtataattgagatggcaataaatatgcccgtattagaaagaggaaacaaagctacatccggcttatgattttgttgagtcacttctcccgaggcagcctttccaatgcctggtcccttcccctgagagcaggtggactgctggtggtggctttctttcctgcagagaggcactttagacccatacctgctgtgagctgaattgatgttctcatcctgtgaaccttctcccactttaacctaatttatctttacttgtttaaagataaggaaacccaagatgtactttatttgcaaactcaaagcaaatggcgaggccacctgtgacccagtaaccagaaaagaaaccatgccatttgtataagtagagacacttcttgttgaggtaggcaaggctcttgtgagcgatttttttcccctagtgagacctaacaaaagacaagctatatcatttctgcctgaaattatctgcttgaaaagatcaaaatatcaggatacttagctcttcacaaatatgaagtcattatcacatttcactgagccagaaatcactgttaacagcacacacaaaagactacactggttgaacagcaaagagaaacccgggtctccagaatcacagtttagtccttctatattactgcaagtgacctgttttttctgaaggctccccgcaaatgaagtcctggaatggaaaaaatccataagtccataaattaacttgataaatattttagaacagacaaaagaaaatattgagtgatgtagttctaatcctcctaatatggaacctggcaagactgaatcattttactgtgaaatatataaacacaatagaatgagccaacatgatggtttctctccagtaagagtttttcttttggaaatgaggttaacctagccccaaatctagcaattctcataaaatccgattttagaattagcctcccagattaatctgaatgattgacttattttttcttaggcaagtcagtaagccacccactagacagccatatccagcaaaataagagaagtttccagatgccaaatgataagccaccatcaacccagcggggaagccttctggttggtttggctgtatgagattcaggaaggccagaatacccaaaattattcacacgacgttaacttattggtactggctaagcaatacatgtatttcctaaaggaggagatggtcttttggttgatttatggacacacttgtttcatctgactgtaaatatattgcatgctttattctgatggtgcactatttcatccagcaagcttttcatctgagaatgtttaatgttgaccttattcttagagcaagtagatctaaatatttttcagctgagttattagggagtcattattctgtggtacaatgctgcaaaaagcatcatgtggaagaatgggaactatgcttactttatgaagtgatgtataacacaatgaaatctgttttacaactacaaaaaaaaaaaaaaa

SEQ ID NO: 49761 - DNA, 1274 bp, Homo sapiens
ggtttctgaggaacaagaagagatgggagggcaaagcagcgcggcccaggccacggccagtgtgaatgcagaggagatcaaggtagcccgtattcatgagtgtcagtgggtggtggaggatgctccaaacccggatgtcctgctgtcacacaaagatgacgtgaaggagggagaaggtggtcaggagagtttcccagagctgccctcagaggagtgaaagggacaatttggctgaagtctttctctgaaaaaagccaaagggttataggggtacacttaggggttgcatgcaagctgttaccaaaaaatttttaagtattttcttaatttgaataataaaaccagaggaaatgcatacagggcatgagcaactgaggcaaacctttgtggacatgaattgttctacgatgaatttttgctttagtattttaataagaattacaaagacaatggcatacttggggtgagagggagctgaggatgtctgaggagggaatagtattgcagggaagactgagaaaacagtaggatgacagttttgagtatactctgcacttttcaattgtgcaatcttcttgtgcactttaaggctttttaattttgtttgagaatgcaaatgtatactgtaagtctacctttactatctactatgcctacttcaccatctcttaaggactcggcatttgtccacagtcagactgcaagagagggtaggtcatgaacagtcacccgtgctggctgtagcccccacagaggcaatcatgcccaatagattcaagagaagctaagcggaaatggagggtggaaggtgtgatctgtgggactgtctgggcctgttactcatcctgctatcaatttcttattaattaatcttgatgattcttattaattaatcacatttgcaggaaattcagatgaggcaagaaaattttattggcctgggtaagactgaaagcattccaaattaggcttagactgtgcaaagggcttagctaagttatcgagcttaaaacccgtcaattaaacaaacattatttgaacagttactgcatgccacgcactgtgttgggcttagtaataaaaaaaagaaaagataagtgcttgttctagcataaattaaaaggtccaagggaatttaatctggaagagaacatatgccaatttttaaactatgacagctttttttttctctttccattcaaatagtcctggttcattcccagaagggcacaaaatgaatgaataaataaataaatgaataaagacaaaaaaaa

SEQ ID NO: 49762 - DNA, 595 bp, Homo sapiens
aaagaggatccctcattgaaggatgttgaagatactatggtggagaccattgctctttgccagagaaattcacataatttgaaccagcagcaacgtgaggccctttggtttccgttattggaggcaatgatggcccctcagaagctgtccagttcagccattcctcatctacactctgaagctctgaagtctttgaccatgcaagttttaaatagcatggcagcatttattgcccttccatcaatcttgcaaagaatcttacaggatccagtttatggaaaaggaaaacttggagaaatccagggacttatcttgggaatgttagatacctttaactatgaacaaaccctgctggaaacaacaaccagccttctaaaccaagatctccattggtcattgtgtaacctgagagcttcggtcaccagaggactgaatcccaaacaagattactgctctatatgtttgcagcagtacaagagacgccaagaaatggctgatgaaataattgctttagctgtggccatttgtatcactcattctgcctacaaaacaaagaatgcactgtggaatttgagggccaaacaagatggacatg

SEQ ID NO: 49763 - DNA, 1703 bp, Homo sapiens
ttttggttgatttttttgccttcccttcaattttaaactgaagcattttaatgtgggtagaaactctacaccaaatacactaaacattttggtgcttagtggatttctttttaggtaactggtacttacttccaaagactgaatacaagccacactccatcatatcccttaaacttcatgaaaaaccattcaagatccccttgctgcaacactgttctcttcttctctactaaattctatttccaaaattggtaatagagccagaaggatcccccagtacccagccctctgcctggcacaaagtggtagcacaattaaattcagtatgggtggagcatggtacagtcttggtgccatagaaggagtagttgcatagtcacacatcatttgataagttggatgttccattacatagaggaacacaaaattccagggtttttggaggaagggattagatagtgactaagccgccagaattgaggtggccattcctttttgtataggctaagaaacaggttatcagtgaaaagttaattatggctttggcactagaatagcactgttgcaaagtatttaagcaccccccatctcagccctttattttatctttcatgtgggctaatgtgaggataatcttacagatattataggaatttcttttctatctttatgaaaacaacgtatataaaatatatctagaaaacctttgtttgagactcttatttaatgggcttttgattctaatgataattgtacctttatctttcaaaagctgatatttcctacctaagcatctcccgagaaaaatatctcattaaaaagcccataaataataggggagaagaaagccttaggtatcaattccaaaacagtgattgaaatttcccaaaataattatggcttctgtcatctccagagataaatctggcttggtttaccccataaatctaatttcaggaaaaggaaagctttaattttaacactcatctgaatcaacattaaagccttttctcttcaaggcgtttattggaggaaactcaaatgaatatactttttgaattactgtcatcaaaagtgtacggcttcctgtgctgcttgtgtcaaatggaacctgccctctaaagcactttctttcctttacttgcgtggtttcatgtaagctgtgctgtttagaaacaacatctcagactttacaaagaaatgacaaagaaggcaattgcactttttaagggatatccgccaagcagtttctgttttctaaaggacaaaatacagagtgtgtgtcatttttaattagattctttcccctgctgagttggaaattccagtgcagcactgattgaccacagttgccaatctaaaagcacaaagacagaagtaaagctttatgctaattttatttcaatatgatagaaaatttatcttggtatgtccttttttagataactccagcaggaaactgtaactgctatgtctttaggaaaatgtagaagaaagaacattattgttctttaattcctacaaggtactcgaaaaccttaagtgaaaaagatttctatctttttatcttagcgcatttatggaaaaaatattaactatcctgaatattttataattttgtaggaaaaatatgcatctattttttcttgacttcttttatatagtaataaaagttattttggaagctcaaaaaaaaaaaaaaa

SEQ ID NO: 49764 - DNA, 1570 bp, Homo sapiens
cctacatgtacaaaaacatttacaagaaattctaacctccgggcacactgtcagttggtgcatcattttacaactgaagaaatggtaaagttaaaaattaaaaggccttatggaagaaaatctcagagtgaaaatgtgccggcctcacgaagtacacaagtgaaaaaacagctagctatgacagaggaaaataaaaaggaatctcagcctgctttagaattgagagcagagacccaaaatacccacagtaatgtagcagtgatcccagaaaaacaacttgtagaaaaaaaaagtcctgacaaaacagaaagttctttacaagtgattacagttacttcagaacaatgtaatacaaatgcactcacaaacacacaaaccaaaggacggaagattaggaggcataaaaaagaaaaggaggagaaaaaacgaaagaagccagtttcccaatcccttgagtttccaacaagatacagtccttacagaccttatcgatgtgttcaccagggatgctttgctgcctttacgatacagcaaaatttgattctccattaccaggctgtacacaaatcagatctacctgcattttcagcagaggtcgaagaggaaagtgaagctggtaaagaaagtgaagaaactgaaactaaacaaactttgaaagaatttcgatgtcaggtaagtgactgttctcgaattttccaagcaattactggcctaatactacactacatgaaactacatgaaatgactcctgaagaaattgaaagtatgactgcttcagtggatgttgggaagtttcgcatgtgaccagttagagtgtaaatcttcatttactacatatttgaacgtatgttgttcatctagaggcagacgcacgagattggactaagggcaagtaaaacagaagaagatggtgtatacaaatgtgattgtgaaggctgtgaccgtatatatgcaacccggtcgaatctcctccgacacatttttaataagcataatgacaaacataaggctcatttgattcgtccaagaagattaacaccaggccaggaaaatatgtcaagcaaggcaaaccaagaaaaatcaaagtctaaacatcgggggaccaagcacagcagatgtggaaaggaaggaataaaaatgcccaagaccaaacgaaagaaaaaaaataatttagaaaacaagaatgcaaagattgtgcagattgaagaaaataagccttattctctgaaacgtgggaagcatgtatattctataaaggctagaaatgatgccctgtctgagtgtacaagcagatttgtaacccagtatccatgtatgataaagggatgtacttcagttgttacaagtgaaagcaatataattagacattataagtgccataaattatctaaggcatttacatcacaacaccgaaatcttcttattgtattcaaacggtgttgcaactcacaagtaaaggaaacgtctgagcaagaaggtgctaagaatgatgtgaaagattctgacacgtgtgtatcagagagcaatgataattcaagaacaacagctacagtttcacaaaaggaagttg

SEQ ID NO: 49765 - DNA, 422 bp, Homo sapiens; identical to SEQ ID NO: 12317

SEQ ID NO: 49766 - DNA, 2951 bp, Homo sapiens
acgggctgttgctcgggcagcccagcagcggcgcggccgccgagcccctggaggaagacgaggaaggggacgatgagtttgacgatgaggccccggaggagctcgactttcggccagcgcccaggcggaagcgaggagaagaggagcggcgagtgcgggagaccgtgcgcagggataaaacgctcctgaaggagaagaggaagcgacgcgaggagctgttcatcgaacagaagaaaagaaaactccttccagacactattttggagaagttaaccacagcttcacagactaacatcaagaaatcgccaggaaaggtgaaagaagttaatttgcaaaagaaaaatgaagactgtgaaaaaggaaatgactccaagaaagttaaagtacaaaaagtacagtctgtcagccagaataaaagctacttggccgtaaggctaaaagaccaagatctgagagattcaaggcaacaagcagcacaagccttcatacataattcattatatgggccaggaaccaacaggactactgtaaataagttcctgtctcttgccaacaagaggttaccagtgaaaagagctgctgtccagtttttgaataatgcttggggaatccaaaaaaaaacaaaatgccaagaggtttaaaagacggtggatggtcagaaagatgaaaactaagaagtaaatcaatgctaaatgaagaatctgtactttgtatgtatagaatttatctaataaatcattcatagatcattttaaaggatcattataaaaatcataaacctatttgaggaagtgctcaaccacatttcattcttctggagtagaactgtgccttgcaatcctagaggaaaaagtggtttaagaaggaattgttttctttttaatatatttaactgaattcaagccatacccacatcagcaacagcacctcttctactctccccgggttagaggggtggcaaaaatggcacggactaaaaggagaaatggatattccagcaaagtctctaactgcagcctgtagacaatttgctattaaagattcagtgcacaaaatatagctaacagcttttaaatttttacttttaaccagtctggggatttgcttgcctggtgagtctcatatgccatattatgaatatgaaaataatgaagttaatttcctgttgcctttcctgtgtccagcccacaataatccaggtctaaccccctaaccccagggatgcccagtaaactgaaggcaattttaggttgtagaactcagattaattgtagaaaccattaattttaattgctctaattttcatagtaatcataaaaagtatgcaagtacctaatatataaactcaattgacactgtatctgtagaagtaaatttttaatggctggttaattatatcactacattttattgcaatatagtactcatttaagcacttaaaaatggaaggtgtacaaagattaaattaagacacggtaaattgactaaatatttggtttttatataaataaaggtcataaccacaccgttgacatgtaatactgttataatacaacagttaaacttgtgagtctacaacagaagtcatctgtagttaaacaggaaacaaagttgaaaaagaccatgttaaaacaaaactactgggactaacaggtcgggattgtaagtagcaacaaacatattcactcagctcctgagtatttcaagttttacagtacacattaaaaatgatttcttccatcaacactataaattcaaactgtcggatgtttatgcattttgcaagttacactgattgaatgcttatatgggagtgggggtcggaacatctcccaatttgaagtttacatcacccacatgctaacacaaacacaaccttgttccatttccttcccctctctcccccctcccccacaaagaaggcaggatttttggtttcttttaggtaattgttttaaaggatttgtgatgatcaatttgaacgtctgaaattcagtaatatttaactcttagacaactaagaggttaaagatggaaaataatttctcctaacactaagttagaaaatcatttgcatcatgctgtaaactaggaagcaatgtaaagcgacaaaaaccctgtccccagtacataatttaaaaaatctaaatttcaaatcagcagagctggtctacttccatgttgactatatgccacaatataagtgtgagctcttgaaatgccatagctaatgtaggtagtcttccactgtgggcaaaatgccgccaggatcccaattcctgatcgagcccatcagtccctaagacattgtgtggcctgtcccattgctagggcaagtggaggttgctttggcagattgtgggtttctaatattgcactgttaagagctgagcacacaggttctctctgaatcgggtcaagctgatttcccaactgggctgttccagggatctgaatatgcctagtagactgaatgcatccttcaacatttttttgtttgcagtgttcttgccacagtctctccttagctgttcactcattgcttgcagctctcgtccaaagtggatcattctttctatggcggcctgacttcctccacacaactggcgtctcaactgacttgaatcaacttctgtaagaaaaacagacaagtattttactaccttatggaatggagtataatgaggacacgaacatacatttcttataccattttgtacatttagtaactattccctaatatttcatctaaatatgcagattgttaaaaattcatttttaatatgaaactgcagctaaaagatatactttatttagctctcaagagtctaggatccagtattcagcatgcagttgagaggggacaacctttcagtgttagagggtacttatgtcagaaaaaaattttagaaaaagtataattccctaaaactacattaagcaacatttaa

SEQ ID NO: 49767 - DNA, 619 bp, Homo sapiens
cagctttatccaggctggtctgcaagagacaattatggtaagaaaaagaagaggaagagagagaaactacaggaatctgcatcaggtacaggtccaagaatgacagctgcctacatctgaaacatggtggaaaacgaagctcattcccaacgtgcaaagccaaggcagcgaccccaggacctcttctggagatggaagcttgttgaaaacccagactgtctccacggcctgcccagtcgaccccaaaggaacactgacatcaattttaccctgaggtcactgctagagacgctgatccataaagacaatcactgccaacccctctttcgtctactgcaagagccaagttccaaaataaagcataaaaaggttttttaaaaggaaatgtaaaagcacatgagaatgctagcaggctgtggggcagctgagcagcttttctccccccatatctgcgtgcacttcccagagcatcttgcatccaaacctgtaacctttcggcaaggacggtaacttggctgcatttgcctgtcatgtgcaactgggagccagcaaccagcacatccatcagcaccccagtggaggagttcatggaagagttccctctttgtttctgcttcat

SEQ ID NO: 49768 - DNA, 1474 bp, Homo sapiens
atataactgagtttacgcagacgcagaaaacgcaggcaaacctgaggtcctcagaatggcgggcacaggtttggtggctggagaggttgtggtggatgcgctgccgtattttgatcaaggttatgaagcccctggtgtgcgggaagcggctgcagcgctggtggaggaggaaactcgcagataccgacctactaagaactacctgagctacctgacagccccggattattctgcctttgaaactgacataatgagaaatgaatttgaaagactggctgctcgacaaccaattgaattgctcagtatgaaacgatatgagcttccagccccctcctctggtcaaaaaaatgacattactgcatggcaagaatgtgtaaacaattctatggcccagttagagcatcaagcagttagaattgagaatctggaactaatgtcacagcatggatgtaatgcctggaaagtatacaatgaaaatctagttcatatgattgaacacgcacagaaggaacttcagaagttaagaaaacatattcaagatttaaactgggcagagaaagaacatgcaactcacagctggatctaaattgaggaggaaatgggagtcaaattggggtatccctggtcagtaagaattatgagattgaacggactattgttcagctagaaaatgaaatctatcaaattaagcagcaacatggagaggcaaacaaagaaaacatccggcaagacttctgaaaagacaatttagcaggtagaagaaaagttgggctttcacaaaaggcatctgaacttttaatgaactttgaaggacaacagcatcttcccaaaaccattgatgtttaagtgtttagaaatcatagaaggtgtaggctgctgtggtaattctatttgtatatctcaacagaattaaaatgtctagcttggtggtatttttatagccataaaagaaaatctttaggctttcaaaataaggatgactttagaataatattgtgtcatagaattaattttcagccatgtggaccatattttgtatccaaggatccttatttaaagctttcaacatgtacaggaagttggaaatttttggtttatgactttgtctaataaagagatagttctaaacacattcttgatcaccaaacaacttcagaaagacagtgactgtacagttatcattatcatcatcatcgtcatcatcataggtaacagttatatcaagcttaatatgtgctgaacattgttctgaacactttaggtagatgaactagatgtatgtgaataaaaattatttggtcctcacaaaaacctcaggaggcggttactgtttttcctcatatgtggacatgtaacagacaccagttaaataacataacttcgccagagttttatagctgaaagtgtcagcttttttatagaaagttgtcagtcaggttttgcaccaatagtccagctccagagttaatgttct

SEQ ID NO: 49769 - DNA, 1589 bp, Homo sapiens
gtcgggcgcgtgacgtctttcctgcgcgccacctagcgtctctatcgcgccagttcctcagcctcagtgctatgaaggtgacagcgtgaggtgacccatctggcccgccgcgatgctggcaacacggcggctgctcggctggtcgcttcccgcgcgggtatctgtgcgtttcagcggcgacacgacagcacccaagaaaacctcatttggctcgctgaaggatgaagaccggattttcaccaacctgtacggccgccatgactggaggctgaaaggttccctgagtcgaggtgactggtacaagacaaaggagatcctgctgaaggggcccgactggatcctgggcgagatcaagacatcgggtttgaggggccgtggaggcgctggcttccccactggcctcaagtggagcttcatgaataagccctcagatggcaggcccaagtatctggtggtgaacgcagacgagggggagccgggcaccctgcaaggaccgggagatcttacgccatgatcctcacaagctgctggaaggctgcctggtggggggccgggccatgggcgcccgcgctggcctatatctacatccgaggggaattctacaatgaggcctccaatctgcaggtggccatccgagaggcctatgaggcaggtctgattggcaagaatgcttgtggctctggctatgattttgacgtgtttgtggtgcgcggggctggggcctacatctgtggagaggagacagcgctcatcgagtccattgagggcaagcagggcaagccccgcctgaagccccccttccccgcagacgtgggagtgtttggctgccccacaactgtggccaacgtggagacagtggcagtgtcccccacaatctgccgccgtggaggtacctggtttgctggctttggcagagaacgcaactcaggcaccaaactattcaacatctctggccatgtcaaccacccttgcactgtggaggaggagatgtctggtgcccttgaaagaactgattgagaagcatgctgggggtgtcaacggggcggctgggacaacctccttgctgtgatccctggcggctcgtctaccccactgatccccaagtctgtgtgtgagacggtgctgatggacttcgatgcgctggtgcaggcacagacaggcctgggcacagctgcggtgatcgtcatggaccgctcgacggacatcgtgaaagccatcgcccgcctcattgagttctataagcacgagagctgtggccagtgtaccccatgccgtgagggtgtggactggatgaacaaggtgatggcacgtttcgtgaggggggatgcccggccggccgagatcgactccctgtgggagatcagcaagcagatagaaggccatacgatttgtgctctgggtgacggggccgcctggcctgtgcagggtctgatccgccactttcggccggagctcgaggagcggatgcagcggtttgcccagcagcatcaggcccggcaggctgcctcttagcccaccaccctggcctgctgtcctgcgtctatccatgtggaatgctggacaataaagcgagtgctgcccaccctcca

SEQ ID NO: 49770 - DNA, 419 bp, Homo sapiens
gctttttagcttatttattgggataaaatgttttgaattttgaatatagatgccctgttttaagatttttttttcccacacagttttgcatttaagtaccagaatacccaaacatttttcattagtcttcatcaacactcccgtttgtgttctcagtcaaattaaaaatagcaattcttggccgggtgcggtggctcacacctgtaatcccagcgctttgggaggccgaggcatttccactaaaactacaaaaaaattagccgggtgtggtggcgggctcctgtggtcccagctaccctggaggctgagggaggagaatggtgtgaacccgggaggcggagcttgcagtgagctgagatcgcaccactgcactccaacctgggcaacagagcaagactccgtcgcaaaaaaaaaaaaaa

SEQ ID NO: 49771 - DNA, 450 bp, Homo sapiens
gatgtgccaccacacccagcttactctgaacttttatgacagatgattgtttttaatgtagaaatgagacaagggtacaaattggaactagaaattgacattgtcattgacaaacatggctaaaaacaaaacatcaaatcctgcccccgtgaagagttccctgtcacctcaagtttgaggatagtcctctaagagtgacctaagcataagtgaaagacacctcccctcacccttctagccccctacaaggtgccaggttggggtaaagagttggagatgatggccaggagtggcctccaacacgctggtgagaggcctgattaggttttggggaagatctgagagctctggcctcttcgtgagtggaacataaagccgcctcttgttgggagatcctaccccagtgacagaggaatcccccaaactaggctgtgccctggctccgtggcg

SEQ ID NO: 49772 - DNA, 924 bp, Homo sapiens
tagaccacctatccaaaatgcatgttttgcagataagcacaggcctctggaaatgtcagccaagatccgagtaccatttttacgtcaggttgttcccattagtaaaaaggtagcccgggaccctcgctttgatgatctgtcaggggaatataatcctgaggtgtttgacaaaacataccaattcttgaatgacatccgagcgaaagagaaagagcttgtgaaaaaacagttgaagaagcacctttcaggagaggagcatgagaaactgcagcaactgcttcagcgaatggagcagcaagaaatggcacagcaggaacgaaagcaacagcaggagctgcacctggccctgaagcaagaacgtcgggctcaggcccagcagggccatcggccatacttcctgaagaaatctgagcagcgccagttggcactagctgagaagttcaaggagctgaaacgcagcaagaaattggagaacttcttgagtcgaaagaggcgacgaaatgcaggcaaggacaggagacatctccctttgagcaaagagtaataaggaactatcctctgctctgccactgccccagggagacatggatctgtgaggacagatttggccacggctggtttccgttcaagggcaaggatcacagctgcccttgaatctcattgcctcagagaagactagagggctcttggactatccctagggctacacaagaatagttcagccttctgccatgccacacagcctcagcttgaatctggttcattgcgtcctcgtgttcttctctcatccttgccttaaaccagggattctgataccgaagaagaggggccaatgaaaaccatggagtctgttcgtgactcccagggctgggacattatgtaggagccacttcataaacattctctttactcatctttttaaaa

SEQ ID NO: 49773 - DNA, 1766 bp, Homo sapiens
gttttacacctatctgctcattttgttgggttagcttttctggtttatttcataggttgttcttgctatttattaagaacagaatatcaaaagattatgaatagcctcagctctagaatgcttaccactgttaaaacaacaaaaagactaaacctctaatttcatgcaaatctttgttagcttattctaagaaatttattaagtaaaacaaagagaaaccagaagtgggagatagttattttgtgcgtaattttctttaaatcattttgaatgatgtgaaggcattcagtttgctgtatttttttaatcacttcatacaaggaaaacttcgacatttacatttctagatgtagtaacagtctactttgatatatgagtatttaaactaagggcattaagagatattagatatttcttaaggttttcatagggctcaataggtgtagtagcaatgatattacctctgaaaccaaatactcttttatccttgattccactatgggaccttataactagtccatgaaaccaagctcagaaaagctttaactcttatatttgtgtatatgtatgctgcttctgaaaatataatttttctaagttgttgtaatgactttaatttgtaatcagctaaggcttaagatttcatttgtttctaagtttctgtttttcatcccttcttttttcttttatatttagttcagacctagagccagtagaagctctcacagtgagttcaatttgttagtgaaacattgtactgcatcaccagtttttcttaccttctgttgacagctgaatatttctgttactcagtacttgcaaaaacagtaactaaaatgcactatgctgagtggaaagcaccgtcataacaattgattgccatagcaagttccaaagtgaatttcagccttgcttcacatttgtatcaataaatatgcacattttttaaaactttctaacaatatagtctttggatttgtttttagttatgagccgcattctttacttgatagaactcagatttgtcttagcctattgccatatagtactcaccttataactatgtaactttctcgtaatgtatctgtttgtgcaatatggaagctgtgagtggattcatagctttttggtttaattgtacattattgtgtgtgtatatatgtatatatgtatatatataaggaccaaaattcttagctcgcttacactgttgctagtgtaaacattgttacacttaattttacagggcacaaattatggaattacttcataaattcatgggaaatgttttcataaattattggcattaacatacaattgccatttaattatgaagtccatcagtattgacagaagacgttacagtgaagtgctaaaaccacactatatggtaattatattttgggttatgtagtaaatcaaatatgcatgtcattgtgacactttatgtgttaaaacatggtagataatcacattttctgggccctgtaaaatagtgttactgtaatactctgttttgcctcctgccttgtttacattaaacaggatatttggtaaatttttttgtattgaaagttgtgtaggttactgacagtgttaccagcgtctggaattcttggtccctccgtggagaaactcttcagatggtcattgtgtacctactctctcttcaaaggaagttgtgatcaagttcaactttttgtgctaacaatgcatgcaggactaagagggatgatctaaaaaataaataatgtaatttataaaaa

SEQ ID NO: 49774 - DNA, 748 bp, Homo sapiens; identical to SEQ ID NO: 12344

SEQ ID NO: 49775 - DNA, 1466 bp, Homo sapiens
tttttttttgcacacaattatgattttatttgttaagttacaatagccaaaagagctttacaaaaggcaaaataaactacacatccattgtagaaaagtcctttttatttctttaaatcagaggccccctctagcgtttgaaagcagtcacaggcaacacacaatgcaattgaaagtaaacagtcacagcattttaccgcagaccttccaaaacataaggcttgcttctgttccattcaagtggcacaaaaatcaatgagagaaaaatagctaaccataattaatattgcaaattcctgctatgattcagattcattatcctctcattcagtaatttctttattatttactgctgggttattttttactagattaatactctgttaataaggaaaaaatatataataaatatagggactttaatttccctaataagaaatatacctcatttgaaatgaccgaaaattaatgttaccatatatcctactctgctttgatggaagttattggtaacttcctaaagtatatacttaattttaactttattatatttggaaatcagaactttttaaagtacatatattttgaaattcaacctaatctgtgactttgctaaaactttttcagtactcagtaaaaaggaggtgggaaacgttgctttgaggacaaatgttggctctgaagaatatgatataaaggaacgcttaagagtttttatacagacagggcactgcataaatccaatgagtgaatctcgtgcgcttttgaaaacgattgattgaaattagcgggagtaaaaaatagttgattttcactctattttttcagctaatgtctttatgtgtctgtttccatgttctattacagagggtttaagctgacagctagtattactataactggaaaataaaaagaaatctctaattttaacaaaagaaaacaatgcaaacttgaggaagaaaccaacagagaaaactatattaagctaatacttcatgttcttaaaagttataaatacactgaaaatttgaaaattcaatagctcttgaaacaaatttaatctgtattaactttatttaaataaatgaccaatctgtcacccaacatgtcatgtggcttctctgcactgatcttgctttgttttcaaacttgtcacttgcaaatattataagaaaaaaaggtcatctaaaatgagttaaactggttacaattggtctcaacttttaagaatttacattcaaatggaataggacgcagtgtttttaaagtgcaagatatactcttttggctcaacatgaaacattatagaactggaaattaccgcagtcatttctcctacaacaaacttagttaaaagctgttttgaaagttagttagccatcagattataaactatgaaaaacactgaaaagtcatttaaaatgagtatataaatgcaaattacaaataaaaccagtgtgggagag

SEQ ID NO: 49776 - DNA, 3272 bp, Homo sapiens
tttttttttttttggtttttttgtttttattcattttatgattaaggtgtttatcactactccagttgggtaaaccacattgaagaatctgactgcaggtctttagattcagccaaatgctttccatcaattttgctctaaaaaatattaaacattttaatacttcagccatgctcagaacgctgcagtctaaggatgaacttcaacttgcccatgccaagttagggcgacaggagcagaactaaggagctatgacgtctaaaagaatcagagaatctggcttaagacgaagagagcttctgttccccaaaactaaactgtctagtttttaaatccacccttaaccgttcaagaaactgaaaaagtcaacttgtttttaaaataccacacaggtatgcaatcttccatgatttgttttgcatctcagctagcacagggaaacccttgaaaaacctagctgtcagaagtttttcctgagggaaatcattacgcttctactgctgagcttcatgtttattctgtgcgtcggggaaaggagaaagcaatgggacagagaagggaaaagttgcgactgggtgacgaattcattaggtgcatttgaaagtaaatgcaatggaaaaaagtaacaaatgctaaagttttctaaaagtttaatgaagccaataaggcatataaattgtgttctggcagacattaagacctgctttctcttaccaaagaaaatggcacgttttatcaaaatttgacaattcagagtaaagggtactgagattaagcttcagagcaccaacttaaacaaaacaaccaaaaaattgttatccaacgtggaaagaggagcaagaaccaaggcataaaggggaattaaatatgtgttcctccatctcaaaatccttttaggaataggagttctggccacttgtgagcaacacattgcaccaccaaaccccaattccagaatctaaatttacgatagaaaaacaaaggtaactccaaacgcatgtcttgtatattccaaagggaagcttgaaagtattcataatacataggcttgtctgtttcaggtaaaatgacagattgctataattcttcctgctattatagtcaaacaaaaaaatgacccactttcgcaaaagtttagaaatctctcactttcattcctagttttagtatggaattcacttttttaaataagggctacatctataatgaatacagaacttcaattcacacaacatttctaacattccattcacatcccacccagtcaatgaatgaacatttatggttaactcagcaaagtttcttcacagaaagatattattaaatggctgaagaaattgcaaactttaacaaagtgctgtgagtaattactggaaaaacccttacactgatttgcaatggtcttttaaggataaaaataggaagtaactgatactggactacaagtttgcaaggaaacatttttcactgtcctacttgatatataatataataatatgatagaataaattacagtacctggcaggctgacatcagttcttcatctaaaaaaacactatcattcagttcaggatattaaaaatgaagatgaaacatgctctaaaacattgtagctacaagaggtcttatatttactcaaaagaggaatctattgagaactttttatttaggtctacctaacagctagagaatctccatgcgattccatcttttccagaatgagattccaaactgaactttttaggagagggattggagggacagggagagttgggttttgctattttaagttgcaatcacattattagtagataaaaaagagagctttatcatcttccacccattccaatggaaactgcactaagcagggactccatgaaaaatgtaaaatgatagactagaaaacctaccccaccatccatctccctctccctctcactaatactgaaccaaaaaggaagcccattctcaaagttcatgacctctctactttaggtcacctcgaatgcagtctacatgtttacatttaccataaggaaagtaccccgcatgggaagtagtgtttgtcttaaaactgagtactttaggcctacagggttactctggggacagtttaataataatactgctactttagagcactaacacacacaaagtgaatccaataaagctctgggcattgattcaatatttagtattaattgcatgaccatcatagcacctctttacatcacacaatcaccagaattagaaattgatttgaaaactaaaaacagggcacagtccaataattagaattgcacactgttactatatagaaaccaggtgcatggtacagtgcagctgcaaaaatggaagccaaatcatgtttttagacaattttaggaacctggcaatactgttgaagcaaaatactcaacacagcaggaaatggacccaaaaaaaaaaaagcattctataaccaaataaacatctgatatttcctttccctttgagaataaatacagttaaggtcacttttagccttggaacggatatatgtttgcctatgatgatcttgctaacgactacacaatatctgatgtcctctgctaggattatagttttaagaaagccataattacaagaggcatctactataaatacctagaacttccttttatggcaaccactatagaattcacttgtcttaaacagtgaacaagggaagatggcctcatgtttcctttgcaattatagtatatgttgaggatcaagtggctttcaagcagcatggtgggtgtgaaaatgtttgcagtttagatcattctgttgcgtttatgggttggtgagtctgtaatgacatcgccacactgggctgaggtacgctttctagttccaccattgtccaagtggagtgccatttcttctgatatgaaagtgttcaaatcgacatcatggagtccatttctccttcgactagcattcgatccactgcttacatgtgtaggagagcctggggtactcgaacgcacgcttatactagccattgcaccactaagaccatgcagagctatggcttcccggaagggttgcaaatcagtctctacagatgagctagtttccgttgaagtagctcggttaggggacactacagtcagtcttgggggagctctagagtttcgtggtggaggaacttttccacacaggaagctgatcaaatcttctcgacgaatagttcttctgcgttttttaacccaagccaacacatccttattgcgtcgctgatagcc

SEQ ID NO: 49777 - DNA, 1038 bp, Homo sapiens
taaagagggtttgctttgtccgtcagcttcttcctcaggtgaacacatataacttgcttctcatatttagagctcatatccccaagagtgagatattgacagtaccttttaagtacagaatccaacataaagtcctattgttaaaaatttctcatcatcaattaggattttttaaatgtgccaacatgcttaaaaattaggataactaaaatatattatgacagaaggaactataaaaactatccttgggatttaaaacaatacaaaacaaaaaataacattttccttttgaaatactctaatttgaaaacatctggtacattctcctttctggttgtgctgtgatttttttttgcccatcaacaaaacatgtaccagttgttttggagttccgattccacctcttcccctcttgggcatatgaagcacatttcctgttttatgataccattttcacattctcctcatcagtttgaaagcaacggccctaacgttccttctaatactttgcaccttttccattttttcaacaagatatatcagtagattcaattttaaggtttccctgacaagcatgtcccctcacttggtaccagaaacggcatatggtgatatgaagcagagaattagcaaccccaggcacaatctatccccatttgtcttgttttgacaacactggaactcagccgaccaaagtcaccacagtggcctgtcacgtacagagggtgactgtcatagttagctaagcaacttctgattccagcccagaaaacctaccactttgggacaggttcaatatagaatgaaatagtcattcttgtattttcttatgcctcttcctttctcctgcatctcaatgcatgctgtattagggaaggacacctcacctgctacaatttggcaaatgaggcaggtagtaacaaatagggccttaacttgctttaatttaatgcacagataggcagatgcctaattctgtgcaaagtgtatttcataactgattttcagaagacaaagatgaatctgagtctgtaagag

SEQ ID NO: 49778 - DNA, 1795 bp, Homo sapiens
tttttatttttttcgagtgaaggacccggagccgaaacaccggtagagcggggaggtgggtactacacaaccgtctccagccttggtctgagtggactgtcctgcagcgaccatgccccgtaaaggcacccagccctccactgcccggccgcagagaggaagggccgccgccgccgtcccctgacggcaccagcagcgacgcggacgctgagccgccgtccggccgcacggagagcccagccaccgccgcagagactgcaagtgaggaacttgataatagaagtttagaagagattttgaacagcattcctcctcccccgcctccagcaatgaccaatgaagctggagctcctcggcttatgataactcatattgtaaaccagaacttcaaatcctatgctggggagaaaattctgggacctttccataagcgcttttcctgtattatcgggccaaatggcagtggcaaatccaatgttattgattctatgctttttgtgtttggctatcgagcaccaaaaataagatctaaaaaactctcagtattaatacataattctgatgaacacaagaccattcagagttgtacagtagaagttcattttcaaaagataattgataaggaaggggatgattatgaagtcattcctaacagtaatttctatgtatccagaacggcctgcagagataatacttctgtctatcacataagtggaaagaaaaagacatttaaggatgttggaaatcttcttcgaagccatggaattgacttggaccataatagatttttaattttacagggtgaagttgaacaaattgctatgatgaaaccaaaaggccagactgaacacgatgagggtatgcttgaatatttagaagatataattggttgtggacggctaaatgaacctattaaagtcttgtgtcggagagttgaaatattaaatgaacacagaggagagaagttaaacagggtaaagatggtggaaaaggaaaaggatgccttagaaggagagaaaaacatagctatcgaatttcttaccttggaaaatgaaatatttagaaaaaagaatcatgtttgtcaatattatatttatgagttgcagaaacgaattgctgaaatggaaactcaaaaggaaaaaattcatgaagataccaaagaaattaatgagaagagcaatatactatcaaatgaaatgaaagctaagaataaagatgtaaaagatacagaaaagaaactgaataaaattacaaaatttattgaggagaataaagaaaaatttacacagctagatttggaagatgttcaagttagagaaaagttaaaacatgccacgagtaaagccaaaaaactggagaaacaacttcaaaaagataaagaaaaggttgaagaatttaaaagtatacctgccaagagtaacaatatcattaatgaaacaacaaccagaaacaatgccctcgagaaggaaaaagagaaagaagaaaaaaaattaaaggaagttatggatagccttaaacaggaaacacaagggcttcagaaagaaaaagaaagtcgagagaaagaacttatgggtttcagcaaatcggtaaatgaagcacgttcaaagatggatgtagcccagtcagaacttgatatctatctcagtcgtcataatactgcagtgtctcaattaactaaggctaaggaagctctaattgcagcttctgagactctcaaagaaaggaaagctgcaatcagagatatagaaggaaaactccctcaaactgaacaagaattaaaggaaaaaaaaaaaaa

SEQ ID NO: 49779 - DNA, 2724 bp, Homo sapiens
ttttttttttgctgcaggtatattcatttttattatattaatagacttagttacatataaataaacacaaaaagcaaatatcaactgaaaggtttggttgggtagtcaactaattttgttcttttctagggcaattcaagaaggtaacatttgaaaggtttctaaatgatgcacactgtaatcattcattctttgttaaaatacaacacaaaccaacagctacaatgctttttatttttaacaaaaaggatgtaaggagggtaagaaaaacagaggacagtaagataggatgtaaagtgtgatgtatctctggacaccatccctctctgcctgccccacacccaaaagttttaaataatttaaaggataccaattacagtaccagaacaccatcaaaataattgtctttatcagggtcaaaaaatacagtgattatgaatgagctgtgaccagttacgaaattttactggaaatgtttaactgtggtcagcagtccaatggtgtgcacagtgccttcaattaatgcacttgagcatacgtaattacatttctggcagggtccacaccccccaagaaaaggtaaagctaagcatttcatttctacattctaaactctggaatcacagagcccagtttaaaagaaaagtcacagtggataagagatgtatataaaaaatacaaggtgtttctttcaaatcaggagttgtgggactacattctttttttttttttttctttcttttcttacaaaatgcgattttagaaaaggatagagactccagttcatgttatactacagacttagacagtgaataagtatattgcatgttttggtagtcagtcttcaggcttcctttcatttcccctagccccaggtttctttagggtaaagcatgtgagtcctgaataaagatacaaaaatgcatttgcagctcttttcttgaattctgcagacttcaaagcctgcaagtcatatattccatcatcaatgaccacaatttttctttagctttgtacacctattcttgtataacaacagtgcatggcacaaatgtacaagaaaataactggttttagtctctacagtttctatatggagtaaaataagttaaaacttttctaatgagaatagctgacaggcagcatacatctttattttacattttaaagtctctgcaggcatctactttggttagttatcaacaatcataacataagcactgatcagagaactgagcagcattccaataacgttaacagatatattatttctttttgaaatactgggaaagcccagttttaaaatattattaaaatgttctaacatttacatactatgaagagttagatctaataaaataacatttcttcaaaaataatcttgcagtgctcttttaggcatgctctgagacgttatcaccaaacatccataccttgaaaatatgactatcacatatccatacatcccaactcacacacacataattccttatacagaccaaaaaacaaaaaaacccaaacccttatcccacatactgaaaaatcaatggtttttgcaaacgagtcctggatgcgtatagctgactgcatgttcatgtggatggatgattaagcatcaattgcaggttaggttttcaactgctagaaatcccaagcagctttgcaggtcttcagctaaaatgaaacagccttgatttcagcctcatttcacctgcttttggttgtttcagtattggaggccattattgcaaacattcttggaattcttttctttccccagaaagtaatgtatttgtaggcatcacttttagcccttttcttttcacgtaggttaagtaattaaaaaattccttcttcacgcagttattgtgggagatattggcagctgttaaaatatcagatgtttttttctttcagatctttgtttttgatgatacagtttgacattagttacactaaaaagtagatgctgccagaaagttatcagtgaatgcaagggtccataaaaggtgcttggttaatattcttcatcatcttcagtttagtttctttcctaaaggcctgaagtgtctcagaatccagtgctcaccatatttcccattggtttggcctgtgctagaagttggtatgattgcaccatgcgtagagactctcttatttccagattaagttccatcagtttgtagttggcttctgacatgtccaggttagagcctataactgcaaagcttcctgtctggcccagccgtctgatgatggaaatatatatgtaacagtgtctgtacagggtcatcttcacaactgccaaagatatcactgggccagagagatctgaaagctttgacttgtgctacagctgatataaattctttatttttcaaagtttcaattaaagaatgaatggcagtttctatagtagtttgtgcagctttggaaatgtcaatttcttcgttttcggaagcggactcagcttctttgaggatactttccagttgggcaagttcctctgacatgttgatgacctctgcttcattttttatcgtatttacttggttgataagtttacagtaggcctggaacagaagcagcaattgaaaatgcaatttgtataatcttcggcagagctccaattcttgtgcatctgtgtttatcctatacatgtcttctttggcaccaaatgtcctcttacaatcatctagccactgatcagcggcttctcttttc

SEQ ID NO: 49780 - DNA, 719 bp, Homo sapiens; identical to SEQ ID NO: 12370

SEQ ID NO: 49781 - DNA, 1132 bp, Homo sapiens
gagcatcacagaagttgctcaggagctgacagagctggtggaacatcttgtagacattgtcagaagcctgcagaatcagaggcccctatcagaatctggaccagacaacgaactgagcatcctgggcaaggctttttcttctggggtggatctttccatggcttctccaaagctggtgacttccgacacagctgcagggaaaatcagagatattctccatgacctagaagaaattcaggaaaaattacaagaaagcgtcacctggaaagaggctcctgaagcacaaatgcagggagaactcctgggaagcccccgtcttcctcctcatggcccatttgccttggaccaagagccaccctgcactcaagggagagcttctcggtttgctcagtgggccatccattcaaaccttaaacttgaagagcctttcctgcagcctggaggtgtccaaggattcccgtacagtgactgtgtctcaccgcccacaaccctatcgctggagctgtgagaggttttctaccagccaggtcttatgttcccaggccctgtcttctggaaagcattactgggaagtggacactaggaattgcagccactgggcagttggggtggcttcctgggagatgagccgcgaccaggtcctgggaaggactatggactcttgttgtgtggaatggaaggggactagccagctctctgcatggcacatggtcaaggaaactgtccttggctcagacagacctggggtggtgggcatctggctgaaccttgaggagggaaagcttgccttctattcagtggacaatcaggagaagcttctgtatgagtgtaccatctctgcctcctctcctttgtaccctgccttctggctgtatggcttacatcctggaaattacctgataataaagcaagtaaaggtgtaaggtttcctaagggattacaacacagtggtttcctggtctctctccctgtcatcaatcagggtagtaacttgacttaagaataccacttgttagaaaaattatcgatagagatgggatctcactagggttgcccaggactggtgtcgaattcctggtctcaagcagtcctccacctcagcctccaaggtgctgggattacaggtgtgagc

SEQ ID NO: 49782 - DNA, 422 bp, Homo sapiens
ggaaacgggaactgaaagcgatgaaaagcgttccacacgccacgagcccgcgggatcctcggagagtatggaacccttcccctccgctctcagccggaggccagctgcgtccagccgggcgcggtcttctgaacaccgatttcaaatcaggtccccggggcccagcgtcacttagggaagtggtggcattttgtggttgctgctaaatcacggagagcagccttggcgctgccggtcccaacttgatccaaggagccttgagaaggagatgagattcagtaccaggggccggccgtggctcccatcctccggaatctgcaaaatggctacttcttcagaaataatggggagagggatggcaagaggccagagatcaaggccctcgagtattaacttgagcatttgggcacaaaatagacact

SEQ ID NO: 49783 - DNA, 373 bp, Homo sapiens
ggggagacttcaggagtcgctgtctctgaacttccagcctcagagaccgccgcccttgtccccgagggccatgggccgggtctcagggcttgtgccctctcgcttcctgacgctcctggcgcatctggtggtcgtcatcaccttattctggtcccggtgcccttccagctgtcacctgaaatggctttattcgtcaccgtctttgggctgaaaaagaaacccttctgattaccttcatgacgggaaccctaaggacgaagcctacaggggcaagggccgcttcgtattcctggaagaaggaaggcataggcttcggttttcccctcggaaactgcttctgctggaggatatgtgttggaataattacgtcttg

SEQ ID NO: 49784 - DNA, 379 bp, Homo sapiens
ggcgggcagcttgccccgccgccccaccggagcgcggaatctgggcgtccccaccagtgcggggagccggaaggaggagccatagcttggagtaggtttggctttggttgaaataagaatttagcctgtatgtactgctttaactcctggaagaatgacagatgacaaagatgtgcttcgagatgtgtggtttggacgaattccaacttgtttcacgctatatcaggatgagataactgaaagggaagcagaaccatactatgcattatccaattggtttgctatttgatcttcttgcatcaagttcagctcttccttggaacatcacagtacattttaagagttttccagaaaaagaccttctgcactgtccatctaa

SEQ ID NO: 49785 - DNA, 1135 bp, Homo sapiens
  misc_feature (1)...(1135): n = a,t,c or g
cgcgcccacgctgggccgggagtcgaaatgcttcccggtgccgggagtgagcgatgantggcttctgttcctggcccacagagtcgccttggccgccttgccctgccgccgcggctctcgcgggttcgggatgttctatgccgtgaggaggggccgcaagaccggggtctttctgacctggaatgagtgcagagcacaggtggaccggtttcctgctgccagatttaagaagtttgccacagaggatgaggcctgggcctttgtcaggaaatctgcaagcccggaagtttcagaagggcatgaaaatcaacatggacaagaatcggagggcgaaagccagcaagcgactccgtgagccactggatggagatggacatgaaagcgcagagccgtatgcaaagcacatgaagccgagcgtggagccggcgcctccagttagcagagacacgttttcctacatgggagacttcgtcgtcgtctacactgatggctgctgctccagtaatgggcgtagaaggccgcgagcaggaatcggcgtttactgggggccaggccatcctttaaatgtaggcattagacttcctgggcggcagacaaaccaaagagcggaaattcatgcagcctgcaaagccattgaacaagcaaagactcaaaacatcaataaactggttctgtatacagacagtatgtttacgataaatggtataactaactgggttcaaggttggaagaaaaatgggtggaagacaagtgcagggaaagaggtgatcaacaaagaggactttgtggcactggagaggcttacccaggggatggacattcagtggatgcatgttcctggtcattcgggatttataggcaatgaagaagctgacagattagccagagaaggagctaaacaatcggaagactgagccatgtgactttagtccttgggagaacttgagccagcggctgtcttgctgcctgtacttactggtgtggaaaatagcctgcaggtaggaccattgcagtgatgggcagatgcgtctttcacacggaatcaggcacagtggccttctgtgacatgtgtttataaaaaatggttaagtatataataaattgaacatctttgagattggaaaaaaaaaaaaaa

SEQ ID NO: 49786 - DNA, 489 bp, Homo sapiens
ccgtgaatgtgctcacagagacacgtgcacaagattctgcacccttggccttaatctcagtatgacttaaggtgcaggaacatttttaacaggttttaaaaaaaccaaaaacccttctgggaggaaaaaaataaaaagcagatacaacagctcaactgttcccactcctaactctccactatgtgcttataacttcacattctatgccctccccgccacccacctcatccctgttctgcgtaaccaaaaaacagacaacaaaagcaacctgaggagaggtttctggactattttatctgtctccatttagatggagatataaatgctgctttgggttccataatcctagggggctatgtttacatagtaaaatacatcctaccaaatcaggaaacagtgaataatgggagtcacttcacagagacgcaggaggacctggggggcgtagcagaggaggataggtagagaagtaccattttaattatttgt

SEQ ID NO: 49787 - DNA, 658 bp, Homo sapiens
cggcttttctctttagcgctcagggcgctgacccactgctcttcctcttaagaaagtgctccattccttccggcgcccggagctgctggcccaaagggatccggagcgagctagggcagacaccatgaccacccttgatgataagttgctgggggagaaactgcagtactactatagcagcagtgaggatgaggacagtgaccacgaggacaaggaccgaggcagatgtgccccagccagcagttctgtgcctgcagaggctgagctggcaggcgaaggcattttcagtttaacacaggcccaaaaggtgtgatcaatgactggcgccgcttcaagcagttttgggagacagagcagagggaggagcagtgccgggagatggaaaggctgatcaagaagctgtcaatgacttgcaggtcccatctggatgaagaggaggagcaacagaaacagaaagacctccaggagaagatcagtgggaagatgactctgaaggagtttgccataaatgaatgaggaccaagatgatgaagagtttctgcagcagtaccggaagcagcgaatggaagagatgcggcagcagctttcacaaggggccccaatttcaagcaggttttttgagatctccagtgggagaagggttttttagacatgattg

SEQ ID NO: 49788 - DNA, 865 bp, Homo sapiens
tttttttttttttttttgcaaaacaccaaatctatatttacacttccacatataataacataactttaagctgaaatatatcataaataaaacaagtaatgtctactgttcgacaacttaagtatcaacaattaaaataaatcaaactggaatgaaataaatacataaacaaaaatccaacgaattgtacctctattatatgtactgttgtctcaaagaaaaaaaaatataaaaccagtagtataccaatagttaatactgatggacacaaaaacatattttgaagtacaaagggctgtaggaaaataattggtatttttatacattcagaaatgtggttaaaaagagaaatctgaaagcccaaaaaattccagcataatacaaatcgacttgttttcaaatagatttggtgattcttttttttaaatacaggtttaaattccagccctctattatcacataccccctttaagatttatggttctagtcacagcaagctctctgtaacactcattggattaggcaaagattgagtcaatcatcttgcaaatgtgttaatcttcaaaaataggctataaaagtgcaaaactatgaaaacaaaatctagattatgtacatatggctcagcttgtgaacaggaaaaaaggtcaatagtgtacactttcctgatacaaagcacttcattgcaatgccaacagactgatctcaaatgagttctcccttgtaacacaggagctaagacttctatcaaggaggacatcttacgttgcataatttaaaaaaaaaaaaatttttctaggattacccttgctctatggagaacagcgaggccagaaaaatgaacagtgcaaatttatttttgaaa

SEQ ID NO: 49789 - DNA, 516 bp, Homo sapiens; identical to SEQ ID NO: 12397

SEQ ID NO: 49790 - DNA, 998 bp, Homo sapiens
catatttgcttgggatagagcttgtgtaatttaccaatcgtattgattgtaagtgattgtgccctgcagaggtatatttaacaagacaaaaataatcttggttaataaaggagcccatgagatttgagtcaggttgtaagtgaaatcacttacacttttggatagaatttatactcctgctcttataaatcagtggtagacttaccattttttaaagttttcttgcatttttttgtttttttattgccacagctccctattctttcttgcctgcctccacccccctgttcagggaaaaaaaaaaattgagccttaaagtgacagctgattttttaattgctgaattttgtgaaattttactttttccaagtgtttccaactttaaaaagagaagtgaagacaaataggttgggaatggtgaagacaaatgggattgggatttcacaggctgtgaataattccttaggatctggcaaaccgtgaagtcttatttgaagaccttatctcctgagagttcttttggagtaggaaaaagaaccctatttgaaatagaccgtttttctcttgtttttaatctgtttaatatttctgatttttaagcagctttcaaaacaagtgtggtggaaaaaaagaaatagtagtaggaagatgtttagggcagcagaactctgggtctaaataagtacatgttcccacttgttgccgatttttgagagtactagggccatctttctcaattttgtattatttgtgtgcatgtttatatcaaagatgcccattttgttaaaatgctatttcctttattaccttggaaactgactcagcctcatgttgctcctaattagtgtttaaggctcccatgagttgcagataaaatgatttattttaacaagtagaaggaggtgattcaccttttggattgtaaatatatgaaaatgtctacaaggtctttatctgctttctgtcagcatttatattaaatgataaattaatgagga

SEQ ID NO: 49791 - DNA, 1169 bp, Homo sapiens
  misc_feature (1)...(1169): n = a,t,c or g
cccggagagacggcgaaggagctggaaaccgagccagggctgagccggctgacaacaggcatcgntcganggtttccggtaaccagcatacaccatctcatccgaaacagcggggttcggcttctcctatggcaggatctggggcgaaaagatcaagagatggtgaactggagaccagtctaaacacccaaggttgtaccacagagggagacctgctgtttgcccagaagtgtaaagaactccaaggatttatacctcctctcacagacctactcaatgggctgaagatgggtcgttttgagagaggattaagcagttttcagcagagtgtggcaatggacaggatccagcgtattgtaggtgttttgcagaagccacagatgggggaacgttacctaggaaccttgctacaggtagaagggatgttaaagacttggtttccacaaatagctgcccagaagtcatcattgggtggtggcaagcatcagcttgaccaagcattttccaagccaccacagtgattcagctgcttcctctcctgcatctcctatggaaaagatggaccagacacagctaggacatctagctttaaaaccaaagcagccttggcacctcacacaatggccagctatgaacctcacctggatccacaccactccaatttgcaacccccctctcagctccccaggtactatctcctttagccatggtcctttaggcactggaaccggcattggcgtcattcttttcctccagcatggagtgcaacccttcacccactctgccccaaccaccccagtcccacctactacagcatctcctgtcatccctggtgagcctatgaaactatctggagagggtcctcgttgctacagtttgccagtaactctgccatcagactggagctataccctatcccctcccagtctacccaccttggccagaaagatgaccataggacaccgggagcagcagagaagccatcctccagttgctgctgatgctcatcttctcaacctctagcccagggcatacagctgtccactgtgacttctaatttgtgtaaatatttatgtatatatgtatttttactattaatgtgtgcatttgtgttgagggaagataaatcctttctgattaaagaaatttttttatacctaaaaaaaaaa

SEQ ID NO: 49792 - DNA, 792 bp, Homo sapiens
ggcacgagggtgtttataactattttgtattataaagtgggccttagagataggaagaagaatgatggattccttttggatcaatcagaaaggaaacacgaaagaaaagtcaggaaggtagagagagaaaaagggagggaaggagaaagaatgggaataaaataaggaggtaagagatactatttttgctgagcaaccagtgtgtttcaggatgatacaaagaaaaatatagaatagaaataagtgcaggcttggaatcaagctacaaatcctaaagatggggtgtgtgtggatgtgtgtgtgtgtgtgtgtacaccattgtgtgtttgtaaaatgtgtatgttcatgagtaagggtgtgtgtgtgtgtgtattaaaattccagagtgaccgtggcacttgggtgtacaggtaattcctccagagctgtttgctggcttcaggagtggagtgagaatttcttttttatgaaaagggatataaaggcaccgagctgatgcagtatttgtaatattaagttgacctaacaaggtatttgcatgagtcacaattacaaagttttgagcggttttgtaatttgacatttaggaaagtctcctatttattctcatactttacattcatgcttagtatactatagaggatgccagctttaatctttctgtcatttaaagcaatatgataagggtattcaataattgggtgccctaaatttctggatgagaaaattttcaattctggccatgagaaagaaaaaaaaataaacagccttcttttttaaaaaaaaaaaaaa

SEQ ID NO: 49793 - DNA, 997 bp, Homo sapiens
tttttttttttttgggattttaaaatcattttattaatccaacagtacaaaagacccccaccaccaccgcattctgccatcactttgttccaaaaagtagtggagtgagagagcgagagggagcagatccagcaaaaacactcccccaggggccattttacaaaatgcggacaggggaagacaacacaaaaacagcaacagataaatggggcaaacagaacaacaaacacaagagttgagcagcggggtggggggtggggggttgccatctacgccgttttagtgtgagggacactgggaacgatgcccagaggctgctctcctcccagcctcaaaggttgtcagctccaccagagcagggtcttctctcctcatgccaggaactgagagaagtgggggtaggggaccactaggtctttgccactgtatcttgagctgggggactcctaacttctccgagggccacaccccatgcctgccttccccaccccatggaggaatgtgtgcatgaacagaaaaggagaacgagcagcgctaaggtcctcactcagccccaggcccatctctggcaggcagtgcttaaaaaataaaaaaagacaaataaagcccagtgcagcctttggctgagaggaatgagaattgctaattaatcaccaggcccaagaggatatgaaagaatagcaaagagaagcaacaaactccaggctcttctacctttgagtaccatggcaatgaggatcccgccgcatcccctacccacaggctgtgacagggcctcacttggatccttttatcatggaggaaatgaggtatagggctctgcgccttttcaagctttccttcaatcaagccaggaaggcaggggaataagggcgccgaaagttgaagaacacacggagtataatgtgcaacagatgggctgggggaggagggtaccaccaaagtccagactttcaggacagcccaaacttcaaatattctggtctgtcagataacc

SEQ ID NO: 49794 - DNA, 581 bp, Homo sapiens
  misc_feature (1)...(581): n = a,t,c or g
atcatggcagcatccaggccattgtcccgcttctgggagtggggaaagaacatcgtctgcgtggggaggaactacgcggaccacgtcagggagatgcgcagcgcggtgttgagcgagcccgtgctgttcctgaagccgtccacggcctacgcgcccagagggctcgcccaatcctcatgcccgcgtacactcgcaacctgcaccacgagctggagctgggcgtggtgatgggcaagcgctgccgcgcagtccccgaggctgcggccatggactacgtgggcggctatgccctgtgcctggatatgaccgcccgggacgtgcaggacgagtgcaagaagaaggggctgccctggactctggcgaagagcttcacggcgtcctgcccggtcagcgcgttcgtgcccaaggagaagattcctgaccctcacaagctgaagctctggctcaaggtcaacggcgaactcagacaggaaggttagacatcctccatgatttttttccatcccctacatcatcagctatgtttctaagatcataacnttggaagaaggagattttattttgactgggaagncaaagga

SEQ ID NO: 49795 - DNA, 1858 bp, Homo sapiens
agactgttggatattctccaagactatatggattacagaggctacagctatgagcgtgtggatggttctgtgagaggagaagagagacacttggccattaagaactttggacagcagcccattttcgtttttctccctgagtactagggcaggtggagttggcatgaacttaacagcagcagatactgtgatttttgttgacagtgactttaatcctcagaaatgacttgcaagcagctgccagggctcatcgcattggccaaaacaagtctgttaaagttattcggctgattggtcgagacactgtggaagaaatagtctataggaaagcagcctccaaactgcagctcaccaacatgatcatagaaggaggccattttactctgggagcccagaaacccgctgccgatgctgacctccagttgagtgagatactcaaatttggtttggataaactgctggcctctgaggggagcaccatggatgaaatagacctggagtccatcctgggagaaacaaaagatggccagtgggtctctgatgccttgcctgcagcagaaggagggagcagagatcaagaggaaggaaaaaatcatatgtacttatttgaaggtaaagattattctaaagagcccagtaaggaagacagaaaatcatttgaacaactggtaaaccttcagaaaacccttttggagaaagctagtcaagagggccgatcactccgaaataaaggcagtgttctcatcccaggccttgtggagggatctaccaaaaggaagcgggttctgagtccagaagagctggaggacagacagaagaaaagacaagaagcagctgccaagagaaggagactcatagaggagaagaagaggcaaaaggaagaggctgaacataagaaaaagatggcctggtgggaatccaacaattaccagtccttctgcctgccctctgagggagagccgagccagaggaccttgagaatggggaagagagctctgctgagctggattaccaagacccagatgctacttccctcaagtacgttagtggtgatgtcacccaccctcaggctggggccgaggatgctctcattgtgcactgcgtagatgactctggccactggggcagaggtggtttatttacagctctggaaaagcgatccgctgagccaagaaaaatatatgagctggctgggaaaatgaaagacctgagtttgggaggtgtccttttatttcctgttgatgataaagaatcaagaaacaaagggcaagatttgttggccttgattgtggctcagcatcgtgatcgttccaatgtcctgtctggcattaagatggcagccctagaagagggcctgaagaagatatttttagcagcaaaaaagaagaaagcaagtgttcatcttccacgtattggacatgccacgaaaggttttaactggtatggtactgagcgacttattcggaaacatctggctgcaagaggcatcccaacttacatatattattttcctagaagcaagtctgctgtccttcattcacagtcttcatcttcctcctcaagacagctggtgccttaagaattggcccagcctcagatcctgtctttagcaaccagctaatatttacccagaggtactgcaatagagtatttcaaaatggaatcaggatctggtgggcctcagaaattgtctcttttctgagtttcaatttggttctcctggatgttttgctctgttttggtacctgtaatatagggaaacacaactttttttgggaaagccctttgaccccagcttgctagttgcataataataaattttctgttcctaatgaaaaaaaaaaaaaaaaaaaaaaaa

SEQ ID NO: 49796 - DNA, 748 bp, Homo sapiens
tttttttttgtttgttgaaggcaaaagtgtttattcaagactttctaccacactgtgggaagcatcgataaacagtcataataattatcattctgagtcactgcaagcgtggggttggatgctggctctcacagtagcctgtgttgggaccatgagcagccatgcgcacctccacgcacggccgagctcaacccgaagaccacgcgtgctccctggcaggagcaggaggcctgaccacagacgcagcagctccccagcctgagcctgggagtgcaccagccagctcgcagcggaggccgtttctcctcacaggctggagtgagctcagagtctagaggtcagaggacctcagactaagagctgcaacagaacgacagcaagaacattctggaaacgatgccacagtgaatcttttatactgtcactcacacttggtgagggcctcagacatgaaaccctggggagaggcgagtgtgacctccagagtttggctgggatgcggctgagacagacctgctgctggccgaggagggcagtggctggcgtggccctcatggccagcaggtgctaggactcctctggaggcccaggcgcctgtctaagctgccggctgtggaccacctgcagagctccccccgcagcctggcggagctgggcatccagggcgccacggaggtcgttcacctggacatcaggcagggggttaaggccaatgaccccatccctcggggccagctgaccctatgta

SEQ ID NO: 49797 - DNA, 433 bp, Homo sapiens
ggagaaatggaactgagaaggtaaaaaccagttcaaaatcagggaggaggttctcaatggtaacgagctccatactgctgagatacagggaaatggaggggggaaagctggagtattgatcccgcccccctccttggttgtcagctccctgtcctgtgtgtgggcggaacatagtccagctgctctatagcaagtctcaggtgtttgcagtaagaagctgctggcatgcacgggaacagtgaatgccaaacacttaaagcaattcgatgtttaagtatgtaagttctttttttttagacagcgtttcgctcttgttgcccaggctagcatgcaatggtgtgacctcggcttactgcaacctccgccttcccagattcaagcgattctcctgcctcaggctcccaagtagctaggaccaggtgcgcgccaccac

SEQ ID NO: 49798 - DNA, 1372 bp, Homo sapiens
  misc_feature (1)...(1372): n = a,t,c or g
cggccgctcagcgtgacttgctcttgaccaggccgctgatgctcttaagctgcttgtagcagagccggcacttatgcagcctctcctccctgctgatatccacacccacagagggtggggccgccagcatgtctgtgatgaggggcagaaaccgctgcaggatcagcttcagggaggtgcagcccgtctggacgtagctctcatacttgctctgcagaagcttctcaatctgtggcaggacggtggtgcacaggtccagcttccacagggaggctttctggttgacgatgttcaggaggtccaccaccaccgacaggtcgttgatggccacagcggagtccaccgacgtcttgatgtcgcccatggtccacacagcccgcacagtgtccaggttcttgtggcggctggtgagcaccacacacatggtgtcgtggcctttgcggatctgtgacatggcatcctcgtccaccagctcggcctgctgggggatcttcacggcgggcaggaagtcggaggcctttcnaccgatgggctcgttccgggtggcagggatgatggcaggctcagccttgggtgcaggtgtggaagcaaccactgggggccggggcaggacctccagatttggcaccgggaactgcacatccatggcagggctgggctttgctgcctcctttgctgtggctgcgtcgtcctctgggggtgcagggaagggctcacttctccggggtggcgtccgactgatgctgttcttgggctggaagatctcgttgtagtcctcggcgttctggatctccgcgcgggactcgcgctcgtcccggtcatcctcgctgctgggggctgcggcgctcgctctctgagttctgcttcaccctctgaggcttgctgcaggttgtgctgggccgctcatagatgcgccggaggggggcgctggggttgggcagtggctgtgccaggggccggtggtcctgcacagggtcccgggccaccgtgccagtcctggtgacacgcgtcagatccaccacgtaggaggagacgttgctctgggagaaggccacacctatcaactggtcattgcagatggccaggtcggccaccttgccccagttgncgaggaccacatcaaagcaccgcctaaggttcccagccgtagacacgcagtgagtcctggcagccgctgtacaggcagcagccgtctgggttgaagaggacgctcctgacgggcccaggctccccttcgatgcagctcaccacctggaacttctccaggtcccagaagcggattgtcctgtcagagctgccggaggccaggaggtactcgttggggtgaaactcgaccacgttgacaggccccgtgtgaccagggaactcagac

SEQ ID NO: 49799 - DNA, 1680 bp, Homo sapiens
tttttttttttttttttttggaaataagtcaaagcattgtttatttatgacatatttacatatttacaaaactgattttactcaatacatcatcctgcgtaatatcataaaatgaacaccatatcctgggaataaaaatccatatttcttaataatttatgtatagcccaacttttagaacatagaatattatcaatttggcttcccaaactacaaagtcctgtttataattttttctagccaaggaacagagtagattcaacagcatattaaagtaatttagttaaccctgagtaattactaacttgcataattttgaatggatgtatataacacactttcatctgcacttagatacttatactatcacactacctttttgtatttatccacctcaattttcaacttcattaatcttcagaagaaagaggaataaagaataggaaagtaataacagaatcattacgaggaaattactagcactgcctaaacattcagaagtctgtgacacagtttaggtctagggttgtctcaaaaacctaacaaaaggaggatcccgaattgaataatctgagcaccttgtcaactgaggttgatattaaattatttttcctgcattctttgtttcctttcacactaattaaatattgtgtacaagcttataaaattcaataatttgtattaaaatacaaaatccaataacaaccaggagttcttcggaagaaaaaaaaaatcaccaaaacaaccccaacagtggtgaagaactatattaaagatggcttttcctaagacagagggagaacaaaagcaaatagcactctccctcccccaaggctagagcaggaggttcaaggaaatgggcaggaagagaacagaacactcaagctggacgattagtgaaggaaactgtggcctgagactgatgatcagcatatcttatgcctaaacaccaccactaagactacctggctaagctgccatggtgtgttagagatgatgagttacttttcttgccccttttacaacagggaaatctaaggacaacaaaataaacaaaaggctgagaaagctgagcatgtgaagtcagtcatcgtccgctgcttttgcaaaaactctgggccaagaacagaaccagagaggccagagcagttcatgtatttctctcttccatctgaccatctctcatcttcctcacccactcacacggttccgagcaggaggcttaccaggtcaccaggggcaggaaaatttctagcttcaaccaagccatggactgccactgcccctttggggattcctaggaaaattaatccatcctaatgaaatgtccagtatttgtgattcctatgagaacaattcctcaaaacatcaaaaagacatttgtgacttggtaaaataaaaatcaaagaaaaattaaggtatttttagaatctgtaaaatttccttataataggagggaaagtagcagaactattttaagtaaggacatgcttcccttcagtctgtaatgaaagactgttgttgtcatcatgccattgccatgataaaatactactagaaaaggatagcttttaaaataaagtgtagacgcaaatggtagagaaagccttcttgtacttgaaggaaggaaagaaagtattctgtccctgttactcctggacaaaagtacaccaaggcaac

SEQ ID NO: 49800 - DNA, 1489 bp, Homo sapiens
aactgtgcgaaccagacccggcagccttgctcagttcagcatagcggagcggatccgatcggatcggagcggatcggagcacaccggagcaggctcatcgagaaggcgtctgcgagaccatggagaacggatacacctatgaagattataagaacactgcagaatggcttctgtctcacactaagcaccgacctcaagttgcaataatctgtggttctggattaggaggtctgactgataaattaactcaggcccagatctttgactacgggtgaaatccccaactttccccgaagtacagtgccaggtcatgctggccgactggtgtttgggttcctgaatggcagggcctgtgtgatgatgcagggcaggttccacatgtatgaagggtacccactctggaaggtgacattcccagtgagggttttccaccttctgggtgtggacaccctggtagtcaccaatgcagcaggagggctgaaccccaagtttgaggttggagatatcatgctgatccgtgaccatatcaacctacctgggtttcagtggtcagaaccctctcagaggggcccaatgatgaaaggtttgggagatcgtttccctgccatgtctgatgcctacgaccggactatgaggcagagggctctcagtacctggaaacaaatgggggagcaacgtgagctacaggaaggcacctatgtgatggtggcaggccccagctttgagactgtggcagaatgtcgtgtgctgcagaagctgggagcagacgctgttggcatgagtacagtaccagaagttatcgttgcacggcactgtggacttcgagtcttttggcttctcactcatcactaacaaggtcatcatggattatgaaagcctggagaaggccaaccatgaagaagtcttagcagctggcaaacaagctgcacagaaattggaacagtttgtctccattcttatggccagcattccactccctgacaaagccagttgacctgccttggagtcgtctggcatctcccacacaagacccaagtagctgctaccttctttggccccttgctggagtcatgtgcctctgtccttaggttgtagcagaaaggaaaagattcctgtccttcacctttcccactttccttctaccagacccttctggtgccagatcctcttcttcaaagctgggattacaggtgtgagcatagtgagaccttggcgctacaaaataaagctgttctcattcctgttctttcttacacaagagctggagcccgtgccctaccacacatctgtggagatgcccaggatttgactcgggccttagaactttgcatagcagctgctactagctctttgagataatacattccgaggggctcagttctgccttatctaaatcaccagagaccaaacaaggactaatccaatacctcttggattttatttaatgtcataatgttgtcagaataaagagaaagatgaaataatttca

SEQ ID NO: 49801 - DNA, 1031 bp, Homo sapiens
tatggttattcaatatattcatttatttgacaattatttattcatttgacaattattcaatgtttactgcataagcaaaaaactgaataagacggttttctgcttttataaaacttacagttaagtagaagggacactgcataagaagtaacatgggagaaggctcaagtgttgacaactgtgatgaagagagatgggagggtccagaaggaaattcaactgtgggcgagagggcaactaaaaggttcctgcagtccgggagttcaggcaacctatgggctcattaaggctattcaggatagagacagctgtggctcatatggctagtgagacaacttccaacagagtttagtcaacaatgataagaagaacagtttcactacaggaagagctactgcgcaactgcctggcagtcagccagggctttggctgaccaggaggtatctctggccatcattaaataggactgagactgccaacaccaccttatgtccactgtgcactgctacagagttgggtggtaagtacttgagggcatgtgggaacattcagctggatgaataccttaaaggctgccgatctcactctgggcagctgtgatattgtgaaatatatagttggtcttcaactcccttcctggcatacaactcctaaaatcctttggcctttccaaagtggtgtcattttgtatgctaatgattggtgctggcgcacttaggtagcttcagggtaggggctggtcactgaaaaaccaagggaggattagaaggttaggactttctgtcccatctcccaacctccaaggagggcagagaggctgactgatttccaatggccagtggtttaatcagttgtgcctacataatgcagcttccataaaacccttaaaaggactgggtttggggcacttccagatagctgaacaggtggaggtttctggacagctgcacaccaggaaaggtatggaatctcctcaccccttcccccatcttgtcctatgcatctcttcatctgtatcccttgcaatatcc

SEQ ID NO: 49802 - DNA, 2332 bp, Homo sapiens
tttttttttttttttttaagaatctttcaacttttatttctagcatacattcatctggacctttttgtttctttacaatgttccccctaagataaatgaatacaataaaaatataatccaactaccagcaatgtttctaaccagaaaagaatctaaaatctctggtgtgataatataggattttttttaaaaaatataaacttcataccagaaataaagcctgaatattctctttctttaaaaatataatttttccttctttgctcttccaagtaaatcttaaaatgaacctgttctagtctatttttaatctagcaattataacactacctagcagggttttttcctttataccttgttctgtactgtgaatcaactaataattgcaaacgtctttaaaaagtgagatgccatttggctgtagcaagattcttcaagagatgctgaaaattaaaaaacaaaacacaaaaaatccctattagcaaactgaaacccacttaacaaattatattatcctgtttctgaaattagaaaatgtataaaagcacttttgcaaactgtaaagttcaaatggaaaacattttttataatctgtttggactataaagactgctgactgggacagaactttagggacacaaggctctgtgaaatccatttttttctgcaactccttagttttgaaggggaggtttataaattgcaaacaagctggggtatggatacaggaatatctcataaagattgattggtttgtcgtgacatgtgactgtttttcttaattgagaataaagaccaaggggcacagggagagttctcttagatcaatactttataccagactgataaaaattagacagtgttttccccacttctgactagttcctctatgcagagcttcattatttaagtacaatccagtttaaaatagtattccaaagctcagccataaatggtctggggatgatttcctttccttgatttaggaagataataaagcctaattataaatatgggtacaacacacctgaatcacagagtagtacccttccaactccaaaccaacagtatgatccttaacagtaataaagggctgcatttattgtgattgtctgtgcccagacacaggtgattaaaaagaaaccaaaggatgagtgaactgacaagagggaaagggtttgtgttgctacatttaaaaggttacactaacagagccgagtgagtcaggtgtgctgtggcaggatcagctgtgggggcctcctttcctagtttctgaatgatcttcctgtggctctgtgagcaggcccagcatggggaatgggctaaaaggcttatacatctcttttggccctcagatgcacttacccttttctttggtgccctctttccccaagagaatattcaggccaattttgcttttttccttgtttctgcattagtaagacattataaactagcaacttgtaatacctctaactctcactgtcttatgttagtataaagtacctcaagtaataagaatgtggaacttaaatgccacttacagaagtcaaacaagcccatgtcacactttgatgaatccaaagtattaaatcttagcaactgatgaagtaaaaagctatttttgctaaggtttaactattggactttaaaccaactttaatattccatgaaatcaaaggtcatttatattgaattaacatgccttcatgtttcctacacacaacaaagtttaaaatatacatatatttttaaaccaattcactcccttttacaatcatactttcattcgaacatttaaaatataaatccaaactcaatgaaaacaacagtgggacaagtaacactatcattaaaatgaaacaataatgcaagaaaaggtcagcgttgaaactcagaaaataaacataaatagattcactggaaatctgctcatatgcctaatgtgttcagaaatgaacctcacaaaaaacagatcccactgtgatgttagacaactcattcctttctcattttctcattccatgatgcatgtcttcactatttttactgaggtttatacagtgagtagatatcctaatggcagagattaatattaaatacatagcctattccataattggcatatgttcccaaccattgttttgtatgctccttgaattataaaatactccaatctttaaggaaaaaaaattaaatggcttagatctattcatacatattgggcattaaatgtcactaagttaacacagtaaggtggaaaaaggatgggagggtacagtaagtgttccccaaacaattccattacattatgaagtagttccaatggcgt

SEQ ID NO: 49803 - DNA, 721 bp, Homo sapiens
gcggggaacaccaatggcggggtacttgaagctggtgtgtgtttcctttcagcgtcaagggttccacactgttgggagtcgctgcaagaatcggacaggcgctgagcacctgtggctgacccgacatctcagggacccatttgtgaaggctgcgaaggtggagagttaccggtgtcgaagcgccttcaagctcctggaggtgaacgagaggcaccagattctgcggcccggccttcgggtgttagactgtggggcagctcctggggcctggagtcaggtggcggtgcagaaggtcaacgccgcaggcacagatcccagctctcctgttggcttcgtgcttggggtagatcttcttcacatattccccctgggaaggagcaacttttctgtgccctgctgacgtgactgacccgagaacctcacagagaatcctcgaggtgcttcctggcaggagagcagatgtgattctgagcgacatggcgcccaatgccacagggttccgggacctcgatcatgacaggctcatcagcctgtgcctgacccttctcagcgtgaccccagacatcctgcaacctggggggacattcctttgtaaaacctgggctggaagtcaaagccgtcggttacagaggagactgacagaggaattccagaatgtaaggatcatcaaacctgaagccagcaggaaagagtcatcagaagtgtacttcttggccacaca

SEQ ID NO: 49804 - DNA, 427 bp, Homo sapiens; identical to SEQ ID NO: 12438

SEQ ID NO: 49805 - DNA, 1742 bp, Homo sapiens
ttttttttttttttttgtcattaatatgatctttaataaacggaataacgcaccattttacagcaagcctttttaaacctaaagaactgccttaaaatctccttctccaatgtctctgtatcaatacaatctttttatttaggtttatatatatcaaagcatttacttacacttattcatagaaaactctttagtggcttaatgtcagctttcatagtggcatccatagataatacaaaagaaaagtgatttgctttattttatactcacactgatccatcaaacacaacttatacagcatagcaaggcttcagacagcttatacaaaagcaaaataactgaaattattcataaagtcatatatgatagtctatctgtaatgtaagagcaaaacacaccaacaaaagatacccgttaacaagaaagagggttctgaggaagtgcgagtattttctagcctttctttttccggaaaagcatcctcagaagtgaatactccgtagcttatgtttctcctgtccattcagaaaaagcatgacagctacgcatctccatgtttcagctactacaacaccctaagagttagtgtattttacaattatccatgtatctttatttgaaaaattatcagcaaaaaactgaggatgattccagcttacataaacactgatacaatataatctctatggaaatgaaataacaaggcatacaaaaattgcttaaataaataaatgtggccagaaaaagaaaagccacagaagtcaagcaattcagtgttaaactgggacctatctttgaattgcatcttttagtaattttttcttactgttaagcttctttaaaaatatgtttcctttacatacttacgaggattggtaacaaggtgaagagcctgagacaagagactggttacagataacttcctaggattttaagtatatagcacatcaatttagagcttgaacttgtctgattcaaagaaaaattctgtttgacaatgtgataaatacaggttattttctcaaaacccatcccaagctattactaaagttataaaatatttagttcacttttagaaggctttataacgttaaattgtctcttgagaaaatcctatctgacaggaactactttacccaagttcccttattaaaaaacaaacaaaatgaaacaatttgtcccatatcatgtatggtcatttgacccaaagaacagaaatgtaagtcgttttaagtcagtgcttcaactctaaaggcctaaatttgttgcaacatgtagcccaattagttgagtcattccctctgttcagtaattacagaactgggcaactttttataattaatgaaatctgatattatatctatgtgaaaaagtcaaataagatgaaacattaaatgaactgtgcaacaaacactttaaatattcaactggatctaattgcttacttgctaacaattgaactttttcagtgtacaaagggatgaaaggggccctgagtttttaagtaacatgatgtctgtagaatgcatctaaaacatgaagatgtttctgaaatctaaaggtataaataaaatggataaaacccacatgttgccttttaaaactgaaaaccaaatcaagttgtagtttcaaatacagtaatttgcttaaaaattcaatcataaactggacaccctaatgatgtgattttgttctgaagattccttctctcttacccagattttaaaatgggtttcaagtgc

SEQ ID NO: 49806 - DNA, 1340 bp, Homo sapiens
ttttttttttccaattgtgaaccattccatattgcatctttattgcaaaagtcaacatgcttcttagaaattcagattgtaattgataaaacaaacattacatatatgaatttaaatgtataaacagttagaaattcaacaatatctcctattatactattacacaagttcacaattttgtaaaaactataatacaggcatactatacatcaagaggaaccactattccttttcacatgatttttttcttttttgaaataatgatccatcaccaaggacccctttcaccttaacaagactgttttccaatttatcatcttagctggtaacaacatttcttcaatgttacataaagaaattgagggaaattttgcaatacttggggttacctttttatcttggacagtgatccactagtatatcaggctgacctagtcaactggtggctattattgctgatcagctacttaaaaagatgtcatacacattaagagggacagaacttgctttagatgctgtatgttatttctgtaaatgaagatgccaagaaaacatgtatggcagttattcacttttaagtgaaattctaacagttgaagatttgatggtggaagtaaatcccaaagggggcaggggatatatataaactattttatgctaacctgaagttttccagtattataattaactcacttcaaattcatctttgagtcaaacatgttttaaaattctttgaaagcacacttttaaagtatttttagtcctgtttaaggtgtactgaaaacttatagaaagggcctcaaaccttactgaaaaaactgtttttcactttaacacacttctatcttctgcccccaatactaaaaagtcaaattttcaactttttactgagagtgaaataagatgtccattttgaggtcaaaaaaatcatatgaaaaggaatctcattctgttgaactgtctactgaaatttttcttagagttccatttatttactgtaattttcagtttccaaatacaaaaatacaacaattcttattgaaatctatacgctggtagttttagtacacaaaaaaaaaaacccaaacaaattatttacaaaattatacagtttaagaaaaaactttgtacaaaaaatatataaatcctttgttccctctatcacgtttaaactgtcaggactcaaaatattcaccacaatgaatctttcaaaatatatactgactgagccacagacatcaagaaaaatttcattagagatgatggaggagtaaggagcaagattgtgtattctagatacaccattctgatgttttccttcttttataagcttattttac

SEQ ID NO: 49807 - DNA, 510 bp, Homo sapiens
agagatggcggagttggacatcgggcagcactgccaggtggagcattgccggcagcgagattttcttccatttgtgtgtgatgattgttcaggaatattttggtgactgtaatcaatgagagactgaagacagatcaacatacatcttacccatgctctttcaaagactgtgctgagagagaacttgtggcagttatatgtccttattgtgagaagaatttttgcctgagacaccgtcatcagtcagatcatgagtgtgaaaaactggaaatcccaaagcctcgaatggctgccactcagaaacttgttaaagacattattgattccaagacaggagaaacagcaagtaaacgatggaaaggtgccaaaaatagtgaaacagctgcaaaggttgcattgatgaaattaaagatgcatgctgatggcgataagtcattaccacagacagaaagaatttactttcaggttttcttacctaaagggagcaaagagaagagcaaaccaatgttc

SEQ ID NO: 49808 - DNA, 1104 bp, Homo sapiens
  misc_feature (1)...(1104): n = a,t,c or g
aatactttttttttttttttttaaaaaacaaagaacactttattcccttgacagtttctgtacagcgacaccaggctgtgcaaagcccagtcgtcgtcttcactgagacacattccccagggacgcctggtgcagccctcctctgccccaggccccaactagccacccctgtgcccactagcaggccctgtgccttcacagggatgaagccctggcactgagaatgcctgggaggcaccgtttgctggggagcagagggactgacctttggcttctttgtggctggaggtgttccaggcctggtgagggggtcccatactgttctctgctgagccctctgcacactttgggggatcctggctggcggtggtaggtgggccggagactcagttgtccgtcagctggccatgtccccattttatggacaggcagcctgaggcccagaggcggaaggatttctccttgccacagctgcatcacacttgaactgtccagacctccacgcgctggcctgtttgctccccaccctagtcccgcaggnctgatatggtgcctccagcagactccatggcttcccggagggtgcagggtccccagttcaccctccagcaggagtggcagcagctggggtaccccctagcagtggcatgtggagaagctggggtatgcagaggatccagttctgtgacaccaggaggcacaccaagttttcctctgtccctaactacagaccatgatgggtggccgcagcacccccccgggtggaggatgtgtggaagttaagaggtccctgggtggccccttggttggccatcagagacccccgggagcccagcctgcagggcaggagcacaatgacgtggccaggatcccagaaaggggctggagtgtctgcctcagtttccaggataacggtgcaatggcctcagccaggccaggtgctggctgctgctgggaataatctctgagcttcgtgactctacagtgtgggcatgagggtccttatttcatagatgagaacactgaggcaagtgcagttctcggccaaaactacccagctgatcagcaaaattcagcccacgtctgatagactccacagctcgc

SEQ ID NO: 49809 - DNA, 673 bp, Homo sapiens
tggttgtgatcagttagttgtaaatgccactgcatgcagatcagcctggtttcattttatattcttcttctatctccagaatatttaaaagttaaacatttcaatttttagaaactcttattaaatttaccacctagctgaagattcctgaaggacttaaacagaaaatccatgcccctctcaaatgaacagggcaataactctactgaatataaactttctctctccattcgtaaaagagacagaagcattattgtttgttctctagttttattatttgtcaattttcccaacacaggaactataactcattttgaggatttttttcagtgcatttcacagcaaaaatgaacaagggaatcattaaaattgttgtacacaaaccaactctttttcttataatttacaatttgttgaaaaaattattgttttgctgttttcatcctactaacctctttaacagaacacaatttatcagagcacaaagcttaaacttcttatgatgatgcaacagacacagccacctacaatggctgataaacaacaggtatgttacacacactgattggaagaccatatcagaaaaaacagagtaaggcaccactcttgggaaattaaggtagcttgcagtaacaagtgttgagcaccataataagtaggtgctcaataaata

SEQ ID NO: 49810 - DNA, 438 bp, Homo sapiens
aaggcttcaagagagggcagaatgtattcggcagaaaagggactcaggtaagcccagcctgggatgagagcagaaaagcattcaagatttgcaggccttgctatggatgcgcttaatcaccatggaggccagcaatacccatctcagcatggctttgatattctctacttcctggcctttaaaaatgacctataatttttcagtttgctttactatattttataaagaaaattctatcttatggttgattgagcattgagacttatgaaggcattaggatagatagctcaggaatgtaaaggttcagaaaaggtctgttttctcagattaacaaatatgatggattccatggctgaccttggtgcttaaaccaggaggtttcaatctagtcctagagttgtgtccctctgaaaggcccaatgccatgtaactaacttt

SEQ ID NO: 49811 - DNA, 433 bp, Homo sapiens
gtgccagactctcctcggggcgtctgtgccttcctaattggctgtacctcctatggttgggagacgggcgtctcccatatatgtgcgacttggcagctgtgactttgctggtggccctgtgactgtcctgatgagctgctgtctgtcggccccagggtgctgaccaccccacatcgtgtgtgcgcactgtgtgtatagtgtctccgttgcatgcctgtggctgtaccgtccgaattctttggtgggatttgctggtggcgagtgtgagagtgcagacgtgcacttgtcgcctgccacgcgagggggacctgggcgctgttcctgttgtgtgtcccatgtctgccgttgctgtgcatgtgaggctgctgcccctgttgtcctcccgcctctctggggtggggtcggggctcctctctcctcttcaccagtgtcg

SEQ ID NO: 49812 - DNA, 383 bp, Homo sapiens
cggacgcgtgggtttaggaatgtgtaaccagaactatgttagtattgcttataaaactttagttaggttcaatatatacatatatacatctctatataggtatatagatttgcattttgtcttgtaaaattttatttgaataaattcttcctgtaggtaattgggagacacaattaatagttcatatgtcactcatagcatttctatatttgaaagtagcccaatataaaacttttgattctaaaattaaaccagcagcctattacaagcacattctttgattgagtccattggttataaaccttactaaatgcaggggaagcagcccaatttaggaaacttctgagttggtgggacactgttgattaataatgtactgtatg

SEQ ID NO: 49813 - DNA, 715 bp, Homo sapiens
ttttttttttccagtgtggaaacttactttattccagccatgattatcctagttgtcaccttgcacacctgccatccggtgccatctcctggctggcacatctatacccactctggctctgaaaggcttgtcaaccaaaaatgggcagctggggctaaggcatatttaaacaaaggctccaaaggacccctttcacttgggtctagcatccagcctctctctcagcaaaggcaggattgtggtcccttgtgttttctgaacagggcccagggcagccaaggcatgccatcactgcagcactcaaccctctggtcacagtggagtcgccggtccagcctgaaatattactacagaggagaaagacccattcttgctatgttgctctatcttccacgtccaaaaacagtcctatgtagcttcagctgctccgaaatcaggtcacagaacagcaggagacattcctttggcaaaaaaggacacgcttttgtcctgtatcttatactggtaagtgaagctctgatcccggtggactgcgggctgcgatggtctcctccacaggatcctcagctgcccgtgcacatccctgcagaagccagtggccaggccctcagcccgcagtagcagatggctctgatgactgaggccattcagcaggatgtcattctcctcatcctccgcatctccactgtcgtgcacaaggaccaccatgtttccc

SEQ ID NO: 49814 - DNA, 759 bp, Homo sapiens
  misc_feature (1)...(759): n = a,t,c or g
tttctctgcggcatctcgtcctttgtctttgtcttcccaatccctttggcgttctcgttctttatccctttctctcgctctttctcggttcccgttctcgctctcgctctctctcccgttctcgctctctctccctctctctctcttctctttctcgttcccgttctttttccctgtctcgttccctctctctttcccgctctcgatcgtggtctcggtctctatccctttcacgatctctctctttttctctttctctctcccgttccctagcacgctctctttctagttctctctctttttctctttcccgatcccgttcacgttccctctctctctcccgctccctgtctcgttctcgttcccgatctctctctctagccctttcatctctcctatcatccactctgtctactcttcgttcctctcttctttcatcacgctcaagctcgtcattccttccctgatgtcgaattgggtgagcttggtctttgatctacaatgaaaatcaagttttgtcagtgattaatttgacaggataaactattgggtaaggacaggcatggggaaatcttaaattttatctgtgtataggggtcacactgggcaacaaattaacaaaccaaggtaggcatatttaattttaacttaatatccaagtaacaatcgcccctagaccttaaattttttaaagataatttttaatttggccctctaacgaccatgtttcctgctccccgtcaacccccttcncccctc

SEQ ID NO: 49815 - DNA, 586 bp, Homo sapiens
  misc_feature (1)...(586): n = a,t,c or g
actagttctagatcgcgagcggctgccacggagctcgtagctgcagctgtcggaggngtcagcggcgtggtagcgaaggtcgccgaacccgcctggctagccggcgagttgagtggcgactcttttgaaacagatggtcaccatgtttagatattagcagtcccgtatgtgcatgtctgcatttgaaaatggaagagggaaacaacaatgaagaggtaattcacttgaacaactttcactgccatcggggacaagactttgtaattttcttctggaaaacccagattatccaaagagagaagacagaatcattataaatcccagtagcagtctgctggccagccaagatgagacaaagttgcctaaaataagacttttttgactattctaaattgactcctcttgaccagcactgcttcatccaagctgctgacctcctcatggccgacttcaaagtgctcagtagtcaggacatcaagtgggccctgcacgagctcaaaggacactatgcaatcacccgaaaggccttttctgatgccattaaaaaatggcaggagctatcaccagaaaccagtggaaaaaaaaa

SEQ ID NO: 49816 - DNA, 1180 bp, Homo sapiens
ttttttttttttttaagaatatagaattttatcttcctttagttaaaaaaaataatccgtaccacggaatgaagaagtagcttttttggggggtggggtcggggagaagggaaggtgagaagggggggaaaaaagaagcaaaaagcccaaagaaaaaaacattttatattcatctgtataaacatatccgctaaggcaaacgcaatccgggtccgaggctgctgcgctgggctcggtgcctcctaatttctgcagattctaaggccaaaaaataaaacctctgcaagtccgcgtagcttccaggactcctgggcattttactaaaataaagagttatcgagtttaaaaagcagtgacgtcgttatgacacacactgaaagttgcataactgtggcctcgagggccactcacttgtttggactgagtgatggtcacagtttcacgacacagcaacagacaccacacacaggcacacgcatgtcagcaagcacgtgggaagctgtggcagaacccggccggtggcctgggcctgaccacggcctgtctggtgcagggcaccagggtgttagggtccccatgcttcctcagggggtgggcatgacaggcaggtcgctggtgacaaggcagtggacgtcacttggggaaggatggcgggagagggctggacaggcccccgctgcccaccgcctggcgcatgcaaacacacttaaagcacttctcggaggcttctcggagaatcaaggcgaagcgctcgtctccttccctaggaaggtgccaattcttcctcccgccccactctctccagagccccgagaccctcagggtgttctggctgggggtgctaagcagcggtgtctccgacccccagagccttccctgcccatgatcccacggcatgcccggcagggggtgggcctgtgaggtagattggcacagctgcccccacaccctgcctggctgggccccagagatctggggttctccaagtcagcatggggtgctgggggcctgcccgggtcccttcaccagaacagaagctccccaccccctctcccatttcagtagatggaagacgcagaggaggaaaaggccctggggaggggtcccctcgtgcctccaattagccccttgggtacactctgtgggggcagccctgattctatctcttctgccagcgagg

SEQ ID NO: 49817 - DNA, 910 bp, Homo sapiens; identical to SEQ ID NO: 12470
  misc_feature (1)...(910): n = a,t,c or g

SEQ ID NO: 49818 - DNA, 370 bp, Homo sapiens; identical to SEQ ID NO: 12473

SEQ ID NO: 49819 - DNA, 553 bp, Homo sapiens
tttttcttgtttggttgggggaagtattgtcttctacgtgtgctattttcagtagcagagtaagcacaaggttttaatcgagttgcataagacacctttgcatagctatttaattgcccaatgtaaaactttaatgccatttctaatgcttttattcatttttgaagtatgagtttgtagggacaaagaatgtatgttatcgtagacaagacccccagagactcttttcagcagaaagttatgcttctagttgccttaccatgtttcttgcaaaactgtccatggtcctcaagggtgttggaaacattatgtttattaaatgggcctctcttcctttgctgtgcacttgatgggtgaactggattggggtgtgcacatccaggaggaggaggagagacctgtagaagtttaaagatagtttgtaaatatcttctaatgcttgtttttagtccttttatgttggagaagttcatggtatgtagtttaatgcaaaatgaaaccattttatttcaatgttattaaaaaggtttgttttattaggaaaaaaaaaaaa

SEQ ID NO: 49820 - DNA, 434 bp, Homo sapiens
atgttattggcatttttaagtgtttagagttttttggggtttggggtggttttttttccttgttttccttttttccttttaattggatgcactgacctggcccaggaaatgaagagattctcttttgatgctattaccaatgttatcataaagtgacagtcacctgtaacaaaaaggtggcaccagacatgatcactgatgttttatttgcacatcaatatttttatttttgtattctggctcagctgcttctctgagtggagttaaggaatgagccacaaagatttttgtagtaggtatattggcattgcattttatattcctctatatttaattttgaaaacctaaaagaaggattgtgcatcttgagagaaagttgagcaaattgtgatctagcggaatgttaatttgtgctgcttcttgtgcacgataca

SEQ ID NO: 49821 - DNA, 618 bp, Homo sapiens
gcggcgctactactactaaattagcggccgctcgacatcacgagaggaagcttaaatctgttgtttgaatttaggaccacctcggttcacaatggtccgtagtggaaaaaatggtgaccttcatcttaaacagattgcatattacaaacgaactggtgaatatcattcaactacactgccaagtgagagaagtggcataagaagagcagcaaaaaaatttgtcttcaaagaaaaaaagctgttttatgttggaaaagacagaaaacaaaatcgtttggtaattgtttcagaagaggaaaaaaagaaagtcttaagagaatgccatgaaaatgacagtggagctcatcatggtatatccaggaccctcactctggtagaatccaattattattggacatctgtgaccaatgatgtcaaacagtgggtatatgcttgtcagcattgccaagtggcaaaaaatacagttattgtagcaccgaaacagcaccttctcaagggtggaaaatccatggagtttagttactgttgatctgatgggggccttttcatacaagccacagaagtccatgtatatgctataatcatgacagattgttcaccaaatggattgtgattttg

SEQ ID NO: 49822 - DNA, 2288 bp, Homo sapiens
ttttttcaaaaacatatgcaaaaacattttatttataatagatcaacatttttgacatgaaaggtagccactttcaatttctcaggaatgcctagaacccaacagttttcagaaagactacttagttcacaattatttcactgtaggtaaatgaaataatttcagaatgaactttttaaatggctttgcctatggaaagttgttttataaacttgaatgtatggtaagctagctttcccaggaaatgaatgtaatccaactatgttccaaatgtattaaaccagtttatacaacaaatatgagaatcacttatgtgcatcaactgtgctaaaacaagaattctttttatcaaaatattcatttttcaaaaaggcctcacattaacccctcaaaccaagcacccccttcctatgtccagcactcttttctacttcgagttgcatgactgtagagacaactgtcaaattccagtggaactgtacactgacttaagactctatgtaatatacatcaaacacaggaggtcactgactttaagggacgaggtgataactaactagttataattcagccaatgtcttttttagtttagagggaaaaaagtagcccccaagtgtccttaacttttcagtacttctctgtaacacacagaatgaaaaggtactctctaaaattaaaatcattagaaaatatcttaaataaagtgttttacataaataagtgttaaatttcagattcaaactatattttcttctgtatctcaatttgggaaaaatctcacaattattaactcttctcagttacatttatttttgagcatttaaatctactatacaccagtttgtaaaattcaccttggttacctctccccatgcctatgtgctgtctttcctcaggtaagtccattatatgcatctaagtgctggggaggtttaaatagcacttaaagaatattcatgagagttctgaaatgaaggtttcgtctttagctattgactgtaggatttgtaattcaaatcatcacagcatcctaaagaaatactgtgtgaatggaatgcacacaattcctacagaacacacaaactgatgtccaaaaggcacagagtaatgctggtggctctttctagtcagttaagaaacaataaaaagtctgcattattctttcataatttaaatacttaagtaatctccactttattattttataacaatgacttcaaatttacattattttaagtaccattgtaatagcttagtgtataatacagatatttgcgaatatcccatccaaaaattaaaaaaaacttcttcactatatatatatttatataaaaattattctgaaagacaagaacatagacaagggacttggtacagaccatcaactcaattttctatcaccacagttgtaactccaaaatcaacaaatatacagcagtaattaaaagcagtgcaaatatctttggaggttaggataaaattataatgcaagaacataaaactgaggaaacaaaaaaggcaagtacttcaagtacaaggaaccagtcggcttgaggtccatcttagtgtttactgggggcttctttcctgcttctacttctttctctgaaatacattggccaacatggcacctgatgttgtcaactggcccattttgttcaaaaacttggtctttgtatcttcactcactaagcttgcagcaattggacattgagccttggaggctcttggacggtcttgttttcaactttttgttcaacattcttttatcatggaacttaaaataacctcatgctctggagagagatgttccatgtcagtccgtaaacatctgagaccaggtaaaaagtgattaaccattaaatcctctgaaatgaaacaacaggaaagtgcactgtaggcttcaaaaagatgcgtagcaatgtccagtcttttagaatccacaatctgtaagttgttcaccaaggctaacttatgcaaatgtggtataacaaactcatctcggaacctgggttctgcgttagggccaactctaccaaatgtttttatgatctctgtatgcaaagaatgttggtcttgatactgaggatcttccaggaaagaagccaactgcattttcactctttccagcaactctctttgaattactgtttccataatagtgccaaaggctggaattgtggcaatcctgacagagaattcaggatcactggacaaggtaacaagggccggagcaacccgcttgtcaactaacgcttcactcatgcctcgaagagtcagctgtaaac

SEQ ID NO: 49823 - DNA, 447 bp, Homo sapiens
  misc_feature (1)...(447): n = a,t,c or g
tcttgganncccttggannacnnctatgacatgattacgaatttaatacgactcactatagggaatttggccctcgaggccaagaattcggcacgaggtatatttaggagtgtatttttgggaaagaaaatttaaatgaactaaagcagtattgagttgctgctcttcttaaaatcgtttagattttttttggtttgtacagctccaccttttagaggtcttactgcaataagaagtaatgcctgggggacggtaatcctaataggacgtcccgcacttgtcacagtacagctaatttttcctagttaacatattttgtacaatattaaaaaaatgcacagaaaccattgggggggattcagaggtgcatccacggatcttcttgagctgtgacgtgtttttatgtggctgcccaacgtggagcgggcagtgtgataggctgggtgg

SEQ ID NO: 49824 - DNA, 539 bp, Homo sapiens; identical to SEQ ID NO: 12482

SEQ ID NO: 49825 - DNA, 1029 bp, Homo sapiens
tttttttttttttttttgagactccataatcagatttattttcctctaataagacagtttagcatctccgagttttgcattctacagtcttacaaactttagttattagcatcagaaacacaaaaacattgcaagacctcaaaacacaaataaataccaaataaaaccacacataatatacaataaacaaaactagaaaacagtaatgctatcaggaagtcaggcatgttgctaactcacagtaacaacatgattattgctgggcaataactcacggtctttttgttttttcttagaagagcggaaaacaggacccaaatcactggtcacaaaatcacttggactgtcaagatgtgtcttcacagcaagcggctactacagacgcaacttttaaaacaggcagattaaaaagacagggtcaaatgagagattggccttctttggtctttgtttttgggtaacagaaccgaacagaggcaccggcagagaagaggctgcgaatctgcagatgctgtgcagcgtcgacactgccctccacacttcacagaccttctcctacaggcatttcttacagaaatcaccggacatcatgccagcttgtgtgttttccaattaagtcattgaatttgctgttggagggtatcttacttgtctgaggggactaagttgtcaaatccagtcatcacctaattacaggagcggtacagcgatcctggacttctagcctcttttcacggtgagagttcacaagacagactagacacagtgcagcaggagaaatgaaacgcaggctctgcttggccaccggggcctcctcacccgcacacctgccagccccgagacggccgaggcttcacacgtctgccctgccaccgcatgtggggcacaccaggatcaggtggaaaatgcccttgcagtgagctgctggccccgcctcacgccgcctgctggcccggctccctgatgccaccgtgcctgtgaccatcagcatcagcctggacgaggcagcaataatgaccaggtagcctg

SEQ ID NO: 49826 - DNA, 418 bp, Homo sapiens
cggacgcgtgggcggacgcgtgggcgagtccggccgggcagtagaggaaattgcggtagtgaccctcgggcctcgccatgaagagccgctttagcaccattgacctccgcgccgtactcgcggagctgaatgctagcttgctaggaatgagagtaaacaatgtttatgatgtggataataagacataccttattcgtcttcaaaaaccggactttaaagctacacttttacttgaatctggcatacgaattcatacaacagaatttgagtggcctaagaatatgatgccgtctagttttgccatgaagtgccgaaaacatttgaagagtcggagattagtcagtgcaaaacagcttggtgtggatagaattgtagattttcaatttggaagtgatgaagctgcttaccatttaatcat

SEQ ID NO: 49827 - DNA, 1386 bp, Homo sapiens
ggaagaattaattcagatctgtacctcattgctgctcacacatatatgtttcttaccttagcctgaaccttctcaggccttgaagtcattattctactctttttttttcttttccttttttatggcactagagaatgaaaacctaaggtcttagaaaatcttaacttgaaaaagtctctaactggcatgatttgattacttttttcccctgtggacaaataattttctttcctatataatagatttttagtaagtgaaacctttgctgctgctttcctgggtttacattagttttttcctgcccttaagaataatttatctgtgcttctctgatgactgttaatttctaatagtgcaggaagggatgagcttttgatttcttctcactcccctcctcaccctacttccaaattacacactaacttctaactcttacagcctgttggcacatacacaagatccacgagaccatgctcctcagaagctacccatgtcctttctcaccatggtgtggctcttggagccctgagtatctgtgactacccactccaaaggttgactgtaagaggagagcggccttcttaattttgcatttcttaattttgtttttctccattcctgttttatgacttggccttcagatgcttcctactctggcctcctccttttttctcctaggaattgtttccaggtaacctaccatgtgcacttctcagctgctctgctcacctttggcccaccttcccgtgaaccctgaggagttacagatccgaataatgtggcctgtgcagagctcagagaactgtgaggactacccatgcctgtcagactctgctcagggacagagatggatgggtaaatggtgctgttggagacatttttatcttcataccaggctctgtttcatccctgcaccccgcacccccactcactccccctgagggggtaaaatgcagaggtggttgacctgaagggtctgattccctccttcccaagccttagggcctaccctggagtgctgcagtgtgtgagagctgctgcttgcttgtttctccactaggcctgctccaaatgcttagccaatctctggagccgacacagttgcctacggggtgacttagcaccaggttccattagctctccaagtgactgtttccacccagtacttttggcgcttgaggatggggggagggggattatttaaaataaataaaatccgaggtggcagtagaggattccttttgctttaaaaatctttggactaaaaaaaaaaaaaaaaagttttttatatataaatatataaagtaaattgttatgtaactattattgtttcttgtatgttctaattttgttttatgatgtaattaaagaaagtaagctgtgaaa

SEQ ID NO: 49828 - DNA, 1138 bp, Homo sapiens
cgaacctggggttgctcaggaagtgggccagggaatgtggaagtcgttgacattgcctgggccaaaagagtgggagatagtttttctcccctcagcccactcctggtagcacctgtcgccagcctggtacaaagccaggcctttttcttctgtgagcatctcatcactgtccagcagcaggtggaaaaagggggacaacaaccagacctattttttctcccccattttttccaaattttgctgtgccaaatgtttaaaattttataaatatgaatctattgaaatttccttaatcaagagcttcttcgtgtaaagtttgcttttttagctatagaaaaagaaaacagtaaatatctcttaatggcatccagccttgctgagctcaccttttttcctgaaggaatgggtaggagtgaaatatttaatgtaaacatttcaccaagtcccttaccctaattttgagctgcattaaacccaactcactaacacagggaatgattgcaccctagtcctctgtgggccaagaaactttcagaagcattaaaaaaatagttgaagtatatcacttctcaccaagtgggtagagtcagttggctgtttgtcccttgttttttatttattccataattatgtttgtgctttttgttttgtaaacagtaatggaacgtacatttttattttgtttagaagacaactttgattcaatctttcaagaactgttccattcttggtttcttcttagggggataaaaagttaccagttaatttgttttgagatatttaagcattctttgagttatagaattgtgatgcagggatttgtgaatgagacatttacatgtgaaaggtgacttcactagttacctgcttgagcagagtaaagtgtgtatatgtacataaaatgtaagtaatcttaactccattgtgcagtgccttttagatgttccgctttctataaagtcttcaaatttttgcatatatattatatatatatgatgtaatgttatagaaatatatgtataatatacatattttttccaggggtatctgatagctctgtattttgttatggaagttgaaagaaaaaagtattttacctcagaaattaaataaaaaaatacttttaagtaaaaaaaaa

SEQ ID NO: 49829 - DNA, 1534 bp, Homo sapiens
  misc_feature (1)...(1534): n = a,t,c or g
ctccctgactccccacagcctggcctcccccctgagcagcaggccctgctaggaagtggcggaagccgtaccaagtggctgaagcccccagcagagaacaaggccgaggagaaccgctatgtggtccggctaagtgagagcaacctggtcatctgaggggcggtctagtctaaggacactgcggccctgccctgggaggttccgaaggcttcctggaggaggtggagctgcagctgggactgtgaggaccgagaagcaatggcccagcagacgagacagcaaagaccaaggcctggaggtgggagcgtccgccccagtgaggaggcaggtggccggcgggcactgtgtacaggagcaggctgagccccacccctggccctgctgccatgttgctcccctgaaggatgccccgacccccgtgcctgccctggctggatcctaggagcccacgggattctctgtatcatcagaggctgggcttggcagaggggaggggcctgtgcccgtcacccctggcccattccttggtaattagccacacccttgcctctgtacagggccctanagcagatgtgcgtccccctcctcttccagcaggtctataaagggaaggggtagcagaaagtcctgggctaggagagtgagtccctgggttctaatcttgggcacatctgtggccatcgctgggtccatttttctgactgtgaagtaaggagagacgtctcagtacccagggcctcttcagctctttgtaggttctgggctgggttgtgggggactggggagctgggctctaccatccctcccattagtagctttatccagccccgtttttgctgcttccagggcctctgccttcaaggcccccatggggctgtccatccatggctctgcctacggaaggggcttaatgcatgtgcctgccctcccccagctgtttttaatgaaactgaaaaaatagacttgatcccggcaggactgtgatacagagccctagcctgcccagccagccccaagatctcaggagctttagggagaagacttggtggggctggagcacaccttgggcctcagtggtttctgtgtccctgtggtgccagtgcttctgggcagtgcaggcggctgccaggcccagccctgacttccactctggctcagcaacctggttatttatgtggggccgtgcaggcatgggcccactgcctgtccatcctgtttctcttatttattgaaactcaccattgccctatccttgtgtctccacccccttccatgtgttgaataataaaaggtgggaaagtgctgtcacggaggagctcctttttctctgtgccctttccaagctttatccggcctgtttccacttgtacctgtccagccctgccctgtgttgggcaccgtgacaggctgccctcccctcacagttcctgcacctcagcagccagggaagcagggcccagaggagacccatcaactcatctggttctcaccaaagcccctagctagaggcagggctgtcccacagaaatagtgt

SEQ ID NO: 49830 - DNA, 757 bp, Homo sapiens
  misc_feature (1)...(757): n = a,t,c or g
attttttttttaagggtttgtggtccaaaggcacgtttatttaaaacaaacgtgatgaggtataggaagaagaaaagaaggagaacaacaattctaacataaaaacacaggaagcatctcaaacttaaaaaagaaaaaaggagtgggggcaatggaggaagctatgtctcatacaaactgctgacctcaattgattacttacatccaaaccttacaaaatagcatttcaagtcagcacttaagccagtgttattagattttcttacaaaaagttaaagctacaaacttcacatttttaaactgtacatagcaaaaacatttaagcttttttttttccaagttggtccgagtgcaagctggtaaaagagattttttttccaaacacaaacaagaacatgtattccaaagacaatgaatataatactgataaaaacacaaacatagtgcttaagaaaagatggggtgaggtggagatgtagattgggcaggaacaattttctagtaaataaggagctgcaatctttagaggcaacatggtatgctagaaaggacactggaataagaatcagaagacctggatctgaatcatggctctgccatattctagccacatgaccttgagcaatagactttacttctctgagcctnaaattttcaacatctgtaaaaaatggaggataaataatacctaatatctccccagcactattaaagtttcctaaaagatatagggctattcaagattatctaattcttc

SEQ ID NO: 49831 - DNA, 1191 bp, Homo sapiens
cttacccagaaatctagaggatctctcctttttataacaaatcaagaaatatgaagcactttctcttaacttaatttttcctgctgtatccagaagaaataattgtgtcatgattaatgtgtatttactgtactaattagaaaatatagtttgagccactgagcccagcctacttttcagtttttaacataatttttgttttatccacaacttttcaagtattgaaagtagaataaaaacatgggttcttagtctttagctatctgttaaagcctatgaatgccttcttaaaatcatgtttttaaatgcataaaatatataggattacaaaggaatctaattatatcgaaatacagttattaaaatgttaaaagataagtttgttatatattaatatgcatgcttctttataaatgcattaaataagagttaatagctatcctaaatttgaaatagtgataagcataatgaaaatagatgcaaaaaactaatgtgatatgaaaatatctgggtttttcttttgatgatgaagtattgctaatattaccgtggtttatgaactatgttcagaattgaagaaaatcctaactttcagttagaggttagtgacggggttcaggacaccctacacaaaatacagcactttgacatattgaatattttaagctgaaggcatttgaggaaattgcagaagcaggaaggtgactctgaccttctgcctgctgttctccccagaagcagccataaaacctgggaaggattttctgaccttcccctgaagtagatcataagactgtcatgtaagaggtgctctcctggcacccagagaaaaggagcatccttacctccaaaagcacagggacacaaagaggaatctaaacaaacaggcctctcagtttcccccagtttattacatttagcttgttcacactttgccctatgacatttctacatcactggctgctcttcatcaaacctactataaaaaacattcaagttcaactgtttctttgggcctttatttccttatggagcccctcgtgtcgtgtaaaacttatattaaataaatgtgcatgcttttctcttgctaatctctcttttgttatagagatctcagccctaaacctaggatggatagaaggaaacatatgttctcccctacattagtaaaaataaaaatggaatttttta

SEQ ID NO: 49832 - DNA, 315 bp, Homo sapiens
ttttaaaagaatagatagacgttgaattattgatattctccctctctctctctaggatacttacagagagctacaatggaaaagtcctggatgctgtggaactttgttgaaagatggctaatagccttggcttcatggtcttgggctctctgccgtatttctcttttacctttaatagtgacttttcatctgtatggaggcattatcttacttttgttaatattcatatcaatagcaggtattctgtataaattccaggatgtattgctttattttccagaacagccatcctcttcacgtctttatggtcccatg

SEQ ID NO: 49833 - DNA, 669 bp, Homo sapiens
  misc_feature (1)...(669): n = a,t,c or g
ggtgaacttctataacatcttaactaaaagcactcccacgtctacaatggagtcgagtctagaattcacacagagccacctagtttgtctttgtcagcgccacgtgagacacctacaacgagatgccttaagccagctcatgaatggccccatcagaaagaagctcaaaattattcctgaggatcaatcctggggaggccaggctaccaacgtctttgtgaacatggaggaggacttcatgaagccagtcattagcattgtggacgagttgctggaggcagggatcaacgtgacggtgtataatggacagctggatctcatcgtagataccatgggtcaggaggcctgggtgcggaaactgaagtggccagaactgcctaaattcagtcagctgaagtggaaggccctgtacagtgaccctaaatctttggaaacatctgcttttgtcaagtcctacaagaaccttgctttctactggattctgaaagctggtcatatggttccttctgaccaaggggacatggctctgaagatgatgagactggtgactcagcaagaataggatggatggggctggagatgagctggtttggccttggggcacagagctgagctgaggccgtgaagctgtaggaagcgccattctttcctgganntaactggggcctg

SEQ ID NO: 49834 - DNA, 746 bp, Homo sapiens
aaacaaggtaaaaaattacatctgaattctcacatttcaaatatatatgaaatatcaaataaaaatttatttttacaagaatttaggggaactactacatagctataaatgtaatatatatgttaactaagtatcatagataaaaaccatgctcccttcagcagcacgtgtaataatagatacaaagattgaaaggtaaaagatttaggatgaaaagaatcctctcttaaaaaggaaaacaaaattatatgtatgtgtatataacagttataacacccatcacacagctttatagaaacagcatctattcaaaaataccagtatttccaaaatatttaagataatatttaaagtaataataatatttaaataaataaatatatttaataaatatttcaataaataaaataatatttaaataattctatacccatgtttttcaaaataaaccaataaaatagatagtatatattagacgtgttagtatatatatctgaggcatgttaaaaatcacaactgaattctcacaattcagtcacaaacctaaacagcaaataaaaatttctatcaccagaattatgtttttttctggtggggaactaccaatagctataaatagaagagattattatggaagtatcatagataaaaagagtgctcgcttcaggagcacatgtaataatacagaaacaaatttaaagataataaaatatttaggataaaaagaattgtctcttaaaaaaaaa

SEQ ID NO: 49835 - DNA, 715 bp, Homo sapiens
  misc_feature (1)...(715): n = a,t,c or g
ctctttcttttttaaacaaagaactttgcacttggccagagaggaggagaaagcccattttctcccttcctaagctagatccaaataaaagaaagttcagttttcccccataactattcttgggtcatgaactttgatctggagtttgttttgtttcaggaatgtgtgcacccagcttgctgatccaacaaagtctattgcttaccagtctagcttgatgaagccttttggccagaagtcaatttgttttggatcagagaaatttcctgacaaggtatatttgttttctagtgacagaaaggcaaaggaacaagtcctagttgttgttgttgttgttgaatactaaatttaagatatgtcagcttgctttcaatgagccttgggcttctgttattgcttgagcatttggaactcgagcttccagagaaatttgaggtcctcgcttgttctctgccttcaagaaacaatgacctgattctgtctttaaaaaaaaaatctcagaattctttttttgtttgtgtttttttttttttnnaaananagtntanntttgtnncccnggnngnaggncaggggccccttttgggttnanngaagcntcnncnnccnggtttanggaanntttcnngcntaanccncccaggtagnngccnctacnggggcngnccccccnccccnggtnaattttggttttttngaaaaancngggtttccc

SEQ ID NO: 49836 - DNA, 1081 bp, Homo sapiens
gaaagtattccagtctttaatttcaaaaacttcaaattagcctcatgaagagaatttttccctgtgaaaagtaagaccaagaaaaaacaaactaaagacatgtgacttattcaatgaaagtgaaaaagaagctctaaaacagtgtcattgattaaaaagaatatctggaatgtagccccactctttgagtgggattcatttcttactgcttatgaactttcaatttagtagtcagaaaccatggatttattttactgcacaatgtgaagtttacattttattaacacttgagtagtctgatttagagactagttacttctattttttaaaataatggagtaacaaattacagaatagctaaataattttttaaaaatattttacagttgtaaaaaatatccatcagaaaaatgacacacaaaacaaaatatctggacctttacagaagacgtttgctgacccccactttaaaggattggaacagtcttctagaattgaggaatatttattaaaatacctgtaaagaaaatagtgaatcactgtagcaatggctttgattcagaccttaaaatcacataagaagaattacaacatgttatggatttttaagtggcaggtattgtaactgttttttgtgtgcaaaatactgagtaaccactgggaaaatatttcagatgaaagggatgacaaaagcatgttggccctttgccatcagcaaggcattgacttctgaaaaaatgatctgaaaaaaaagtttcaccgtttgtcttcttacctcattttaagaagcatgtgaaaatgggatactatagactactgagaatttcagaaattgagaacaatttcataataaaacggctatatttgaagagagaatacattttatataaacaggaaaatacatttgacactttatggaattttatgagactttttgtgggaacagaaggtcttcaaattgtaaaatgtaaagattgctctttttattaagtctttaacagggatgtatttcattgtatgttttgggtatggctttggaataaatcattttatattttatttgaatatcagaaccattaaa

SEQ ID NO: 49837 - DNA, 373 bp, Homo sapiens
cgcaggagttgagggaggagtggacggagttacccacaggagtcgagggaggagtggacggagctacccgcaggagtcgagggaggagcggacagagttacctgaaggagttcagggaggagtggatggagttacccacagcagtcgagggaggagtggacggagttacccgcaggagctgagggaggagcggacggagttacctgcaggagtcgagggaggagtggactgagttacctgcaggagtcgagggaggagtggacagagttacccgcaggagttgagggaggagtggatggagttacctgcaggagtcgagaggggagcggatggagttctccgcacgagtcaaaggaggagcggagagagttct

SEQ ID NO: 49838 - DNA, 629 bp, Homo sapiens
ctctcggcacctagggatggcggagcagagttgaagaaactgtgttccccccactctttgctatcgatcaagggtaaaattccattctgatatcaaaatgcagtattcgcaccactgtgagcaccttttagagagactgaacaaacagcgggaagcaggttttctctgtgactgtaccatagtgattggggaattccagtttaaagctcataggaatgtgctggcctcctttagtgagtattttggtgcgatctacagaagcacttctgagaacaatgtctttcttgatcagagtcaggtgaaggctgatggatttcagaaactgttggagtttatatacacaggaactttaaatcttgacagttggaatgttaaagaaattcatcaggctgctgactatctcaaagtggaagaggtggtcactaaatgcaaaataaagatggaagattttgcttttattgctaatccttcttctacagagatatctagtattactggaaacattgaattgaatcaacagacttgtcttcttactctgcgagattataataatcgagagaaatcagaagtatctacagatttgattcaggcaaatcctaaacaaggcgcgttagcgaaaaagtcatctc

SEQ ID NO: 49839 - DNA, 1203 bp, Homo sapiens
ataaagaatatgcaatccatttgggatttattgcatttaaagaaaacagattaaaacaggtatgataaatacagtaagaaaataactttaaatttcaaacaaaacagtgaatcagggacagaattcagtcaaaaagaataagcagtgtaaaggcaataaagtaataaaatcagttagtgcttaattagatatggcaggggaaaaggggtgggagggggagactgagtctatctcataattgtttcccagctatatttgaggactgaagttagctttagcaagtatgttttgtaacaagtagaaatacaataaagatgtaaatttgctttatttaaaggttaaagttatttgcttagtggtacataaaaggcttcagaaaattcaagtttaacaaaaaatggaagtgtaatcaaagaaagtgcacttaaagctgtgtgccagcaattaaaaagtagcttctatacagcttctattagatgacttttcaatcacaaaaagagcatagtcataaaaacaattctttcaaaagtagcagtataaattttaaaataaaacaaaaataaccccaaatcatgaccctttgcattatcatctaccttattctcttagtagcttttgtaaaccctcactaggagtgaatgttctcttagatatgattgtggttgcaattccattttttaaaaattcacattaactccacagtagagagatgtgacatgcatgtgtgtacatatttttatcttaatatataaaacaccactgagtataaaagttctcaaataaactattcatcatttatggtattctcacagtagatatgtcatctcattctcacagtagactgtcaactcaataattggacctaaaataacaagtttgctaaaaagaaaaaaaaatgagaaaaaagtttactgcacattctaaatatattaaaaacaaatgtacccaagcgcctcaaaactagtgatattaatacacttgtaccttctaacagtgcttacgtgaagtaccaaaacctaaaataaaccaagcagagtagctgacttgtaagaaaactgctctgcctggtgaacttcagcatagaagagtgggctccaccttagattttccaccagcaagaggacaacagtctatcactcttaaacaataaacagggtaagactgaaagttgtgtctatttgcaaatccggataatgtcgtaac

SEQ ID NO: 49840 - DNA, 564 bp, Homo sapiens
ggtctcggatctcttggaccttgtggatctacccggccttggcctcccaaagtgaaacttttcctttaaaatagagatggggatccttgcctgtattgcccccagacctggtcctcagacctcccttgcccttaagcagtccctccccaccctcagccctccctaaagtgcctgggattacaagcgtgaagcattacatccaagtgaaacttcttgagatggttacataatgtctaaatctgctggtgtagaagttaataaagtgtagaactgaataactattaaatattagatcaagtttctcatgtttatcttaacgtataacgatttatcttaaagcactgattttcacaaaataacatcagtgtgaaattggaaaagaagccaaatattttatttcatgtatctgggaaatgaggtgctttagtcaactgaatctgcccaaaactaaaaagcattaattaaaaagtacttaactcagaaattataaaaataggagacatcaataaaatacattctacacagaatacgccaaccatacactactcttttttgataataaaa

SEQ ID NO: 49841 - DNA, 932 bp, Homo sapiens; identical to SEQ ID NO: 12558

SEQ ID NO: 49842 - DNA, 897 bp, Homo sapiens
  misc_feature (1)...(897): n = a,t,c or g
gaattgcaaataagatccagagacctgatcaaattcaggtttaattatttggcaagaccatgtcacgggtgatgtgtgcactcctatagtacttccaggcccataatgtctggtcttcctctgtgatgttaatatttatcaggatttgggacagtttgataaatccattagaaatttttgttttttaatcagctttccacttaatggttttggcagccattgatgactgcccatatccataattttattaggggaaaattacattttgattacgtatcgctggttgtttttgttcaaaacataggttgtatgttaatctgccagtacattggcatcttctggatgagggactcattagtcttctcacaagagtcccttttgttcattagcttgtggaatttgagtgtctgtatgttttttttttaattgtttgtttggaggggagttgataagctaattagctatagagacaaatttcatttttgcttaactgaatctcactgcatgaaaaggcaatctaattctccaacctactttggtaaggtctgatgacttctgtgggcatgaccttcagaagactggttggtcctctgttttggaanatccttgagtgccaagcacatgatacattgatgatctgcttagtaagaataaatgttgctcctcagtttgagaggtttttgctgtctttgagaaatattttcccagacattctaatgtctaaatgccatttgagtagacaatcttcttcaatccatgcctggtaagtagtggggttctgtgtagccagcttattacactaacttctcctgactccagtcatagctccttattattttgtcatcaatgatgttaaccaaaccaaggaacatatttgctacttttcatatatctcac

SEQ ID NO: 49843 - DNA, 788 bp, Homo sapiens; identical to SEQ ID NO: 12568

SEQ ID NO: 49844 - DNA, 1082 bp, Homo sapiens
ttttttttttttttttttaattttagaaggaaaaaatttattcagatgatgtgatagccatgtcactgttaagcctgaacttttctttcctgggtggtgtgaaaggtgcaagaaaacacaagctgcttttaataacactcttgcactgctttctccccaaagctagatatatcaaaacattaaaaaataaaaaagctttttaaggtgtaaggagcaaatggaatagtggataaagccttttcatctgtttagtcattttacacccaagtttctctggagtatttgcctggggaggtttctaatcaaaaccattagactttgagtttcacaaactcctcttgaagctcttccagtgaggcctgcacatcggtatgaaacacattctttccaaaagctaccactggtagattttaagaacaagctcaggagcacatcactcaaaataattccaagtatttcactttttcccttcaaataacactcatgaatctggtccttgaaagactagccaagaaaattagacatttttagcattagtttgctcatacatacatttgctatatttttatggttgtatttttggcaagttttgtttgatgtatttcataatgaacggcgaaattggtgtttgccccattgacatttcagtgtcaatgtattttaagcttcagtgtgttaaaactctgttgaaaattttaacttttgaaatgttcaagtatagattatttttcattgttcttccaaccttggggttgttctgtccacaagttcagcagaatccgtttttctttggcaaccaagaaacttcaatatgtaacagaaaacatggaatggcatttagatcttcaaaaagcagggcaaactggaatggaatgtactgtttctcacagtggtctatgctgacagcaaggctgaagatttccagtaggttatgggtaatcagtgaaagttcatgcttggtggtgacagctgcagtacatcttgaataccagttttcttcaatctttgccaaaaacccaaatttaacacagtttgctgtagtgccattaagatatactcctatacaatttcctccaaactgg

SEQ ID NO: 49845 - DNA, 1141 bp, Homo sapiens
attggggaagtagggctgaaaagagaattttcaaaactgttcgtgtcttcagttcattctgtcataactttgctattgtaatatgtgaataccagtttatttaagctgttctcttttatactgtattaatttaatgttcatctgcgtttagtaccatttttgttattaaaactggcatttaccgtttttcacattaacccaccttgcaccttcccccaaacttatctccacttttctatgcattctatcattgatttgacacacttcatagtgagtcatttaaatactctacgtttggttcaattaaccagtaggttacagttattgaaaattaaagtacagtttaaagctcagtctgttacactgaattgattgtgtttgtttttgccaagggtttagatatgcttttaaatattagaaacatctaagaacagaataacataattaaacttttttctggtaagttactggaaggtttcactgtttagggacctatcatatgagacttcttaaaggattaaaagaataggatagtctcataattgtgagtaaacatcaaggcattatattttacaatactgaataaaatttcatctacacacatgttgccattgtttcatttaaggttcagtgcttatagttaactacaatattggacctaacaggatctagattagcaatataaagaagcatagtggtactctgtttcacactttcagtagatttattagaagtcaaattctattcaacagacacttattaggatatacaactaatttaagaataaaattccaggcacaatatattttttttaaatggtatttgttagtagtgcttcttccccttaacatttacagtgtaaatactgcaggtaaccgcaatctaagttagccaaaaagcagctttttttcccatactgtatgtaaataatgtagacctgggtttttttgtttatttgggtttgtttttttttttgaggtactggaatctaattaatatctcttaggtatcaacaaaagggaacaattggaatgagaatttaggccttagcttccatggtgatttttagttttttatacagtaataattgtgatgctatttgtcaactggatataaatacacatataattttaaaaagtca

SEQ ID NO: 49846 - DNA, 505 bp, Homo sapiens
ctttggttcttggttgtaactgttgactgagaagagccatttacattttttgataccaacagggcaaagctttttacttaattacctctaccaggctttaagggaaatctgatacttcagcatgtgttaaactataaaatacctactccaagtatctgcccagttccttgtcccctctccccaggcccttaaaggaagttctcgatacatatttgtagaataactgaatgttttcaggattcctgtactttgctgagttaaaatggatatggtacccttgctgattggttgagcccctaagagggggcagaatattaaatattccatatcagatatgcttttacaggtttgactttagaaaagtcttagcatgtgaagcctgttggataaagggctgtgtttgcatttaatctgcacttttgtatctcctgtcctggctggccattttgatctcatgctgttcttttttccttttgaacttgtaggtcaccatgtacttgacaag

SEQ ID NO: 49847 - DNA, 531 bp, Homo sapiens
ttatactcatagggtttatatgtacgtattgtgctgctacttatgtacaagtaacatataactaaaaataagatattcataaaaacaagttttaatttgattgaaaataaaataacagtcgtctctgacagtggagaaactatgctcaaatgattactttgaaatagacctctaaattatgtacttttggatttgacatttcatactgactctcagatagcacataatagagaatcctccgtcttctaaatttgtctttctctgaaatctgtacaagtcctttgataacactatattattgaagtctctggagtgaaacactatacactaatttacagttataaatacaaaatattgtagacggggtgaaaaaaagttctgattgacttgctagctggtttctcatctcatggttgccaagtttgtttcagttgttatagtctgttctcagtttttatgcattgcctttttaaacattaggattacttttttgattgacaagtaaaaattgtatagtgtatttatattgta

SEQ ID NO: 49848 - DNA, 3604 bp, Homo sapiens
agacttgaacttgaatctcgaaccactgcatctccgactctgcccagactcttcactccgcggcaccctcaaaccccagcccaggccggggcgcacaagccagccagcgcacctgcagtcctcgcccggacgcgccgcgccccctcggaaccaggctctgctccgagcagccttcgcccctcaagccagccacagtccccgccaggccgggtgggcgtcaagatgaaggcggcccgcttcgtgctgcgcagcgctggctcgctcaacggcgccggcctggtgccccgagaggtggagcatttctcgcgctacagcccgtccccgctgtccatgaagcagctactggactttggttcagaaaatgcatgtgaaagaacttcttttgcatttttgcgacaagaattgcctgtgagactcgccaacattctgaaggaaattgatatcctcccgacccaattagtaaatacctcttcagtgcaattggttaaaagctggtatatacagagcctgatggatttggtggaattccatgagaaaagcccagatgaccagaaagcattatcagactttgtagatacactcatcaaagttcgaaatagacaccataatgtagtccctacaatggcacaaggaatcatagagtataaagatgcctgtacagttgacccagtcaccaatcaaaatcttcaatatttcttggatcgattttacatgaaccgtatttctactcggatgctgatgaaccagcacattcttatatttagtgactcacagacaggaaacccaagccacattggaagcattgatcctaactgtgatgtggtagcagtggtccaagatgcctttgagtgttcaaggatgctctgtgatcagtattatttatcatctccagaattaaagcttacacaagtgaatggaaaatttccagaccaaccaattcacatcgtgtatgttccttctcacctccatcatatgctctttgaactatttaagaatgcaatgcgggcaacagttgaacaccaggaaaatcagccttcccttacaccaatagaggttattgttgtcttgggaaaagaagaccttaccattaagatttcagacagaggaggtggtgttcccctgagaattattgaccgcctctttagttatacatactccactgcaccaacgcctgtgatggataattcccggaatgctcctttggctggttttggttacggcttgccaatttctcgtctgtatgcaaagtactttcaaggagatctgaatctctactctttatcaggatatggaacagatgctatcatctacttaaaagggctttgtcttctgagtctatagaaaaacttccagtttttaacaagtcagccttcaaacattatcagatgagctctgaggctgatgactggtgtatcccaagcagggaaccaaagaacctggcaaaagaagtggccatgtgaagagggacactcaggacactttacgggatcaaagtgggtctacaccagtgctgcttcctgaatgtttgtgtgtgaacccttgtttcctccaaaacaaacgacagcaacgaaaactccttaatcagaacactgatccaatgaggaatggagcttgtttctgtgacccaggagaacttagtgcaagactacaggagttaacagatggccagctccttattttttaatgtagaataactcctgagtttatatcaaatcctgaagaaataagcctcagttttccatctgtttttgataagaataagaaagggagtgagtgtgaagatggtggttagcagtttcactaagactgatattttaggcctcttgttcacatcaaaagatattggtgtcagaataccagcattttcctgccatgcaaaggattaaaacttagtttacactatgtggttacaaatatatgtcaatgtacattttgaacatatttatgtgctatggaaggaaatgctggtgactaaaataaggtttactctgaaagaggaggaattttattcaaagcattcaaacattttattcaagtgtttcaaaattcaaagcattgtattcaaagttgcagtgaaggcatcaacttatgtaaaaactcagaaggaaggctcctctgataaaaacacagctcctttattatgctgcttttcttgttcactttacacactaagtaaacacttattgtcaggtgcctagtcttgagtgaattgttagatgtgcactgaactcgggatgttggggattggagagagagaattgccaaagtaacagcaaaaatatctcttactttgctttgtttataaataaattagtagattggaaaaactagtgttagggaaagaaatcacatgttcagagcctaattcagtaggaagggcttttctctaccctgaaatgaaggtaatccaaaggcatccattttctaggcttaaaagatatatttttgatatatttaatgatattctctacactccagcattaatatgtctgtttaaaaattactaattctcaaatggctcaagaacattagaatttaagtaccttttagagtaattattttaagcaaatagcctggacgtaagagattctcatgccagcatgctttcatttgtcagttgttgtgactgagagataatgaatgacacctgaaatgcatatggtatttttgggagagttaaggtataatttgaaggttggcagaccagttgtgctgattactcttagagaagaagaaatggaaaaatgaaagaaggcaggaaggaaagaaaggatataggaagagagggaagcagaaggcaggcatttttctattttccccacaaattatttcaaaaaaaatctgtattttctgggatatgtcattggcaagaggaagaactggtgttttgaaagcagtatggattctttaaatgcctctcactcttacaagatagtaggcttttgagataataaacttacccgtgtcaattaacatttaaactggcatatagaaaaaaaggaggatttttctgcattgtaaaataatcagtatggtttatatgttgaatttgacatttgtgtgtaatttcatggtggcctagtgttgtggtgcttctggtaatggtaatagaagctcaactatttttttgtggatttcagtttttatcatcagaagtcctagacagtgacatttcttaatggtgggagtccagctcatgcatttctgattatacaaaacagtttgcagtaggttatttgtcatttcagttttttactgaaatttgagctaaacatttttacatgtaaatacttgtatttaccaaagatttaaatcagttgattaattaattaactcaaatactgtgaactatctttaaaacactagaaaaaagaaatgttagtatctcaattacaccaactgtgcaaatgaactttgataaaatagaaataatctacattggcctttgtgaaatctggggaagagctttaggattctagtagatggatactgaatactcaggcccacttaatttattaatgtatacattgtgtttttgtctttatgctatgtacagagaaatgtgataattttttataataaatattttttatgatgataaaag

SEQ ID NO: 49849 - DNA, 1033 bp, Homo sapiens
gttttcagaggcgtggagggagcccgagaagagcagatgttgacaccaccatcactgcctgcagcagtgaggaccaggggcacagtttttgttgaaagggtcgaccaggaagcacttccttgactctgtcctaaagcctctggagagcccttaaatttgtggtccttgaagctattgtaaaggtgaggacactgcaggaagacagctgtctaagaactaggaagtgggccctcaccagacattgaatctgccagcaccttgaacttggacttcccagcatccagaactgtgagaaataaattcatgttatttataaaccaacctgtctatggtatttgttgtagcagcctgcagctctctatcactcttgtttataagaggctgaagtttactttacctcaggcagagctaagcaaaaaagattacatcccgattacaagatgaaagtaaacagaattgacaagagaaatttattactaaaaataaagcagctgaaggttttcccagggaaaaccatcaccacaggaccttccatgatgaaatacgttagtatcttctttacttctgaattgctgccttctttcatatacccaaaattttagtttaagttaaattaatcacgacaaaaacgatgtggcatctgatcccttcttgttcaatctgaagactgaattgggctaccctgtgatggagacttcaagtgctgcaggtgagtatctaccaagggttcatgtgtcaggtacatgggctggtaagaagacacaaaggctgcaggctgaagctctgggaggtccaaggatcctggcagaaggggatcattctgatcttcatcaaagatctgtctctgaaaggcttcaaagctcatagctgcatcattctccggcagcccctcaggtagctgcccatctccagggtttgcacacatcaaatttcacccactggtaattgatgcattttcgagctcctggacagctctggatcaggttgtggatggctggatgagaaaatccaaaaaagtcagctccagctggaa

SEQ ID NO: 49850 - DNA, 614 bp, Homo sapiens
tttctggtcccacagctgagtttattatacttgttttcttttacaaaattaaaaacatctaaaaccaggcccaagtggcagcttgagtccctccatttctggaaactgagaaggctccacctggcttgatatggacacagggtgtggggtggaggggaggaggtatggtgcccgaccaaggaggcaaggggcaagggtggcagactgaggagggagcaccgccacgagccacagtccctgagttataattcacagtaagaaggctcaggctgcagggggaggtcaaggctcagtgaggttctggggtgaccaggggtttccctggggaaggtggccggggccaagatgctctcgagccagtttagaggccagggcccttcctggccatctgtcccgtggcctagctgacactccgttcatctcacttggtgctctgggttcctgtgacagaggcccctggcctttcctgcattggctggccatcaggggggccgaagaacaacacccccagagtcagaggaagaaggcgattccggaggccacggtcttgcagccgttggaagagaagagcggtcgttttcaaggaagaaagtggtgctcttcagcctggttgc

SEQ ID NO: 49851 - DNA, 1434 bp, Homo sapiens
gaacgaacagaaaccggtgtgggagaagatatcctcctcaggaactgcaaaggaatccccgagcagcatgcagccacagcccttggagaccagtcacaaatacgagtcttgggggcccctgtacatccaagagtctggtgaggagcaggagttcgctcaagatccaagaaaggtccgagattgcagattgagtacccagcacgaggaatcagcagatgagcagaaaggttctgaagcagaggggctcaaaggggatataatttctgtgattatcgccaataaacctgaggccagcttagagaggcagtgcgtaaaccttgaaaatgaaaaaggaacaaaaccccctcttcaagaggcaggctccaagaaaggtagagaatcagttcctactaaacctaccccaggagagagacgttatatatgtgctgaatgtggcaaagcctttagtaatagctcaaatctcaccaaacacaggagaacacacactggggagaaaccttacgtgtgcaccaagtgtgggaaagctttcagccacagctcaaacctcaccctccactacagaacacacttggtggaccggccctatgactgtaagtgtggaaaagcttttgggcagagctcagaccttcttaaacatcagagaatgcacacagaagaggcgccatatcagtgcaaagattgtggcaaggctttcagcgggaaaggcagcctcattcgtcactatcggatccacactggggagaagccttatcagtgtaacgaatgtgggaagagcttcagtcagcatgcgggcctcagctcccaccagagactccacaccggagagaagccatataagtgtaaggagtgtgggaaagccttcaaccacagctccaacttcaataaacaccacagaatccacaccggggaaaagccctactggtgtcatcactgtggaaagaccttctgtagcaagtccaatctttccaaacatcagcgagtccacactggagagggagaagcaccgtaactttcaagcgctcctgttgttgtcgttgttttaaactttagaatctgaaaaccagaaagaagtcttgtcattgcagcagcatcgattccggtgatagagtttgtatcactcaacatcaggggatgcctgaggagtgcgagctccacagcaacatggcaggcaggaggtcctcagaaggtgtcaggaggttccacactcgccagttcactggagcagagtcccttcgccacacttagggtcccagtaagccatgccagcattaccttttgcgtagttaaacagacgtgtatccagtctagttaaggaagaaacattaagattgtttaatttttaacatatattcaagaattttaatttgtaaagaattgagccacattgaacacaattgaatgagattcagaataaacttataacatcttaagaaa

SEQ ID NO: 49852 - DNA, 2200 bp, Homo sapiens
attctcgcttccgtagcggtctccgccggttggggggaagtaattccggttgttgcaccatggcgtccatggggaccctcgccttcgatgaatatgggcgccctttcctcatcatcaaggatcaggaccgcaagtcccgtcttatgggacttgaggccctcaagtctcatataatggcagcaaaggctgtagcaaatacaatgagaacatcacttggaccaaatgggcttgataagatgatggtggataaggatggggatgtgactgtaactaatgatggggccaccatcttaagcatgatggatgttgatcatcagattgccaagctgatggtggaactgtccaagtctcaggatgatgaaattgggagatggaaccacaggagtggttgtcctggctggtgccttgttagaagaagcggagcaattgctagaccgaggcattcacccaatcagaatagccgatggctatgagcaggctgctcgtgttgctattgaacacctggacaagatcagcgatagcgtccttgttgacataaaggacaccgaacccctgattcagacagcaaaaaccacgggtgggctccaaagtggtcaacagttgtcaccgacagatggctgagattgctgtgaatgccgtcctcactgtagcagatatggagcggagagacgttgactttgagcttatcaaagtagaaggcaaagtgggcggcaggctggaggacactaaactgattaagggcgtgattgtggacaaggatttcagtcacccacagatgccaaaaaaagtggaagatgcgaagattgcaattctcacatgtccatttgaaccacccaaaccaaaaacaaagcataagctggatgtgacctctgtcgaagattataaagcccttcagaaatacgaaaaggagaaatttgaagagatgattcaacaaattaaagagactggtgctaacctagcaatttgtcagtggggctttgatgatgaagcaaatcacttacttcttcagaacaacttgcctgcggttcgctgggtaggaggacctgaaattgagctgattgccatcgcaacaggagggcggatcgtccccaggttctcagagctcacagccgagaagctgggctttgctggtcttgtacaggagatctcatttgggacaactaaggataaaatgctggtcatcgagcagtgtaagaactccagagctgtaaccatttttattagaggaggaaataagatgatcattgaggaggcgaaacgatcccttcacgatgctttgtgtgtcatccggaacctcatccgcgataatcgtgtggtgtatggaggaggggctgctgagatatcctgtgccctggcagttagccaagaggcggataagtgccccaccttagaacagtatgccatgagagcgtttgccgacgcactggaggtcatccccatggccctctctgaaaacagtggcatgaatcccatccagactatgaccgaagtccgagccagacaggtgaaggagatgaaccctgctcttggcatcgactgtttgcacaaggggacaaatgatatgaagcaacagcatgtcatagaaaccttgattggcaaaaagcaacagatatctcttgcaacacaaatggttagaatgattttgaagattgatgacattcgtaagcctggagaatctgaagaatgaagacattgagaaaactatgtagcaagatccacttctgtgattaagtaaatggatgtctcgtgatgcatctacagttatttattgttacatccttttccagacactgtagatgctataataaaaatagctgtttggtaaccatagtttcacttgttcaaagctgtgtaatcgtgggggtaccatctcaactgcttttgtattcattgtattaaaagaatctgtttaaacaacctttatcttctcttcgggtttaagaaacgtttattgtaacagtaattaaatgctgccttaattgaaggggtttgggtggatttttttttctcaaaataagctgtagggactattttaacagcttaaacaggagctctcaagatgcacttttgtattgagaggaatatgggcttgatcctcttcctatctaaatgggtgggccatttgattgtagagggccaccacagaattatgggatgccttaagtgctgttactaggttgctcacaagcctaacctggcg

SEQ ID NO: 49853 - DNA, 1305 bp, Homo sapiens
ttttttttttttttttatgattgtaaaattatatattctcaataacaattccactaaaattatacaaagtacattcaatacttaagaatggcaaaggtggggagaggaggagaggaagccagtttggcctggaagcatcaacagttgactccaacaaaggaagcccagctgggctggaggaagttgggggtggaggtccggttgtaaaaaataaaaaaggggatcggtaaaaaaaggccacccacaaggaagcagagtgagcgtgcatgttcctgggggagggcaggaggctcagctgacatgctgctgctgggcactggagctcaggcgggctccgagttggtggggggcaggtttttatgcttgaaatactgcacaacttgttggggcagctccgccagcacagctttggccaaggtctcttttgctgcgttgcggaactctcgaaagggaacgaactgcacaatatcgcgggctgcctcctcccccgtgtgggagcgcagcatgcggctgtccccatccaggaactccatggcagcgaagtccgcattgcccacgcccacgatgatgatggacatgggcagcttggaagcctgcaccacggcatgccgtgtctccctcccatgtcactgatgaccccgtccgtgatgatgaggaggatgaagtactgcgtggccgtccgctgttgtgtgccctgggccgcaaaccgggccacgtggttgacgatgggggagaaattggtaggaccgtagaagcggatgtggggcaggcaagctgagtacgcctgggcaataccatccacacctgagcagaaggggttggtggggttgaagttgatggcaaactcatgggagaccttccagtctgggggtaactgggccccgaatcccagagctggaaacatcttatcactgtcgtagtcctgaatgatctgcccaacagcccagatggccgacagatattcgttggtgcccatagggttgatatagtgcaaagaggaagggtcgaggggattcccgttggaggctgtaaagtctattccaacggtgaacatgagctggcagcctcccaggatgtagtcaaggaaggagtagtctcggtttatcttgcaggatcgcaggatgatgatgcccgagtttttatagttcttcttcttcctctgcttcttggggttgatgcactcgaacttccagcgggacgctgtctcgagcctcacacatctgtgacactgaggtctggaactcgccgatgaagtcatggcccccgtcattgtcatagtcgtagcacatgacctggatgggcttc

SEQ ID NO: 49854 - DNA, 1140 bp, Homo sapiens
tttttttttttttcagaactccaagatgtttttatttatttcaaattccaatagaatgaatatgttttatctaaatatttttatcacacaactaaaacattgaattactttttcagaaatagttaaatacatcaatctagttacaaattctaatataaagagtacaaaatataatgttataaattgtattttaaaaaaagaaatacaaattctatggtcttttgcattttactgcctcaaagcagaattagcaaagctgatgaagaatgaacattttcccttgggcgggtggcccttggtcactcccacaggcacgttaccgggctccggcgtgtgctcccaccaaccacggcaaacaaaggcgtcctcctcacttgaagtcctggcctgtggttgtttcatctgtttttttgctcagtgaacaaaacgttctgaaattagaactcaccaaagttaaaagcagtaaaacaacatatgctacttaagacattttgaagcggaagtaaagctatgtgaatgccgtccttccttccttcccttttctacagcttggaaacctctgagaatttgctgggggtggcagaggagggtttgtctagtttgaaggaaggaatgttggtagacagtctccagccacgaaagcccaggaggtgccctcttccacacaacagactaagcactgcacccactttctttgatccagaaagcatccctactgaccctgtaacctacaccctctctgtccaaagaacagaggccgaccagagttgcccagcctggagaggcaccatggagatgaagcttgccctttctgcactcaacccctgcagcctgaaggagtgtgagacgatgaaacccacatgtgccggagcccctgcagaggtgttctcacaccctcagcgacctgtgcacagtggccggatcaggggtgggggcctgtcatactgggcgctcctttctctgacgaagtaactgtatgcaactcccaattgctacttcctgaagcacctgcttttcagggaaccagtgtctttcttggtttaaaaaataaataagtaaatattgggggacctcttaaaacacttaatacttttcagacctcaaaggcaaaattcacctggctttgaagccaaatctgta

SEQ ID NO: 49855 - DNA, 874 bp, Homo sapiens
tcactgaacgggccatttaagaattagatttccaagactcccactccctgtgggggcccactaaataactgaatacattttaagagcaatcctacactgagggaaataacggttcctaaggtattctgcaaagaaagagtatcgataatgggaactggcaactgagcatgctaaatcaaattccatgaatacagttttcataagatgtctttactacatgcattttgctaatatttccctaaaatattcaccaactctacagagttatactttgtgttaaggtactattgagttataagggaaatagccgtatcaggtagctagtgacataataccagttgtgaaaattcagacaaaatgagtcgacaaatccccaaaaatggcaaattaagccctgtgacaaaataagttattggatcatacagaaatagcccaaatctggaaattttgaattaaaattgtaatcctgtaaaacaagttttgggggtgaatggatttctttaataccaataatatttttaattcccaccacagatggatttgctgaatatgctaatgctgtgaatgagaaaacaattttggggtaggtatacccacaagtaatctgatgacaaaataaaccacagactgatgtcaaatggacaaaaaactgaaaatatgctgtgagaaatagacaaccaaaataatatagggggttgtggggtgtggcacagttaaggcatctaaacaaaaattccacatggctttggcttattaaaatattttacactatttttttaaaaaaagatttgaaagcatctgaaaaacatgcaaattgtttgaaaaccttgcatggcaaattcagacagtttgcaagcgtcaatcagatgtttga

SEQ ID NO: 49856 - DNA, 2179 bp, Homo sapiens
aaatgactctaatctggagacatttgctgagacccttgtgcctggtcacttccgctcccaggatccttgagatgcatcctttcctgagcctaggtacttcccggacatcagtaaccaagctcagtcttcatacaaagcccagaatgcctccatgtgacttcatgcctgaaagataccagtcccttggctacaaccgtgtcctggaaatccacaaggaacatctttctcctgtggtgacggcatatttccagaaacccctgctgctccaccaggggcacatggagtggctctttgatgctgaaggaaacagatacctggattttttttccgggattgttactgtcagtgttggccattgccaccccaaaggtgaaatgcagtggcacaaaagcagctcggccgcctgtggatcacaagcaccatcttcttccaccctccaatgcatgaatatgcagagaagcttgccgcacttcttcctgagcctcttaaggtcattttcttggtgaacagtggctcagaagccaatgagctggccatgctgatggccagggcgcactcaaacaacatagacatcatttctttcagaggagcctaccatggatgcagtccttacacacttggcttgacaaacgtagggacctacaagatggaactccctggtgggacaggttgccaaccaacaatgtgtccagatgtttttcgtggcccttggggaggaagccactgtcgagattctccagtgcaaacaatcaggaagtgcagctgtgcaccagactgctggccaagctaaaagattcagtatattgagcaattcaaagatacgctgaggcacatctgtggccaagtcaattgctggatttttcgcagaacctattcaaggtgtgaatggagttgtccagtacccaaaggggtttctaaaggaagcctttgagctggtgcgagcaaggggaggcgtgtgcattgcagatgaagttgcagacaggattttggaaaggtttgggctctcactttcctgggggcttccaaacccacgatgtcctgcctgacattgtcaccatggctaaaagggattgggaatggctttcccatggcagcagtcataaccactccagagattgccaaatctttggcgaaatgcctgcagcacttcaacacctttggagggaaccccatggcctgtgccattggatctgctgtgcttgaggtgattaaagaagaaaatctacaggaaaacagtcaagaagttgggacctacatgttactaaagtttgctaagctgcgggatgaatttgaaattgttggagacgtccgaggcaaaggtctcatgataggcatagaaatggtgcaggataagataagctgtcggcctcttccccgtgaagaagtaaatcagatccatgaggactgcaagcacatgggactcctcgttggcagaggcagcattttttctcagacatttcgcattgcgccctcaatgtgcatcactaaaccagaagttgattttgcagtagaagtatttcgttctgccttaacccaacacatggaaagaagagctaagtaacattgtcagaaataaataaaaccacaagtctcaagaatttgccacgtatgttcaagggtgaatttgaagaatttcagaaccactggtatccagagaaagcctgcagctctccacaggagctgtaaaagtcatggttgactgcctaccaaccatatttgttagcagagcccctcttatcttgagaactccattcttcagggaaaggatctccctagctcagagaataaatcctaattagtttatgttaggtatggtaatttgattcccctttgcagtgattggtttatgcatgaatatgtgatgtatttttgtccagtgaatcttgaagaaaaatcttttggtggaggtgccttcagggaaagttttcttcaccctcactcttcagttcaagaagagatgtcttcttgttgcgctgagaacaccatatgttcatgacgagattcctggcaccatgtcagccggcttgtagtcatgaggacaaccctttttggtgaggttggaagatggatggaagccaagtgcttagtgatgtcaaagaagcactcacttaagcattcctggagccaccctacctcagggcctcttgatatttgaggtaataaattcattgttctgtaa

SEQ ID NO: 49857 - DNA, 712 bp, Homo sapiens
tttttttttttaagtgttacaaattttattaaaaattaacatttcaagaggtcatacgtatacaaatcaaactgcaaaaaattccaggcataaaaactattatctgggttagtgtgccatctttcttctccaaatgtcaaaatgtccacaaaaaaagtctttagaaagtcaaatccactgtccatttgtgttgggtaagaaacctatgtcttcattcactgcatggaatccatgttaaaagaaccctgtcttggttgtatattatcacaggactcttgtattaatccatttttcctcaattccccatagtagactgccatcttgatttctcagtggtagggtccatttgaaactcttcaagctgactgggtgtaaatgtttccaccaatgtctacttcattgtatggggcctttagaggattcagtttgaggttcatatttttgctatataaaatactgactttcccaaagatttcctttatcctctaggataaaactccaacgtctcagtcttcaaaatggcatacctcaaataaaagaactcattatttgttcagaaccaacagcaaccaaattaattttaatctcttaagtcaccttcgcatgtatcactgcagccgtttcaaaatcggctttgaaagagttaaaagccaacacccaataggagggaaaaaaacaagttttatttttgttgaaacgtagtcagggttcc

SEQ ID NO: 49858 - DNA, 6406 bp, Homo sapiens
gaacaaaggcaatgaccccaatgtctcactagtgccaaaagacggaacaggatgggcaagcaaacaggagcagtccgaccccaagagttccgatgcctcaaccgctcagccgctggaatcgcagccactgccggcttcacagacgcctgcctccaaccagccgaaacgacccccagcagcccccgagaacactcctttggttccaagcggggtaaagtcctgggcacaagcagcgtcacccatggagcacatggagatggtggaagggcatcaagcctactgtcacgattctctcgagaggaatttccgaccctgcaggcggctggcgaccaggacaaggctgccaaggaaagggagtctgccgaacagtcgtctgggcccggaccaagcctccgcccccaaaattctacaacttggagggacggaggtgggcgtggccctgatgagctggagggcccggactccaaacttcatcatggtcatgatccccggggtgggctacagccttcaggcccaccccagttccctccctaccgcggaatgatgccgcctttcatgtatcccccatatctcccgttccctccgccctatggaccccaggggccttaccgataccccactcctgatgggcccagccgttttccccgtgtggcgggcccccgaggctcagggccaccaatgcgcttagtagagcctgtgggtcgtccctctattctcaaagaggataatctcaaagagtttgatcagttggatcaggagaatgatgatggttgggcaggggcccatgaagaggttgactacactgaaaagctcaagttcagcgatgaggaagatgggcgagactctgatgaggagggagctgagggccacagggattcccaatcagcttctggtgaggaacggccccctgaagcagatggcaaaaagggcaactcccccaacagcgaaccgcccactcctaagacggcctgggcagaaacctctcggcctccagagacagagccgggacctcctgccccaaagcctcccctaccccctggggactacccagatcgtgggggtcctccctgcaagcccccagcacctgaagatgaggatgaggcatggcggcagcgacgaaagcagtcgtcatctgagatttccctggcagtggagcgggcccggcgacggcgagaagaagaggagcggcgcatgcaagaagagcgccgggcagcctgtgctgagaagctcaagcgactcgatgaaaagtttggggcacctgacaagcggctcaaagcagagcctgctgccccacctgctgccccttctaccccagccccaccacctgcagtccctaaagaactccctgcacctccagctccacctccagcatcagccccaacaccagagacagaacctgaagagccagcacaggcccctcctgcccaatctactcctactccaggtgtggctgcggctcccactctggtgagtggtggtggcagtaccagtagcaccagcagtggcagcttcgaagccagcccagtggaaccacaactgccctcaaaagagggtcctgaaccaccagaagaggttcctcctcctaccacacccccagttccaaaggtggaacccaagggtgatgggattggtcccacccgccagccccctagtcagggcttgggctaccccaaatatcagaagtcgttgcctcctcgtttccagcggcagcagcaggagcagctcctgaagcagcagcagcagcaccagtggcagcagcatcaacagggctctgcccctcctaccccagtgcccccatcaccaccacagcctgtgaccctgggggctgtgccagctccacaggctccacccccgccccccaaggccctgtacccaggtgctctgggccggcccccacccatgcccccaatgaactttgatccccgatggatgatgattcctccttatgtggacccccggctcctccagggtcgtccccctctagagttctaccctcctggtgtgcatccctctggcctagttccccgagagcgttcagacagtctggggctcagctcagagccatttgaccgtcatgcacctgctatgttacgggaacggggcactccaccggtggatccaaagttggcctgggtaggagatgtcttcaccgccacacccgctgaaccccgcccacttacctcacctctgcgccaggctgcggatgaggatgacaaggggatgaggagcgagactcctccagtacctcccccaccaccctatctggccagttatccaggctttcctgagaatggagcccctgggcccccaatctctcgctttcctctggaggaaccagggccccgtccactcccctggcccccaggcagtgatgaagtggccaagatacaaactccaccacccaagaaggagccccctaaggaggagactgcacagctgacggggccagaagcaggccgaaagctgcccgcgagtcggagtggagcaggccccccaccaccacgcagagagagtcgcacagagacccgctggggccctcgtccagggagcagtcgtcgtggaatccctccagaggagccaggggccccaccccgccgggctgggcctataaagaaacctccaccacctacaaaagtagaagagctgcctcccaagcccctcgaacagggggatgaaacccccaaacccccaaagccagacccactcaagataaccaaggggaagctagggggccccaaggagaccccacccaatggaaatctttcccctgccccaaggcttcggagggactattcgtatgaaagagtgggtcctacctcttgccggggtcggggccgaggcgagtattttgccagagggaggggttttcgggggacctatgggggacgagggcggggaggccaagcgaattccgcagttaccgagagtttcgaggagatgatgggcgtggaggtgggacagggggaccaaaccaccctcctgctccccgaggccgccatgccagcgagacacggagcgagggttcagagtatgaggaaatccccaagcggcgccggcagcggggctcagaaacaggcagcgagacccatgagagtgatctggctccttcagacaaggaggctcccacacccaaggagggaacactcacccaggtcctctcgctcccccaccaccaggagccccacccttcaccgagcgccagcccgcttcacgtgcccgggggtcggcgagtcttcactcccagagggtgccatctcgccggggccgaggaggagggaggcccctcctcaagtttgcccaggctggagccctccagccaagtctctggctcccaagaaacctcccacaggccctttgccaccaagtaaggagcctttgaaagagaagttgatcccagggcctctgtcccctgtggcgcgcggaggcagcaatggaggtagcaatgtgggcatggaagatggggagcgaccccgaaggaggcgacatgggagggctcagcagcaggataaaccgcctcgtttccggaggctgaagcaggaacgggagaatgccgcaagggggtctgagggcaagccctccctaacccttccagcctccgctcctggacctgaggaggccctcacaacagtcacagtggccccagcacctccgcgggcagctgccaagtctcctgatctgtcaaaccagaactcagaccaagccaatgaggaatgggagactgcatcagagagcagtgacttcaccagtgagcgccgaggggacaaagaggcacccccaccagtactgctgacacccaaggctgtgggaactcctgggggaggtggaggtggagccgtaccaggtatttcagccatgtcccgcggagatctgagccagagagccaaggatttgagtaaacggagcttctcaagtcagcggccaggcatggaacggcagaatcggcgccctggcccagggggcaaggctggcagcagtggcagcagcagtggaggaggcggtgggggtcctggaggaaggaccgggccaggacgaggcgacaagaggagctggccctctcccaagaaccgaagtcgtcctccagaggagcgtcccccggggcttcccctgcctcccccacctcccagcagttctgctgtcttccgcctggaccaagttatccacagcaaccctgctggcatccaacaggctctggcccagcttagtagccgtcaagggagtgtaactgcaccagggggtcatccaaggcacaagcctgggcctccccaagcccctcagggcccctctcctaggcccccaacccgatacgagccccagagggtcaacagcggcctcagttctgacccccactttgaggagccggggccaatggtgagaggggtgggtgggactcctcgggactctgccggggttagtccctttccccctaaacgtcgggagcggcctcccagaaaaccagagctgctacaggaggaatctttgccacctcctcatagctctggattcttgggctctaagcctgagggcccaggccctcaggcagagtccagagatacaggcacagaggccctgacccctcacatctggaaccgtttacatactgccactagccgaaagagttaccggcccagctccatggagccttggatggagcccctgagtccttttgaggatgtggctggcacagaaatgagtcagtctgacagtggggtggacctgagtggggattctcaggtgtcatcaggtccctgcagccagcgaagttcccctgatggaggactcaagggggcagcagagggaccccccaagaggcctggaggctcctcacccctgaatgctgttccttgtgagggtccacctggctctgaacctcctaggagaccaccacctgccccccacgatggggacagaaaggagctgccccgggagcagcctctgccccctggccccattggcacagaacgatcacagcgtacagaccgaggcacagagcctggccccattcggccatcccatcgacctggtcccccagtccagtttggcactagtgacaaggactcagacttacgcctagtggtaggagacagcttgaaagcagagaaggagctaacagcatcagtcactgaggccattcctgtatcacgagactgggagctgcttcccagtgctgctgcctctgctgagccacaatccaagaacctggattctgggcactgtgtcccggagcccagctcctcaggccagcgcctgtatcctgaggttttctatggcagtgctgggccttccagttctcagatctctggggggagccatggactctcaattacatccaaacagtggaggcttccgccctgggacaccctcactgcacccttacagatcacagcccctatacctacccccgggcccagcccctccctcagcactgctctctggggtagctctcaagggccagtttctgggatttctccacaatgcaagctacagagctggggaagttgccggctggaggagttctctaccctccaccttccttcctctactctccggctttctgccccagtcctttgcctgacacatcgttgcttcaggtacgccaggatctgccatccccttcggatttttattctaattcctcttgcagcctggtggccaaagtggctttctcccttcaggggctcctgcccagcagatgcttctacccatgggtagactcacagctgcctgtgggtgaaactttggctccctgccgccagcaccacctcctgccccacctcccctttctctgttacctgtgggccctgctctgcagccccccagcctggctgtgcggcccccacctgctcctgctactcgggtgctgccttcacctgccaggcccttccccgctagcttggggcgagcagagctgcatccagtggaactaaagccgttccaggattatcaaaaactgagcagcaaccttgggggacctggatcatcacggactcccccaactggaaggtccttctctggcctcaattcccgtctcaaggccacgccttccacctacagtggagtcttccgcacccagcgcgtcgacctttaccagcaggcctccccaccagatgccctgcgctggatacctaagccttgggagcggacagggccgccacctcgagaagggccctcccgacgggcagaggagcctgggtcccgaggggacaaggagcctgggttgcccccaccccgctgagggagttcctcttgccccctacccccggggcttgtatatagattataaatatataagggggaaaggggtgggcggggaggggttgtggggctggggcctcacttcccctcctcccccttcccctggtcccctgtccctggggctgtttgttaaaaaagagtaataaaaggattt

SEQ ID NO: 49859 - DNA, 1891 bp, Homo sapiens
ttttttttttttccggtaaccctttggttttatttctttttattcttgatgggcaaaaagcctcctttaaaaaacattattcttaagaaacctgggagagaaaaaaatgccagtgagaggaagacaaagaaaaattagaggcagtacattccatatttcagaactttagctttccagacagtccaattttgttttgtttacaaattcatcttgcagtacaaggtgaagccaaatggtacaaagtccacagaattgaaaagccattcatatttatcattcaattttttgatcttcaaatgttatgaattctccaaaaaggtaacagggaacagatatccctttggtctcactttatagacagggaaattaccaaaagaaaaatcttggctctaccatctctacttacagaaggtaaaacacttaacagagacagatttctgttggagttagactagatttcttttcacagcccttaatctcacgaggtgagaaggagtggaagttgccaagttgttggctaccagacccatcagtctgtttaactctggctaaaagcagagaataatgggcaagttaccaagtttcccccttcagctctggcgtgcattctgaaattgtggaagatcctcatgtaacacacacgctgcaacctgcatttgccacacagtccagggcatatagagcattgtgattcttcacagtccgcagagacaagaccaaaaatgaggactaaaaactaaaggtagctgagtttttcagatggattttcactctggcaaactcagtagttcactccctcccacccctcaaatcatttaagtaaaatgttcttccaataaacataaattgagctcttcctctgttatccatcacattctgccagttctttaaaactggaatatggtactaggtacagaaggctaaaggggtaggaaagccccaaatactataaagatgcacttataagcagtgtggggttatcaccactgtctacttactctcccattctaggacacagggtgaagagaccacctgggttccctctaaagccctgaacattaggaccactgaggaggaaatatttgtccttaaaaataaatgtaggttccctggattgttctctttggctgccacatttggagcctgagtggaggcccttcaaattaacactggttctgtagggactgcccagtcagggtgcaatgggatcagacacaggatcaaactcacctaggggcaagaagggcactggttggcctacgggtagaatgcactgtattgttagttaactttctaaattgttctctatttagcttcagcctgagtcaggtcctacaatggccactatttagaaaataatttaaatcagtgaggtaagcacgccgatttgaaatatatccaaacatcattaagcctctgggtcataaaacttggtccctgaactaacaggagtatcttactcattaatgactaggtttgttccaaacggcccctgctgacacacatgatccttttgtgtggcacaataaatctggtaatagcagaacaatagcatggcttttaaatagggtaattttataattccttaagatgctggtttgcttcttataatgtgttgtgtggattacagtacttagacaaggttcacatttactttaaaagacttctatattttaatgcaaatctaaggatcatcccctttcttagtttatagaagattcaaactttgtaaaacataaataacctagtactctaaacatctgaagccctttgtaatactcactgttttttcctaatttgaaaataacttatttatatatcaaacattagagcggagtgtaaacatggatgtcaatcacccttttagtttcataaatttgcttttagcttt

SEQ ID NO: 49860 - DNA, 1462 bp, Homo sapiens
ggctcagttggctcagtaacggacactatgatgctgtatttgatcactcctatcctaacccagagtacgacaactggtgcaaacaaactcaagtgcaaaggaaacgcgacgaagaacttgccaaatctatggccatatccttgtctaaaatgtatattgaacaaaatgcatgctcttgaaatgtctcaaaaccttacaccctgggaataattgcatatataacttgtgtttggagaatcacatgaactttaatcagggtaatagcactttcaaacttgctagtagattttactgtaggtgtaatgccttaatcatctttttgaatgttttctcagagctggaggttgctgggcacctaaatgatgtttcatgatagctttgggtgattttactgctatttataatttgctgtataaagtgagcattacttaatttgcaagctgatttctcacagtgtaaatttgttcattcctggtagtctattttctataaaaatgtatttttgcacaacatttttaaaaactggtgtaccttcatctatgacgtgttccattttgacaaacagctttcaggcgtaaatccagagaagtgctttatatgaaatgtattattttgaacagagtttgtgatttggtagttattttatgttgttgaaatttgaatttcacaattcttagataattatttcaaatggatattgatgcattcttgttaccagatgtttggcccattccattttgatgaaacagagctgttgttttggaagtcattatttttctagaaatggcgaatcttttaaagaaaattacttaatggaaggttgtgggaaggtgtttttttgtgttttttttttggtttttgttttgtttttcctcttttaagggatagtagcaggtcttacttgaatgaaagtctgatatttgctgatggcagaatgattattctggtaccctggttgatgtgtagagtagattgtctggtgctctcagttgtttttatttacatttgtcacgttgttgtaagagaatgttaacatggtataaaactctgtgacaagataagcctcctgctttatataacttcttgaatccagctaagagatttataaactaatggcataaatgtctggagccaaccttggcagttatagcaggagaacactgtcttaatatttctttacattctttcaaaaggcaaaataggattgccctgtattgatgtagaaatgtctgtaaacagagcttgtatggtttgctgggtcaaacaatgtttccaacttaaaatcaatctcattgccactttaactacttttagtcatatttattaagtaatgcagtttgtactttttttattttgtaacattttgtgatttttttgtacaaaactgtatttgtacaatagagcaattcccagctgatggaatgaatgaataaaatgcaaaattatacttttaaaaaaaaaa

SEQ ID NO: 49861 - DNA, 1059 bp, Homo sapiens
  misc_feature (1)...(1059): n = a,t,c or g
tttttttgaattgttcagtgcatccaacactttacttactccacacctttctgcaaaatgctcataataaacctcctgtctacattgtgttccaatgaaaactttagtcatattttacatttattattaatataacatgctatgtaaatgtacaggagcctgacaaatgacaatctacttacataatttaaataacacaagtgcttgctgcagtctttattagtacacagctttgttatggcttcttagaaataattttaaaaagtgcatgattcttgtgggctactctgtttaggaaagattacagataacacatttctaagaatgaattagtcagctgtatatgggttcagattagaaaatattaaataaatacagggaaaaatatttttaattagcttaatttatatatgaagatattttatttaatttgtttttgagacagggtctttctctgtcaccccagactgggtgtgcaatggcacaaacacatctcattgcggcctggacctcctggcctcaggtactatgcctagctaatnnnnnnnnnnnnnnnnnnnnnnnnnnnnnnnnnnnnnnnnnnnnnnnnnnnnnnnnnnnnnnnnnnnnnnnnnnnnnnnnnnnnnnnnnnnnnnnnnnnnnnnnnnnnnnnnnnnnnnnnnnnnnnnnnnntcccattttacttaaatatcaaattcaaatcttcagtgttctacttattttgggtgttaattccattatacaccatcttatttcagtaatttccatattgtgccagacaagatataaaaataattcaactccagtcaataataccatctgtcttcatgtgaccaggatgaaaagcttctgctcccaacatggaagccacagtaagaaaagaatctgtctaatccactagcaacaagcagttaatactgtagttcggaataatactaggacattaacattctaattccagcaaacaaggactgactcttttcaaaattcaactttggttaagaaatgctgagtacaactttggttaagaaacactgaggtcatggataaagagtctca

SEQ ID NO: 49862 - DNA, 498 bp, Homo sapiens
  misc_feature (1)...(498): n = a,t,c or g
tttttgatggttgacagattcttttattaacagtcaaaaacttcacacaattggaaaataaatgtttcttcaatgaataatcaaacaaaaattatccaggaccttatagggttttcagtatgtaccaggcttgatgcacatcttagaagacaggacattatcttgctgggatcattagggtatgatcagcataacgatcgtggtttactttttgcaagccatgtatctttcagttacattctcccagttgattacattccaaatagcttttagataatcaggcctgacatttttatactgaaggtagtaagcgtgctcccacacatcaatccccagcagtggaataaggcctgttgttccttgcagtggatcctgatttggacaagcagcaatttgtaagtgtccccggttcccttattggaaaccaaggccaaccccaancctggagccttggacaccaacagatgcagccgtcagcttctccttaaacttggtcaa

SEQ ID NO: 49863 - DNA, 3463 bp, Homo sapiens
  misc_feature (1)...(3463): n = a,t,c or g
ggggcctgaatggtgtggacatctactcgctggtgactgaaaacattcagtggcccaatggcatcaccctagatctcctcagtggccgcctctactgggttgactccaaacttcactccatctcaagcatcgatgtcaatgggggcaaccggaagaccatcttggaggatgaaaagaggctggcccaccccttctccttggccgtctttgaggacaaagtattttggacagatatcatcaacgaagccattttcagtgccaaccgcctcacaggttccgatgtcaacttgttggctgaaaacctactgtccccagaggatatggttctcttccacaacctcacccagccaagaggagtgaactggtgtgagaggaccaccctgagcaatggcggctgccagtatctgtgcctccctgccccgcagatcaacccccactcgcccaagtttacctgcgcctgcccggacggcatgctgctggccagggacatgaggagctgcctcacagagggttgaggctgcagtggccacccaggagacatccaccgtcatgctaaaggtcagctccacagccgtaagacacagcacacaaccacccggcctgttcccgacacctcccggctgcctggggccacccctgggctcaccacggtggagatagtgacaatgtctcaccaagctctgggcgacgttgctggcagaggaaatgagaagaagcccagtagcgtgagggctctgtccattgtcctccccatcgtgctcctcgtcttcctttgcctgggggtcttccttctatggaagaactggcggcttaagaacatcaacagcatcaactttgacaaccccgtctatcagaagaccacagaggatgaggtccacatttgccacaaccaggacggctacagctacccctcgagacagatggtcagtctggaggatgacgtggcgtgaacatctgcctggagtcccgcccctgcccagaacccttcctgagacctcgccggccttgttttattcaaagacagagaagaccaaagcattgcctgccagagctttgttttatatatttattcatctgggaggcagaacaggcttcggacagtgcccatgcaatggcttgggttgggattttggtttcttcctttcctcgtgaaggataagagaaacaggcccggggggaccaggatgacacctccatttctctccaggaagttttgagtttctctccaccgtgacacaatcctcaaacatggaagatgaaagggcaggggatgtcaggcccagagaagcaagtggctttcaacacacaacagcagatggcaccaacgggaccccctgggccctgcctcatccaccaatctctaagccaaacccctaaactcaggagtcaacgtgtttacctcttctatgcaagccttgctagacagccaggttagcctttgccctgtcacccccgaatcatgacccacccagtgtctttcgaggtgggtttgtaccttccttaagccaggaaagggattcatggcgtcggaaatgatctggctgaatccgtggtggcaccgagaccaaactcattcaccaaatgatgccacttcccagaggcagagcctgagtcaccggtcacccttaatatttattaagtgcctgagacacccggttaccttggccgtgaggacacgtggcctgcacccaggtgtggctgtcaggacaccagcctggtgcccatcctcccgacccctacccacttccattcccgtggtctccttgcactttctcagttcagagttgtacactgtgtacatttggcatttgtgttattattttgcactgttttctgtcgtgtgtgttgggatgggatcccaggccagggaaagcccgtgtcaatgaatgccggggacagagaggggcaggttgaccgggacttcaaagccgtgatcgtgaatatcgagaactgccattgtcgtctttatgtccgcccacctagtgcttccacttctatgcaaatgcctccaagccattcacttccccaatcttgtcgttgatgggtatgtgtttaaaacatgcacggtgnnnnnnnnnnnnnnnnnnnnnnnnnnnnnnnnnnnnnnnnnnnnnnnnnnnnnnnnnnnnnnnnnnnnnnnnnnnnnnnnnnnnnnnnnnnnnnnnnnnnnnnnnnnnnnnnnnnnnnnnnnnnnnnnnnnnnnnnnnnnnnnnnnnnnnnnnnnnnnnnnnnnnnnnnnnnnnnnnnnnnnnnnnnnnnnnnnnnnnnnnnnnnnnnnnnnnnnnnnnnnnnnnnnnnnnnnnnnnnnnnnnnnnnnnnnnnnnnnnnnnnnnnnnnnnnnnnnnnnnnnnnnnnnnnnnnnnnnnnnnnnnnnnnnnnnnnnnntgcatggtgcatcagcagcccatggcctctggccaggcannnnnnnnnnnnnnnnnnnnnnnnnnnnnnnnnnnnnnnnnnnnnnnnnnnnnnnnnnnnnnnnnnnnnnnnnnnnnnnnnnnnnnnnnnnnnnnnnnnnnnnnnnnnnnnnnnnnnngaatttggccagacacannnnnnnnnnnnnnnnnnnnnnnnnnnnnnnnnnnnnnnnnnnnnnnnnnnnnnnnnnnnnnnnnnnnnnnnnnnnnnnnnnnnnnnnnnnnnnnnnnnnnnnnnnnnnnnnnnnnnnnnnnnnnnnnnnnnnnnnnnnnnnnnnnnnnnnnnnnnnnnnnnnnnnnnnnnnnnnnnnnnnnnnnnnnnnnnnnnnnnnnnnnnnnnnnnnnnnnnnnnnnnnnnnnnnnnnnnnnnnnnnnnnnnnnnnnnnnnnnnnnnnnnnnnnnnnnnnnnnnnnnnnnactataaaaaaataaataaatcctccagtctggatcgtttgacgggacttcaggttctttctgaaatcgccgtgttactgttgcactgatgtccggagagacagtgacagcctccgtcagactcccgcgtgaagatgtcacaagggattggcaattgtccccagggacaaaacactgtgtcccccccagtgcagggaaccgtgataagcctttctggtttcggagcacgtaaatgcgtccctgtacagatagtggggattttttgttatgtttgcactttgtatattggttgaaactgttatcacttatatatatatatacacacatatatataaaatctatttatttttgcaaaccctggttgctgtatttgttcagtgactattctcggggccctgtgtagggggttattgcctctgaaatgcctcttctttatgtacaaagattatttgcacgaactggactgtgtgcaacgctttttgggagaatgatgtccccgttgtatgtatgagtggcttctgggagatgggtgtcactttttaaaccactgtatagaaggtttttgtagcctgaatgtcttactgtgatcaattaaatttcttaaatgaaccaatttgtct

SEQ ID NO: 49864 - DNA, 1766 bp, Homo sapiens
tcatgaaagccactgactttattgatctaaaaaactttacaaggacagtgactgttctgccaaaaaaggagccaaatggtatcaaacggattgaaagtgagggtgggggtgagggatggggccgggaatccattcaggaaagctggtaactgtcaccagggaactggcaagggaaaaaggacgggggaggcatgcaagagcgagaatccaaaaaaaagttgaaatggttaggggagaaaactccccaaaagaccccggagtacgtcggaggtgagtacgacaatagcaatcttttccttccgtagaggacaggggaggagtccctactcggctgcaaactctggatgagggctggggattgagagcttcccagagagcatcacaagaaggcgtcgcaccactctcgaaggcatccgaagcagtcccgggactgcttggcgttggccgccaaaaagtgtctttcagccattcccggaagaggtcttcatctttctttagcaccagaaactggccaaggacaacataggccttgtcaaaacccctttcctccagcttcttgcccaggacttcaccaatcccagccaggctccccactggcttctcccccatgggctctgccacgaagtctcggtgcttttgggaggttgtcatcttgatcaggcttaatctcaagccactagaactttcttccacttccgcttccgggtcgcttcaagagccgcctttaaaaaagaaacattccacgttgggcacttctagccagttagagctatagagttgaggcgccccggacctcgacggcgtccttagtaggcgctcctttccggtccttcgcgggaagcgctgccttctaaggtctcgcttctcgcgccgttctgagggagataggcctccagggagaggacttcctttctctgctgcccggacccggaactcaaggacttaggcttgacggacctggcgtggggaagagttagaagacggacaagggaggggacgggaggcctccgagacagcgccggaagtacggttttcggagggatcagactcagactcacgtcgcactcctcgcagttggactggtgggaactgggaacactggagacctgatttctaactgacgctaccgtcgcggccgccgaacagtcctgggttctgagcctgccatccaaggaactcaggaggaggagttgacagtctcttcgttcctaaccagtgtgggacgacttcagcatgtctcaggccaccaagaggaagcatgtggtgaaggaggtgctaggggagcacatagtgccctccgaccagcagcagattgtcagggtactcaggaccccagggaacaatctgcatgaggtggagacagcccaagggcagcgcttcctggtgagcatgccctccaaataccgcaagaacatctggatcaagagaggggactttctcattgttgaccccattgaagagggagaaaaggtgaaggctgaaatctcgtttgtgctctgcaaggaccacgtgcgctctctgcagaaggaggggttttggcctgaggccttctctgaagtggctgagaaacacaacaacaggaacagacaaactcaaccagaactcccagctgagccacagttatcaggagaggagtccagctcagaagatgattctgacctgtttgttaacacaaaccgcagacagtatcatgagagtgaggaggagagtgaagaggaggaggcagcctgagactccaggacccaattctccacttgctcagggac

SEQ ID NO: 49865 - DNA, 3998 bp, Homo sapiens
  misc_feature (1)...(3998): n = a,t,c or g
agtctccgccgccgccgtgaacatggagcccccggacgcaccggcccaggcgcgcggggccccgcggctgctgttgctcgcagtcctgctggcggcgcacccagatgcccaggcggaggtgcgcttgtctgtacccccgctggtggaggtgatgcgaggaaagtctgtcattctggactgcacccctacgggaacccacgaccattatatgctggaatggttccttaccgaccgctcgggagctcgcccccgcctagcctcggctgagatgcagggctctgagctccaggtcacaatgcacgacacccggggccgcagtcccccataccagctggactcccaggggcgcctggtgctggctgaggcccaggtgggcgacgagcgagactacgtgtgcgtggtgagggcaggggcggcaggcactgctgaggccactgcgcggctcaacgtgtttgcaaagccagaggccactgaggtctcccccaacaaagggacactgtctgtgatggaggactctgcccaggagatcgccacctgcaacagccggaacgggaacccggcccccaagatcacgtggtatcgcaacgggcagcgcctggaggtgcccgtagagatgaacccagagggctacatgaccagccgcacggtccgggaggcctcgggcctgctctccctcaccagcaccctctacctgcggctccgcaaggatgaccgagacgccagcttccactgcgccgcccactacagcctgcccgagggccgccacggccgcctggacagccccaccttccacctcaccctgcactatcccacggagcacgtgcagttctgggtgggcagcccgtccaccccagcaggctgggtacgcgagggtgacactgtccagctgctctgccggggggacggcagccccagcccggagtatacgcttttccgccttcaggatgagcaggaggaagtgctgaatgtgaatctcgaggggaacttgaccctggagggagtgacccggggccagagcgggacctatggctgcagagtggaggattacgacgcggcagatgacgtgcagctctccaagacgctggagctgcgcgtggcctatctggaccccctggagctcagcgaggggaaggtgctttccttacctctaaacagcagtgcagtcgtgaactgctccgtgcacggcctgcccacccctgccctacgctggaccaaggactccactcccctgggcgatggccccatggctgtcgctcagttctatcaccttcgattccaatgggcacctacgtatgtgaggcctccctttcccacagtcccggtcctcagccgcacccagaacttcacgctgctggtccaaggctcgccagagctaaagacagcggaaatagagcccaaggcagatggcagctggagggaaggagacgaagtcacactcatctgctctgcccgcggccatccagaccccaaactcagctggagccaattggggggcagccccgcagagccaatccccggacggcagggttgggtgagcagctctctgaccctgaaagtgaccagcgccctgagccgcgatggcatctcctgtgaagcctccaacccccacgggaacaagcgccatgtcttccacttcggcgccgtgagcccccagacctcccaggctggagtggccgtcatggccgtggccgtcagcgtgggcctcctgctcctcgtcgttgctgtcttctactgcgtgagacgcaaagggggcccctgctgccgccagcggcgggatgagagggggctccgccgccaaaggggagccagggctgagccactcggggtcggagcaaccagagcagaccggccttctcatgggaggtgcctccggagaccaggggtggcagcgggggcttcggagacgagtgctgagccaagaacctcctagaggctgtccctggacctggagctgcaggcatcagagaaccagccctgctcacgccatgcccgcccccgccttccctcttccctcttccctctccctgcccagccctcccttccttcctctgccggcaaggcagggacccacagtggctgcctgcctccgggagggaaggagagggagggtgggtgggtgggagggggccttcctccagggaatgtgactctcccaggccccagaatagctcctggacccaagcccaaggcccagcctgggacaaggctccgagggtcggctggccggagctatttttacctcccgcctcccctgctggtccccccacctgacgtcttgctgcagagtctgacactctttccgcttccctttttcttatncnctagcccagagcttttaaaatgaggtctggcatatacttgattacaaatgaaaactcagaaaccaattttatttattaaatcatatcttttgtttttccccctcccttctaatcccccaaaggacctatttgagctgttccccaattcatctgcttattttggaccatgaatctgccagagtgatattttctgttatttctcctccaaatttttccctgatgtttccaataaagatttacttgggtggccccttaaggtgacatcaggatgctcttatgtccttccagaataagcatacacttcactcctctccctttcatctccctctgcattcttaattccttgcttttctcacttggagccgagggtgctttagagaggtggttttccatgaatcagccaagattcctgtagaagttgggtataccaaccaccaccaccaccgccccctattccagtttcaaagctcctcggctatgctaatgtcccctcagagatgaggtttgacttttaggcccgtatgactcctccatagcctggccaaggagaccatgagtagccatgtctggtttactctttatcctgagactgtttgtttatagcttaaaacagaagtgtgtcttcccagcacaaacctaatcaatcagtgtatcagtgcatctggtggcaacagctcagcccattcaaagagcaaggattcaggaaaggcacactgatggtggggagcctcttaagagcctctaatgttctcccaaaaccagagttgagagtcggagtgccagtcgtcgggggcccactattcctgaataagggacatgcaagggcccagaagtagcttgactctcgcctaaatatctgtgcctttgcctgtcctttctcccactctactgaaacccggaacagattcccgcttgccttctgatgaagagaggttaggtaaagagagtttggaggaaaaaagacaccaggaggcaggctgcggggtaggagagggttctgagaggaggcagcaatccagaatacctccttttctagccagcatcccttgaacttttgaaaggttgtgcctaccactgggctgggcacaccaggggcaatgatttccctggcagaagggaagggaaagaatgttttcacccttggcatccttcttgggagaagctacagcctgttgcttcagtttgagttggtttcacattcagactttggctttatggttttccttcctccttgtctttgccctgaccttgatcaacaggggtgaaaagaaccaccctgaggtttccatgcctctcccattttagtggtagcattttgtgtctttactccacccttcaccctagttccaccaaggttcacacaccagatgtaactgtttttcagctgagttgtatggattaacttcagtccactgtaaatacacctgggatggggtggggttggggttgtttagggagaagcagccagacttgctttgtgaactgaatgtatttttatgcaattttgagtggcctttcaaccctaagatgaatggttttgttttactggttgttgttatatagttttgagtattctgtgtttgaaagtttgggaataataatattcacttctatatgatgcctgtaaacacaacagtatttataaatgagtaaataaaactgtgttttaactttgaa

SEQ ID NO: 49866 - DNA, 1233 bp, Homo sapiens
  misc_feature (1)...(1233): n = a,t,c or g
agggctttttaggcacttatttaatcctcattaacaaattcataaggtaggtgctattgatagtttagccataaccagatatggcttgttatttgtaagttatcatgaaaaggtttatattcactattctttatttcagtgtagcacttttagagccaaaaaaactcaggcacaaagaagttaaataacttgccggnnnnnnnnnnnnnnnnnnnnnnnnnnnnnnnnnnnnnnnnnnnnnnnnnnnnnnnnnnnnnnnnnnnnnnnnnnnnnnnnnnnnnnnnnnnnnnnnnnnnnnnnnnnnnnnnnnnnnnnnnnnnnnnnnnnnnnnnnnaggggtggtggtatgcacctgcagtcccagcaacatgggaggctgaacaggagaatcgcttgaacccgcgacagggagtnnnnnnnnnnnnnnnnnnnnnnnnnnnnnnnnnnnnnnnnnnnnnnnnnnnnnnnnnnnnnnnnnnnnnnnnnnnnnnnnnnnnnnnnnnnnnnnnnagaagttaaataacttgtttaagatcacacagctagtgcagttaccccctctcagtaattatgtttggcaaatatgaaatacaaggatctggcaaggttaggaagaggttaagaatatcagtgacagtactctgaggcatctgggcatgtcagatgaagatttattattcagaaaagttaagtcagctgttgcagggatcagttgttttattcctggaaaatgtttttcattttgctgcaaatctatatctgacctgctgaggaaatcgtttggtgaaatgaatccagaaagcagagaaaatgcttcattactttaaatagcagcattaagcccattatagcctctgaattgtcccttccttgagtttgctaatgcttccaacttagtcatttgaagcccaagagtctaattttatatgccctgccaatgtcctcatctattgcagaatgtataattatctatttgttttggactatatgttacaaaaatttaaaacataagatcctctctctatatttcattattggtgaacccacattgtgctgtgttttgtgatattttatcattttctagattcttatgtggatctaataacgaccacttgaacccagtttcacagaatccttatttttctgttcaaattaggaattagggacatgggatggaaattgggaaatccttccattcctcagtaaactatcgcaaggacaaaaaaccaaaca

SEQ ID NO: 49867 - DNA, 720 bp, Homo sapiens
ggcacgagaaagaattattaggaaagatcctctttaaagaggaatggtaagaaacaataaaacttaggtgatatttaaggaaacaagtctgattaaaagaaattttggagtatcctggcttatacacaagaccataaagcaagacatttgaagaggatactaaagttgtggattatttcctaagctctgactccctgtgattaccctcactatgtataaagaaaagaagtttggcattacagagcttacttataaaaaggaacccaaactcgggcatttcatagcagcatgattctgagcacacgtgggtaagacctttcttctctggttagatatcatatgctggtgtataattagcttaaatgattgtgatttagacacctaggaaataatcaataggggcaattgctttccataatactttatcttcttgtgctttatttctgaagcagagtagaatgctaaagatgtatcctagtgacagcataaaccctagaggtgacagtctgtattattgcttttcgcttctcttttctgcttctgttgggagccagttttcttcttacgccgcattacagagagaacgtcaaatttagcagccatatctgccatagggtccaaataaagagacaataaaaacattattctctcttttttggatggaatactgcgtgaaatggttatccatacaaagatactttatgtagaatagaaaaagga

SEQ ID NO: 49868 - DNA, 1147 bp, Homo sapiens
tttttttttttttttttttaagatttaatgctttattgctcttgatggcaaatcaaaatatgctttagaaataaagttaatttactggaaaataggagtttttgcaccaaaccataaaattgcatttcattacatcaagagaaccccctcattgtctacaatcatgcccgcttcctttcccctcagcgcccgggacacgtgaccgagatcataccctaaattcctgatccttttgcagttgccacatactgtggcttttagtacatcataaaaaagtgctttcctgtggcctcagctgggaggccctggcgctggggctaaggggcccaaggcaccatccaaaggctgggaggaaagaaccccaaaccccaggccctcctcctgccctccagcctttgacaggcaactcatttggcatgatctgttttggtgtgtttaaaacatacatttgcatgtgtctagtgtaaagcaacaagtttgaggaaataagtggaaggagagaggaagttccagttagatggttccactagtgtctactggtaattggcaaaactatgagtgttgctaacctgggctgagggcacactctgcctgtgcaggcagctgacccaggcttggagaatgagaaagggttcccaaggacaggatgccagcgggattctttgttgcaaactgcacacagtgcaatttttgggaagcagggatggggagtgggcatgagaccgggttgttgggaccactctggggtcaggccctgggtgaggcacaggaggctgcacacaggcacttggtgggttctgccgggtcagggtgggaaggcaggagtagtgtctgtggcaggacgggaagaagcttcagtacatccctctcttgcacctctgcccactccacctgaggcgtgggctccctccccctcatcctctcaccacatgcctgaggcgtaggctcccctcatcctctcaccgcatggggcatttgctcccagcctctacttccctcaagggctttttagcagctgggggtcaatggggaaagtggtctcagaagggcccttaaacattattgtcttaaaagaaaaaaattggtaatttgtaaatggtccctggaacaagtttaatgggtgaagccaaaggggtggtaaaggttg

SEQ ID NO: 49869 - DNA, 1335 bp, Homo sapiens
ctggcgtcccctttccggccggtccccatggaggcgctggggaagctgaagcagttcgatgcctaccccaagactttggaggacttccgggtcaagacctgcgggggcgccaccgtgaccattgtcagtggccttctcatgctgctactgttcctgtccgagctgcagtattacctcaccacggaggtgcatcctgagctctacgtggacaagtcgcggggagataaactgaagatcaacatcgatgtactttttccgcacatgccttgtgcctatctgagtattgatgccatggatgtggccggagaacagcagctggatgtggaacacaaacctgttcaagcaacgactagataaagatggcatccccgtgagctcagaggctgagcgggcatgagcttgggaaagtcgaggtgacggtgtttgaccctgactccctggaccctgatcgctgtgagagctgctatggtgctgaggcagaagatatcaagtgctgttaacacctgtgaagatgtgcgggaggcatatcgccgtagaggctgggccttcaagaacccagatactattgagcagtgccggcgagagggcttcagccagaagatgcaggagcagaagaatgaaggctgccaggtgtatggcttcttggaagtcaataaggtggccggaaacttccactttgcccctggggaagagcttccagcagttcccatgtgcacgtccatgacttgcagagctttggccttgacaacatcaacatgacccactacatccagcacctgtcatttggggaggactatccaggcattgtgaaccccctggaccacaccaatgtcactgcgccccaagcctccatgatgttccagtactttgtgaaggtggtgcccactgtgtacatgaaggtggacggagaggtactgaggacaaatcagttctctgtgaccagacatgagaaggttgccaatgggctgttgggcgaccaaggccttcccggagtcttcgtcctctatgagctctcgcccatgatggtgaagctgacggagaagcacaggtccttcacccacttcctgacaggtgtgtgcgccatcattgggggcatgttcacagtggctggactcatcgattcgctcatctaccactcagcacgagccatccagaagaaaattgatctagggaagacaacgtagtcaccctcggtgcttcctctgtctcctctttctccctggcctgtggttgtcccccagcctctgccaccctccacctcctcggtcagccccagccccaggttgataaatctattgattgattgtgatagtaaaaaaaaaaaaaaaaaaacaa

SEQ ID NO: 49870 - DNA, 1096 bp, Homo sapiens
  misc_feature (1)...(1096): n = a,t,c or g
tttttttttttttttaaaccattactgtgactttattataatagttaacaatattttagtggtatacaatcatatcacaattactcaagctatatacaaacaggtatttatataagtctacatttaaaaaagaaaaagcaattaaatgacctccccaaaatcacattatcatcaacaagatttttttctaaaagttacggccaatccaataacaaaaaaattcacagttattctgcagacattttaaagatgcaggaattgtattgcacattatataattataaaccataacaagcagttatatattttaatctagtttttcacaaaatttacattatcatgcaatacttcactgtacacagaatgatggaactgaacaggttaacttacaaacttttaattatagccacaaatttagaattattttaaaggttatatttccaaattattatactaaaaaacactccagtgtaataanaccggccccatccctaatttgggtcccagatcaaattacttttttaagtgttccttccttggcctttggcccttcttttccttttcatcctgtagtgcagtaccgagctttttgataagaactgacagaaccttgtccagtggatccatgactcctctttgaagccatttaggaatagtagtcctagcatgatgaaagcccaatttttgaagaatataatcaacacctactggatcaatctttcttccagtccaagaaattaatctaagagtaggttctagatgccatgtattgcacataaaatctctccagtccacagtagtataagtgatgctatcttctctatctttatcagaggaattgtcgtcatgtataataattggacttttttgtcctggtcgagtagataaaatccgaggtggaaagatggctttttctttttctttaagataagctgatactaaatcatgaagaaacatgatgagctcagcatccatagtcacacaaatgtggtcagtgaactctgtcaccacactacattctacttttggcttcaggctggcatcctgtaatgaaggctcctgtggttcttgaacatgaatggatttaaagtcaagc

SEQ ID NO: 49871 - DNA, 2267 bp, Homo sapiens
cgggaaagtctgagcactctgctgctttacaaggagttgacattttgctgtttgtcaaccatggtttaccataattgcgtgttaagggacgtgttttatttcatagctttctgcaagcaaaattgctctgatacaaaatgagttcaatgatacaggtgctactgtccactcaagcaaaagaaaacctcacatgtatatgaacgcactttatacttatattcttacagtataataggtctaatatccagaacatgattatttcagatgagaaatcaaaataaacccatttttaagtatcttttggtcactccaaattgatattgctcataaaaaaatacactagttttccctggggaaaaaaaattaattccatagcaatgcagttaagggacgtgttttatttcatagctttctgcaagcaaaattgctctgatacaaaatgagttcaatgatacaggtgctactgtcccactcaagcaaaagaaaacctcacatgtatatgaacgcactttatacttatattcttacagtataataggtctaatatccaggatgcctctggcctcattgaaagcaatggcagagaaatgctgcaaggtacttgaatatcatagtactggcaagtgcttgaagtaacttcctgtgagttctctgtcagatactgcaaagactgcgtgtgggtgtgtttgtctttttgtcttccatcttttggtttacatttaaatcatctcaaaaaatatcccctgcatgtatcattcagcttctcagagtttcccataaaaacaggaaaatgtcatgaggtatccctaacgtcagggattgatgtagtgctgtggctgtcagagaggatgtagacttacctgtaggtacagtaactgagtttagtgtgtgcccggcacgttacagtgcagaaatgttagttcatgttaaacttttcctcctcacatatgatgtgactttaaccccagaatatctgacaaaaaaaattatacagataaaataaaaagacaaatacacaaataaggccatctgcagaattttaaactcgcctcttgcaatatttcacaagaatttctacaccatattttacatcgttcaaacttaaataataaatgctcaaggaagggccttggtagaaccaattgcactatctctttgaggacttgtccaatttgctggcaggtgatttcctctggggcgtggggatttttgaaggcttcgctgtggatggccgagaacctgctcggggtgtaggtctgtgtgtctgggggacagtttccacatctgagcacacggactggatttctgaaatgtcaaagtctgatgcatcactgcctcggcggctgctggccctgctgccagctttgcttccagctcgacttcctggtcggctgggagtcttcttggaatcagcaaactgtgttcggactctggcagctgcagttgttatcaagccactgtcctccccagagtggaagcctttccctgataaatatcctggaagtcgaagcttgcttccttgtattggcgttccctctgcagatggcacgggaaagtctgagcactctgctgctttacaaggagttgacattttgctgtttgtcaaccatggtttaccataattgcgtgttaaaggatggagaatcttgggtgtggtggtggcagggacctgtggggaggccgcctgcgcagcctgactggacacagaagtggatctgttgggtgaagcgcctcgtgatgatggccgggatcttcggcctcggggtcggaaagcagccataccctggctggcaccatctgctaaaatgaacttctcacgcagttccatgtttgtccttcctttggccctgcaaggatcatttttcactaagaactcatcaagtgccatccatccacctccaacacgaaccatcacagtactccgcaggatccggaccagtcggcagttgctgggaggtctccaaactgatttcccaggaagaacctgtatttattatcaccaatctgctcaacttgaaatcgctttgcacatttacacttagctacctgccttgtcacctcatcttcgattttgtcggcatctgtgataggtttatatgcatctttatttgggtgaagggctgctacaaattcatagtagtcaatatatccatcgccatctctgtcaaagatgtctgcaactgcgctcatctccaagcgactggttggaaactttgaggaaagaattccatcaataaattcctgccgcgttattttcccatcctggt

SEQ ID NO: 49872 - DNA, 1334 bp, Homo sapiens
ggaagtagggccttcgcgcacctcatggaatcccttctgcagcacctggatcgcttttccgagcttctggcggtctcaagcactacctacgtcagcacctgggaccccgccaccgtgcgccgggccttgcagtgggcgcgctacctgcgccacatccatcggcgctttggtcggcatggccccattcgcacggctctggagcggcggctgcacaaccagtggaggcaagagggcggctttgggcggggtccagttccgggattagcgaacttccaggccctcggtcactgtgacgtcctgctctctctgcgcctgctggagaaccgggccctcggggatgcagctcgttaccacctgggttgcagcaatttttttcccgggcccgggcgttccgggacgccgatgaggagacactccaagagagcctggcccgccttgcccgccggcggtctgcggtgcacatgctgcgcttcaatggctatagagagaacccaaatctccaggaggactctctgatgaagacccaggcggagctgctgctggagcgtctgcaggaggtggggaaggccgaagcggagcgtcccgcaggtttctcagcagcctgtgggaagcgcttgcctcagaacaacttcctgaaggtgatagcggtggcgctgttgcagccgccttttgtctcgtcggccccaagaagagttggaacccggcatccacaaatcacctggagaggggagccaagtgctagtccactggcttctggggaattcggaagtctttgctgccttttgtcgcgccctcccagccgggcttttgactttagtgactagccgccacccagcgctgtctcctgtctatctgggtctgctaacagactggggtcaacgtttgcactatgaccttcagaaaggcatttgggttggaactgagtcccaagatgtgcccccgggaggagttgccacaataggtttcaaagcctctgtcaggccccctcccaccctctgaaagataaagttcctaactgccccggagacctgtaaagccgcaggatggagattttgaagtcccctggtcttagcatctggacagacctcttattagccccccgtagtggtgcatttaggaaaagacaagttttgggtctcagcgcaggcctcagttctgtataggcaatgctgtgttattacttgaatatagaatatatagtttacaaaatgaaaattacaatgttctcaccaaatatatgccttcgtgtgtccaaagtataattattttagatgctaattttgaatagtttattaaacagttataaatatgcaaaaaaaaaaaaaaaaaaaaaa

SEQ ID NO: 49873 - DNA, 676 bp, Homo sapiens
tacaatcaggaatgtttactaaaatgtacaacttattgggtacagattgtatattcatggcattcattctgtagatggtcttgtgtagcaaatctagattagaataagaaaacctatttttatattatgtatatttaatggtgtctaacttcattatggttttattttttggaataagaggtagtcgatagagacagctggcaagatggccgaataggaagagctctggtctgcagctcccagcgagatcaacgcagaaggagataatttctgcatttccaactaaagtacccagctcatctcattgggactggttagacagtgggtgggtgcagcccacggagggtaagctgaagcagggtggggcatcacctcacctgggaagtccaaagggcgagggaacttcctcacctacccaagggaagccatgagggactgtgctatccagcccagaaattatgcttttcccatagtttttgcaacccgcagaccaggagattcccttgtgtgccaatgctaccagggccctgggtttcaagtgcaaaactaggtggctgtttgggcagacactgagctagctgcatgagttttttcataccccagtgacacctggaacgccaatctggaaaagggggctgaagcaggggagcaaagtggtctagctcagtggattcca

SEQ ID NO: 49874 - DNA, 1119 bp, Homo sapiens
  misc_feature (1)...(1119): n = a,t,c or g
gtcaacaatcccaagaagcaggaatgaaagtggcgctttctccgccccagggttccaggacatagtctgaggcaagatggagggtatgaggggccttcacacttcacttcatcccttctacccatcacaacatgctgggcgtgtcgctcttcttgcttgtcgttctctatcactacgtggccgtcaacaatcccaagaagcaggaatgaaagtggcgctttctccgccccagggttccaggacatagtctgaggcaagatggagggtatgaggggccttcacacttcacttcatcccttctacccatcacaacatacaaagcaactacacctggatttttccaaacaacttttatttcctcagagtcttccttaatcctatggaacaagaagctgccactgaatagggcccagtataggggcttgcttttctactccctccccccaatataaaaatatagacttttttttgtggtcccaaaatcttgtgctgcggagggagggaaggggtggcaggtccctgttttgttctgtctcaaggtgatactctgtaatgccttggacagcgtggctggcattccaaggacttaacggctgtcacatggaatcagcggcctggaggggaactagcatatttcccactgttaccccatcttggggctatatcctgggattgaacataaaggcattatcagacccggggagaaacagtcagtgggggagatttagggacaaaacaaacctcaggttggcccaagggacccctgctgtaacaattccaggatggggagtcagatagactacaggatataggagaaaaggcaggggcagagcggggccgtgggggcctggcctgaggcagccctggtgtagcagagcaggatcccagctccagctcactgctctccctggtccggggggtaggggatgtggggcctgaagagcctttcatccctctgcgagtcgccggtgagccccggcccaacctgggcctagcctgcaatcgagtcttgatgcagggcatccgagctccagtccctagcagacctttcccgattaccatgacancctctggtttgtctccagaggacaagagtgagcaactgctccctcgcgggcc

SEQ ID NO: 49875 - DNA, 14992 bp, Homo sapiens
  misc_feature (1)...(14992): n = a,t,c or g
cctaattacatagttgaaaagcgtgaatcgggtacaacagcttggcagcttgtcaattccagtgtcaagcgcactcaaattaaagtcactcatctcacaaaatacatggaatattctttccgtgtcagttcagagaacagatttggtgtcagcaaacctctagaatcagcaccaataattgctgaacatccatttgtcccaccaagcgctcctaccagacctgaggtctaccatgtgtctgccaatgccatgtctattcgttgggaagaaccctaccacgatggtggcagtaaaatcattggctactgggttgagaagaaagaacgtaatacaattctttgggtgaaagaaaacaaagtgccatgcttagagtgcaactacaaagtaactggtttagtagaaggactggaatatcagttcagaacttatgcactcaatgctgcaggtgttagcaaggccagcgaagcttcaagacctataatggctcaaaatccagttgatgcaccaggcagaccaggggtgacagatgtccaaagatcaacagtatcactgatttggtctgccccagcgtatgatggaggcagcaaggttgtgggctacatcatagagcgtaagccagtcagtgaggtaggagatggtcgctggctgaagtgcaactacaccattgtatctgacaatttcttcaccgtgactgctctcagtgaaggagacacttatgagttccgtgtgttagccaagaatgcagcaggcgtaattagcaaagggtctgaatctacaggccctgtcacttgccgagatgaatacgctccacccaaagccgaactggatgcccgattacacggtgatctggttaccatcagagcaggttctgatcttgttctggatgctgcagttggtggcaaacctgaacccaaaattatctggaccaaaggagacaaggagctagatctctgtgaaaaagtctctttgcagtatactggcaaacgagcaactgctgtgatcaagttctgtgacagaagtgacagtggaaaatacactttaacagtgaaaaatgccagcgggaccaaggccgtgtctgtcatggtcaaagtgcttgattcccctggcccatgtggaaagctcaccgtcagcagagtaacacaggagaagtgcactttagcctggagccttccgcaggaagacggaggagcagaaatcactcactacatcgtggaaagacgcgagactagcaggctcaactgggtgattgttgaaggcgaatgcccaaccctatcctatgtcgttaccaggctcatcaagaacaatgagtacatattccgagtgagggcagtaaacaaatatggccctggtgtgcctgttgaatcagagccaattgtagccagaaactcattcactattccatcaccacccggcatacctgaagaagttgggactggcaaagagcatatcatcattcagtggacaaaacctgaatctgatggtggcaatgaaatcagcaactacctagtagacaaacgtgagaaggagagcctgcgctggacacgtgtcaacaaagactatgtggtgtatgataccaggctgaaggtgaccagcctgatggagggttgtgattaccagttccgggtgaccgcagtgaatgcagctggtaacagtgagcccagcgaacgttccaacttcatctcatgcagagaaccatcatatacccctggaccaccttctgctccaagagttgtggataccaccaaacacagcattagtttggcatggaccaaacccatgtacgatggtggtactgacattgtaggatatgttctggaaatgcaagagaaggacactgatcagtggtaccgagtgcataccaatgccacaataagaaatactgaattcactgtgccagaccttaaaatgggccagaaatattccttcagagttgctgccgtgaacgtgaagggtatgagcgaatacagcgaatcaattgctgaaattgagcccgtggaaagaatagaaataccagatcttgagcttgcagatgatctaaagaagactgtgaccatcagggctggggcctccttgcgcttgatggtgtctgtatctggaagaccacctcctgtcataacgtggagcaagcagggcattgaccttgcaagccgggcaattattgacaccactgagagctactcattgctaatagtggacaaagttaatcggtacgatgctggaaaatacacaattgaagctgaaaaccaatctggcaagaaatcagcaacagtccttgttaaagtctatgatactcctggtccctgtccttcagtgaaagttaaggaagtatcaagagattctgtgactataacttgggaaattcccacgattgatggtggagctccaatcaacaattacatcgttgagaagcgtgaagctgctatgagagcattcaaaacagtaactaccaaatgcagcaagacactttacagaatttctggacttgtagaaggaaccatgcactatttcagagtgctgccagaaaatatttatggcattggagaaccttgtgaaacatctgatgcagtactggtctcagaagtgcctttggtgcctgcaaagctagaagtggtcgatgtcaccaaatccactgttacccttgcctgggaaaaaccactctacgatggtggtagccgactcactggatatgttctcgaggcctgcaaagctggcacagagagatggatgaaggttgtcaccttaaaacccacagtcctagagcacactgttacttccttaaatgaaggtgaacaatacttatttagaataagggcacaaaatgagaaaggtgtgtcagaaccaagagagactgtcacagccgtgactgtacaagacctcagagtgttgccaacaatcgatctttctacaatgcctcagaagaccatccatgtcccagctggcagaccagtagagctggtgatacctattgctggccgtccacctcctgctgcttcctggttctttgctggttctaaactgagagaatcagagcgtgtcacagttgaaactcacactaaagtagctaaattaaccatccgtgaaaccactatcagagatactggagaatacacacttgaattgaagaatgttaccggaactactttagaaaccattaaagttatcattcttgacaagcctggtccaccaacaggacctattaagattgatgaaattgatgctacatcaattaccatttcctgggaaccacctgaattggacggtggtgctccactgagtggttatgtggtagaacaacgtgacgctcatcgtccaggatggctgcccgtttctgaatcagtgactaggtccacgtttaagtttaccagactcaccgaaggaaatgagtatgtgttccgtgtggctgcaacaaaccgcttcgggattggctcttacttgcagtctgaggtcatagagtgtcgcagcagcatccgtattcctggacccccagaaacattaaagatatttgatgtttcccgtgatggcatgacacttacttggtacccaccagaggatgacggtggctcccaagtgactggatatattgtggagcgcaaagaagtgagagcagatcgatgggtccgtgtaaataaagtacctgtgacaatgacacggtaccgctccactggccttactgaaggcttagaatatgaacaccgtgtcacagccattaatgcaagagggtctgggaaaccaagtcgtccttccaaacccatcgttgccatggatccaattgctcctccaggaaagccacaaaacccaagagttactgatacaacaaggacatcagtctccctggcctggagtgttccagaagatgaaggaggatctaaagtcacaggctacttgattgaaatgcaaaaagtagatcaacatgaatggaccaagtgtaacaccactccaaccaagattcgagagtatactctaacacacctacctcagggtgcagaatacaggttccgcgtcctagcttgtaatgctggtggacctggtgagcctgctgaggtaccaggaacagtcaaagtcactgaaatgcttgaatatcctgattatgaacttgatgaaagataccaagaaggtatctttgtaaggcaaggtggcgtcatcagacttaccataccaatcaaaggaaaaccattcccaatatgtaaatggaccaaggaaggccaggatattagtaagcgtgccatgattgcaacatctgaaacacacactgagcttgtgatcaaagaagcagacaggggtgattctggcacttatgacctggttctggaaaataaatgtggcaagaaggctgtctacatcaaggtcagggtgataggaagtcccaacagtccagaagggccactggaatatgatgacatccaagtccgctctgtgagggtcagctggagacctcctgctgatgatggtggtgctgacatcttaggctacatcctcgagagacgagaagtgcctaaagccgcctggtataccattgattccagagtccgaggtacatctctggtggtaaaaggcctcaaagagaatgtagaataccatttccgtgtttcagcagaaaaccagtttggcataagcaaacccttgaaatctgaggaaccagtcacaccaaaaacaccattgaatcctccagaacctccaagcaatcctccagaagtactcgatgtaaccaagagttctgttagcttgtcctggtcccggcccaaagatgatggtggttctagagtcacaggctactacatcgaacgcaaagagacatccactgacaaggtggtcagacacaacaagactcagatcaccaccacaatgtacactgtcacagggcttgttcccgatgctgagtatcagttccgcatcatcgcacagaatgatgttggcctgagtgagaccagccctgcttctgaaccagttgtttgcaaagatccatttgataaaccaagccaaccaggagaacttgagattctttcaatatccaaagatagtgtcactctacagtgggagaaacctgaatgtgatggtggtaaagaaattcttggatactgggttgaatatagacagtctggagacagtgcctggaagaagagcaataaggaacgtattaaggacaagcaattcacaataggaggtttgctggaagctactgagtatgaattcagggtttttgctgagaatgagactgggctgagcagacctcgcagaactgctatgtctataaagactaaactcacatctggagaggccccaggaatacgcaaagaaatgaaggatgttaccacaaaattgggtgaagctgctcaactctcatgccagattgttggaaggcctcttcctgacattaaatggtacagatttggtaaagagctcatacaaagccggaaatacaaaatgtcttcagatggacgcacacacactcttacagtaatgacagaggaacaggaagatgaaggtgtttatacctgcatagccaccaatgaggttggagaagtagaaaccagtagtaagcttctcctgcaagcaacaccgcagttccatcctggttacccactgaaagagaaatattatggagctgtgggttccacacttcggcttcatgttatgtacattggtcgtccagtacctgccatgacttggttccatggtcagaaacttttgcaaaactcagaaaacattactattgaaaacactgagcactatactcatcttgtcatgaagaatgtccaacgtaagactcatgctgggaaatacaaagtccagctcagcaatgtttttggaacagttgatgccatccttgatgtggaaatacaagataaaccagacaaacctacaggaccaattgtgatcgaagctctattgaagaactccgcagtgatcagctggaaaccacccgcagatgacggaggctcctggatcaccaactatgtggtggaaaaatgtgaggccaaggagggggctgaatggcaattggtgtcttcagccatctcagtgacaacctgtagaattgtgaacctcacagaaaatgctggctattacttccgggtttcagctcagaacactttcggcatcagtgaccctctagaagtgtcctcagttgtgatcattaagagtccatttgaaaagccaggtgctcctggcaaaccaactattactgctgtcacaaaagattcttgtgttgtggcctggaagccacctgccagtgatggaggtgcaaagattagaaattactaccttgagaagcgtgagaagaagcagaataaatggatttctgtgacaacagaagaaattcgagaaactgtcttttcagtgaaaaaccttattgaaggtcttgaatacgagtttcgtgtgaaatgtgaaaatctaggtggggaaagtgaatggagtgaaatatcagaacccatcactcccaaatctgatgtcccaattcaggcaccacactttaaagaggaactgagaaatctaaatgtcagatatcagagcaatgctaccttggtctgcaaagtgactggtcatccaaaacctatcgtcaaatggtacagacaaggcaaagaaatcattgcagatggattaaaatataggattcaagaatttaagggtggctaccaccagctcatcattgcaagtgtcacagatgatgatgccacagtttaccaagtcagagctaccaaccaagggggatctgtgtctggcactgcctccttggaagtggaagttccagctaagatacacttacctaaaactcttgaaggcatgggagcagttcatgctctccgaggtgaagtggtcagcatcaagattcctttcagtggcaaaccagatcctgtgatcacctggcagaaaggacaagatctcattgacaataatggccactaccaagttattgtcacaagatccttcacatcacttgttttccccaatggggtagagagaaaagatgctggtttctatgtggtctgtgctaaaaacagatttggaattgatcagaagacagttgaactggatgtggctgatgttcctgacccacccagaggagtcaaagttagtgatgcctcacgagattctgtcaacttaacatggactgagccagcctctgatggtggcagcaaaatcaccaactacattgttgaaaaatgtgcaactactgcagaaagatggctccgtgtaggacaggcccgagaaacacgttataccgtgatcaacttatttggaaaaacaagttaccagttccgggtaatagctgaaaataaatttggtctgagcaagccttcagagccttcagaaccaaccataaccaaagaagataagaccagagctatgaactatgatgaagaggtagatgaaaccagggaagtctccatgactaaagcatctcactcttcaaccaaggaactctatgagaaatatatgattgctgaagatcttgggcgtggtgagtttggaattgtccatcgttgtgttgaaacatcctcaaagaagacatacatggccaaatttgttaaagtcaaagggactgatcaggttttggtaaagaaggaaatttccattctgaatattgctaggcatagaaacatcttacacctccatgaatcatttgaaagcatggaagaattagttatgatctttgagtttatatcaggacttgacatatttgagcgcattaacacaagtgcttttgaacttaatgaaagagaaattgtaagttatgttcaccaggtctgtgaagcacttcagtttttacacagtcataatattggacactttgacattagaccagaaaatatcatttaccaaaccagaagaagctctaccattaaaatcatagaatttggtcaagcccgtcagctgaaaccaggggacaacttcaggcttctattcactgccccagaatactatgcacctgaagtccaccagcatgatgttgtcagcacagccacagacatgtggtcacttggaacactggtatatgtgctattgagtggtatcaacccattcctggctgaaactaaccaacagatcattgagaatatcatgaatgctgaatatactttcgatgaggaagcattcaaagagattagcattgaagccatggattttgttgaccggttgttagtgaaagagaggaaatctcgcatgacagcatcggaggctctccagcacccatggttgaagcagaagatagaaagagtcagtactaaagttatcagaacattaaaacaccggcgttattaccacaccctgatcaagaaagacctcaacatggttgtgtcagcagcccggatctcctgtggtggtgcaattcgatctcagaagggagtgagtgttgctaaagttaaagtggcatccattgaaattggcccagtttctgggcagataatgcatgcagttggtgaagaaggaggacatgtcaaatatgtatgcaaaattgaaaattatgatcagtctacccaagtgacttggtactttggtgtccgacagctggagaacagtgagaaatacgaaatcacctacgaagatggagtggccatcctctatgtcaaagacattaccaaattagatgatggtacctacagatgcaaagtagtcaatgactatggtgaagacagttcttatgcagagctatttgttaaaggtgtgagagaagtctatgactattactgccgtagaaccatgaagaaaattaagcgcagaacagacacaatgagactcctggaaaggccaccagaatttaccctgcctctctataataagacagcttatgtaggtgaaaatgtccggtttggagtaactataactgtccacccagagcctcatgtaacatggtataaatcaggtcagaaaatcaaaccaggtgacaatgacaagaagtacacatttgagtcagacaagggtctttaccaattaacaatcaacagtgtcactacagatgatgacgctgaatatactgttgtggcaaggaacaaatatggtgaagacagctgtaaagcaaagctgacagtaaccctacacccacctccaacagatagtaccttaagacccatgttcaaaaggttactggcaaatgcagaatgccaagaaggccaaagtgtctgctttgagatcagagtgtctggcatccccccaccaacattaaaatgggagaaagatggtcagccactgtccctcgggcctaacattgaaattatccatgaaggcttggattattatgctctgcacatcagggacactttgcctgaagacacgggttattatagagtcacagccactaacacagctgggtccaccagctgccaggctcacctacaagtggaacgcctgaggtacaagaaacaggaattcaagagtaaggaggagcatgagcgacacgtacaaaaacaaattgacaaaaccctcagaatggctgaaattctttctggaactgaaagtgtaccactgacacaggtagctaaagaggctctgagagaagctgctgtcctttataaaccggctgtaagcaccaagactgtaaaaggggaattcagacttgagatagaagaaaagaaggaggagagaaaactccggatgccttatgatgtaccagagccacgcaagtataagcagactaccatagaagaagaccaacgcatcaagcagttcgtgcccatgtctgacatgaagtggtataaaaagatacgtgatcagtatgaaatgcctgggaaacttgacagagttgtacagaaacgacccaagcgcatccgcctttcaagatgggaacagttctatgtgatgcctcttccacgcattacagatcaatacagacctaaatggcgtattcctaaactgtcccaagatgatcttgagatagtgagaccagcccgccggcgtacaccttctcctgattatgacttttactaccgacctagaagacgttctcttggggacatctctgatgaagaattactcctccccattgatgactacttagcaatgaaaagaacagaggaagagaggctgcgtcttgaagaagagcttgagttaggtttttcagcttcacccccaagtcgaagccctccacactttgagctttctagcctacgttactcttcaccacaagctcatgtcaaggtggaggaaacaagaaaagactttcaggtattcaacctatcacatcccaacgaaggctgaagctagtacaagttatgcagaactgagggaacgcatgcccaggctgcgtacagacagccaaagcaacggcaaagaatcatggctgagagggaggatgaaggagttngtcgcccagttacgaccacccagcatctctcagaatacaaaagcgaacttgacttcatgtcaaaggaggaaaagtctagaaagaaatcaaggcgacaaagagaagtgacagaaataacagaaattgaggaagaatacgaaatctcaaaacatgctcaaagagaatcatcctcatctgcgtctagactactgagacgacggcgctccctgtctccaacttatattgagttaatgaggccagtgtctgagctgatccggtcacgtccacaaccggctgaggaatacgaagatgacacagaaagaaggtcacctactccagagagaactcgcccacgatcccccagccctgtgtctagtgagagatcactctcgagatttgagaggtctgcaagatttgatatcttttccaggtatgagtccatgaaagctgctttaaaaactcagaagacatcagaaaggaagtatgaagttttgagtcagcagcctttcacactggaccatgcccctcgaatcacactgagaatgcgctcgcacagggtaccatgtggccaaaatacacgttttattttaaatgttcagtctaagccaactgccgaggttaaatggtaccacaatggtgtggaactccaagaaagcagtaagattcattacaccaacacgagtggagtcctcaccctggaaattctggactgtcatactgatgacagtggaacctaccgtgctgtgtgcaccaactacaagggcgaagttctgactatgcaacgttggacgtgacaggaggggattataccacctatgcttcccaacgcagagatgaagaggtccccagatctgttttccctgagctgacaagaacagaggcgtatgctgtttcatcatttaagaaaacatctgagatggaagcttcgtcttctgtcagggaagtgaaatcacagatgacggagacaagggaaagtctctcctcatatgaacactctgcatctgcagaaatgaaaagtgctgcattagaagaaaagtcactggaagaaaaatccacaaccagaaagatcaagacgactttggcggcaagaattctaacaaagccacggtccatgaccgtcgtacgagggccgagtctgcaaggttttcttgtgacaccgatggtgagccggtaccaacttgtgaccttggctgcgtaaaggacaagtgctaagtacttctgcccgccaccaagtgaccaccacaaagtacaaatcaacctttgagatctcttcagtccaggcttccgatgagggcaattacagcgtggtggtagaaaacagtgaagggaaacaagaagcagagttcactctgactattcaaaaggccagggtaactgaaaaggctgtgacatcaccaccaagagtcaaatccccagagcctcgggtgaaatccccagaagcagttaagtctccaaaacgagtgaaatctccagaaccttctcacccgaaagccgtatcacccacagagacaaaaccaacaccaatagagaaagttcagcacctcccagtctctgccccaccaaagattactcagttcctgaaagcagaagcttctaaagagattgcaaaactgacctgtgtggttgaaagcagtgtattaagggcaaaagaggtcacctggtataaagatggcaagaaactgaaggaaaatgggcatttccagtttcattattcagcagatggtacctatgagctcaaaatcaataacctcactgaatctgatcaaggagaatatgtttgtgagatttctggtgaaggtggaacgtctaaaaccaacttacaatttatggggcaagcctttaagagtatccatgagaaggtatcaaaaatatcagaaactaagaaatcagatcagaaaaccactgagtcaacagtaaccagaaaaactgaaccaaaagctcctgaaccaatttcctcaaaaccagtaattgttactgggttgcaggatacaactgtttcttcagacagtgttgctaaatttgcagttaaggctactggagaaccccggccaactgccatctggacaaaagatggaaaggccattacacaaggaggtaaatataaactctctgaagacaagggagggttcttcttagaaattcataagactgatacttctgacagtggactttatacttgtacagtaaaaaattcagctggatctgtgtcctctagctgcaaattaacaataaaagctataaaagatactgaggcacagaaagtctctacacaaaagacttctgaaattacacctcagaagaaagctgttgtccaagaggaaatttcccaaaaagccctaaggtctgaagaaattaagatgtcagaggcaaaatctcaagaaaagttagccctcaaagaggaagcttcaaaggttctgatttctgaagaagtcaagaaatcagcagcaacctccctggaaaaatccattgtccatgaggaaatcactaaaacatcacaggcatcagaagaagtcagaactcatgctgagattaaagcattttctactcagatgagcataaacgaaggtcaaagactggttttaaaagccaacattgctggtgccactgatgtgaaatgggtactgaatggcgtagagcttaccaactctgaggagtaccgatatggtgtctcaggcagcgatcagaccctaaccatcaagcaagccagtcacagagatgaaggaatcctcacctgcataagcaaaaccaaggaaggaatcgtcaagtgtcagtatgatttgacactgagcaaagaactctcagatgctccagccttcatctcacagcctagatctcaaaatattaatgaaggacaaaatgttctctttacttgtgaaatcagtggcgagccatcccctgaaatcgaatggtttaaaaacaacctgccaatttctatttcttcaaatgtcagcataagccgctccagaaatgtatactcccttgaaatccgaaatgcatcagtcagcgacagtggaaagtacacaattaaggccaaaaatttccgtggccagtgttcagctacagcttccttaatggtccttcctctagttgaagaaccttccagagaggtagtattgagaacaagtggtgacacaagcttgcaaggaagcttctcgtctcagtcagtccaaatgtctgcctccaagcaggaggcctccttcagcagtttcagcagcagcagtgctagcagcatgactgagatgaaatttgcaagcatgtctgcccaaagcatgtcctccatgcaagagtcctttgtagaaatgagttccagcagctttatgggaatatctaatatgacacaactggaaagctcaactagtaaaatgcttaaagcaggcataagaggaattccgcctaaaattgaagctcttccatctgatatcagcattgatgaaggcaaagttctaacagtagcctgtgctttcacgggtgagcctaccccagaagtaacatggtcctgtggtggaagaaaaatccacagtcaagaacaggggaggttccacattgaaaacacagatgacctgacaaccctgatcatcatggacgtacagaaacaagatggtggactttataccctgagtttagggaatgaatttggatctgactctgccactgtgaatatacatattcgatccatttaagagggcctgtgcccttatactctacactcattcttaacttttcgcaaacgtttcacacggactaatctttctgaactgtaaatatttaaagaaaaaaaaagtagttttgtatcaacctaaatgagtcaaagttcaaaaatattcatttcaatcttttcataattgttgacctaagaatataatacatttgctagtgacatgtacatactgtatatagccggattaacggttataaagttttgtaccatttattttatgacattttacaatgtaagttttgaaactaactgttggtaggagaaagtttcttatggaacgaataccctgctcaacatttaatcaatctttgtgcctcaacatactgttgatgtctaagtatgcctcagtgggttgagaaaatccccattgaagatgtcctgtccacctaaaagagaatgatgctgtgcatatcacttgatatgtgcaccaatacctactgaatcagaaatgtaaggcattggtgatgtttgcatttaccctcctgtaagcaacactttaacgtcttacattttctctgatgatgtcacacaaaattatcatgacaaatattaccagagcaaagtgtaacggccaacactttgttcgctcattttacgctgtctctgacataaggagtgcctgaatagcttggaaaagtaacatctcctggccatcccttcatttaaccaagctattcaagtattcctatgccagagcagtgccaactcttggaggtcccagagtgcagccaatgcctttgtgtggtagttctaaattttaattgcacctgaaaaacctgggcacctaagcaatgagccacagcaaaaagtaaagaacaacaacaaaataaagctgttgttaaattttaaacaatattactaattgcccaaaatgtcaatttgatgtagttcttttcatgcaagtataaattcaattgttagttataattgttggacctccttgagatagtaacaacaaaataaagcaagctatctgcacctcaaaaaaaagtcgacgc

SEQ ID NO: 49876 - DNA, 1082 bp, Homo sapiens
ggtctttcccatctggcggccgcggctcctgtccagaccctgaaccctccctcccaaggctcaaccgtcccccaacaacccccagccttgtactgatgtcggatgcgagagcctcgtgcttaagtaagaatcaggccttattggagacattcaagcaaaggttggacaactacttttccagaacagaaaggaaactcatgcatcagaaaaggtttcagggatataatcagaaggtgactaataaaggtaccaggaaggaatatgggctggcacaaataccaggaatcttgattcaggataaaacagtttaagggaatttctggggacctacaataaacttacagagacctgctttttggactgtgttaaagacttcacaacaagagaagtaaaacctgaagagaccacctgttcagaacattgcttacagaaatatttaaaaatgacacaaagaatatccatgagatttcaggaatatcatattcagcagaatgaagccctggcagccaaagcaggactccttggccaaccacgatagagaagtcctgatggatgaacttttgatgaaagattgccaacagctgctttattggaaatgaggactcatctgatagaatcccctgaaagcagtagccaccatgttcaaccatctgtcatgactgtttggcaaatggaaaccgctggagaaacaaaattgctatttaccaggaataatcacaatagaaggtcttattgttcagtgaaataataagatgcaacatttgttgaggccttatgattcagcagcttggtcacttgattagaaaaataaaccattgtttcttcaattgtgactgttaattttaaagcaacttatgtgttcgatcatgtatgagatagaaaaatttttattactcaaagtaaaataaatggaaatatcactgagcagttgtttatactgtatggtaccatagtattctcactggactgtggatacgttgaaatgtttttcaatcaggatcatcctccaagcagtcctgttcattcatgtctgcctcaaattgctggtgaatacataaaatagttatttgctaatcataaaa

SEQ ID NO: 49877 - DNA, 1448 bp, Homo sapiens
cctcatctactttgaattcgtcattctattaatctacttttgcctaaagtgggaaactgaatatatcagaatgaaacatctatttttttcataaagaagatcatataatatgtgaaagaactttgaaaggatgaggcattatataaatgcaagaatataaaagataaacaggaagtctaatgtgaacaatattctgagagtaaaaagtgtaattatatttccattgtaaatgtataccaagttttcttagctttctattctccaataacctctagaaactattctaagcatgcctggtttctgtaacttaaatatggcataaaaacctgtttcctttgaattcacttgatagcagtagtcaaacactaataatgcttgctaatttcctctcactttcttaagaaagcccctatatttagcctctgcctccatgtcgcatgtggtggttaggtgacagcataagtacactagtggctttagcactaaactcgaggcctgggtcacttctcccctgaagaagaaaggtttaaaaattcctaaatcacaatgtagaactaagttacaccctacctcagaactgcagatattaaaataccatctctttattaagtgtctctacaataaggatatttgctaagatcaagatgtacattttttggggttctgttttgttttggcaaatattgcccacgtctttttagtttgcttcaaacatttactaaaaataaaaaattttaaatctttgcctacttatttaaaaataaaaaaaatactcaaaacaaatttaagctgaagatatatactgtataaagtgttcatctacccagtactctgaagtcttttttttttctgtgttttaagactttatcattaaaaaaagaagaaattagagaagggaggtgggggggacaggagggtgaaagaatctctccaaaatgtcggatccgggcgaccctccttccctgactgcccagccaccctgtcccttctctgtcctcgcggcgaggccctagctgccatcttctggggaccaaggcccaggagcccagctcgggtcccaggcagaggtgaaggcagaagcggggctcagagcctggaggccttgccgggtgtccttgagagccccttgggtgggcactcaggcccccatgtcccagcagggccctagggaggtaggcgttgagcggagaggcctttggaggtgggatcctgaagccagaggaccaggcgggaaccagaggcaggtgtgaggctgggggtcacagccggaggctgggtctctcctgcatcagcctctatagataatgccattctccttccaagttcaaactcatccccactgatgctggagcccggaaggccacgtgtggctgcgtctcggtatagcccccgatgggctggccctctgggctgaaggctgcaccctgccctgtgcggttggattgatc

SEQ ID NO: 49878 - DNA, 778 bp, Homo sapiens
ttttgacaggaactgtttttattccaaccacctcacctccttagaatgggaggcgaacagtgaaatagtgcatttatcttaaaagtgaaataattccaggatggtagggcgagaccctgtgatgggtgaatttacctcacttgataccaagggcccttaatactcggggaagtgggactttgtcgacaaagccagggacaatccccctacccccaccccacccagcagtgattaaaaacccgtacggtcactttctatgtgatggctgtctccctctcaccagactgcatagcggttgcagatgaacatttggcacctagatgggggtcaaggagctggggctgtgattcagggaagatgctgagggggactgggagtctctgtttgaatcttgaagcaaggggtgaaggtgtggggtgtgtgtaggggagctgacactgaagtctttcaggaagcagatggtaagggtcagggggtgtgtgtctatgctggggtgagggtcctgtggtgttgctggtgatgctgactgccttgcccaccccaagttggactaggagagtcctatcaggctgctgggcagggagggcaaaggagagcaccattctgcgggtagggcaggaagggtggcctccccaccctgggtgcctgcagagcctggcagccccgccctgtggccatccgatgccacatgtcctctagagttcctgggccggctgtccacagcctgtcctccacaggctgcatggcctcctgcacgtagacgatgaactccgaggcc

SEQ ID NO: 49879 - DNA, 908 bp, Homo sapiens
atgcgcagtcatgagtcgcttcaagtttatcgatattggtatcaacttgactgaccctatgttcagaggaatttatttgggggttcaaaagcatcaagatgacttacaggatgtaatagggagagctgtcgagattggtgttaaaaagtttatgattacaggtggaaatctacaagacagtaaagatgcactgcatttggcacaaacaaatggtatcctcatatttcttttaccaaaaaaaaaaatgaattaagtaattttgaagaagtctttctgaaaactgcttcaggtatgtttttcagtacagttggatgtcatcctacaagatgtggtgaatttgaaaagaataaccctgatcagtacttagcaggattgctgagccttgctgagaacaacaaaggaaaagttgtggcaataggagaatgtggacttgattttgaccgacttcagttttgtcccaaagatactcaactcaaatattttgagaagaaatagagaccggtatgtgggtggagtgctctctgaaaactgaagctaatttggaagttttgaagtcaattcctagtgaaaaattaatgattgagacagatgcaccttggtgtggagtcaaaagtacacatgctggatcaaaatatataagaactgcatttcctaccaaaaagaagtgggaaagtgggcactgcttaaaagacagaaatgaaccctgccatataattcaaatattggagataatgtcagcagtgagagatgaggatccactggaattagccaatacactatataacaatactattaaagtattttttcctggaatataattggtatatgtcttccactttccatcatgtatgtaaaatttcatagtaaaacttcctgatagtttcaataaagaaattatctgcaaaaaa

SEQ ID NO: 49880 - DNA, 501 bp, Homo sapiens
agttttcagtaataataacctatttaatcagatgatgatgtgtttgaaaatagtgttcaatatcagcaaatttgtacacagggaatgtaaataaggataactgatcagagttatccactgtatttataaggaagagtcggaaaaaacaatgaccttagttttttttaagcctgatgatactatggtttactctaataagatagctatattgataattatatttttgttactgtgcccttgcacattttggtctttttgttaatatttttattaataacacataattagtaaccactctactgtttcaagttaatctagtaatagagcttacatatatttgtataactgctataccactgaactgaatttattttacaacagtgtagaattcttgaaaagttaacgtagaaaatatccaaaaagcagtatttctagaaagtgtccaaaaagcagtatttctttcccctggttgtgagagtaactaattatataaatattacc

SEQ ID NO: 49881 - DNA, 730 bp, Homo sapiens
ggcagcaaaagtggaccaagaaaccttgacagaaatggtgaaacccagtattgattatgtgcgccacaaaaaattccgatctgggaattacccatcatcattaagcaatgaaacagaccggctggtgcactggtgccacggcgccccgggggtcatccacatgctcatgcaggcgtacaaggtctttaaggaggagaagtacttgaaagaggccatggagtgtagcgatgtgatttggcagcgaggtttgctgcggaagggctacgggatatgccatgggactgctggcaacggctattccttcctgtccctttaccgtctcacgcaggataagaagtacctctaccgagcttgcaagtttgcagagtggtgtctagattacggagcacacgggtgccgcattcctgacagaccctattcgctctttgaaggccatggctggcgctattcactttctctctgatgtcctgggaccagagacatcacggtttccagcatttgaacttgactcttcgaagagggattaaaaggtgcaaaaagacaactaaaatacccatttggaccaaaagccgccagattgcttagtgcctgacacagaaacaactgggaatcctgaaagagaagcagacaccgtcacaggcccctctggttagactagcatgagtgaccgaagccatccatcaacattttctaacagcaccctcatcaatataaaatatgacttcttcac

SEQ ID NO: 49882 - DNA, 1193 bp, Homo sapiens
ttttttttttttttggagctctttcaaaggatttatttgctacagaattgcttgagtccaccaatgagaagaactcaggatttctgtgtttaaaaggattttgcttactgctttatttttacaagtgctgccatatccaaaaagcacttctttttgccagcatttggcatgtctataagaggttagaaaaagtcagaatctatagaattgatgtctaaaaataggaaaaaaaaaagaatatttaaaaattcctcatttggataggtcctgagttgaaaacacattcatctgcaaaataacttttttaggtcagaatgctatatttttaaccacaggatggctgacctttgacccttgactggtaaatatttccaggcaccatatggatgacaggacagacgccattcagttggccaaatctggatatatgccctacttggcttgtgaaaatttttgagtatctcttaaccccaaacctcctggttctctgaaactgattgtcttaatctgattcccaatacttttaaaaacaaataaacaaaacattccctgaaagatcacacatataagtatttgttgcctgtgaatagatacagagaaaccaagtacaaatgtgcattaacaattcagtgacgtagctgtggatctctggatggctatgtaagctgtgagaaagtcccccactggctttgcacttgctgcgcaccagaggtgaccatccaggcagtatcaacctgaagagggggtgaatcccaagcagctgctcgatgggcttaaaccgccactcgtcagcctccagctcttctaccaaaccagctagtttttccatccgagcaacttgctgatcatgtttcacctgtttaagcgtggatgccacttgatagctaaaaacagattcgcagaggaatctctcagagccatcttctaacatctctccagctcctttggggtaggtgaaaagggctttccgtggtggggcaaggtctgagacactgaaaccagatccagtgacagaacttccactgaccccaccagctgaggaggatgatgatgaagcagccatttcctctctagcagagttcttacttcactacagagaaagaaaaacagcaattggcaagtttatggaagtgagagtgacaacatttcattctagctgctgtaagggccagcatacagttttgtaaagactt

SEQ ID NO: 49883 - DNA, 499 bp, Homo sapiens
attgtttgcagccattttttattccaaacatgtatgtttttgtaaacctgacatttcccaaacagtgcaagtgaatcagaagtgactgcttagactttaatacacgtgacattgtgaggcagcacaacctccccccacccaccaaaattcctcagtggaaatgtacatggatgcatcagtaaagttctggaaatgcagatagcgtgggtgcctgccaagcaattaatcactcgtaaagcttttaaactcactctgccagtcacaccgtgcacattagaattaaaacaacaacatcaacaaagaaaaaaccttaacacagtctgaaatctagatcattgtgctataaagcattgcacgatgttgggaaatttgttcacttattccccccatgtgctgaaaattcagaagacatcctagaagtttcattttgggccctactgggctctgtattctcccttcagccactctttgaatattctccactgtgtatattattacg

SEQ ID NO: 49884 - DNA, 1716 bp, Homo sapiens
ttttttttttttttttccagctcttttattcctttaactgcttaacaaaagaaagagtctccaaagtttaaaaaacctttgaaaaatatacagcttgatattatttacataaaatatgaatccaggttccaatatcaaacaaacattgctatgtcagaaacacagtggaaggcaggaacgtaactcactgccttttagatgcaaagactaatagacacgttctcctatctcgactatctttgttacctgttatcctcaaacataaattattaggcacctgagaggttggaagactaccgaaaatgaacttcataccttctgtatgattattatcttaaaaagttaccgcatttttaatctcttttataactttacttcatctacaactaacttcactttcattatcccaaatgatcaggtattaattacatgaactgttaatgtatacacagacctaaaaatcaaacaaaaatgtattgcccagttgtgtaggatatatatttgaaccccatgacatttcctagtgctttgtgagcaatccaaatttcacttaaaagagaggtgtcaattctgcccatgctctggactatgtttttaaaaaacatacaaaaaagactgacaataattgatctcttataaattaatcaagaaacctaagattaaaaattctaaattacaattttatttgtatttaaaaatacattggaaattctgcatattcccatgatcaaccttattttcaatgcacattacttaaattttgatgacacagttgattctgacaagtcctttttcaagctgaacaccaaaatagggaaactcctgtacatttccatgggccctgttcccattgatgtatactgcttccttactaacagtgagggatgactttcatcagtcttttatcacctgaacagtcttccggccataatgatagtaactataagctgatgcagctgtggtgaaagctgtaaaacaccatagtatctgaagataaatgctgtcagcatagttgaaaactggagctgccaaagaagctgccaccaagattaactggactgctgtattcaccttgctgatgaatgttggttttaacctagcagtggcatagcaaggattgaaatacttggcaagtgttcgctggcagaggactggtgttggaagagttcggtatctgacataaaaaacagcagcaatcaacattacatctctcgaaatgatcatgtaagtaagtggaactggaataagatctgcataggtcaagctaacatataagatactgataagtattttatcagcaagtggatcaagagcacttcccaaagctgatctttgattggcccagtttcgagcaataaatccatccaacaaatctgttagtccagctaaagcaaaaactcctagtgcaatattaaaatcttcttcaataatcaaatagcccagaactggggccaagccaattctcgtcattgacaacatattcgggattgtccatgggttttcataccaggctcgggggtgcttcgcccggccccaactggtcgcccggggcttcggcagggcgcccgcatccgcgctggcctgggagccgccttccccgcgcccgaacagtggttccgctggccgatcccgggcagccgcaagccaagagcggccggacgcagcctccagcgttcggccaggcagcccaagcagcagggcacgggcggcagcagg

SEQ ID NO: 49885 - DNA, 432 bp, Homo sapiens
gagggacccggcgtccgcgcctaacggcgctgggctagtgctaggccacttcatagcttcggggatggtcaatcagatatatggtacatttgctggagttggctgtgactttcattgagagattaaaaacccaccttgaaacaattagaaatattcctcatttagctgcaaatctaaagaaaatgaaccaggctttagcaaagatggatatattggtgactgagacagaagaactggcagagaatatactcaagtggcgtaaacaacaaaacgaagtttcgtcttgtatccccaaaatattagctgaagaaagttatctttataaacatgatattataatgcctcctttaccttttacttctaaagttcatgtccaaactattaatgccaagtagtcatcaactttatttttgcttaattatgtgtagcata

SEQ ID NO: 49886 - DNA, 734 bp, Homo sapiens
  misc_feature (1)...(734): n = a,t,c or g
gtcacgcagtgctcgccgactcggtgcacctcgcctgggaacctgtcgcggtccctcggggccgtggtcttctccagagttacaaataacgtcgttttggaagcgcccttcctagttggcattgaaggttcactcaaaggcagtacttacaaccttttattctgtggttcttgtgggattcccgttggtttccatctgtattctacccatgctgccctggctgccttgagaggtcacttctgcctttccagtgacaaaatggtgtgctatctcttaaaaacaaaagccatagtaaatgcatcagagatggatattcaaaatgttcctctatcagaaaagattgcagaggtaaaatttcatgatggttgtatgcttttttaaaatacagacaactcttgataacttctaccaatgaacttggggatgatgaaatggcatgatgctcaataatcctttttacttgatttgaccttccctattgaatttgtaatgaaaaacaaaatactaaaaccacactgtaaggtatagttcaggaagaaaggaaaagctgctcaactgctgcactcctgcattctcctttgtgctgggaatggatatcatcatcttgccatagaggtgtcttctttgcaaataccttgtaattgctcaactgtctcagacataagagtgatgaaacagttattaagaattcctggccgggcgtgngntgcacgcctgtaatcccagcactttgg

SEQ ID NO: 49887 - DNA, 316 bp, Homo sapiens
  misc_feature (1)...(316): n = a,t,c or g
ctttggcaggcatgcagctccacaggcgatttcttcaagcagctgaagtgtttagccctcctgggttaagagccagataaggagaaatccctttcctaggtttggaatgtnttgtgaaaaaaaagagaaatccctggctcctggagctggtgggagacaagattaagcaaacctcccctgacatgtatccctttgaccccaagctctgcctcctccctgaccacccatgccctttcctttaactttctcaaacagataccagggcctaaactgctttacctcccctcctactgagtcaaggttaggtggtgggagg

SEQ ID NO: 49888 - DNA, 592 bp, Homo sapiens
gctctttaactgctgacagcttttttttttaagccccatccctcgctcttccccttctgccccacatctgggcaagctgataagaaagtctggatgctctcccgcttggctgcagcagaaggttcaaaccatgtaagcccctgcccatacggaaccctcgcccaaacctaaccgctaatcaccatacaatccccagaccagtctcctttctcctttctcttccctgtctttcattttcagaccagcttgagaagccggccctgctctctccagaaaaccctattatgtggtctcaacgttcaaatcaaattctgggtggagaccatcctggaaatgtggagcggccacaacaaagggcacacacagaggatttggtgccactgcaaactcagtgtctccagcaggacgcggccatcaaataaggacttggcgcagctccatcagcagaggcagagctccctggtttcacgcagggagctgagaatagccctgtactctgcactccggtttgtgtctgcctctcccagtgcccagctctgaagcacgggctttacacctgggccccgtacttgaggggacataaaccaactgt

SEQ ID NO: 49889 - DNA, 649 bp, Homo sapiens
gtccgcagagctgcagccttcgagggccagccctctccgagtccggggctgggtcccaccagtgacaaggcggcacccagcgcacaccaaagagaaggcggctgtggcggcacgggcagccccagccatgctgtgttatgtgacgaggccggacgcggtgctgatggaggtggaggtggaggcgaaacaaccggcaagggactgcctcaaccaggtgtgcaggcgactgggaatcatagaagttgactattttggactgcagtttacgggtagcaaaggtgaaagtttatggctaaacctgagaaaccggatctcccagcagatggatgggctagccccttacaggcttaaacttagagtcaagttcttcgtggagcctcatctcatcttacaggagcagactaggcatatctttttcttgcacatcaaggaggccctcttggcaggccacctcttgtgttccccagagcaggcagtggaactcagtgccctcctggcccagaccaagtttggagactacaaccagaacactgccaagtataactatgaggagctctgtgccaaggagctctcctctgccaccttgaacagcattgttgcaaaacataaggagttggaggggaccagccaggcttcagctgaataccag

SEQ ID NO: 49890 - DNA, 485 bp, Homo sapiens
ctatattccatcaagagcaataaagtttttcccaggtgtcacttattgtatatgttaccaaataccatgaatttctgccatagtactactatcaagcaccttgtcttgctatttacagtttcttcatttgtatatttttagcttttctaagtggaaatgtctacataattttgatcttgacatgattgaggatttagagctcttgtctttgtcttgattgcaatccaacgatagattaacttgattctcagggggaaaagaaaaacttattttatgagaattgtttgttctgtgaaactcacttcacctagaacacatttcattgattcttggatcttagtttatgtggtcatagttgactgctgagaaaaggacaatgaaatgatagcaatttccttttgcttctaggtgatctctgattatagatagcatcctgtaaatataactttattgtcttgaaatgtttattgaagatgctatatttt

SEQ ID NO: 49891 - DNA, 730 bp, Homo sapiens
tttttttttggaaaacaacaccttatttattcagggtgtaatactgtctacttcctttcagaagacttgaaaaagatcaaaataggataaatggacagttactactaaacgattcaaatacttgggcagtatctttccctcttaaccctttcacacgtttttaaagtgtcaaaattgatgaatggtataaattcaaaaggaaaattcttttctactgaaaaggacatccagctcgcacaaacggtggttcagctgaaggcaaggcgtttctggttttcctctgcactcgggcggatcgttaacttccccaagttacaactgagttgctctttccaggcttttcgaagcatctttaagtttccccaccaagtcctgtaattgttccatgctgcaactaaaactaatctctggataggatggggaatcagtgttctagggcaggaaaaaaaacacgcaacaagaaacgctgtttatttaaatcaatgaaattataaatttcattattggataagacttatctataaatacctgtacacttaaggtcaccaaatatgcaggtctgtacatcctatgaagttgattggtctaaaataacacaacaaacacgcaacagcttttaactctaggttttaagaagttccctaaatcccccgctagagaagtttcttaaactttacctttatctgatattccaagcgccaagaaacatccgttatatgagggagagatc

SEQ ID NO: 49892 - DNA, 179 bp, Homo sapiens
attacagtgatcatcataggcttatgtcttgctgcagtaacttatgttgatgaagatgaaaatgaaatacttgaattatcatcaaacaaaacattcttcgtcatgctgaagattccagaggagtgtgttgctgaagaggaattgcctcacctgctcaccgaaaggctcacagatgtgtt

SEQ ID NO: 49893 - DNA, 763 bp, Homo sapiens
atttttcagcaaacacaaataccagaccgctgaaagtaaagctgaacataaaaaattgccccagccatataatagtctgcaggaagaaaaatgtctcgaagtcaagggcatacaagagaaacaagtcttctctaatactaaagattcaaagcaagagattacacagaacaaatctttcttttcctctgtgaaagaatcccagcgggatgatggaaaaggtgccttaaatatagtggaattcttgagaaaacgtgaagaactgcaacagattttgtcgagagtgaaacagtttgaagcagagccaaataaaagtggccttaaaacatttcagacactattaaatactatcccaggatggctgataagtgaagataagagagaatatgcagttcacattgccatggagaataatttagaaaaagtaaaagaagaaataacacatattaaaactcaagcggaagatatgcttgtgtcctatgaaaatataattcagacagccatgatgtcctccaaaacaggaaaaccgggaaataaacccactagtcttgatgaaacatcatccaaagtatctaatgttcatgtcagcaataataaaaatagtgaacagaaagaaaataaaattgccaaagagaaaacagtacagcaccaagtaacagctcatcatgaagcaactgttcgtagtcacgtgaaaacccatcaggaaattaaacttgatgatagcaacattcctcctccctctttaaaaacacgcccaccgcaccaa

SEQ ID NO: 49894 - DNA, 2384 bp, Homo sapiens
ctgctctgaaaccaggtctctaagtgaacatttctcaggcatggatgcatttgagagtcaaattgttgagtcgaagatgaaaacctcttcatcacatagctcagaagctggcaaatctggctgtgacttcaagcatgccccaccaacctatgaggatgtcattgctggacatattttagatatctctgattcacctaaagaagtaagaaaaaattttcaaaagacgtggcaagagagtggaagagtttttaaaggcctgggatatgcaaccgcagatgcttctgcaactgagatgagaaccaccttccaagaggaatctgcatttataagtgaagctgctgctccaagacaaggaaatatgtatactttgtcaaaagacagtttatccaatggagtgcctagtggcagacaagcagaattttcataagtcctgcttcccgatgccaccattgcaacagtaaactaagtttgggaaattatgcatcacttcatggacaaatatactgtaaacctcactttaaaccaacttttcaaaatcccaaaggaaattatgatgaaggttttggacataagcagcataaagatagatggaactgcaaaaaccaaagcagatcagtggactttattcctaatgaagaaccaaatatgtgtaaaaatattgcagaaaacacccttgtacctggagatcgtaatgaacatttagatgctggtaacagtgaagggcaaaggaatgatttgagaaaattaggggaaaggggaaaattaaaagtcatttggcctccttccaaggagatccctaagaaaaccttaccctttgaggaagagctcaaaatgagtaaacctaagtggccacctgaaatgacaaccctgctatcccctgaatttaaaagtgaatctctgctagaagatgttagaactccagaaaataaaggacaaagacaagatcactttccatttttgcagccttatctacagtccacccatgtttgtcagaaagaggatgttataggaatcaaagaaatgaaaatgcctgaaggaagaaaagatgaaaagaaggaaggaaggaagaatgtgcaagataggccgagtgaagctgaagacacaaagagtaacaggaaaagtgctatggatcttaatgacaacaataatgtgattgtgcagagtgctgaaaaggagaaaaatgaaaaaactaaccaaactaatggtgcagaagttttacaggttactaacactgatgatgagatgatgccagaaaatcataaagaaaatttgaataagaataataataacaattatgtagcagtctcatatctgaataattgcaggcagaagacatctattttagaatttcttgatctattacccttgtcgagtgaagcaaatgacactgcaaatgaatatgaaattgagaagttagaaaatacatctagaatctcagagttacttggtatatttgaatctgaaaagacttattccgaggaatgtactagcaatggctctgaagaaacagactgacagagcagctgctggcagtcctgtgcagcctgctccaaaaccaagcctcagcagaggccttatgggtaaaaggggggaagttcaatcatctctcctgatacaaatctcttaaacattaaaggaagccattcaaagagcaaaaatttacactttttcttttctaacaccgtgaaaatcactgcattttccaagaaaaatgagaacattttcaattgtgatttaatagattctgtagatcaaattaaaaatatgccatgcttggatttaagggaatttggaaaggatgttaaaccttggcatggtgaaacaacagaagctgcccgcaataatgaaaacacaggttttgatgctctgagccatcaatgtacagctaagcctttgtttcccagagtggaggtgcagtcagaacaactcacggtggaagagcagattaaaagaaacaggtgctacagtgacactgagtaaaatatctatggccactgacagtccacacttaggcactgagagatattgatgttctgaaataagattttatgaatttggatacccttttgaggaacttgatgtaaacatggtgttcagaaatctcgtgtctatctcaatgggatatttcttgtattacaccttgtcatttttttcacaatttatttacatctacttttgtttgaactggaatgaagagatgaaacactatggatatgttttccattcaaatggcactttagcatattgttctgttttcctgtaaaacatcatgggtgtgatttttatactgctgctgcttgtcacaattattataacttctctgtaatttcctctgaaataaaattgaatcacctgaggtgcaaaccaaaaaaaaaagtcgacgc

SEQ ID NO: 49895 - DNA, 624 bp, Homo sapiens
cacttggctccctgtttaattccatctgagaaaaatctcagggtgagtgggagtgaaaaggagcatggaagacccagtcctcacattgtccccgagtctgggaacagttcagaacctcaagactctgggtcatttggtgccacatcaggtggctgggtcatgtagatggctgcttggtgttgggacagtttgtctaccctcttcctgaccccaaagctaccacttagatgttccttctctttcatttcatgattacagggttttgcaattttcagctttctctgcacaatgaacactcacaaggagacattcttatatgggctcatccctctctaatttacaggttttccctcagaatccactgacaaagcagatggggagatgaggatattgatcgcatactggcgtgattaacccaggttctacacagattcgactgtgaagcatgagatttcacaaaataactaggccaaaggaggctgcaggtacaggacagaactttagacttaagagatccatgttgagttgtggctggaggaccagacgattccagaaccctttagaatctgtttgtcaaaccgatcatctttgccccatgttgtatggatcaaatgaaatggcatg

SEQ ID NO: 49896 - DNA, 240 bp, Homo sapiens
cttcgatcgccgcttcttccccatctccaaggaccagcctcgggtcctcttgcccctggccaatgtggcattaattgactacactctggaattcctgactgccacaggtgtacaggaaacatttgtcttttgttgctggaaagctgctcaaatcaaagaacatttactgtaaggccctgcaacttttctttccatgtttcgccatctttttccagttttttcaggatgaatgtaactaag

SEQ ID NO: 49897 - DNA, 542 bp, Homo sapiens
  misc_feature (1)...(542): n = a,t,c or g
ggtgagtccagggagcatgagaaattcatccaggccacacaggctcaggcacctatactcctgcccaccccctgcaggatggatattaccatttgaaatactttggcgcttgcagtgagatcttgccttaaaagaagaaacccaccaaattctagaatcgcagaggtgggggcacctatgtgacaaatgagggaacagaggcacagagattggcagggacatgctcaaagacatggagagcctgggcagaggatggccccagagtgggtggtgcctggccctgcttcagcctgacattgtccaagcctcccccagcccactcctaaaatggccaggccccacttcttcccaggtgggctacattttctgctgtcccggttcccacttccttaccttttctccttaaatctgatttcactgtgagggtgggaggttgggcagaggggtgaaaaccctcttccccttacttggtaagcacatacaattttttttggttttgtcaattaaaaaaaataacanccctgatatntcctgccaggcag

SEQ ID NO: 49898 - DNA, 772 bp, Homo sapiens
gattgtatatctaagccaattgcttgttctgcaacttttctttaaatgacacgcatagattcttcagttgttaaagtccaatatgtaaccgaagccaagttaactatgtaccatcaactaactattccagaattgtagaacttcaatgccctcccctatccccgccccacaaaaaataaatggaaagaaataaagtatttccccaacaccccagaggccgcttaactcctggcaagacatgcaaatcatattcgctaaaaaaatacaccctgctaacttcaaggcatttatccagcattctcgcaggggcttaattaaagtaaaaccaaaaagatcaagggaggagtggggggaaaatgttgaatcattctgggttccccgtgattagtgtatcacttcagtcacagaacaagatacagagatcttttaagtggatttgcctttccagtgggtcatttgttgcccaagttgatgacagcaggaactttagaaccacacttgttaagtctgtattcattaatcacttgcattcacacttaaaaacaaaaactaacagaagaaaaaaaacctattcagtaccggagattaaataaccatgtgtagtctcttgaaataaatttgattccttaagaagtctaattactttcagttgccttttttaaataactatatatatatatgtatatatatataattgtatatattatcctgtgattctacttatggttcctctgctgcgttgaagatctaggagcataaaagccttgtgtcc

SEQ ID NO: 49899 - DNA, 312 bp, Homo sapiens
tttttttttttggtaaaacacttgtctctttcataaaagcatttaacatcttactagatgaatactggtcacaaataacaaaagttatcgatggtttgtagagtaattggaagacttcttcagtcattaaacaaatgagaatccagttccagttgtttcatttgagattaccctttagagaaagactagggaaatacttagtaaatatttttaaaatatcacggatacttattttgcatacaaaattaaaatataaaaacatctgaaattactaatcagaagtactgatagtttttccaaatgagcaataag

SEQ ID NO: 49900 - DNA, 418 bp, Homo sapiens
gaagaattgaatacctctttggtgttgagcttgatgtcttcagaggaactttgcccaacagctggtttgcctcagaggcagattgatggtattggatcaggagtcaattttcagttgaacaaccaacataaattcaacattctaatcttatattcaactaccagaaaggaaagagatagagcaagggaagagcatacaagtgcagttaacaagatgttcagtcgacacaatgaaggtgatgatcaacaaggaagccggtacagtgtgattccacagattcaaaaagtgtgtgaagttgtagatgggttcatctatgttgcaaatgctgaagctcataaaagacatgaatggcaagatgaattttctcatattatggcaatgacagatccagcctttgggtcttcgggaagaccattgt

SEQ ID NO: 49901 - DNA, 411 bp, Homo sapiens
taaagtaatttttccaaaacgggtaaggcagacagaaggtgaagtcattaaaaacacatggtcaaagaggtcctccaaacagcttagaggaaggcggcccaacgaacgcatttaatcaatatatattgctaaagataatggggagaggaaaagagaaaaaaaattccatgctttgctgatacacaaatataggtttcccaggacgggggtagatatggaatactgtaattgaggaagtggtccaatctcccagaagggtcatgccatctgacaaaggtcaagggtcacaaaatggaggcaggtaggaagaggaagttgtagtgctgggtaaattgctcttggcccctcaacagaggtttgagatttgggattatgataggttccatcaggcaaataagtgcttgcgaggca

SEQ ID NO: 49902 - DNA, 884 bp, Homo sapiens
  misc_feature (1)...(884): n = a,t,c or g
tctctgccttctgctttgcttgcaccaaacatttctaaacacttgttctgccatctacatgggaggtgatgaaactcagtggtaactcatgatttatgacattgaaaataaagaggaacattgacctgcagactatggtttgtacaagaaagtttgtttgaatgtgtagaagaggnaaaagcaacaacagcaacaacacgaagatgataccaaaacaaggaccacaaaacaactagccatgatgggagacaggagttttttacatggaaacatggcacttgtgtttttatgtggcaagatctttatccataggcagagtatgaaatttcccaccaggctaagcaaataaagaagtccattgccttatagctatgtcagatcacagaatccttccaagtgctctatcacagtgtgccttatgggaagtttctgactggaaaatcttgtcattctaacactgaaaagtgcacacgcatgacaaaatgtagacaagatgcctcaaggtattggtagcaagcaagattttgccctttagttttcgaagacacctttctttcattatgcactcgggacaagaaaattaatagagcgttattccacagaaggcctctagccagagatcttgagtgtagtgcaagggactcatgctttgcgaacttgtccctgtgactagtagattcccccttttcctgtgtttaggatttagtagtgcataaagcattaatatccataaacatacctaggaagtttgttttgcttttaatttaaagggaaggcagtaaccacaaaggctttccgcttcagggttttttctttccttccaagtcttccaaggggctttttccagcgttcacaagcccagccaactctctttgcctttaatt

SEQ ID NO: 49903 - DNA, 342 bp, Homo sapiens
tcccaagaaggccatggactactcgtcgtccagcgaggaggtggaaagcagtgatggacgacgaggaggaaggcgaaggcgggccagcagaggggagcagagatacccttgggggccgcagcgatggggatacagacagcgtcagcaccatggtggtccacgacgtcgaggagatcaccgggacccagcccccatacgggggcggcaccatggtggtccagcgcacccctgaagaggagcggaacctgctgcatgctgacagcaatgggtacacaaacctgcctgacgtggtccagcccagccactcacccaccgagaacagcaaaggccaaagcccaccct

SEQ ID NO: 49904 - DNA, 404 bp, Homo sapiens
tttttttttttctttttttattttcccttgtcctatgctatggttatcagaaatattgtaattaagcaacaggtataattttaacaggtctttttttgtgtgtgtggagccacaagcaaaatgagtttataattgtgcaatatacagatatatatataaaaattcaactgctttgtgtgtctagtcggtgcgttaaataaaagggacagaaaaactaaaagcaaaactaaaaagcaaaacaaaagcccaggatagaggagacaaagcaggcctatgcgcacagtctatgtgttactggatataatcagggtcaccagggaagaacagctttgccacttgacacacaaacactgcggggagaggggctatcagtgggcaggagccaaacctcttggccttttcac

SEQ ID NO: 49905 - DNA, 1942 bp, Homo sapiens
tttttttttttttttcatatgcacgagatcaactgtttattgatttttttcctcaaatactacacatgtaaaggaactgttaaactgaaaaagacttgacaatttttggtaaatccgtagcacagaaatgaggatttctgctggtaagttctcaggacagacacagacacaggtccactttccaagcaagacatctgctcactggaaacggagtgaatggcatagctgggtgacggcggcgggcactgctgagtcacgtgaaacacaggtgtctcccacgttccccccacccccgccgggcccgcgtggcccccgcgtaactctggctgcagcacctgctcccgggcgactccgggcagcccgagacactcgtgcttgcgggtaagacccagcttctgtttgtgcacaagtaacacgacgacttgaaatctggcaactacttgcaaagacgcgggcacttttacagtgttctgctacggagccaggacaaaggccggtcagaagccggaccagcagtcagctggtgacgacgagcctccctccagcaggcaccacgtcagagaggccccaggccccactgagcccgggaggagacccagccggccagccagatgtgtgcctgaatgccacagacttcaagcagtttacaaacgaaactcactgttaaaagctgttaaatctcattaaaacagtagacgagtgctttagattctctgaatatcaaataatatatacagatagacactgagacatgacagtctaatctaaagcatctttacagatgcatttgccttgaaaagttagtcttctttttaactctgaatcagtgataaaattgttaatttgcaaaagagtacagttttaagcaagaatagagtgaaaataatttttaaatatggcgatttgggggagttcctacctaaggttctatgtaaagcttccattcagatgcccaaaagcacaaagagcattccccaatagaaacccgaccataacccggtcccaccttcctggcataattccttttctcaaacatctgcccacctgaggctaagcctacacacggcgtggctgagtaacagggtaagggaatagggagatcgtttcctcaagactggtgcgcatcaatctgtgccataatttaagtagaaatgaacaggtgtataaaaaagtataactgtacacagcctttaaattaaaaacctcaaaatcttcactcaaaatgggatgtaagcttgttcatttaagttgcaggtgatggactcgtcagagagagtaatcagtggaacaagatcagtgtaacccaccattgactcggaaaggagagacaaagtcaagaacatagagatctatgataggccaacaggcacagtgggcggggaggggcggctatttctgttgttctgcgtcttcctgcgctcagatccctccagctgcactcggaaaggtgccgagtcccaggcgaaatgaccagctcatctgccttccaggaacaccatgaagccaagagcaatggaaccatcatctcttgcaggaaaaggagtggatgcccacgtggctggctgaggctcctgggcccgccgcctccgtccccccgctggcctgtccccgactcatcactggatcgcctccacataatttgccgggtataggccaacttgcccgttgtccaagcgtcccttgcaccagccctgctcatcctcgtcctccatcttggtcagctcatccccagccttgaagctcagctcatcatgctcctgcccctcatagtcatacagggcccggactcgcacttccgtccccgaggtggcgtcgtcgtcgaatggattcgagtccccattggcatccgtggaggagaaggggttgttagactcatcgtctgaccagtcggtgggatagctctgggtcttctcgtagctgctcacactgctgggcttaactg

SEQ ID NO: 49906 - DNA, 380 bp, Homo sapiens
  misc_feature (1)...(380): n = a,t,c or g
ttgatatgtttggccaatggaatgtgacagaagtgatgttattccatttcccaggctagctgtcattctgcctttcttagattacttggctagttccacgtggctggggaggacttagaatcatggtgggaggcaaaaggcacttcttacatggtggcagcaagagaaaatgaggaagaagcaaaagtggaaacccctgnnnnnnnnnnnnnnnnnnnnnnnnnnnnnnnnnnnnnnnnnnnnnnnnnnnnnnnnnnnnggctccatgattcaatcacgtcctcttaggtccctcacacaacacgtgggaattttgggagatacaagttgagatttgaatggggacatagccaaaccacatcattctgtccctggcccct

SEQ ID NO: 49907 - DNA, 375 bp, Homo sapiens
ttcagatttaaacatttcatagaatctcaaatatgacttcaggtaccacattttacaggggaaattactgtggattcaccccacttaaatgataggtgaggtaaataataactgggatctgtaactataacctaggagtcttgcgttctagtctaataactgttctcaaaaatatcattaactttttgggtataataaacagcaaactgcagaataaattgcacatactaaagagtaagcaacaaaacaaattgcacatgctgtgcagtatgcaaagccacagaattatcaatctgagaaacaactgaatacaaaataaaacacacagttgtgttttgattaaggctccttttaggcagtttgcttcagccaagg

SEQ ID NO: 49908 - DNA, 445 bp, Homo sapiens
gtagattaaagaatcgtgtctgtcttacagttggggagggtgagtaattgagtgatagagtacttttttccagcagacacagttctttagaatacaagtcgcctcaagagtcttcttaatgagatttagccagttagcctgtgttccagacaaggttagttgcagaaaagaggagacgcctgctttcattctgtgacaaacttaccagtagtgttgcgctttcattctgtgacaaacttaccagtagtgtcgcttatcctggcctctcttactcctctttcatggggcattgatctctacctcaagcctcctttattgcatgggaaggattttcatgagatttctgccttaattctacattttccttctttagttagccactgaacaaaggatggaatttatcctatgtactcaaaatctcacaaaaaggagctagcatagctgg

SEQ ID NO: 49909 - DNA, 1119 bp, Homo sapiens
agcaccttgcctctagtggacaagggacctgaccttgtacacagccttccgtatttattaggcaaaagagatagtgtgaagggaagtggaagagggggtcagctgctcggtccagagtaggcttgcaagactgcattctctggatgtcccaatagataacctcaaggagcttggcgtcaggaagcaattgccctcagcaaaccttctggggcaggcacagtcatgagtttgcccacattctgtattcatgataaacagtttgctgtttgatcgtatagactcagtggaatgttggtcacgtcccatgggcctttggctctctgtatatcctcctttctgtttatgtattaattgaaggagtgtaaggccagggtgggcagctctcattttcccattgatggtccatccaactttacagactgtccctggtgctccagtagtttctcagcctcctgtgtggttttcttgagttgtccccaggttatgggggttgatgtcatgactgtagtcggccttcccaacatggcgcagtctattaacatcacggagctgaatctgccgcagctagaaatgctcaagaaccagctggaccaggaagtggagttcttgtccacgtccattgctcagctcaaagtggtacagaccaagtatgtggaagccaaggactgtctgaacgtgctgaacaagagcaacgaggggaaagaattactcgtcccactgacgagttctatgtatgtccctgggaagctgcatgatgtggaacaccgtgctcatccgatgtgggaactgggtactatgtagagaagacagcttgaggatgccaaggacttcttcaagaggaagatagattttcttaaccaagcagatggagaaaatccaaccagctcttcaggagaagcacgccatgaaacaggccgtcatggaaatgatgagtcagaagattcagcagctcacagccctgggggcagctcaggctactgctaaggcctgagagtttttgcagaaatggggcagagggacaccctttgggcgtggcttcctggtgatgggaagggtcttgtgttttaatgccaataaatgtgccagctgggcagaaaaaaaaaaaaaaaaaagtcgagc

SEQ ID NO: 49910 - DNA, 655 bp, Homo sapiens
ctgtgttcaatctctggatttgaccctctagctccctttcagctttctgtttctcattgtttgctttcttttcttcttccagctgatgttccacttgtttcttctgttgtttcaaagatttgatggtgtcattcagtcgactgatttttatggacctcgagttcaggactgctgcttgttcttggcacgggctctgaggcgcatgcagagaggaggaggcggaggaggacttgggggagaggtagagagaacgatcattagggctgggttgtgtgtgggctgtctcagctggcagaggggcacccagtccccgctgcgggaggaggttggagggctgccctgcagggtcactgcacctctgcccagagcctcttacctccagatccttcagggtagcagatgatgtagggctctccccgtggatacctgttgctgactacaagagatgagagtgcacatgaagatgttctgtcccactcagtatctaagccctctgacttcttttcttccccatcaactggcacaattttcttttctgcctatcttggaccctttgtcccataactcctttgtgccaacttctctcatggttcttatctccccaccacagcaccctgcggccctttcagtgactcctgtgccaagtgactgttct

SEQ ID NO: 49911 - DNA, 78 bp, Homo sapiens
ttttttttttttttgctacctccctgttggtggagatactcataccagccttgaaagacacgtatattactgtcacag

SEQ ID NO: 49912 - DNA, 772 bp, Homo sapiens
tttttttttttttttttttcctgggcgcagagggcgtttattggacctgtccttcccagccgctgcttgtccaggttcagcgctctccgcgggtgaggcaaggaaaccgaggagacgcccgagccgggtcaccacaaggtccgcctggacccccggccgtcacggacggtcctctggatgcagatggtccagggatctgggggtcctgggagagtggtgtgtggactgcgggcccagctggacaaaggcaggggcttcctcagaagctctgctggtcacgcaggcgtccggcccacggctttcaacagccctgcagggcgggcatgaggttaaccgcgccgaggagagtccagggcgagcggtggctcttgcagcagccgggctcaggggcagctgaggggtagctgaggagtagctgaggggcagctgggctcaggggtagctgaggggcacccgccaccagagcccaccgcacaggcagttcttgatccagcgctgctcccactgcttcaccgccgtggttctgttgggcgacttgagcatggtgacacagccgcacctggtgcaggccttgcattcctccgtggggcaagcgccaaggtgcagcctccgcaggtggtcgatcttgggctggcctggggccctggcgaggccgtcgagctgcagggtggcagcactgccaggcagcgtgggcgcccggccaaactgcagacgaaggggctgcttgggctgcaggcggctaaccaggccgtcgctggctggcagccagtcc

SEQ ID NO: 49913 - DNA, 557 bp, Homo sapiens
caaacaattactatttgaaaatctcttatgacatttttataatctactctgtttttatttgcatgattatgcttatgtgatgaaccatccatgattctgatattgtatttctttccagtattaacatgtgtattgtgtggccaactctgatttgtacaccgtattattgttgtaatgattcaactgttcctacatttaattgcagtttaattattatgccttttggggttaaatgatgtgaagtgtttccacctactgataaataccatatgaaaacatgactaaaagactgatttaagaaacttgttatttttaaaaatatgaatttcaaaagaaatgttctcaaagacacatgcatttattttaaattcaaaaaattctaatgaatttattattgcttgtactttaactttttttattgtagacaatcctaagtgaataatgtctcatgggagaacacatgatatgtgcttgtatttgtgtaatctgatcatgcactcaatggttggaaaaggcactccagtgctaagaaaataaccagaagccaatatatcgat

SEQ ID NO: 49914 - DNA, 376 bp, Homo sapiens
caaaattactggaaacacctatttctagtaagtcccaaagcaaaactacacagtcagcactgcccctaacttcagagatgctgattgcagttaaaaaatcaaaaagaaatgatgtgaatcagaaaataccatgttgtattgaaagcaaatcaaatagtgtaaacaccatcaccagaactctgtgcgaacaagctcccaagaggagggcagcttgtaacttacaaaggctgttagagaactcagagcatcagagcataaagcatgtgggatccaaagagacacatttggaattccagtttggggatggtagttgcaagcacctaaacagtttgccaaggaatgtttctcctgagtttgttccttgtgaaggtgaagg

SEQ ID NO: 49915 - DNA, 1153 bp, Homo sapiens
cgggaaacctgcactgacttttttctccttttggagggagagcagagaccatgtctgacatagaagaggtggtggaagagtacgaggaggaggagcaggaagaagcagctgttgaagagcaggaggactggagagaggacgaagacgagcaggaggaggcagcggaagaggatgctgaagcagaggctgagaccgaggagaccagggcagaagaagatgaagaagaagaggaagcaaaggaggcttaagatggcccaatggaggagtccaaaccaaagcccaggtcgtcatgcccaacttggtgcctcccaagatccccgatggagagagagtggactttgatgacatccaccggaagcgcatggagaaggacctgaatgagttgcaggcgctgattgaggctcactttgagaacaggaagaaagaggaggaggagctcgtttctctcaaagacaggatcgagagacgtcgggcagagcgggccgagcagcagcgcatccggaatgagcgggagaaggagcggcagaaccgcctggctgaagagagggctcgacgagaggaggaggagaacaggaggaaggctgaggatgaggcccggaagaagaaggctttgtccaacatgatgcattttgggggttacatccagaaggcccagacagagcggaaaagtgggaagaggcagactgagcgggaaaagaagaagaagattctggctgagaggaggaaggtgctggccattgaccacctgaatgaagatcagctgagggagaaggccaaggagctgtggcagagcatctataacttggaggcagagaagttcgacctgcaggagaagttcaagcagcagaaatatgagatcaatgttctccgaaacaggatcaacgataaccagaaagtctccaagacccgcgggaaggctaaagtcaccgggcgctggaaatagagcctggcctccttcaccaaagatctgctcctcgctcgcacctgcctccggcctgcactcccccagttcccgggccctcctgggcaccccaggcagctcctgtttggaaatggggagctggcctaggtgggagccaccactcctgcctgcccccacacccactccacaccagtaataaaaagccaccacacactgaaaaaaaaaaaaaaa

SEQ ID NO: 49916 - DNA, 363 bp, Homo sapiens
  misc_feature (1)...(363): n = a,t,c or g
acccattctaaaattaatggttagggggaattccacttctagtaaatagctccaattggactaattctcctccaaattaacagtcattctggacaaaatatttatttaattgttaagaacactggagcacgatccagagcaggcagatattggagggcagtagacacttggaagaagagaacgacactgggtgattttcctgtttcggccttttatccngnnnnnncnnnggatctaaaactctgttaggaaacctgcngtcttactggcctgaggaaccagaggccngagttcgggacaaacaancctctggaaagtgaggaagaaaatcctgaaanggagagccccaagttngtnnnatgg

SEQ ID NO: 49917 - DNA, 411 bp, Homo sapiens
cccactcccctggagcaactggggttgggccttgggtaaccaagggcaggggctctcaatcttggctgcaagaaacatctaggagcttttaacgtatacctatgggtatattttaaacatatacatagcttttaacatatacatatagggatgtctgggtccatccccaaataatcagtggtctgggttgagacccaggcatcagtattttttcaaacctctcctattgattccttatacaaccatggttaagaaccacagccctttggataccagacagtcctcacggctgacaacattaccgatggagaggactaaaactcaaggttggaactgttcctgtccagctccactaccagcaaaaacactctgcatcccattattcaagcataattggataagcattctttg

SEQ ID NO: 49918 - DNA, 5431 bp, Homo sapiens
gcaagaccaaggtggctgtgctggagatcctgggtgctgtgtgcctcgtgcctggtggccacaagaaggtgctgcaggccatgctgcactaccaggtgtatgcagcagagcgaacccgcttccagaccctgctgaacgagctagaccgaagtctgggccggtaccgggatgaagtgaatctgaaaacagccatcatgtccttcatcaatgctgtcctcaatgctggagctggagaggataatctggagttccgcctacatctacggtatgaattcctgatgctgggtatacagcctgtgattgacaagctccggcaacatgaaaatgccatcctggacaaacatttagacttcttcgagatggtgcggaatgaggatgacctggagctagccaggaggtttgacatggtccacatcgacaccaagagtgcttcccagatgtttgagttgatccacaagaagctgaagtacacggaggcctacccctgcctgctctctgtgctgcaccactgcctgcagatgccctacaaacggaacggtggctacttccagcagtggcagctcctggaccgcatcctccagcagattgtcctccaggatgagcggggtgtggaccctgacctggctcccttggagaacttcaatgtcaagaacatcgtcaacatgctcatcaacgagaatgaagtgaaacagtggcgagaccaggcagagaagttccggaaagaacacatggagcttgtgagccgtctggagaggaaggagcgggaatgcgagacaaagacattggagaaggaagagatgatgcggacgctgaacaaaatgaaggacaagctggcccgggagtcccaggagctgcgccaggctcggggacaagtggcagagctggtagcccagctcagtgaactctcaacaggccctgtatcttccccaccaccccctgggggcccactcaccttgtcttcctcaatgacaaccaatgacctgcctccaccccctcctcctctgccctttgcctgttgtccccctcccccaccaccaccccttcctcccgggggacccccgactcccccaggtgccccaccttgcctcggcatgggcctgcccctccctcaggacccctaccccagcagtgacgtcccactcaggaaaaagcgtgtcccccagccttctcacccactgaagtccttcaactgggtgaagctgaatgaggagcgtgtccctggcaccgtatggaatgagattgatgacatgcaggtatttcggatcctggacctagaggattttgaaaaaatgttttcagcctaccagaggcaccaggagctgataactaatccttctcagcagaaagagctgggctccactgaagacatatacctggcttcccgcaaggtcaaagagctgtcggtcattgatggccggagggcccaaaactgcatcatccttctttccaagttgaagctttctaacgaggagatccggcaggccatcttgaagatggatgagcaggaggaccttgctaaggacatgctggagcagctcctcaagttcatcccagagaagagtgacattgacctcctggaggagcacaagcatgaaattgagcggatggcccgtgctgaccgcttcctctatgaaatgagcaggattgaccactaccagcagcgactgcaagccctcttcttcaagaagaaattccaggagcggctggctgaggcaaagcccaaagtggaagccatcctgttggcctcccgggagctggtccgcagcaagcgtcttagacagatgctagaggtcatcctagccataggcaacttcatgaacaaagggcagcgtgggggcgcctacgggttccgggtggccagcctcaacaagatcgctgacaccaagtccagcatcgacagaaacatctctctgctccattacctgatcatgatcctggagaagcattttcctgatattctaaacatgccttcagagctgcaacatcttccagaagccgccaaagtcaacctagcagaactggagaaggaggtgggcaacctcaggaggggcctgagagcggtggaggtggagctggagtatcagaggcgccaggtacgggagcccagtgacaagtttgtccctgtcatgagcgacttcatcacggtgtccagcttcagcttctccgagctggaggaccagctaaatgaggccagggacaagttcgccaaggccttgatgcacttcggggagcatgacagcaagatgcagccagacgaattctttggcatctttgataccttcttgcaggccttctcagaggcccggcaggatctagaggccatgaggaggaggaaggaggaggaggagcggcgggcgcgcatggaagccatgctgaaggagcagagggaacgtgagcggtggcagcggcagcggaaggtcctggctgcaggcagctcgctggaggagggaggagagttcgatgacctggtgtcggccctgcgctctggggaggtcttcgacaaggacttatgcaagctcaagcgcagccgcaagcgatcagggagccaggccctggaagttacccgggagcgggcaataaaccggctaaattattgacctggggaactagccacacaggaggccgggagacagggactggtgagaatggggctgagtggaggaggtggtgatatttaaaccatttggtgcttggtttagagccttgggctgggtcctgggatggggggctgtgtgtggctggaccaggtgtctccccacgcttaccttaaggggctcctcttatctccccttcacatgattccttctgtgccctggccccaggtattattctgaggctgccttggatggcctcaggccaggtaaccccaggctgaaggggccctgctccccatcccctaccatgggcacccatgtgctggcacagaacagttccagatctagactggagaggtccacagccttgtccagagttcctgtgtagcacggggagcaatgatggagggagcccctgagagggaatctggtgagggaatccagactcccttctctcaaggggaggctcaacagaacattgacctgggggcaaactttcctcttgaatgggaacagaggaggcattatatattctagttagatcagctctggtaggttccagagaacagtcaatgttggaaggatgatgcagggaccaaagccatcaggacagagtagcagtgtctgtttcccatgtcacaagtcctctggcctctccctgcatgtcttaagtatctttcccttccttctctaccctcacctccatcctgtctactaatccacagtcctagaagactcaccttgggtttccacagctatggctcactaccaggtgcttgatgaatctggcgaggggctcaagacagacctcatgcatcaccacacctcatgccttttgggcatctcccatgtccccatctcctggacacctggccattgttgtgaagccagacagtgacctcaaatgttgccttggagtcccctacagcccctcagcagagggcagcacttgaatgcttagctccatcccatagttctctacttcatataaattgctcaggccctcccaccccttctctaacactagcttcaaggcagaagccacagcagcctctgtccagcctgcaggtggccacttggaaccatgtgtccactggcgttggggagttggttcctgagaggtctgagggccagagctgccctctacattaacatgctgtctctaagggtggcccctcctctcaggcgttcagatggtgcgaacagcagagcaggcaagggaaactggggagatggggatggaggaggaaggctgatatcctctggggagcacatcacctgaaggtgccaaggaggaaggctgagaggggggccaccccatttctggtacccaatttggttcttcagcccaacttgcaaggggttccttctggtcctcccatccactgccaccttccattttgtccatctcatgctggccttggtggatgggatggctgtatctagacaaaatttttctaaaactccatcaaggctcttattcaataccacgttccgagttggcctttcatcttctttgagactggccctgcctaacctctaccatcaatgagctcttggcccttctgcccttccctgtgtttctcactttccaacctaatccctggctcaggggttattgccagtggagactggtgagctggggcctactctcagctgcctatcttctgcctttcacttgcatccaactcctggggctgggaccgtagtagctgcgggggggaagaaacacagggtcggtgagcccagcatgtgcgttggtttgagggggcgggcggtgtgtgtgtgttctggtgggagggatctgagcaagtgcaagcctgggctgacacaggtgtgaagaggccatcctggaacccaggtgagggcaagatgaaggcttccaggcagaacagctgcagagagtttggctatatgcatctgcagccccaagagctcccactgcaagacaagtgttggggaagatgggaggttgtgggtgaggcctctaaaggtcctctcccaaactgaccaggctgatgtcaacctaaccccctcaggggcagggaacaggggagggctccacaagcgtgtctggcattcccacccaccatggaagactggatacgcacctggaaacaaaaggactatggaagctgttcaagatacatttgatcttcagaaaagcagaatttggttcaactgttgacagaggacacaaatacgttgttccagagctcagccttctcactctaaaagaaagatatttttctatttattttctacatctggccagtggctctggtgctagatgccactgtagccagatctccaacagtgccttggaccatggactcatactcaactgagtaagaaggggctggtgcccagtcggggtggctgagctggtccttaataggttgtttcttggtcttgctttcttcatgccctccccactgctcctgccacctttagataagtttctctagctaattttgtggccaatgtaaaattcgtcatcaacctaacaaacacaaccttctcagcagcatttctcccctgtgatggaaataaagtgtttagggcagtgggaggagaaaattctccaggtgaatggggaagggtctgttccagcctctccctactcccatcccatttccaccaactggggaactgtgactatctatctcccccgacttctaccagggatgccttcacgccaaggctgttctcaccagctgcctcagatgacaaatgaggctaatggacataatctacagtgtcctttttcacttgcaccttttttataagaatatattgtaatactaaaaaatattaaattcataccatccctaccc

SEQ ID NO: 49919 - DNA, 602 bp, Homo sapiens
ttttttttttttttgtgtacaaaatacttatgtatttatgaatccatgaccaaattaaatatgaaaccttatataaaaagaggtgtggtttttgtctcccgccccccaacctcccctcctcctgtgaatcagctctgagtgacaggaaaccagggctgtgctcctgctgggactccttccttcctccctcccctctgttttcaggcttggcctcctgggggtgtttcctgaatccgactccccagagtttaaagagctaggttcctggggactgggattcatacctccttcccctctctctcctgcctgctcctccctctggggacagggacaccaatgttggcctggctcacccacagcctcccaggagagttctctgggctgccgggttgcatctggttccgacagctctcggggaatgggcggtgggtccctgaagttggggggccggccctgtttctcagggaatcccgtggtcactctcctatggcttcctacagccctgggtcgaccttcgctttctctgccccggccttccctgcatccccaccagggtacccaggttgctcagcgcttcaggcacctaggagacctatttcccg

SEQ ID NO: 49920 - DNA, 249 bp, Homo sapiens
gtttgtcacaggcattccactgggaaagcaaagtacagtgaagaatgaatttatggtatagttgaacccagtggcagattgtacactgctagcactgctagcacacagtagcaaagcaaacagctacattatctttaacataaggcatgtagccatattttcatatagtggtatacaacacagtatcattgcaaatgcagtttacagggatttttgatatactggcttgggacctataagattcttctc

SEQ ID NO: 49921 - DNA, 1954 bp, Homo sapiens
atcatcattcatttatccttttatttagtggcttagatcctagaagatagattccctataaaatcattttagccacgaaatattcataagaaaccaacttcaaatgttaatgaggatactgaagttttttttaacctaaaaaaagtggcaattttaggtaaccataaagctgaggcaaaggcagtttgggttcttggaaagaatcctgcctaccatcttcagtggcctctgggcacaaagcacttatgatcactgcagaggtggagcaaggtaaaggactgtgtcagcagttcatgttgtgacagcagcagcatctgcagaaaacgcaggtcatataccttggcttacacaaggaatgctatgaaaaatgagccaccaggtgggagctttaacataggtaatgattagtgaaagcttcttagaaagtgagaatttgtaatttctttattaaacattacattcagtgtaaaggctttaaccatcataatcaccatgatataatatgtgagtatgtatatgtaaaaaaatacccattgaacataaaattatgttttgaaatctatgcaacatgaaatatagtttgatataaaaaacccaactaatcagaaacatgaaaaccagtatgttttaataaaagcctgttgctggttctggaataactgtggcatgcatgttcctagtcatgttggacttctccttcagctttgattggagtagtgtgtgttccacaatgccaattctaatgtccatctctacagtttcttgcttcagttttgttaagctctgtttaatcttcaccaaaggagcaccatcagtcatgctgctgcccttttcttccatttcttgttttaccttttctaattcttccataacctcagagaggagtctggttctttccgtcactcctccatttccctgctggtatcgctcctttgcctcactcagctgggcttgagctgcacgatattcttgaaccaaattctcaagctgattgttgatgtacttttctcggctgctgatcttttccaaagtcctagtaatttcattatggagtttgtccaaaaatcccttgggtctcctttagagcagattcaattccacttctgtgctggtgcatttggtcaacatggattctccaatccttattgtcagtcctaatcgtgactttcagttgcggtagtacacgttccacttctaggctccattctgcagcatctgttgtggattccaaaatatcttcttgtttggcagtctcgttcatatccaagtgatatgtctgggcctttaaaacgttgagatcaataaagttttcttcattatctgtctcttcacaaattcttcatccactttatttaatgttaattctgcatcatcttctgcaacgcgttcttcttctaattcttctactgggtatattggccttttccaggtgaaaccaatatatttcaatgcttcttcagcgaagcaatcaagaacatagcatacatgttctccataacctgactttaattttgaaggaggaaaatctgcagttcttccaaatgaccgaagctcggatagtatgttagatattgttgcattagggtcatcatattcttgaggctgctcaaagggacgtcccgctttattaatcaaccaagcagcaagagtacaaaacatgtagaactgttcgccagggttggtaggcagtgcaaaatagtgtctggacggggccttcaggttgctcttccggaggaactcctcctcgtagcggagcagcttcagcttctccaccaagtcctccatcaccacgaacatgtggtaggccgcgccgggcccccgctccaagaccacttccccggtcccttcgccacgggacctaggcaccccatcttccaaacccgacgtcgtgacgacggccagagcagcagtcatcgcagaacgacagagtccatgctgctcaggcccacagacc

SEQ ID NO: 49922 - DNA, 1094 bp, Homo sapiens
  misc_feature (1)...(1094): n = a,t,c or g
gtacctgtgggtgaatcccctaaatcacgtctctgtgacttctttgaccctattgctgaccatatccacagcgtggagatgaagcagggccgtactttgctgcactgtgctgctggtttgagccgctcagctgccctgtgcctcgcctacctcatgaagtaccacgccatgtccctgctggacgccatcacgtggaccaagtcatgccggcccatcatccgacccaacagcggcttttgggagcagctcatccactatgagttccaattgtttggcaagaacactgtgcacatggtcagttccccagtgggaatgatccctgacatctatgagaaggaagtccgtttgatgattccactgtgagccatcccacgagcccctgcattggagtcagaggtacagatctattgttgatcttacaccaagatccaaacttgaacattctacttttgttgatacagaaaaaaacagatgatgccttttatgagcacaaaaaagagttgctgtagcttttaactttataatccattttttttaagattaaactaattgtgagatggtgaagataaattttctgccctgtgagtgacactggccaggggataggttgaggcagatggtgcccagaagaaagagggcagcacccattgcacatggcaggcctggaatcctgcagccctccccaaaaacagattgacccaggaatgaatctgctacaattccacctcattctttcacacccagagccagagccttaagcatcatggtacctcttgcgcttcttacagtgagtgccaatctactagataaatggccttcaggcaggtgctccagggaatcctgggggggtcccagggccacctctggtttccaccttcactattaagtgggcccagttctggttttctagattgtacttatggcattaaggtagttttttaaaaggaaaggcattccactgttgttaaattttttttgtctttttttttggaaactgttccntgcttntgttcacccatccggggggnttgcagtagtnttgatccaggggctcantgtaggccacaacnttttnagggttcaagngatccctt

SEQ ID NO: 49923 - DNA, 840 bp, Homo sapiens
tttttttgagtgaaaatgttttaataaaaggaaactagaaatcaaatatttgtataaggacagatttgaggtttttctgtacttttaatgagctagaaaatgcatactataaatagaatatacaaatgattttacacaaatgaagcattaaaaatcacaaatcttatatttggttatccacagtctataaaataatgttcccaaattatatagtttaaaatacacaatgtttcaagttgcaagacaaaaccagggtagttttggccctaaatcatagctaacataagtaggaattataattaattttataattgtgtttaaattttaaatactctagaatctgaaaatattaaatattaaatagatggagggatcaaattatcaagttttttaacaaaattgaggtaaaaatctgcattaaattacaccaagaaaaacatttcctaaaacattgtttccataactcattataaatatttcatcttctgaaagtactctttgattacctctggccttctgggtctggtaattaagttgacttaatatttgcacatagctactgattactcaatacaggcctatcagataaaactaaaatgctgcaacttaatcagaatgatgcaatcttgtcttatataaatatacaaatcacagtatgctgacactagataacttcagctttatttgccaaaggggatttagaatatactacaaaattgtatataaaataaccctttacaaggatttactaggatgactgcaaagaaaggcaaattaaatatacctggtcccatataagaattgttgcctaacctcatatactaatttgaatatgaagac

SEQ ID NO: 49924 - DNA, 1026 bp, Homo sapiens
gaatgctaacaccattttgcagttttttttttctattttaaacatttttcttttcactgccgaccccctgccttacgattttattggaaagcaaggacctgctattatttgttaatttgccatcatttatgtatattttggaaggtatgagacccacaagcacaatgatcatttttatttgtttgtttgtttgaaacttcagcagaatagatatctgcatgctttatgaagttgttgcttcggtaagagcccatgggatgccagaaattaacatttctttgctgccatgggctgatgatgctgctattagataaagtttagctgtggcaccaagtcacatcattttcatagaaaaagattacttgtagcttattttagaagtatgaccttttggtctgtttgattgattgattagaattgcaataaaagaaaagcttgcattcataaggcattcattctgttgtaaatgttcaatatatttattttgagagcaaggacctgtggttgtaaacaggtgtggttacaggtgtggttatgtatctgagtgttgcggtcatactctcctccagtccaatcctgagcatcttcatcttattaattagctgttcgtttctttgtgcactcattcttttatttttacttctttttaatgttatggtatccagttgtttccagtagcagtttcttgaacttctggcctgtactactaactgcagacctccagagtcactggcctttctgtgctctacatattattttaggggccacatcagttgccaagagcaacatacataccgacctggctgaattattgccagtgaaaacaacctgtacgaagcctttgctcaggttctaaaatatgtttgtccttgcacgaattttgtatatttcaaatatttctgtaaaggtttcttcttttctgttagagtgtggtgttaagccagagtcagtggtttgtgttctcattaaaatgtttgtttaaatcctatgtccaattcaagcctatctaactacaatttgggtagg

SEQ ID NO: 49925 - DNA, 397 bp, Homo sapiens
  misc_feature (1)...(397): n = a,t,c or g
agcaaatcttgattaattgaagaaataaaatatttcggataaggtttcataatttacaaatgggaatttcatttataataataaatatgagtgtcctttatttgcctagtagaagtgataaattgtgttatatatgataatttatataaaaccactaattgttccgttaagcttcacagaaaataaaacctctattactagacatttatgtaacatcttgctgtactaaatacagcaggaaaatctactctttaggcaatatataacacagtatatgcttttttatatattcaatgttaggcccaagtctggaatttacatttggacttaaggcggcacataggttatttggctaaaatgctatctttgctnatgggngggcctnattggggntttc

SEQ ID NO: 49926 - DNA, 105 bp, Homo sapiens
gaataatactaccttcctcacagggttggtgtgaagatgaaatgagctgacatatggaaagtacttttaggagccatgtcttgcatgtagtaagtatgatgtaac

SEQ ID NO: 49927 - DNA, 714 bp, Homo sapiens
gcacaccattgctgttactaaaatacatgcactgctcattcttgacatagcttgggtgtgggttcctcttgttttggttattttgtgtagcagtttaatcagtggataactgagcctgtttcctcttagctttctagacttcttaacagaaaaaacagtttgggttcaatagcattttatgattctacaatattttgtcacctagctggaagttgcaataaaaattccttatgaaatatatggttttcatctgtaattgaaggaaatcatagaaagtttgctgaaagcaaagggctaagcttatgaaggaatgcctcctttgttacacactcaagaatttgcagcacacaattaattgcagccatagtacctttttgcgtaatgtttgggatattcagtagcccaggattgctacaaaaaggtcctttgagaaaattaatttgtgcttgcttttatcccctctcagaaagacatcactaaaggcccattaaaaatctggccctaaaagttcaacttttgtagagtttattgttcagagaggtttaatcctatgtggtagtctatataagtgatgtatgagttgagttatgtaaattttgtcattgtagtgtacatggagtgatcattttactaacataaatattttctatgtgtgtttcagtggatgacaatcgagcagcagaagaatggtgtgcctaccctttaatgctgcag

SEQ ID NO: 49928 - DNA, 475 bp, Homo sapiens
  misc_feature (1)...(475): n = a,t,c or g
aattcggcacgatgggagttaggtactttttatacagattccaaatatgccattttagtattccacaattatgccaccatttggaaagaaaggattgttgacagcaaaagatacccctactaaatatgggtcacagatattttaccctaccctaggctatccacctaccacagaaagctgcagttcattgctggggctaccagaaatgccaagatgagattacctagagaaacaggagggtcggccaagcagcaacggccaccaccctttccggggaactccttatggcccttatcccaactttgcctaacaacctgcccaccctgcaatggggtatcaaatgtgaatatactcttaggacttgaaagattgtataaaattggggagaggttctttattttcccccagggttcttccagcaggaaaggcaataaaggggcactncattanttttngttttcttgttggggagagg

SEQ ID NO: 49929 - DNA, 198 bp, Homo sapiens
  misc_feature (1)...(198): n = a,t,c or g
gagatatgctcagaggctaaaaagtaagtgaaagctagactcagcactcagagcctatttttgtcttgatggcacctactgaaccagctaaacctgggcttatggtttcattgccttcgcagacatagaggataggagactaagctcagtctatgaggagactccaccgagtgtntgngccccctccccacccctact

SEQ ID NO: 49930 - DNA, 211 bp, Homo sapiens
  misc_feature (1)...(211): n = a,t,c or g
agcaagttcagcgtctccagggacttggctctgctcctcactcccttgaaccccttaaaagaaaaagctgggtttgaagctatttgccctttgagtcatgggagacacaaaaggtatttaggggtacagatctaggaaggaagagagaggaacacctaggatcccaacttgacccagggngattttcgggggntgggcctctnaggtncct

SEQ ID NO: 49931 - DNA, 863 bp, Homo sapiens
catttctcacttcctacgtggaggcctttgtttccgagttgctgtctgtctaacgcttgctgacttgcgtttcaggtgccattactgcaagtcatcctgccacgtgtcttccctccgtattccgtatgcctgcaagctgctcttccaggaactacagtctatgaacatcatccccaggttaaaactgtccaagtacaacgaatgaggatggaaaaaatgattattaaagagaacaagtgatacatccaatgcaacggaaagcagaagggatttaggactacgtctcctcctgtgaagaattcccttgcgtattctctctctaaaacaaccaaaaaaaaatggagaggctttttatatactctaagactggctaaacaaccttgatcattgagcctcgagccatgggagagatgcctgcccctgtggactgccaaggctgcttgattccacagatggatgtgacctaaaggataaataagctattacttatgtgctgatctcttgacattcactcattagaagaccttactccttcaagcaaatgtttggggtcaaatttaccatatcttctggctaaccatattcaagattcttctgaaacttggaggatgtaaagaatccatttgatttggtcagcctggcttttgtcgtggtggctggctcggataaattttcccaacaattaaatcttgcctttacacacccaaactttgtaattttagtcttggtgaaatataatgaatttgttcctaccttgtcaagcaagaatgtcgtcttctcctatggactcaattgctattattttaaacctgcatgattgtaccatgcaatactattcgttaaatatctgaatctaaaaaaaa

SEQ ID NO: 49932 - DNA, 365 bp, Homo sapiens
aagagtttgaaatgtcattttgggaaaagagagccagtctagctagtaggctgattgtgaagaaaatctaataccttatctttatctcaaacctctgtacaactttattttcattgatgggatactttaacaaaaatgaaatttttttttggtttttaaaatatgagtgattatgacctctttggggatcatgcttcaaaaagtcagaaacctagagacaaaactgtcattgatttttaagaagaaacacactaggtcaaaagaagatgtcctggaaatacgaagtactctttaaaaaccatgcatttggagaaagtaattgtttccttgaaaaacatgattaaaaactaaaactgggatgttcc

SEQ ID NO: 49933 - DNA, 653 bp, Homo sapiens
tttggtattttacattttattttgttttttagacaaatgttcattgtgactcacagaattgatttcatgcctcactaatgggtctcacatataccatgaaaaatactgatatagagacattttgtgcctttgctgtgttggtaccttgagtatgtctgcttgatgatgaaagagactggctgatctgctagactgttgacttgtataagaacatcttgaagtggtgggaatttatcttagattttcattcctggatcatttttatggtctgatccagtgaggagccaatgaggttttccatggctaggtcaaatatcaggttggagttgatggtatatttttatagaactttcctggaatgcatccttgaccttaaaaggtgtgcatctgggagagaattcaggacctggtagatgcctttgacttaatcttggttagatgcttccttgaaagatgacatgttacaaatagttaaccttggcctggaatcgttcgctttagcggactccggtccactcccatcagaggatgcccttctttcgcctcacctccagcccagccgcagcgacccggccgggcccagcgctgcaagcctcaggtctctccagcagagtgcgcctctgctctccccacacttccctccgcaacaccac

SEQ ID NO: 49934 - DNA, 494 bp, Homo sapiens
tcttgatcaattagaaaatgtccctgtagaggaagaggaagaattgcagtcacaacagctactcccacaacagctgcctgaatgcaaagttgatagtgaaaccaacatagaagctagtaagctacctacatctgaaccagaagctgacgctgaaatagagcccaaagagagcaacggcacaaaactagaagaacctattaatgaagaaacaccatcccaagatgaagaggagggtgtgtctgatgtggagagtgaaaggagccaagaacagccagataaaacagtggatataagtgatttggccaccaaactcctggacagttggaaagacctaaaggaggtatatcgaattccaaagaaaagtcaaactgaaaaggaaaacacaacaactgaacgaggaagggatgctgttggcttcagagatcaaacacctgccccgaagactcctaataggtcaagagagagagacccagacaagcaaactcaaaaaaaaa

SEQ ID NO: 49935 - DNA, 779 bp, Homo sapiens
taagactccagcgttgctgtcttgccagtgccggcccccgccagttcagggacagaattatagtgtttgggattcaaaccaacagtctgtcagtgtacagcagcagtactctcctgcacagtctcaagcaaccatatattatcaagggacagacatgtccaacagtctatggtgtgacatcaccttattcacagacaactccaccaattgtacagagttatgcccagccaagtcttcagtatatccaggggcaacagcattttcacagctcatccacaaggagtggtggtacagccagccgcagcagtgactacaatagttgcaccagggcagcctcagcccttgcagccatctgaaatggttgtgacaaataatctcttggatctgccgcccccctctcctcccaaaccaaaaaccattgtcttacctcccaactggaagacagctcgagatccagaagggaagatttattactaccatgtgatcacaaggcagactcagtgggatcctcctacttgggaaagcccaggagatgatgccagccttgagcatgaagctgagatggacctgggaactccaacatatgatgaaaaccccatgaaggcctcgaaaaagcccaagacagcagaagcagacacctccagtgaactagcaaagaaaagcaaagaagtattcagaaaagagatgtcccagttcatcgtccagtgcctgaacccttaccggaaacctgactgcaaagtggggaagaattaccacaactgaagactttaaacatctgg

SEQ ID NO: 49936 - DNA, 631 bp, Homo sapiens
tttttttttttttctttaattgattttatttttttacataaaaagttcagtaaaaattggataaagtaaagtgattttaagcagtaaatcaatcttatcaacatagcacaaggctggccaaaaccacaaggcagcctgctttggaatatttacatgataacaaattaaaccttgcaggagaacttaaactgtccttacaaagtcttcctgtgatcctagcatgtagaggctaaaagcaaaacgaaaaccaaacaaaaaccaggaaaaaacaaattattttcaatatattcacatatacattaaaatataatacagatcatcagggtaaagggttgtgggtggggatgcgcatgggtctgtgcgctgacagcaccgccaaggagaagacccaggtttaagagtggagtcaggtctggccagggtcttttctaagcccttgcacctctgatggcttctaaccacatgccaacagctcacaactaggtaatcacttgtagatggagttcatttttgtggccttcagttgacatctgcagggttgaattccccagggtgatgtatcatcagtagcacagtgctgacaggggtgggacagaaaggcccacaggatttcctctccctagagtctgtc

SEQ ID NO: 49937 - DNA, 487 bp, Homo sapiens
tttttttttttttgagggggcggtgtgactgtatttaattgaacctcaagtgaattctgagaggccggagtgtgacttctcttgccctataaatcaggtcccctgcagcaagtcagctccatctttcacagggctgggctggctggatgcgctggcagccccggctggagtaagagcctggctgtcagccacgcaggtgccctgcacaggacctggggctgggacagggcaccaggcaggcaggaggcctcaccccggggtgcagaaggccccaggggtagcagtttacagaagatgtctcagtcctgtaagtaacaaacagaaacaagccccagcgcttcccggtcccctccccgtggcccgcaccaaaccctaagctgtctcctaaaacttcagctgtttccaccaccacgctgacgaccagaaagacaaaccaaaacccatatgaagggcaatctttcaattgcttaaaattaatcagtgcaaa

SEQ ID NO: 49938 - DNA, 700 bp, Homo sapiens
tcactaatttttttaatccaatcacatttcatactttgctccagtgtagccaatcacattccaggtcccgccgcacccagctccaggcagctctcactccaaaccccacccccaacccagtttcagcctatcagtttccaagttctttctagcctcaaccagtttctgtctctgcttgttctgcagcccgctgaactacatttcccaggaggcgtcggggctgcgcgtacaacttccggctgtaaagatggcggcttcctagtgagtcggcggctgatttagaaggaggttcaggctacggtgagccgaaggtgggtggtgaaagcgtgtggggcccgttcctaggggcccagctccctttgccccaagagatccagctcctcgcctttcctggggcttccgcctttatttctggtttctcctgcagtgtagcctccatccttcttgctgccgctaaagccttgtttttcttagaggtgtggggactgcaaggcgctcaaagaccatcttgggaagcccgtgcctatttcccagatagacaaactgctccattcgcgtcctgtttctctccaaggggaaccacagtactaatattttgcttctccctcatgcagacacccgctagggagtagggtgtcctaggaggttattatttcccttatttcaccaagacatttttcagttttaggtaacagaaaac

SEQ ID NO: 49939 - DNA, 918 bp, Homo sapiens
  misc_feature (1)...(918): n = a,t,c or g
tttaaaatggaataatttaagctttattactaacatacagataatagtatctgtatatatttataaataaatatacacatattgggaatacatgcccaaataccatttattcttaggtgcataatcaaataaggaaggctgccattgctttcacctgctaagtgggtctccaagcccctcttggggaccatgactagagaggggcatagtgggtaagacaattgtgggctccagagcctgaccacctgggttcaagcccccgatctgccccttcctaagctgcctgaccttgagcaagtgacttcacgattctggcctcagctttttcatctgtgtaatgaaaataatagcagctgtcacttcagagggctgaggtgagggacgcattagttgatccaggtgaaacacctgagaatggtgcctggtacccagtaggtgctcagtgagtgtgagctatggttaattgtcctaacactgccgtgcaagtggggaattaggtgcagacagctgaaataatgaggtattagtcatgagtggagctgcgattcagaagtcggttcnnnnnnnnnnnnnnnnnnnnnnnnnnnnnnnnnnnnnnnnnnnnnnnnnnnnnnnnnnnnnnnnnnnnnnnnnnnnnnnnnnnnnnnnnnnnnnnnnnnnnnnnnnnnnnnnnnnnnnnnnnnnnnnnnnnnnnnnagcacccggttctcgaccacagccgcacctcggagctctgagcatttcctcctctgcaagactgaaatacttctattcagtcttgaatagaacagttaagagtagcatgcaggtcacagggctctcccaggagggaaggaggtcgcagtccaaaagaaggggaggtggtcactgctgtccgcctcccacaggggcttggagagaagtccacccacgcgtccg

SEQ ID NO: 49940 - DNA, 1090 bp, Homo sapiens
  misc_feature (1)...(1090): n = a,t,c or g
cgcaaaatggctccagaattagagtaattatgagatggtgggaaccagagcaactcaggtgcatgatacaaggagaggttgtcatctgggtagggcagagaggagggcttgctcatctgaacaggggtgtatttcattccaggccctcagtctttggcaatggccaccctggtgttggcatattggccccactgtaacttttgggggcttcccggtctagccacaccctcggatggaaagacttgactgcataaagatgtcagttctccctgagttgattgataggcttaatggtcaccctaaaaacaaccacatatgcttttcgatggaaccagataagttgacgctaaagttcttatggaaaaatacacacgcaatagctaggaaaacacagggaaagaagagttctgagcagggcctagtcttagccaatattaaaacatactatgaagcctctgatacttaaacagcatggcgctggtacgtaaatagaccaatgcagttaggtggctctttccaagactctggggaaaaaagtagtaaaaagctaaatgcaatcaatcagcaattgaaagctaagtgagagagccagagggcctccttggtggtaaaagagggttgcatttcttgcagccagaaggcagagaaagtgaagaccaagtccagaactgaatcctaagaaatgcaggactgcaaagaaatngggtgtgtgtgtgtgtggtgtgtgtgtgtgtgggngtttaatttttaaaaagtttttattgagatacaagtcaataccataaagctctcacccttctaaagtgtaccattccagtggtgtgagtatattcataagatttatacttggtgtctattcataagacttatatccagcatattcataactagagccatatcacagatgcattcatcataataattccagacattttcatcaccctaaaaggaaaccctgaaacccattagcagtcattccccattcctccaacccattctctccctaatccctagaaaccaccaatctgctgtgtatttcatctattgccaacatttcatataaatggcatcatacaataaaaaaaaaaaa

SEQ ID NO: 49941 - DNA, 528 bp, Homo sapiens
tttgataatagcagctaacactggtcactccaaagcactgtttctataggaacattgaagctattaagatgttttgattatcctaattacataatgaccgatttgagatagaggcctttaaatacattccatgccctccccagaaaatagtctgtgggagtcagttgccttggtgccaggtatgtgttctgatgtaggtcatgagtctttctacttaatgggaagggaagaacatttgtttccaggatgactttctggccagaataccggaaagcttttaggaagcttcgttcacatgctatttaaatgcacaaaatagacagtaaggatttatctgttcagtttttcttcccagtgaattaatttcagcttatatgggtgtcttcatttgaacatgaggaatattaggttatattttcagcagtggttttttcctttgccctttaaggagtggggataatgtccacggtggcccagcctcttgctgatggcaccttccctgcattgctgctccgatgatgtggttct

SEQ ID NO: 49942 - DNA, 439 bp, Homo sapiens
cttcatggtttttggatcctgacaactatcaaaatgtggcaagcagcccatacctgcctggcaggaagttatatttagtcaaattataatgaagaaaggaacctctcttgagtacaaagagctacctacggtggtctggagccggaggaccacagcatcaaaggatataagatgcatagccaactgaggaacctgagcaattaaagagatccacagttaagtcacacttaactggcacttgtggaagccccgcaaggcctgaaggagagctgacataggcaccccagagagtcagaatctggatccgatcttaataaggccatgaacaccagtggagaagaggcagaaacaccaatggataaggaacattcacatctttcttcccacgtgcctctaagtgccagtgcaggccccacaggccaagctacagggagaaagg

SEQ ID NO: 49943 - DNA, 959 bp, Homo sapiens
cggcacgagcatggctacctcagagctgagctgcgaggtgtcggaggagaactgtgagcgccgggaggccttctgggcagaatggaaggatctgacactgtccacacggcccgaggagggctgctccctgcatgaggaggacacccagagacatgagacctaccaccagcaggggcagtgccaggtgctggtgcagcgctcgccctggctgatgatgcggatgggcatcctcggccgtgggctgcaggagtaccagctgccctaccagcgggtactgccgctgcccatcttcacccctgccaagatgggcgccaccaaggaggagcgtgaggacacccccatccagcttcaggagctgctggcgctggagacagccctgggtggccagtgtgtggaccgccaggaggtggctgagatcacaaagcagctgccccctgtggtgcctgtcagcaagcccggtgcccttcgtcgctccctgtcccgctccatgtcccaggaagcacagagaggctgagagggactgtgacttgggctccgctgtgcccgccctgggctgggcccttcctggctaggactgtggaggggagctgctggccatggctgctttgtagtttgcccagagttgggggctaggggaggggggagccagaggccaggatgcctgagccccctgagttcccaaagggagggtggcagagacagtgggcactaagggtggagagttgggggccagcacagctgaggaccctcagccccaggagaagggacaaaaggtactggtgagggcaagaggtgcctgggaggagtggccctgatccaggaaaatgtgaggggaatctggaacgctctaggcagaagaagctgggagggagggggaggtgaaaagggcagaggcaaggatggtggggcccccagcaccctctgttagtgccgcaataaatgctcaatcatgtgccaga

SEQ ID NO: 49944 - DNA, 314 bp, Homo sapiens
  misc_feature (1)...(314): n = a,t,c or g
tcattcatttgatgaggtcatgttttcctggatgctgttgatgctagtagatattctttggtgtctgtgcattgaagagttaggtatttatcgtagtcttcattgcctggccttatttgtagctgtccttcttgggaagccattccagatatttgaaaggacttgggtgttgtgatctaagctgtatcncctttagggggcacccaangcccagtaatgctgtgggttcttacagactcatagaggtacccgccctgatggtcttgancaagatctgggangaattctctgggattgtcaagcagagactcttg

SEQ ID NO: 49945 - DNA, 1331 bp, Homo sapiens
  misc_feature (1)...(1331): n = a,t,c or g
aggttttcaagaaaagataattttgtattagtgtaggaatatattagacaaatgtttagttggtcaaattatgcataagatatttgtaactttaaacattgcaaattgaccagctagctatggaagcataaaattaattgataattaatgttggaaatacatttctaaaatttatatttttatggtgttagcctgtaagagcattttagcatattgaaatgcatgctgcttaagatgtgtctggttcaaatatcaaaacttgctgggtcatttttacatagtagaaacatactgtctatgtgttgcccaattgctgtttgtccactctgaattctggaccctttttggactaagaattagttaaattcatgaactaagagaattagagatggggtagagtaggatcaggacagtggggttacaacagataggaaaggaaagtcagcatttgagtgtagagaaaaaaagaggatcatacagatgtcatcaaattataggctttaatacaggttgctttttttaatccaaaaggaaaagcacttatcctatcagaatgtctaccatgttttatagtaataatttgtgtaaaaaattgaatttttgaatagttttttgtattttttgtgatgaaaaactcataacataaaatttaccatattaactgtttctaaagaatacagttcagccatgtgaagtacatttnnnnnnnnnnnnnnnnnnnnnnnnnnnnnnnnnnnnnnnnnnnnnnnnnnnnnnnnnnnnnnnnnnnnnactcccctttttgttttctcctcagtggaatagaattttgactccatataaatccaggaaaccacctaaattctttagttgtttgtgtttgcaagatctaaggtcatggtaaacattaagttcttaaaatttttgggagggacagtgcacctctcctctgaattgttagcaattaaattgagtaggttttaaatgtctattcattggaagggtttgttatttcattttgagccagaggggagaggcacattttaaatatcagaattagattagctttgagtttgtacaattgggaacataatagattttcataaattatgtgtgccttgttggaagtgtcaactgtctttatgtctgcttgtaaaagtttcaaaatatgttttccctcaaaaaggcaacgttacttcatttgcttgaatattatgataggaatgcttactgatattacttgatagtcatatatagcctaggaaatttaacatatatataactatagcagtattaataatgatagttgtacttctttaaaacattaaatttgaggaaactttaatgctgtc

SEQ ID NO: 49946 - DNA, 386 bp, Homo sapiens
gttttggttcctaagtctacattacacaactgggatgagtgaattcaagagatgggtaccaacacttagatctggttggttggataggagataaagaccaagagctgcttttggccagaaaacgtttaattaccgggagaatgggatgtatgtgtaacatcttagaaatgcctaattaaggaaaagcctgggttcaaaaaatttaattggagatccttagtattagatgaagctcacaggatcaaaaatgaaaaatctaagttgtcagaaatagggagggaattcaggactccaattggactattattacctggaccacctcttcaaaacaacttgcttgacctgtggcacttttacctttctgttgccaaatgtgtttaattcag

SEQ ID NO: 49947 - DNA, 523 bp, Homo sapiens
acggttttgagcgtagggggaggcgtgagagggggatctcaggggaggaggtcaatcgcttgccccccactttggcaaattggggactgaggactggaagggtggagagtaggcggaaccaggtggtcgtcggggcagaggatctcgggctaggcttgagggcggcgtgcttcttagggacgacttagggcgtgactgagggttcacaaggtttcttttggggtggtcgggagggagagattctagggaacaaggaagctcgctatggctttcttgccaggaggggtcgaagggaaagtacaagggagctgaccctgggtagaacgggtgaagggatgggggagcgtgaggttccgccctctcttgagactggaaccaattgagggactagtagggcagggggacagaaattgggctcctagtggatttgggtccgtttccgttgggacgttttgggtgtgagaacttaagagctcagttgaccggggatagcctgtgccggagttgatctgcagcttccagc

SEQ ID NO: 49948 - DNA, 362 bp, Homo sapiens
ttttttttttttttttttgagggggcgggtgctttattgggggctgggactgggtccgggacagggactggggccgggaccgggaccgggactggggccgggaccgggaccgggacagggaccaggactgaatttcaggctggacttcggggctcggcgtgcccgcagcagcagtgctgctttgggcacaaggcctgcagcctgcagcgtgagtgtatcgtcctggtagagggtgggcgggaatgtgctgaagatctcaaaggcagaggcatccatgaccctggcctgcgctagcagagctcgcacgtccccaatggtgttgtcaggctgcatcatcagtaggaaggcctgttccccattct

SEQ ID NO: 49949 - DNA, 345 bp, Homo sapiens
gattttaaggatgtaaaatttgcctgaaaacatcttgctcttgaaaagcttcagattagctcagaccataccatctgcattgatgctgctctgaaactaccaagaaaaggcaatgtagaactctgattggcctgggcttagctcagaccataccatctgcattgatgctgctctgaaactaccaagaaaaggcaatgtagaactctgattggcctgggctccatgtccctttgttccctaacctctaagctccacttcagctccatagctgcaaagaaactcatgacgtgcatcaagagtcaccctttggtcccaaagtgaacactattttgccctgatgcctgc

SEQ ID NO: 49950 - DNA, 354 bp, Homo sapiens
aggtatgttaatttaaaacttttatttgtaaaaaaatttaaatatgtatttgaacagatttgtttaaccattattctccttggcaatgttttataaaaagcacaaggtttctctttctccactttccatgtgggtattacaaaatgtttcaggaaatattagatgtaatataaagcaaaatgatgaatggttatttttaacattccaagtcctttacatattattttacagtgctaattttataattttcattttaataatttaataataaaattcaataataatttatttaacaatttaagggggctaatataacctaaaatctatttgcaaagaataaatgtatattaatga

SEQ ID NO: 49951 - DNA, 2993 bp, Homo sapiens
  misc_feature (1)...(2993): n = a,t,c or g
ctgccagggttgggtgcgccgctgaacggatggctgagggagccccgcggatcgttaggaaagccggccagctgatcgtcgtgtgttgccacccattcatgtcaagatgactaagtttggatttttgcgattgtcctatgagaagcaggacacacttttgaagcttctcattctgtcaatggctgctgtattatccttctccactcgtctgtttgctgtcctgagatttgaaagtgttatccatgagtttgatccgtactttaattatcggactaccaggttcctggctgaggaggggttttataaattccataactggtttgatgaccgagcctggtaccctttgggacgaatcattggaggaacaatttacccaggtttaatgatcacctctgctgcaatctaccatgtactccattttttccacatcaccatcgacattcggaatgtctgtgtgttcctggcccctctcttctcctccttcacctccatcgtcacgtacctccttaccaaagagctcaaggatgcaggggctgggcttcttgctgctgccatgattgctgtagttcctggatatatctcccgatctgtggctggctcctatgataatgaagggattgccatcttttgcatgctactcacctactacatgtggatcaaggcagtaaagactggttccatctgttgggcagctaagtgtgcccttgcttatttctacatggtctcgtcatggggaggttatgtgttcctgatcaacttaattcctctccacgtcctcgtgctgatgctcacaggccgtttctctcaccggatctatgtggcctactgtactgtttactgcctgggtactatactttctaggcagatctcctttgtgggtttccagcctgtcctttcatcagagcacatggcagcctttggggtctttggtctctgccagatccatgcctttggtggattacctgcgcagcaagttgaatccacaacaatttgaagttcttttccggagcgtcatctctctggtaggctttgtccttctcaccgtgggagctctcctcatgctgacaggaaaaatatctccctggacggggcgtttctactcactgctggatccctcttatgctaagaacaacatccccatcattgcttctgtgtctgagcatcagcccacaacctggtcctcatactattttgacctgcagctcctcgtcttcatgtttccagttggcctctattactgctttagcaacctgtctgatgcccggatttttatcatcatgtatggtgtgaccagcatgtacttttcagctgtaatggtgcgtctaatgctagtgttggcacctgttatgagcattctctctggccattggagtctcccaggtgctgtccacatacatgaagaatctggacataagtcgcccagacaagaagagcaagaagcaacaggattccacctaccctattaagattgaagtggcaagtgggatgatactggtcatggctttctttctcatcacctacacctttcattccaacctgggtgaccagtgaggcctactcttctccgtccattgtactatctgcccgtggtggggatggccagtaggatcatatttgatgacttccgagaagcatattattggcttcgtcataatactccagaggatgcgaaggtcatgtcctggtgggattatggctatcagattacagctatggcaaaccgaacaattttagtggacaataacacatggaataatacccatatttctcgagtagggcaggcaatggcgtccacagaggaaaaagcctatgagatcatgagggagctcgatgtcagctatgtgctggtcatttttggaggcctcactgggtattcctctgatgatatcaacaagtttctttggatggtccggattggagggagcacagatacaggcaaacatatcaaggagaatgactattatactccaactggggagttccgtgtggaccgtgaaggttctccagtgctgctcaactgcctcatgtacaagatgtgttactatcgctttggacaggtttacacagaagccaagcgtcctccaggctttgaccgtgtccgaaatgctgagattgggaataaagactttgagcttgatgtcctggaggaagcatataccacagaacattggctggtcaggatatacaaggtaaaggacctggataatcgaggcttgtcaaggacataaatgtcacgtccagctctgatatgcttcgcactgagcacatcacatttaggacgttgaagatttttttttttttttttttttaatatgcagtttgtaagaacaaaactggatggcatcagaattgtctggaagttttgtcttgggcagtatgggctgggccaaatgaaatgatttttataattctaaacaggttaccaaatgaaatgtcatggctttactttggtcaattaaaggggggaatttttttaaaaaatgtgccttatttgttttgacttataactgatttgagggaggcaaaagctatgctaggctgccagaaggacataagcagaccttgtccattctcttagctccctaaattagccaaatagagacttctttctcaaatcaggaaaactatcaaagaccaattcagatcctacatttacagacagttttgtcataaccctttgcattgcagcacctagtacaattccttggaaacagcgtggctcaataaatttttattgaatgaataaatgtgggaccagaagagtgctagaagagtgcctttctgggctactatgtctctgttctcaatgtcttttatccttagacgctctttgactttataaaatcagcagtttttgnaagattnaagacaaacagtgaaattaattggtttatcaatggagaggaagaaactcttccagcattacatatagagcttgatggtcagtaggtgtttttgaatcagcttaaatataatcatnnatatcaatttga

SEQ ID NO: 49952 - DNA, 1433 bp, Homo sapiens
  misc_feature (1)...(1433): n = a,t,c or g
ttttacaaaagagtaaacattttattatttgtacatgaatcagtttggtctgaggatacacaagcatctggctaactcataaaagtagcctgaagtgattgataggagagtgtttgtagtcatttccatttgctgccacatcccttacattatctacttgctaagcactgagaggcccagaatggacacatcaaactgtcaggaggaacatatgggacactggcacctgcaatggtttttttaaaagcagagaatgcagagcagtcacagactccacttcaaagccagggtgtgtggaggtctccggggaagagctctgcacaacaggtttcctgggggccagagggcttctcggggaggaacagaaaaaaaccagccaggagtgctaccgaccagcctcagccagaatgctgtcagaacaaggccccaaacatggcctggcctcagtgatctggggatgaacggtgtcacaagggaaccacctgaagggtggggcagaggccccccgtggaggagccacatactcttcctctctcagcagccgcagcaggatgttttttttattcttgggcccagctgtagacatgagtgttctgaagcccaggtgggcacatgctccttcttagcatttgggaagagcacagggatgaatctgaaattcatgcttccttgttttatgaactcaatctgcatcattcgatgaatgtacttagtatgtaagccatgctcatcctcgtccagctgcgactcagcgccttccacgtcctgtttgtatttggggctgattgctacgattatcatcacggtcttatccctaaggtagcgctccatccatttaatgatatcaatgcctcggattctatcctcaaatatgtcaattgcagtttggaagccatttaccaacaaaaagttcacgaatttcaccacctccatagctgtgtccatcgaataagtgataaagactttccgcaattcttctggcaaattgcttgtttttagagttcctctggctggagggttgctagggggtctaggcacagcagctggggacggaggctggggaacctgtggtctcagctctgcagggcactccaaggactccccaggagcaccagctctattaggtggctggtgatgtggctggtcctggtgccttggaagccccggaaaggagcagtctctctgtgcgggcctctcttcttggtcccaggggctgggataattcaggataaccttctgcacagggtgcaggcctctcacactggctccaggcaggggctgcccaggcagagccggctggatcacttgctggtaggctgctcgagggtagtcatggccatatggcacctggtgatcgggacttccaggacaatggtaatgatagttccatggagcatgtggggaaagattgggaggcagcatctgtgnacatg

SEQ ID NO: 49953 - DNA, 666 bp, Homo sapiens
ttttcttctaagatttattttataaacatgtaagaaaagttgtagatatttattgtgggtctggttatgcaagaacaatcttcctggacacagtgtgcgattctcagtatcaaaagcattctcttctttcagttcgtaaaagaaaaacatggtttaacttctaatttactgcttattataaggtttaaaagcaattactgtacttatgtatcgaacttatttgtgtagcaactaattcatctgtgaagccatggtttgctgtggcttcacagtaaattttgacttaagtctaaagcgtgtgttagcatctcaccgtaacttaatgcttcgagtgagaagtttgaggaatgctgctttaggcaaaagagccactggaggaatgagctctgctcttttcacctgctctggactgctctcactttcctcaccgacaggaccacaggcttaagaactggctcagccagtccttctttagggtctagcgcctgcctaaccagcttcctctacttctatcccgggacagatgaatgcttttctaaaaaataattttggaccatctgcatgattccctagcaaatgctttagagagctggtaagcttcagctccgacatggccagatcatcaaaatttgaagtttactcaggtctatttaatgagattttttt

SEQ ID NO: 49954 - DNA, 500 bp, Homo sapiens
gaaataaagagaaataatcaactagaaaaaaaacaaaacttggatcacccagaaagagcgtcacagaggcgagggagaatgaagcctcttgttatcctgatcgcctatgacaacgacatttctaactcttctttgaagcgcagttcttactcttaaatctggtcatacaagctttggcttgggaatcctgtctgtctttgaaacagctgaagttagtgttttcctgtgttacccagtgttacatagtctcatctttgaacttttctgcgtcagccttctctctttgggaatgctgcctgtttctgtctaacttattctccctggtgtggtgtggcagtgaagtctgtgctgaagcccatctgcttggttcctccaagtgcacattatgcaagtgtatttggataagacagggagatgcccggaacgtggttttcctcctccctccctattggagccatacctcctaaatatattgtctggggtcccaaatgtttgagcct

SEQ ID NO: 49955 - DNA, 2414 bp, Homo sapiens
ggggtgagggcagcagctcgccacagctgccagccatctgtccattcacccatctgtccatctggcagcccgctgttcagacctgtctgtctgtccgcccatctctgtaagcccatctctgtcccattgtctatctgaccatctttctcttactgtcctctttgtctagctatctggcctatctgtcgatccatcttcgtgtctgtcttcagcccccacctgtttttgtccatctgtccaattacctgtgactctgtgcatcttcttgtccattcatctgcccacccatccgtccctccgtctgcccaccagccgcccctctcctcctgggctgcagagccatggcccggggctacggggccacggtcagcctagtcctgctgggtctggggctggcgctggctgtcattgtgctggctgtggtcctctctcgacaccaggccccatgtggcccccaggcctttgcccacgctgctgttgccgccgactccaaggtctgctcggatattggacgagccatcctccagcagcagggctcacccgtggatgccaccatcgcggctctggtctgcaccagcgtcgtcaaccctcagagcatgggcctgggcggaggggtcatcttcaccatctacaatgtgacaacagggaaggtggaggtcatcaatgcccgggagacggtgccggccagccacgccccgagcctgctggaccagtgtgcacaggctctgccactgggcacaggggcccagtggatcggggtgcccggggagctccgtggctatgccgaggcccaccgccgccatggccgcctgccctgggcgcagctgttccagcccaccatcgcgctgctccgaggggggcatgtggtggcccctgtcctcagccgtttcctgcacaacagcatcctgcggccttccttgcaggcgtcaaccctgcgccagctcttcttcaacgggacagaacccctgaggcctcaggacccactcccatggcctgcactggccaccaccctggagaccgtggccacagagggcgtggaggtcttctacacggggaggctgggccagatgctggtggaggacattgccaaggaagggagccagctgacgctgcaggacctggccaagttccagcccgaggtggtggatgccctggaggtgcccctgggggactataccctgtactcaccaccgccgcctgcagggggtgccattctcagctttatcctcaacgtgctaagagggttcaacttctcaacagagtctatggccaggcctgaagggagggtgaacgtgtaccaccaccttgtagagacgctcaagtttgccagggggcagaggtggaggctgggggaccctcgaagccacccgaagctccagaatgcctcccgggacctgctgggggagaccctggcccagctcatccgccaacagatcgatggccggggggaccaccagctcagccactacagcttggccgaggcctggggccacgggacaggcacgtcccatgtgtctgtgctgggggaggatggcagcgccgtggctgccaccagcaccatcaacacaccctttggagcgatggtgtattcaccacggacaggcatcatcctcaacaacgagctcctggacttatgcgagcgatgcccctggggttccggcaccaccccctcacctgtgagtggagacagggtgggtggagctcccggaaggtgctggcccccagttccaggcgagcgttccccatcctccatggtgccctccatcttgatcaacaaagcccaggggtcgaagctagtgattggcggggctggcggggagctcatcatctctgctgtggcccaggccatcatgagcaagctgtggcttggctttgacctgagagcggccattgcagcccccatcctgcatgtcaacagcaagggctgtgtggagtacgagcccaacttcagccaggaggtgcagaggggactccaagaccgtggccagaaccagacccagaggcccttcttcctgaacgtggtccaaggctgtgtcccaggagggggcctgtgtgtacgccgtctcggacctgaggaagagtggggaggccgcaggctactaagacactgctctgcccagagctgaagtctggccccaccatgagtcctgtgtccaggccggacatggctgggggaccaactactctggcaggatctggacccctggcaggggagtccagctgagagtggaagaggtggcggggaccagctgggcagatgagaggctgagcctcatccctaaccccctttcccagagcccctggtggtcctgaaccggcccctctatccctccgcaggcctcttgcctggggccactctcccaccctctcgatctgtatatcctccagtccaagattaaagaggcggactgtga

SEQ ID NO: 49956 - DNA, 428 bp, Homo sapiens
ataaaaggaaaaccactgtgtaaaacagtaggcggatctttcagagactccaaatcattgacaattcagaaggatcttgtcgctgcatttgacaacggagaccagaaggtgttcttcgatctgtgggaggagcacatttcaagttccatccgagatggggactcctttgcccagaagctggaattctatctccacatccattttgccatctatcttttgaagtactctgtggggagaccggacaaagaggagctggatgaaaagatttcctacttcaaaacctacctggagaccaaaggggcagccttgagccagaccacagagtttctttccctttctatgcccttcctttttgtttcccaaccctatggtgcacccctcatttaaagaactcttccaggattcctggactccagagttaaagttga

SEQ ID NO: 49957 - DNA, 352 bp, Homo sapiens
gtgtcccaatcattttttattccttttcccaaaatgacatgtgaaggttgctctcccccaagaaactttccccgaagaaccctttctattctttaaaacaatcagacacatttacctactgatgccctagtagttacacatcatcacgtggcttcttggttattgaaggagtttgacctctctgccaggctgcgacatgcacagcctaggaggcacctcagtgcttcgcattgtcctggatacaaaacagttgcttaataggtatgtgttggattggactgaatggcaaccagccagctccaaaattccagccaccacctggtgaccagcattttttctgcctttgaaatag

SEQ ID NO: 49958 - DNA, 570 bp, Homo sapiens
gtcgactccagccccaccatggcctcctccacaagcctcccctccaactgcagcagctcctcgggcatcttctccttctcaccagccaacatggtctcagccgtgaaacagaagagtgctttcgcaccagtcgtcagaccccagacctccccacctcccacctgcaccagcaccaacgggaacagcctgcaagcgatatctggcatgattgttcctcctatgtgaaagaattgccttgaagaattgtattaatgaagaggttggattctgctacagagagtaatctgatacaagtcccagagtggaacttttaactcaggcctttttaagaggaatcacaataactgcagatttttaaacaaacaaaatcaccgaccttgcaaatactgaaattggaagagggatctgcaagtgcagggtgttggttaaagttgtacctcccaagtatttgggggatatatttattctgtattgacaaaagcaaatccactttttctttttctttttttttttaaggttaatttctgcaatcatttgtcttttataaaccgtaaagctctattacaagtt

SEQ ID NO: 49959 - DNA, 310 bp, Homo sapiens
  misc_feature (1)...(310): n = a,t,c or g
tcgcttgagtctgggagttcaagaccagactgagcaaaaaaaaccagaccagcctgagcagcccgaacagggatagcctgcctttacagaaaaatttaaaanttagccagggcatgggtgggcacatgcatgcctgtagtcccagctacatgctgagatggggagggccactttgagccagggcggttgaggcttaccaaagagggantgatccacaccacttgcacttntagncttggggcnaacggantaaagggcccttttttttcccaaaaaggnaaaaaggaatttccngaattttaattctttt

SEQ ID NO: 49960 - DNA, 1057 bp, Homo sapiens
aagagtttttttttttttaattattccttcatattcaaacttcacaaacagtgtgaacttgtacaatacctcggaaagtgaaacttacaaaaaaagtgctggtaacatttaaaaaaaaaacaacaaaaaccccaaaaaaacaaacatcattcttagcaacatcaattactcttccacacaaaacagaaaccttgtaaaatttattttcgtatttttaaggcgtaatacttccgtataaagtatatgcaagagataaaacttcacagtattccaaaatgtcacaataataataataatataatagtataatgaagcgctacagttaatttttctttttttgaatgttttttttcctgtttaaataacaaatacaagtcacaggtaaatatacgtgagaaaaatacgaggctaatattaaatggcaggtaaggatactgtcactgtaagaaaaaactggcaggatgtgtgtatttagtctatattttaaagcacttgataggaaaaggcgtatgccaaggtttttcccaaacaatttttctgtttgtttgtttgataactgacaacaatttaagagtataatgagaaaaaaaaaggaacaaactccctctcaaaactattgacctgctcatcccaaaccatgtatatgttgatggatggatgtgtgtttttgtggatatatggatttataccgtgcacagagtgatacaagcagtgttccatgcccacctgcaaagattggagggtataacactgtagtcattcagcccaggttcctcttaggaaattaacctttcaatttaaagctctctttccttgcctctccctctttccaaactcttcctcaattcccaggtctttgttctgaaaagacaatctggttagaaaagttgccctccactcataattcactgggaaatggaaactgcataaacagtgacacacagacactggaaacaccacttgaatgaatgaatgaatggatatgtatgtgtgtgtgcatgtgtgtatgttttaggtcacataaaaatacagtgtgtgcgtgggtgtgtgtattttc

SEQ ID NO: 49961 - DNA, 239 bp, Homo sapiens
gaaaggaaagaagaaaaggtgccttagtcctttgttgcacttccatttccatgccccacaattgtctgaacataaggtatagcatttggtttttaagaaaacaaaacattaagacgcaactcattttatatcaacacgcttggaggaaagggactcagggaagggagcagggagtgtggggtggggatggattatgatgaaatcattttcaatcttaaaatataatacaacaatcttgc

SEQ ID NO: 49962 - DNA, 505 bp, Homo sapiens
  misc_feature (1)...(505): n = a,t,c or g
gcacacaaaatataaataatagtgtatgcaagttaatgtacattatacatgcgtgtaagggacataaatggaggggtgtgaactttggttaggcaaagtttactggaggaggggtttttgagtcaaatttggaaggatgaacttgttagatagtcagagttggaaacaaaacaatccaagaatagggatataaggcattgctagtctagaatagtctattccttgtgaaaatataaatttaattttcaggaatccagtatattccaaacatcacatatttagcatgaggaaaaattgatttgtgattgtgtatatgagtcattgttatggggagacaagctgaactgccacatgccacccaatggaacctttacttcaatcaaaaaggagggtatgattggttcaattatattaacagaatatcatgggcatttctctatgatggtcattcaaggtagtaggtctctttcaactgagtgcaacattgagaataatgattnggatc

SEQ ID NO: 49963 - DNA, 621 bp, Homo sapiens
atgctttctgctctttctctttggaagtagcattaataagatagatgtaataggattaagatgtgtggaagatgagaaaaagaaggtttttgtagagagagtgcttatgttttgtttactcatgtttcaacttgctgtgtatgatcataaatctatgatcttgagaaaaatcctaaaacaatttaaatttagcctatgcagccaattacataaagagaaattaaggattatattcagaggagaaattaaggattatatttagagcacagaggttatacaaagaatataaccttgtttggtcaaattcttaggtaaagaaaagtaatcaatgcttgcattgctgttggagattctaaaagatgtattgaatgaagaggatgtacacatcttttagaatctccaacagcaatgcaagcattgattacttttctttacctaagaatttgaccaaacaaggttatattctttgtataacctctgtgctctaaatataatccttaatttctcctctgaatataatccttaatttctctttatgtaattggctgcataggctaaatttaaattgttttaggatttttctcaagatcatagatttatgatcatacacagcgtcgacgc

SEQ ID NO: 49964 - DNA, 355 bp, Homo sapiens
gcggaaaactgccaggctgagagacaaagcagacctcctggtgaatgaaattaacgcgtatgctgctacagagaccccgcatttaaagctgggcctgatgaactttgcagatgagtttgccaaacttcaggattatcgacaagcagaggttgaaagacttgaagccaaagtagttgaacccttgaaaacttatgggaccattgtgaaaatgaaacgggatgacctcttagcaacactcacagctcggaatcgagaagctaagcaattaactcagttagaaagaacacgtcagcgaaacccatctgatcgacatgttatttcacaggcagaaacggaattacagagagctgcaatg

SEQ ID NO: 49965 - DNA, 1400 bp, Homo sapiens
agccgagttcccccagcctcccggtgctgccgctgggctgaggttatggctcgcttcgcgccaggctgggcccagggcggcgggtggtgttggttacgtcaggcggcaccaaggtcccactggaagcgcggccggtgccttcctggacaacttcagcagcgggcggcgcggtgcaacctcggccgaggccttcctagccgccgctacggggtcctgttcttgtatcgcgctcgctctgccttcccctatgcccaccgcttcccaccccagacttggctgtccgctctgggccttcgggcccagccctttcgggcttgctgagcctggaggccgaggagaatgcacttccgggttttgctgaggctctgaggagctaccaggaggctgcggctgcaggcaccttcctggcagtagagttcaccactttggcggactatttgcatctgttgcaggctgcggcccaggcactcaatccgctaggcccttctgcgatgttttacctggctgcggctgtgtcagatttctatgttcctgtctctgaaatgcctgaacacaagatccagtcatctgggggcccactgcagataacaatgaagatggtgccaaaactgctttctcctttggttaaagattgggctcccaaagcatttataatttcctttaagttggagactgaccccgccattgtaattaatcgagctcggaaggctttggaaatttatcagcatcaagtggtggtggctaatatccttgagtcacgacagtcctttgtgtttattgtaaccaaagactcggaaaccaagttattgctatcagaggaagaaatagaaaaaggcgtagagatagaagagaagatagtggataatcttcagtctcgacacacagcttttataggtgacagaaactgaagtaaaaagcccttataggatcaaaaattgttcagggctcttagagatggtgaaaactacaaaaaaaaccatggctttcatatggacagataaaatgaaagaaagggaaaaggcagtggtgtgtaggcaaatatggtttggcatttgtcttttaatgacacctgatatgatgtcattttgattttgaaattgaacactagaactgttaatcacctttaaaaagaagagcttattgggaattatatattccttaaaatatacatgggggcctgaatgtcagccatctttatactatagaaaaaggattatggatgcatgaatggtcatgctttggagatcaaatattggttgaatgcctatgtatgtcaggccctgtgctgagccatgaggattaaaaagatgaataaacatatcttgtttaggaaatggatgtataaaaaaatcaagtgcaataaagtgtgtgtccaaaagctgacacaatggaaaggaaaa

SEQ ID NO: 49966 - DNA, 312 bp, Homo sapiens
gcttgccttttttttatttttaatttatggctttctgttacctggtatgctgtgtggcctgatgacatttaagtaatctgaaatgtaccagttcaatcaaagattgctaaaaagggcaatccattcttattagaaagtacagctgaaagtaacagaatgcgcaaaagaaagccatgttttcaatggacgttaaatagcaaaaaaacagaaaagagaattcagttaactataaaattttatgaatgtccagaaacaatcacaccacagcacatgactgcctcgtgccggaattcttgggccttcgagggcaaa

SEQ ID NO: 49967 - DNA, 519 bp, Homo sapiens
ttgacatgattacgaatttaatacgactcactatagggaatttggccctcgaggccaagaattcggcacgagtagagaaaggtgtctgtattgggaggaggctgggggtaatttagagaaagttttgtaatacacccagaaggtgctatgtaaagcaagagtaacgcgaactgaactaaaggcttcaagggggggtcccaatacagacacctttctcacatacctcttcagagtgttgaagatggagggttccatgatataatcccgggtggaaaatttatgcaggcattcttgctgaacctccgcatcatcctctccttctccagaatcatcctcctgctgttggtaaatgcgaagagccaggatatttttttcattaatacaaataccctaatctcaccttaaatcgtataatgctgcccattttgaaagtattctacacacattatttcatttgactttcatgacaatttcatgaaatgggctggacagatagtgagtggctaggaaaaatgggat

SEQ ID NO: 49968 - DNA, 814 bp, Homo sapiens
ctggaaggtgcgtgcacagaggccacaggaagggtgggcttgccaagcgggtacgtttgttgctaaccttgcgcgcacacacaggttgtgactcttacgggcagcatggtttcctgatccttcctaaggatgcagcagtcttttaaaaaaaatattgtattataataataataataatatgaatttctctctcttgttttttttttctgacttgctgttgttttcttttttccccatttcttttagggactggggtaggaggggacaggaagaaaaaaatgtcattcgtcagttaggtcctgaacaaaaagaacttctgtgtggctgagtccggcctcctgtagcgtagggggattgggccactcctctgaagggatgcagggcagcactcgcctgggaaaattggcttcaatctgaaacttttctgggctttccttcaaggagaataagaagtcgtggattactgttagagactgtgaaaagtggaatcgtctctctactcgagaatcattaggtaatttgaagatgatcttgacactttcagggtcatcaggggaaggttcagggggcaggcattccaacttcctttccttttcctcctgtaaattctgccgccgtctctcctctgccaacttttgctggttgcacctcctccttcttccgccgcttacgctcccgctcctcccgtttctttctttctttctcctggtcagctctgagagaggccaggtaggcctcatcctgctgttgtctcagcacttgggtctggtttctttcttccctttctaggcgttctgacaccaggtaagtctgc

SEQ ID NO: 49969 - DNA, 631 bp, Homo sapiens
ttgatttgtcagcatcttccctcaggattctgctggtctcttgcagagtgaatgaagtggcccctgcctctcctatgggtcctttgggatctgagctctgggccacagtctggccgcagccctgaagctcctggcccctctactctcagctcttcgggacagttctctgcctggcacacaaaagaccctcctgacaccagccgacctagacacaccccctccaaagatcccatcggagcccaccatcctgggagcatcacccaaaacccttcctctggcttctcggatttgcatccgaccttcgaatacccctccatcccgcaatttccaaatgagtagtcaccccaacactgaggtccctcctctgatgggcagcccctccccagaccctcattccccctctccacaatcttcctcttccaagatgtgacctctccctctctgtgttcctttctctccatcagtatctcctggctatggtcatagcgtatttcagccgggccggcttcccctcctggcaataccaacgcattcatttcttcctggctctgtgagtggtttgctgcctcctatccgtcaatatccaatgccctgggacagcgggggaagtgggattccagcctttcattta

SEQ ID NO: 49970 - DNA, 377 bp, Homo sapiens
ttttttttttttttagggtctaaggggagctttcgaataattacataaaccaaaaatgtttttaaaataacattttctacgtcttttctttttttttagctgagaaaagtcctaattattcgttcccctttaacacgtctttgcaaaaatatccgaactaatttcttgcaataagcacagctaaactcatggttcttttcaggtttttttttctcttgctaaaaattttcttaaatgtggaataatattattgtcctcaactgtaacaccgatctatttctctggtgtcttttaagctgtttatcatttgcttctctatttcagatggaattaatcttctaaaaacagattacgctctaagatgttttacagctaaa

SEQ ID NO: 49971 - DNA, 904 bp, Homo sapiens
  misc_feature (1)...(904): n = a,t,c or g
acttatgaatgtttaggaaacaacatgaaagctgaaaatttatttcactaatatacataagaagttcacaacaatgaacagacagaaaatagcagtatatacagaatttcactacttacagtacattacaatagagaaagcattttataaacagttcagtattggattaaaatcttttaaggatggctaattctattcagcaggaatctaacttctagacacccagcaaacccattcctatcagggtgagagagggcttttgctgttgctatagtgtactgtaaaaatatttgttccttataaatgaagtggaccacagcaacttctaaatgaacattatattcagtgtaagtctcatattattaaatttcagatttttgactttttagatcgcaattgtttttaaaaagcaatttaaatgtaacagtgtttactttgaccatagatgaagttttataataaaagtaaaactttttttttctgtttgcaaaagtatgaagcattaagaagcatggtgctatatatctctttatctacatttaccctggcccctctagttctgcatctaaacagaacctgtaatgtagaagttatgattatttgaacactttttgttttccttcagcattatacaatataatttaataagatacaaatgcatatttaatgtttgttaatgaagaaagttgtgtgagggtgggcatatatctaggaaaacactactggttactggcttctcatcaataactacaaagtaccacatacctttgtttcagaaaccacccattctacattaaaatctaattcctttatcatctatggctctttgttattatagaatgtctacataggtatntatttgcctttcttcctatcaatcagatttatttattttaaaagcccc

SEQ ID NO: 49972 - DNA, 2575 bp, Homo sapiens
  misc_feature (1)...(2575): n = a,t,c or g
tgttctaccagagtaagcttaaccagttttattatctaaaatgcttaataagtgccccctccccgccaagtgatgatggaattgaggatttattctttaaaaatacctataactccaagtttctttgactagcctccttaagttcatactactactttcagcgtacttggaaaaatcacaggaagaactaatctcttagaaaacatataacaagtgactgttaacacagagcccagatatgtttacaagaattcctaggatgtgtgtggctggggcagcggagacccaagcagaggctgggaggttggactagccctttccagtgctgctactctgtaaaatgtatgtctcaatcagactcacaggcccccatcccaaatactcaagacatcttaaccatttatcttgtaagatttcaagtttgatagttacttaacagtaattactaaattttagccagttaaattcttgtttggatgtgctcttttagctcaaaaaacagatttgtttttctttttatatccctgaaggacatactcctcaactttgcatgattactatagttggcttcttaaggggaagtgaagaaacaaacttctgtatcacaatgacttactatgaataataattgtgatccatgacagatacccataattacactgtatggctacattctaaaaatataccacaataaatacttggtatttgtagagctcaaagcactcttttacagagttttggttagnnnnnnnnnnnnnnnnnnnnnnnnnnnnnnnnnnnnnnnnnnnnnnnnnnnnnnnnnnnnnnnnnnnnnnnnnnnnnnnnnnnnnnnnnnnnnnnnnnnnnnnnnnnnnnnntagtttggttttaatcagtaaatatttatttagcacttggactgctctaggcactatagggtacaaaattagttgtattttatcctctcatcccagctgtgaggtaggtttgctaaagctgtaataccactaagcagttttttcaatactgttcccaaggacagataatattagcaaatcccagaagcatttctaaacacttgtaggaaaaataaagtcggacttaaaatttttagtatctttgccttttttttttttttttttttacataagttttacaagataatacatttttacagtgacctgatgtggatacaactttgcaacttggcaaaaagcaaatcttaacttacattataattaatttgctgcattttacacatctctgattctcaattttggcaagtacaacaggttaagggttctatttagtgtccccttctgatgaatatgatgatcttgaacccattcttcctcctcaagcacggtcatcctcctctgatggcaacagcagaacctctgggaaaggaacctttcggtatccagaactcccaggtggcagcccagtgtgggatttgggagcatgacaacaaaggcattttctcaacatttactaaaggagagtggggtgttctatacgctactgatggggactgtacatgaacacatttaaattgaattacaacaacattttagataggaaatatagaatcttataagaacataatctaaattataaccaattttaaatagcaaagtttaacaataaagctacttaagtgtttgaattagaaataaacagtaaaacatctgtattaattataacagagttgacatttgtttatattttatcttcagtattaaccaaaggagtggaatttagccagggttgcactttttaaaagttgtatatacttttatttattttacaaaaggaaaaaaaaagacatacttttcccataaaattccaggtcttactatgtaaaataaccatgcactacttcatgttataatcataattttagactatttccagtaggtaagtgtcataaagaaggaagagatatggcttccacagcttcaatgaggtgtaaggctagaccatattgcccatgtttttctggtaaaagctcaattactttatttactagtttagctgttgttgcaattggcacttcagtgttttgaaggtcctgggggtccattgctttcagccaagtacacagtgtgggtggaagtctggcaagcagctccattccttcttttgtctgggtgtggagaagcgcatgagccagcctttgccccgtgagcaccagcagctgagaggcaaggacctctttgtcatgaacctgtagaatggcctcttctcctaagtggtcaactccatagttgtatagttcccccacataatgccttctaacaacatcttcactaacttgaaggtgatgggctaaatccacagctagagctggccaatcttggtctttcccaaaaggagtgggtgtggcctcttctgtgggatctttgacctttgtggctgaatgttgggcctggacagctgcactgacaactttcaataagaactgttgtcgtacagaaataaaatctggatccatttccccactaggtaataactgaattgaagttaggtctttgaaaaatgcatttcttcccttactgtcaaaaagtgaaagtggcttcacggtcttcagagaaac

SEQ ID NO: 49973 - DNA, 610 bp, Homo sapiens
ccaagaacaccacatccccatgaggaaaaagttgagactgtagaagatttttttcttcatcttttgagattaatccaaagcttgaggtaatcgatttgcagatctctactccccctgttatggatatcctttcttttgattctaccacaacaacagaaaccagtggtaggactctgccagacaagggtgaagaggcctgtggatatttcttgaacccttccttaatgtcaccagaatgtttgccaacaaccacgaaaaagaaaacagaagacatgagtgacctcccctgtgaaagtcaaaggagcatacctctcgctgtgactgatgctttagagcatattatggaacaactcaatgttttgacacagactgtttcaatcttggagcagcgactgactttgacagaggataagctgaaagactgccttgaaaatcagcaaaagcttttcagtgctgtccaacagaaaagctgaataaaaaattcattttcatttgttgggcagaggcccaataaatgaacaaatgtacatacactcaggaaggtagtacaagatctccatacaacacaaccatgtgctatttatcatggcatttcttaaaagggtgagca

SEQ ID NO: 49974 - DNA, 823 bp, Homo sapiens
ttttttttcttttaaagcagaaatgtctttattgtttgaagcatgacaaaataaaattgataggacatttcatttcttacttagtcttctcaatggggttataaaaatacaatgccacttagtttttgtaagctcttgaaaatgtccagaagctcacacttagtatgatattaaaaggcacttataacacacaataagatacttagaaacccatctcatagatacaattgaaatttctttgagaaaaatttctaaatatagaaataaataggacggcactatttcttcttttccaaaacacagaatagcattttccccatgttacctatacacaccataaatgtggacacctcctcccatttttgttcttgatacaggttgataatcaagctgaaattaatttgcttgcttttcttcaatttaatctcaatttggtttaaaataaagcaaaattcttaatttgtatccaggatcttttagaatacctggcttattttcattttgttttaaatcacaattcattaaataggaagatgatgatgcaaaaattttaaaaagtacttactatttagctgcccaaatcaccctaagcaacaatatttctgaagcatgtgtacatacatgtgtgtatatttttaaatatcacttttgtatcactctgactttttagcatactgaaaacacactaacataatttttgtgaaccatgatcagatacaacccaaatcattcatctagcacattcatctgtgatagaaagataggtgagtttcatttccttcaggttggccaatggataaacaaagtacgccataaattaact

SEQ ID NO: 49975 - DNA, 798 bp, Homo sapiens
gttcgagaagtggagttgaagagtgacgcctcctgggtttgggggtgctcccgggatcttaagtggggatgggtaatgaggtctcgaggagatgcttttgattgtagctggggcgtctgtgtgtctgtctgtgtttgagaggaagactccagctcagagggaactttcaggaatgaggcctcctggattataggagttaggttttagggtgcgaggtttctgtacccttggtgggagttctggggttcttgggtcggccgtaacgaggcgcttctggactctgcagtaggatgggtcccccaggctctgaggagcctctgcacattgcttggggggagctcacctcacccaccctctgccattccagatgataatctacctcactttccctgtggctatgttctgggtttccaatcaggccgagtggtttgaggacgatgtcatacagcgcaaggtgggcataagaggagtgtttgagggttcattccaggggtgggagagggtgtggggcagcagtctgctggggactaatgtctgcctcccataagccgaccctgccctgatgtggggctctggaggcctttggctcgtgtcccatttgtgacttttccttacagagggagctgtggccacctgagaagcttcaagagatagaggaattcaaagagaggttacggaagcggcgggaggagaagctccttcgcgacgcccagcagaactcctgaggcctccaagtgggagtcctagcccctcccctgatgaaatatacatatactcagttccttgttattcaaaaaa

SEQ ID NO: 49976 - DNA, 1171 bp, Homo sapiens
  misc_feature (1)...(1171): n = a,t,c or g
tttttttttttttttgactgtttaaaggttattttattaaatattttcagttcaaggtttcattgtaacaaagctatgaagggtctaccaacattcagaacaaacactatttttaaattatttctatgttgtcatgcaaaaattctgcatcaaatgccttccgtttcttgtttaaaaggtgattttttaatagtctattgtctatagatgctgacattagccccagaagaggagtaagaatgctaagaagtggggctggagcagccatatgaagctatgggtctcaatgaattctaagaccatttgtcttcaagccagcaaaacgaaaccctgtggtgaagggatttgcgtgctggcactgcagactgcagggcaggaaagggctagggcccaggggctggggacatgcatgaggtgctcggaggagcctggctaaatccaagcaccagcacctgtgagtctgctctcttctcagctggctcccaagtaaacctgtagctttgcctcttctcccagctctcgtgcctcctgaaggtagtccagggaactggaatctacccacctttcccccaaaagtggagatgtttgtgcagataaatctgcagcgttgttttgagggaaaccaaggccatgaccaattgctcctccattatcttctttgctatctgcttagggtatagatctcttcctcctggaatggaactccttgagcacagagagggacaatgaaggtagaagccttggctctggacacctcttttgggttacatgcggggaggggtgatgcccatgcagattgtccagcagtaagtctatacttcagttggtcagtaaagaggcctctgtaaggacacctcttcttcttgccagagcagtcaggtcaatctcaaagacaggaaaagagatggacgtgcagcaaggaagaataagaagggaggcagccccaaaggcagcctgaatgcatagaaacgaccaccacctcttctcccactgcctcactcctcccatcccacaggggcacttggcagagggcccaggcccagatgagggtcagcatggggaaccactaccgtgaaaaggcaagacaaagatggtccagatcagcacagaaacagnaccnccaaaggcgggacgggagccctgaccagggcctggctctctccttgccagg

SEQ ID NO: 49977 - DNA, 892 bp, Homo sapiens
atgggcgttagtgacaagagggacatctcgcgatttctcgagtccaaccctgtgatgattgatgccaaagaagtgtcagctgcacacagggcccgctacttctggggtaaccttcccggtatgaacaggccgttggatccactgtgaatgataagctggagctgcaggagtgtctggagcatggcaggatagccaagttcagcaaagtgaggaccattactacgaggtcaaactccataaagcaggccaaagaccagcatttttcctgtcttcatgaatgagaaagaggacatcttatggtgcactgaaatggaaagggtatttggtttcccagtccactatactgacgtctccaacatgagccgcttggcgaggcagagactgctgggccggtcatggagcgtgccagtcatccgccacctcttcgctccgctgaaggagtattttgcgtgtgtgtaagggacatgggggcaaactgaggtagcgacacaaagttaaacaaacaaacaaaaaacacaaaacataataaaacaccaagaacatgaggatggagagaagtatcagcacccagaagagaaaaaggaatttaaaacaaaaaccacagaggcggaaataccggagggctttgccttgcgaaaagggttggacatcatctcctgatttttcaatgttattcttcagtcctatttaaaaacaaaaccaagctcccttcccttcctcccccttcccttttttttcggtcagaccttttattttctactcttttcagaggggttttctgtttgtttgggttttgtttcttgctgtgactgaaacaagaaggttattgcagcaaaaatcagtaacaaaaaatagtaacaataccttgcagaggaaaggtgggagagaggaa

SEQ ID NO: 49978 - DNA, 1443 bp, Homo sapiens
  misc_feature (1)...(1443): n = a,t,c or g
tttttttttttttcagagagatctaatttaattctttatcattcaagtagagagacaggcattttccaaagcaaacccaaccctcgtgattatttctagccagggtgaagctaaggaaggtagcagtaggtggtaggatcagcaccttggttccaggcatcacgccagtcattttatttccatcatcatccttgtgaagaaatggaagtctggagaggtgaaatgatgaaggcaatctggccacaaatcttccttctgggatcctgctcttcagggcatgcatctccccatgctgaaggttaaaatgggggtcatttgccaacaaatttgggagtccgcttctccctgaaggctgccatgccctctaagccggtcccgggttggaatattctgggcatagcacatcccttcaatggccatcccagatgcaatgtccacctccgttcctcggtcaatggctactttgcccagccgcacggcaatgggggcctggggcaggatctcctgggccagtgctcgtgcccgctggtaggcggcggtccccctcctcgttctgggccacagcgtgattcaccagccccagtacgtgggcctcagttccactcagtcgtcggcccgtgaagatgagctccttcgccagggccacccccagacaacggggcagcctctgagtccctcctgcccccgggaggagccctcgcgtggtctcaatcagtcccatgactgccgaggaagctgccactcggaggtcacaggccagggcaagctncttagcctcccgcccaaggcaaacccatccatagccgcaatggtgggtgcagggaaggctgcgatgtcattcatcaggccccggagtcgctggacaaacacccccacctctgcttcactcatctgttcccgctccttcaggtctgcacctgcacagaacacgcccttcactccacttctgaagagcaggacacgcacttgccggtcctcccgcagctgggccagagtttccagcagctcactgacgaagacattccccaaggcattgcgggcagaaggtctgttcatcagaatctcagtgatccctgtaaggagtcagggcagccacgggaaagcagctggctctgccctaatcctgggctgcgggctggggactggaggcaggaggcctgggatctggggagcctctgccctagatgaccagagtgacttgccacaagtcacacactcaggcaggcctcaattttcccaaccataaaatggagagaaaaacccttgctctttctgcctcagagagaaagtggaaggacttgtaaactgtgaagcaaaatggggagaggaacaacagtgactaccacagtagcccttgcctgcttctgctgttgttagacagacagacacacacacacacaagcacacatgnaccnatgtaccntctttaattttacaactccc

SEQ ID NO: 49979 - DNA, 2240 bp, Homo sapiens
cggcggcggcggtggcggcggcgactgctgcggtgaaggaggaggaggagccgagcgggcgctggcaccgaggcctgaccatggacgaggaatacgatgtgatcgtgctggggaccggtctcaccgaatgcatcctgtcgggcatcatgtctgtgaacgggaagaaggtgctgcacatggaccggaacccctactacgggggcgagagctcctccatcacacccctggaggagctgtataagcgttttcagttgctggaggggccccctgagtcgatgggccgaggccgagactggaatgttgacctgattcccaaattcctcatggctaacgggcagctggtaaagatgctactgtatacagaggtgactcgctacctgggacttcaaggtggtggagggcagctttgtctacaaggggggcaagatctacaaagtgccgtccactgagactgaggccttggctttccaatctgatgggcatgtttgagaaacggcgcttccgcaagttcctggtgtttgtggcaaacttcgatgagaatgaccccaagacctttgagggcgttgacccccagactaccagcatgcgtgacgtctaccggaagtttgatctgggccaggatgtcatcgatttcactggccatgccctggcgctctaccgcactgatgactacctggaccagccctgccttgagaccgtcaaccgcatcaagttgtacagtgagtccctgggcccggtatggcaagagcccatatttatacccgctctacggcttgggcgagctgccccagggttttgcaagattgagtgccatctatggggggacatatatgctgaacaaacctgtggatgacatcatcatggagaacggcaaggtggtgggcgtgaagtctgagggagaggtggcccgctgcaagcagctgatctgtgaccccagctacatcccggaccgtgtgcggaaggctgggccaggttatccgcatcatctgtatccttagccaccccatcaagaacaccaacgacgccaactcctgccaaataatcatcccccagaaccaggtcaacaggaagtcagacatctacgtgtgcatgatctcctatgcacacaacgtggcggcccagggcaagtacatagctattgccagcactactgtggagaccacggaccctgaaaaggaggtggagccggctctggagctgttggagcccattgaccagaagtttgtggctatcagtgacttgtatgagcccattgatgatggttgtgagagccaggtgttctgttcctgctcctacgatgccaccacacactttgagacaacctgcaacgacatcaaagacatctacaaacgcatggctggcacggcctttgactttgagaacatgaagcgcaaacagaacgacgtctttggagaagctgagcagtgattgtggccgcccccagcccctgctgccccagcctgtgtctgttctcctcgagggctccagcatcctctgcttcccccaccacgttcccatcacccacctcattgatccactgaccaaatccttaaccctagcgatggcttgggagatggggggttggatagcatcctctttcttggcccttccttatcctagggaaaagagggttcctctccttgtgtgtgtctcttccccccacccctaattcttctggctctgtttggggaagacgtggaggaaaaggtgacttctgcccccaccgctcttacccccactgtagtggcctttggagatgcccccacctcccccccaccaactctcgcgtgttggagagaaggggccctcccagcacaaagttgcattcctccccccctaatttattctaatttattaactttgacccaccctttctgagcctgcagccttcccgtgtggcctgagggctgtcgagtgagctgccccagccccctcccagcccttgcccagcctgggggagtggggaaggcttgggcatggccccgttggaggttgatttgctgttttgtttcttgtctttgtgttctgtggtacttgctgagagaaaagaaaagtgagccaagcagaaggaggtgggaaaacggacccaaaccccagtgtgccctgccccatgcctttcctttagtggtgggaaacccttatcttgcaaagtgaatgtgtccccttccccaccctctagtgtatttcacagaaaacaaaacctcccaataaaacggttgaaacctgaaaaaaaaaaaaaa

SEQ ID NO: 49980 - DNA, 521 bp, Homo sapiens
ttttttcagcaggtcatctttaatgcagaggaggagatgggatgtcactcgctgtctggaggcacgtgggtggtgtgcgggccctcactggccagcctctgggtggccccgcctatcccagtatgaacgtagccaactcaagccctctactgtgtctcagcccacgaagcctttgtagccttcatcttccagcagttgaaacagataggggaaattcagctctccggggctgctgggctcccctcggcctgggacctgtgccacctgcacatgcccaacaatgggcaggaactcccggatgtttcctgtcaggttcccatccatgatctgccagtggaatatgtccatttgtaattggaggttgggtcttcctaccttctgtaagatggctgccgcctgctggggcgtgtccaggaagtactgggggtcagtgatgcgggtgttgatgggctccagcagtcccacgaggtcctcctgagccaaaaccccagctgcatgcctcaggttctccagaaaagcgg

SEQ ID NO: 49981 - DNA, 6773 bp, Homo sapiens
  misc_feature (1)...(6773): n = a,t,c or g
cggccccagaaaacccgagcgagtagggggcggcgcgcaggagggaggagaactgggggcgcgggaggctggtgggtgtcgggggtggagatgtagaagatgtgacgccgcggcccggcgggtgccagattagcggacggctgcccgcggttgcaacgggatcccgggcgctgcagcttgggaggcggctctccccaggcggcgtccgcggagacacccatccgtgaaccccaggtcccgggccgccggctcgccgcgcaccaggggccggcggacagaagagcggccgagcggctcgaggctgggggaccgcgggcgcggccgcgcgctgccgggcgggaggctggggggccggggccggggccgtgccccggagcgggtcggaggccggggccggggccgggggacggcggctccccgcgcggctccagcggctcggggatcccggccgggccccgcagggaccatggcagccgggagcatcaccacgctgcccgccttgcccgaggatggcggcagcggcgccttcccgcccggccacttcaaggaccccaagcggctgtactgcaaaaacgggggcttcttcctgcgcatccaccccgacggccgagttgacggggtccgggagaagagcgaccctcacatcaagctacaacttcaagcagaagagagaggagttgtgtctatcaaaggagtgtgtgctaaccgttacctggctatgaaggaagatggaagattactggcttctaaatgtgttacggatgagtgtttcttttttgaacgattggaatctaataactacaatacttaccggtcaaggaaatacaccagttggtatgtggcactgaaacgaactgggcagtataaacttggatccaaaacaggacctgggcagaaagctatactttttcttccaatgtctgctaagagctgattttaatggccacatctaatctcatttcacatgaaagaagaagtatattttagaaatttgttaatgagagtaaaagaaaataaatgtgtaaagctcagtttggataattggtcaaacaattttttatccagtagtaaaatatgtaaccattgtcccagtaaagaaaaataacaaaagttgtaaaatgtatattctcccttttatattgcatctgctgttacccagtgaagcttacctagagcaatgatctttttcacgcatttgctttattcgaaaagaggcttttaaaatgtgcatgtttagaaacaaaatttcttcatggaaatcatatacattagaaaatcacagtcagatgtttaatcaatccaaaatgtccactatttcttatgtcattcgttagtctacatgtttctaaacatataaatgtgaatttaatcaattcctttcatagttttataattctctggcagttccttatgatagagtttataaaacagtcctgtgtaaactgctggaagttcttccacagtcaggtcaattttgtcaaacccttctctgtacccatacagcagcagcctagcaactctgctggtgatgggagttgtattttcagtcttcgccaggtcattgagatccatccactcacatcttaagcattcttcctggcaaaaatttatggtgaatgaatatggctttaggcggcagatgatatacatatctgacttcccaaaagctccaggatttgtgtgctgttgctgaatactcaggacggacctgaattctgattttataccagtctcttcaaaaacttctcgaaccgctgtgtctcctacgtaaaaaaagagatgtacaaatcaataataattacacttttagaaactgtatcatcaaagattttcagttaaagtagcattatgtaaaggctcaaaacattaccctaacaaagtaaagttttcaatacaaattctttgccttgtggatatcaagaaatcccaaaatattttcttaccactgtaaattcaagaagcttttgaaatgctgaatatttctttggctgctacttggaggcttatctacctgtacatttttggggtcagctctttttaacttcttgctgctgtttttcccaaaaggtaaaaatatagattgaaaagttaaaacattttgcatggctgcagttcctttgtttcttgagataagattccaaagaacttagatttatttcttcaacaccgaaatgctggaggtgtttgatcagttttcaagaaacttggaatataaataattttataattcaacaaaggttttcacattttataaggttgatttttcaattaaatgcaaatttatgtggcaggatttttattgccattaacatatttttgtggctgctttttctacacatccagatggtccctctaactgggctttctctaattttgtgatgttctgtcattgtctcccaaagtatttaggagaagccctttaaaaagctgccttcctctaccactttgctgaaagcttcacaattgtcacagacaaagatttttgttccaatactcgttttgcctctattttacttgtttgtcaaatagtaaatgatatttgcccttgcagtaattctactggtgaaaaacatgcaaagaagaggaagtcacagaaacatgtctcaattcccatgtgctgtgactgtagactgtcttaccatagactgtcttacccatcccctggatatgctcttgttttttccctctaatagctatggaaagatgcatagaaagagtataatgttttaaaacataaggcattcgtctgccatttttcaattacatgctgacttcccttacaattgagatttgcccataggttaaacatggttagaaacaactgaaagcataaaagaaaaatcnnnnnnnnnnnnnnnnnnnnnnnnnnnnnnnnnnnnnnnnnnnnnnnnnnnnnnnnnnnnnnnnnnnnnnnnnnnnnnnnnnnnnnnnnnnnnnnnnnnnnnnnnnnnnnnnnnnnnnnnnnnnnnnnnnnnnnnnnnnnnnnnnnnnnnnnnnnnnnnnnnnnnnnnnnnnnnnnnnnnnnnnnnnnnnnnnnnnnnnnnnnnnnnnnnnnnnnnnnnnnnnnnnnnnnnnnnnnnnnnnnnnnnnnnnnnnnnnnnnnnnnnnnnnnnnnnnnnnnnnnnnnnnngagaaattttccttaataagaaaagtaatttttactctgatgtgcaatacatttgttattaaatttattatttaagatggtagcactagtcttaaattgtataaaatatcccctaacatgtttaaatgtccatttttattcattatgctttgaaaaataattatggggaaatacatgtttgttattaaatttattattaaagatagtagcactagtcttaaatttgatataacatctcctaacttgtttaaatgtccatttttattctttatgtttgaaaataaattatggggatcctatttagctcttagtaccactaatcaaaagttcggcatgtagctcatgatctatgctgtttctatgtcgtggaagcaccggatgggggtagtgagcaaatctgccctgctcagcagtcaccatagcagctgactgaaaatcagcactgcctgagtagttttgatcagtttaacttgaatcactaactgactgaaaattgaatgggcaaataagtgcttttgtctccagagtatgcgggagacccttccacctcaagatggatatttcttccccaaggatttcaagatgaattgaaatttttaatcaagatagtgtgctttattctgttgtattttttattattttaatatactgtaagccaaactgaaataacatttgctgttttataggtttgaagaacataggaaaaactaagaggttttgtttttatttttgctgatgaagagatatgtttaaatatgttgtattgttttgtttagttacaggacaataatgaaatggagtttatatttgttatttctattttgttatatttaataatagaattagattgaaataaaatataatgggaaataatctgcagaatgtgggtttcctggtgtttcctctgactctagtgcactgatgatctctgataaggctcagctgctttatagttctctggctaatgcagcagatactcttcctgccagtggtaatacgattttttaagaaggcagtttgtcaattttaatcttgtggatacctttatactcttagggtattattttatacaaaagccttgaggattgcattctattttctatatgaccctcttgatatttaaaaaacactatggataacaattcttcatttacctagtattatgaaagaatgaaggagttcaaacaaatgtgtttcccagttaactagggtttactgtttgagccaatataaatgtttaactgtttgtgatggcagtattcctaaagtacattgcatgttttcctaaatacagagtttaaataatttcagtaattcttagatgattcagcttcatcattaagaatatcttttgttttatgttgagttagaaatgccttcatatagacatagtctttcagacctctactgtcagttttcatttctagctgctttcagggttttatgaattttcaggcaaagctttaatttatactaagcttaggaagtatggctaatgccaacggcagtttttttcttcttaattccacatgactgaggcatatatgatctctgggtaggtgagttgttgtgacaaccacaagcactttttttttttttaaagaaaaaaaggtagtgaatttttaatcatctggactttaagaaggattctggagtatacttaggcctgaaattatatatatttggcttggaaatgtgtttttcttcaattacatctacaagtaagtacagctgaaattcagaggacccataagagttcacatgaaaaaaatcaattcatttgaaaaggcaagatgcaggagagaggaagccttgcaaacctgcagactgctttttgcccaatatagattgggtaaggctgcaaaacataagcttaattagctcacatgctctgctctcacgtggcaccagtggatagtgtgagagaattaggctgtagaacaaatggccttctctttcagcattcacaccactacaaaatcatcttttatatcaacagaagaataagcataaactaagcaaaaggtcaataagtacctgaaaccaagattggctagagatatatcttaatgcaatccattttctgatggattgttacgagttggctatataatgtatgtatggtattttgatttgtgtaaaagttttaaaaatcaagctttaagtacatggacatttttaaataaaatatttaaagacaatttaggaaaattgccttaatatcattgttggctaaataggaataggggacatgcatattaagggaaaaggtcatggagaaataatattggtatcaaacaaatacattgatttgtcatgatacacattgaatttgatccaatagtttaaggaataggtaggaaaatttggtttctatttttcgatttcctgtaaatcagtgacataaataattcttagcttattttatatttccttgtcttaaatactgagctcagtaagttgtgttaggggattatttctcagttgagactttcttatatgacattttactatgttttgacttcctgactattaaaaataaatagtagatacaattttcataaagtgaagaattatataatcactgctttataactgactttattatatttatttcaaagttcatttaaaggctactattcatcctctgtgatggaatggtcaggaatttgttttctcatagtttaattccaacaacaatattagtcgtatccaaaataacctttaatgctaaactttactgatgtatatccaaagcttctccttttcagacagattaatccagaagcagtcataaacagaagaataggtggtatgttcctaatgatattatttctactaatggaataaactgtaatattagaaattatgctgctaattatatcagctctgaggtaatttctgaaatgttcagactcagtcggaacaaattggaaaatttaaatttttattcttagctataaagcaagaaagtaaacacattaatttcctcaacatttttaagccaattaaaaatataaaagatacacaccaatatcttcttcaggctctgacaggcctcctggaaacttccacatatttttcaactgcagtataaagtcagaaaataaagttaacataactttcactaacacacacatatgtagatttcacaaaatccacctataattggtcaaagtggttgagaatatattttttagtaattgcatgcaaaatttttctagcttccatcctttctccctcgtttcttctttttttgggggagctggtaactgatgaaatcttttcccaccttttctcttcaggaaatataagtggttttgtttggttaacgtgatacattctgtatgaatgaaacattggagggaaacatctactgaatttctgtaatttaaaatattttgctgctagttaactatgaacagatagaagaatcttacagatgctgctataaataagtagaaaatataaatttcatcactaaaatatgctattttaaaatctatttcctatattgtatttctaatcagatgtattactcttattatttctattgtatgtgttaatgattttatgtaaaaatgtaattgcttttcatgagtagtatgaataaaattgattagtttgtgttttcttgtctccc

SEQ ID NO: 49982 - DNA, 1400 bp, Homo sapiens
ttttacaaaaccaaaaaaccaaaaatattttattgctgagtcatcctggggttccataaaggaccccaagccttgcttggagtctatagctttgctaggactcccatgacatcaggatagagattgaggcacggggtcctttgggttccgattaaggaactatctactctgattctgttgatcttattagtccctccaggtcacctctacttcatctgtccgatacctctgtgtaaccccagaatcactgagtggggtcctgtgtccagcccgaaacatctcccagccagcctgggctatcatcgctccattgtcaatacagaatctctcatctgtagcaaaaagccgggctccacgttcctggcacattgttgccatcatctcctgtagcctcacattacaccccactcctcccacaatgagggcctcctgggagccacaatgtgccatggctcgctctgtgatctctaccagcattgcaaacacagtttcctgcagggagaaacacagatcctcaggagtacactcgcctgtggccagcatccgatgggctacatcctcaatgaaagacaggatccctgagaatgagacgtccatcccctttacagtgtatggcagctcaaccagcttcttgcctcgtatatggggaaatccctgaagccccagcagccagcctgcttccaccttatgtccccttaccgctttgccatctgttcaatgttgtatcctggacttgggtcgttagaaatcttcagcactcgagcaaaacgatccagacaattacccactgcaatatcgatggtttccccaaagatacggtaacgatgttcccgagtatgcaatcacctgcgtatttcctccactcacatacaacacggttgggctggtggctccagtgatgaggcggcccatctcaatgtggcctatacagtggttcacacccaccaatggcttattccacagctgggccacagtacgggccacaacagccacagaaaccagtggggcacccatgccagggcccttggtgtatgcaatgcagtcgatatcctgggaggttaatccagactctgttagtgcctcctgcagcaggtctaggataacagctcggtgatgcctggctgtatcacctggaaggaatcctgtgccaggaggcgtgacgtaagtccgccgcgggttcgccagcaccttgccatcccgcaccacgcccacgccaatcttattggcgctgccttcaaaacccagcaccgccggcatggcggaggctgggagaaaacgccgacaggactcctggcaatgtcaggagctgtggaggtcctcactagtccgcgctgggccgcagctttccggagcgcagaggaagctggccagcctgcagatagcactgggaaagacaccgc

SEQ ID NO: 49983 - DNA, 943 bp, Homo sapiens
agcaggcacatggaccgggtgctcggcggccgcacctaccgcacgctgctgcagctcaccaggatgtaccccggcctgcaggtgtacaccttcacggagcgcatgatggcctactgcgaccagatcttccaggacgagacgggcaagaaccggaggcagtcgggctccttcctcagcaccggctggtttcaccatgatcctcgcgctggagctgtgtgaggagatcgtggtctatgggatggtcagcgacagtacttgcagggagaagagccacccctcagtgccttaccactactttgagaagggccggctagatgagtgtcagatgtacctggcacacgagcagggcgccccgaagcgcccaccgcttcatcactgagaaggcggtcttctcccgctgggccaagaagaggcccatcgtgttcgcccatccgtcctggaggactgagtagcttccgtcgtcctgccagccgccatgccgttgcgaggcctccgggatgtcccatcccaagccatcacactccacaaaaacatttaatttatggttcctgcctccctgcccacgtgctgggtggacctaaggttccttcccacccccattctgggcgacactttggagccatctcaggcctccactccctgagtaattcatggcatttgggggctcaccccacctccaggtctgtcaagtggcctttgtccctggggctgatggcccccaactcaccagcatcatgaccttgtgccagtcctggtcctccctccccagccgcccctaccaccttttggtgccacacttctcaggctggccgccctggttggggcagccgagagcctggggttcattggtgaaggggccttggagttgtgactgccggggccgtatcaggaacgtacgggtaaacgtgtgttttctggaaaaaaaaaaaaaaaaaaaaaccga

SEQ ID NO: 49984 - DNA, 1162 bp, Homo sapiens
tttttttttatattgaagtctgtgtcttcgcccttttaagtgcatctccttagcattgggatcattaaagctgcactcgcataatttacaatggaaccgaattacttttccttcatcatttcgtacctcttccacataatcatggcccactggctgcacatcactctgtaaagcagcaagagatgcaggtgtgactggttctgacactgtgtcttgctttacttcaggaatctgcacagcagaagtgacaggagtacttttaacacattcggttccttttatgtcttctgctttatttcctgttgactgcagcttattaccaccaacaaaatttattttgggggtagatgttttcttggcagccatatttgtaggcactgctgatactttagtgttagatgtgctattaagagacgagtttcctgtagtcgtaagacccttcattgaagacgttgcaattgatgacgtattcacagtacaattgtttgctgcaatgcttgaaggagaggcagtcggctttgaagcagatacagctgttgaagaagtagcttggctaacaacatttggttctgttgatggaatgggtttaccaagttttgtgtgtaacttaaccactttctgatgcttagcaccacgaatgtgggcagcatacgcatctgctcctgtacaagacacatcgcagagctcacaacgtagctgattttgagtcccacgagtagaactgttgctgctgctggtattttgtgaggctttcaatgcagcttctttttttttatgtttctgtccttctaaatgttctttataagtctgtggtccagcacagctgatcttacaaacatcacaatagtgaatctgtggtggtttgggaggctgttttggtttcagttgtttattttggaatggtgcttttttagtaaaggtggtccctgtccaggcagctgttgcagcagcagcagcagctgctgctgctgcctgcttctgttgctgctgctgctgttgatagtaggaagatgcagctgaatacactgctgcttcataacctgaataagacgtaccagaatatgtaactgctgtggtactgtaagtagcactctgagtataggatggcaccacagtagccgcagctgctactggctgtacggtggaggatacaggatagatg

SEQ ID NO: 49985 - DNA, 492 bp, Homo sapiens
ctctccctttgtgggcttcagtcattcaaacctgactccattaggtgctgctcattggcttggaggctggtgctcctgtgtgtcagatccacagagatatccgagttcagaaatgagtggaaaaatacccatggtgggcaggaagagaaatccccttgctatattcccattgtgagcagtgccacccgtgtgggatagaagcacacccagtgcaaagcctctagtattcatcatcctggaatgcaaacaaatttgactcaacaatttccaccaaggtcctgagccccacttgcctcaaaaccagtagacctggtctggatgcactctcccaagaaactcgccaactaatgaccaaggatctaaaataatggtgtccaaattttaattgcaaatgtctagcaatgataaaaaatttagtgcccatatctcatatacttatagacagatatgtactactccattcattaaaatgttagaaactagaaaaaaaaa

SEQ ID NO: 49986 - DNA, 1978 bp, Homo sapiens
tgcacactttgtggttattcttttattcttgggtgtcccccaccagaccccagctgactgggcagggattggccccaggcttggcacagtgccaagcccacccgagtgctcagccacctcttgccaaacatctgaatcaatgtcacagcaacacttggtttgctcctgttgcattctcatgacaggctcagcgtcaggtacgacgttcttgagggcaaggcctgtcctccacaaagccctctggggctggggtctccagaggcaagccctcagctctgggagactgtctgcctccgggaggaaacctggggcaaagggacagggagctccgccaccagcagcagcatgttttattgcaaccagaatccccggtcacgtggggaagggattggagctagggatgaggcaggacacatctggtccctgacaggacactccccgtccaggatgcaaagccaaaggcccggaacagcctgctcagtggctgagccctgtggccagctgtgccctgtctcttcccctgcccccagtcagggcatccaacggggcagaggcagaagggacgtgaaaaggggggtcggtttcagcaaagccttcacccagggacctgaaggaagaaggagtattgtgatggggtccaggtgccccaagatgctcagggcgcctgggctgacttcaggatgtgtccatgtggttatcagaggaaagcgatggggcctgccctgcccacgtggagagggagggagaggggaaacacggctcagaaggagaatcactggccagcgaccatacaggtgggatcttgggaccctgactccgccgccagggccgggtccacaccccacctcctggctgggccccacctgggaccccagcctaggcagcctcgtgtcctatgtggggatctgcatgctgtccaggtcctgatccatgatctgcaggacatcatccaggatggaaggccccaggtccacgtgcagggacagcagggagctggcattggacaggaagggctcctcggcccctgactccggggtcagtccactgttgggggagccagtctctggaatcctccagatgtccacactccctccctcctgtggggaaggctgaggggtctccaggtgcaggcgagggggcttgggtggagcctgggctgtgggcagggtgagagcctggggtccaccgataaccgggagggagatggcgttcttgagcagaggggatgggccgtccgggagctcccgcccacacacggtggcggtgcgggtgaactggaaggggaggtcgaaggtgccatcttcttcaggcccctccaccatggtccccggcaggaggtggaacttgccctgcaggaaggagatgtcgccaaacatgtcactgccgccgccactgccaatatgaatggtgtggcggaagtcccccagcggtgggctgatcatgtccgaggacagcaggtcccgaagcttctccttcttgcccttgcgactgccacgcttcagatagatgggcaccttggtggacatggtgacctcaccaccaggcctggctgtgaggctacgggccgcctgctgagaccacacctcctctccaaccctcagccagaggaaacactcgtttccacggggtggtttgcaggtgcccagagctcgccaacgggcttctggctacagtgtgggggcacgaacaaagttggcccaaggaattaaaaaagattagagatcaatgaagtcagtgggctgagataacaaaaatcacgttctccccaaaggacggcaaactcttctgaagaattgaagccagaaaggtaggaactgtgtgggcagcagtgcactttggtcttgtcaccgagggttacttgtccccggtccagggctgaggagcgtgaggcgcgcagacggcagaccggcggacagcaaggtctcaggagctggacagcgctgcggccggacccgaccggcggtgaacttacagagtg

SEQ ID NO: 49987 - DNA, 922 bp, Homo sapiens
ttgttttgtgtttatttcgacattttattgaacttttcatattacacaatttacccaaaacatttaaagtaacagtaagacaaacttaaaaaaaaaaaaagtcatacagacaaaacatctctaggtgaggcaatatgtaaatttcattgtcaaatcatgattttgttactctgctatacaacttggtaccatatcaatgctactaaatgactcaagagtaagacattatgcattccgtttatatgagaaaaagagattatttacaactacttgaaagagaaacagaaatgccaacaacagtatcattcaaattctagtgcaatgtcaattgttaccaagagatcttatttgcttatataaattttgcaaataattcaaacctggctatcttattagaagctgacaaagtatgcttttctgttgcaaaagatcagtggacaaaaatcctccacaacctcagctgataaaacaaatttaagcagcattttttttttccatttcctgaacagatgtactaatacttaggtagaaacactaaagcatttgtactcaatcaataaagtgaatgctttgtgcagttttaacaaagctgctgctaaaaagacagttgtgagtggtcaggtatatctgcaatagtaagcaagttcttacctttccagttctgtatgcttctgaaaacaccagctaaggtattaaatacccattttcaagtgaccttgtttttactatttcatatttatgacatctagtgctgagattctgggggctttaatagataaccttattaacccagataatttttttttggagcccataaaataaaattgagaatggcatttcgggaaggtctacatatatgtatttagtaagttaattcgtaagttcactttacatagtaaattaatatttaccagtttttaat

SEQ ID NO: 49988 - DNA, 2481 bp, Homo sapiens
ccacgtacatctattttggaaaacaaaatttaaagcaaaacctgaaagaaaataaaaacggaagccattatttagtggtgactatatactagacaagaggcacaaattcccagatgaattttaattttgtttcctctcagacaagccattcagaaataaaagggaaatgaggttcatttaagtacacaatttgtaaatgtggaaacagtagtaattgtcatgattattttatattctctcttaacagtggctctaaaaacagcccaatgattcacacaactagcaaagcaaaccaaactctataaatgtatgagaaattaagttgctagcactgaaacactgggtttggatatggacaaggatgttgtctctgacttgtatcttttgggtaccttggtttttgatattttgatgttcaagcagaaagcgcgtgactttgttttatgcaataaggtgatgtaagtgtagaaaatgtgtagggatgaaggaaattccaagttacatgtgtatacataaatggctttataaaatacatatatatagccattaagatagttacatagggacaatgcaatttaaaacatttatactcctgcttacagattgccaagtctaatcatcccttaagtctttttcaataatgacataatttatttgcttaaaggtaaaaacctcctgattgtattaaggacattaatatactacactgtattaaggatactataccaacatcaatctaggaggtaaaataaacgtttggcaaatattgaagtcagatggaatagattcaactctataaagttttgttttagattttataataaaattttgcttctgcctacgatcagtgtttacttcagcatgagtgctacactaactagaatttaataagtgttatttttattgagttttcaaatttggaaggattttgatccaaaatatatacctatgccttaaaaaacaaagtcaagataatcagtatgggctttagtaccaattttactttccaatccattttcttccccagtatttcacttgtatccctcataacttcatagcaaattatccagattatatcttccagactactcagtgaaggaacctaaatctcaaatgttattttgaagaagtgtagagtaaataattttggtaatctgtaaaacagctgcatgcagtgtgtactgtattataacagcaccaaaccctttataaaaaccaaacactccttcctcctgccttatggtattgatacagtctctcattccctcatattgtgtattaattggaagcacttcatagccaaggtctgtattgtcaattattgtgcgtgttccttgaatgtgaaggcggtgcaaaactgtttccaatgggtaaagtataacgtcagaacaaagactggcagcaaagttagcaataagttctggaaaataagcatccaacatactctgcacagggctagtgctctcagctaggtggctattgtaagtctttctctttagaattagtaggacaaacttctgaataactgagctgatgatgtaatgaagaactccatgaagcaccgtagggaagatcaaggaaagaagcggaagaagtcgtttgctatgaggcactcccatgcctatcactcttccaattccttctttaacacactccaaaatgccagtattatctcgaattatctcactctgcactgtttcaatcagacttgctgaataaaaaggcattgccaccacgtaagttagggatttcagtagaaggtgttctcctatttgtttaggactccatttatgtaaaacctcccttggcaaaggtgtaaattcactaattatgccttctgctccaagtgtgactccctggacaataaatgtacttcccattcctttccacagggctctaggtccctgagttttgttgaaactgtacataatattgatgactgtaaatggagtgagatggtaatgctgagcatggtaattaacctgacattggcggcgtagaacaatgcaaggatgtgcccataacattttctgtaaagagacttgcaagtccaataccaaatccagcaaatctattcagctgttcactgctctgcccctgcacactgccgccgccgccactggaaaagggttcctccgtggggccttcgtacggggtggaggtggtgggcacgccgtagggcgggctcttctcgccccagtgcaggttgcggctgccggggatatctgggggagtcgtcacccagtggcccaggtccgacccggtgctgaaggaccttgcagggaaggcgccgccaaagccctgctcgtcccgggcaccaccccggtagcccaagccatcaaatccgtccgggcgccgcggatgcatcgcagcgggggcaggatgacgcgagcccgcccggagcccaccaccaccggggccaccacgacctaagcacacacagcttcccgtcggccgccgccgcgtcaggggtaaattctg

SEQ ID NO: 49989 - DNA, 273 bp, Homo sapiens
  misc_feature (1)...(273): n = a,t,c or g
ctcaaaatataaatcaaaaatgtagtaaccaaaacagcctgatactggcataaaaatagatacagagcaatggaacagaacagagaaccagaaattaatccacgtatctacagccaactgattttttacaaaggtggcaagaatactcattggagggacaaaaaaaaaagggacagtctcttcantaaanggggctgaaaaaactgggtntccntatgcanaaaaatgaaactagatccgcncctcccaccntgtacaaaaaccaactcaaaa

SEQ ID NO: 49990 - DNA, 438 bp, Homo sapiens
  misc_feature (1)...(438): n = a,t,c or g
gctgtcatggcccgccgtggaccaggctctgaaggagtttggcagaatcgacattctcattaactgtgcggccgggaacttcctgtgccccgctggcgccttgtccttcaacgccttcaagaccgtgatggacatcgataccagcggcaccttcaatgtgtctcgtgtgctctatgagaagttcttccgggaccacggaggggtgatcgtgaacatcactgccaccctggggaaccgggggcaggcgctccaggtgcatgcaggctccgccaaggccgctgtggacgcgatgactcggcacttggcttgtggagtggggtccccaaaacatccgcgtcaacagcctcgcccctggcccatcagtggacaaangggcttcggcgactnggtggcctcagccacctgacaccaaggtactgcacccgctncaaaggctgg

SEQ ID NO: 49991 - DNA, 838 bp, Homo sapiens
  misc_feature (1)...(838): n = a,t,c or g
gtgacctgtatagttcctatgtaatcttttacttcctgctgctgtcagtggtaataataataataagtattttcaatgtggagttctatgcagttgtgccttctattccttgctccagactagctctgataggggagatcattcatcctcagcaactcatgcactcatttattcatgctgcaatgggaatggtgatggcctggtgtgctgcagtgataacccagggccagtacagctttcttgtggttccctgcactggtactaacagctttggtagccctgctgcgcaaacctgcttaaatgaatatcatctttttttcctactgactggagcatttatgggctatagctatagcctcttgtattttgttaacaacatgaactatcttccatttcccatcatacagcaatacaagttnttgcgttttangagatctctgctcttattagttaaacacagttgtgtggaatcactgttcctggttagaaatttctgcattttatattattttcttggctatattcccaaagcttggattagcactgctatgaaccttcacatagatgagcaggttcataggccacttgacacagtgagtggcctccttaaatctctcgttaccctaccatgccctggctggtgtggtgtctttctcctgacgacttggtatgtctcatggatactcttcaaaatctatgccacagaggctcatgtgttttcctggttcaaaccaccatttggcaagaaaggggtcagatgagtgccttcccaaaaagtggttaaaataagcaatcctcccccccaatcataaagtntttaggcccttgcagggaacct

SEQ ID NO: 49992 - DNA, 3340 bp, Homo sapiens
  misc_feature (1)...(3340): n = a,t,c or g
gggaagcatggggcttcccaggctggtctgcgccttcttgctcgccgcctgctgctgctgtcctcgcgtcgcgggtgtgcccggagaggctgagcagcctgcgcctgagctggtggaggtggaagtgggcagcacagcccttctgaagtgcggcctctcccagtcccaaggcaacctcagccatgtcgactggttttctgtccacaaggagaagcggacgtcatcttccgtgtgcgccagggccagggccagagcgaacctggggagtacgagcaagcggctcagcctccaggacagaggggctactctggccctgactcaagtcaccccccaagacgagcgcatcttcttgtgccagggcaagcgcctcggtcccaggagtaccgcatccagctccgcgtctacaaagctccggatgccaaacatccaggtcaaccccctgggcatccctgtgaacagtaaggagcctgaggaggtcgctacctgtgtagggaggaacgggtaccccattcctcaagtcatctggtacaagaatggccggcctctgaaggaggagaagaaccgggtccacattcagtcgtcccagactgtggagtcgagtggtttgtacaccttgcagagtattctgaaggcacagctggttaaagaagacaaagatgcccagttttactgtgagctcaactaccggctgcccagtgggaaccacatgaaggagtccagggaagtcaccgtccctgttttctacccgacagaaaaagtgtggctggaagtggagcccgtgggaatgctgaaggaaggggaccgcgtggaaatcaggtgtttggctgatggcaaccctccaccacacttcagcatcagcaagcagaaccccagcaccagggaggcagaggaagagacaaccaacgacaacggggtcctggtgctggagcctgcccggaaggaacacagtgggcgctatgaatgtcaggcctggaacttggacaccatgatatcgctgctgagtgaaccacaggaactactggtgaactatgtgtctgacgtccgagtgagtcccgcagcccctgagagacaggaaggcagcagcctcaccctgacctgtgaggcagagagtagccaggacctcgagttccagtggctgagagaagagacagaccaggtgctggaaagggggcctgtgcttcagttgcatgacctgaaacgggaggcaggaggcggctatcgctgcgtggcgtctgtgcccagcatacccggcctgaaccgcacacagctggtcaagctggccatttttggccccccttggatggcattcaaggagaggaaggtgtgggtgaaagagaatatggtgttgaatctgtcttgtgaagcgtcagggcacccccggcccaccatctcctggaacgtcaacggcacggcaagtgaacaagaccaagatccacagcgagtcctgagcaccctgaatgtcctcgtgaccccggagctgttggagacaggtgttgaatgcacggcctccaacgacctgggcaaaaacaccagcatcctcttcctggagctggtcaatttaaccaccctcacaccagactccaacacaaccactggcctcagcacttccactgccagtcctcataccagagccaacagcacctccacagagagaaagctgccggagccggagagccggggcgtggtcatcgtggctgtgattgtgtgcatcctggtcctggcggtgctgggcgctgtcctctatttcctctataagaagggcaaggctgccgtgcaggcgctcagggaagcaggagatcacgctgcccccgtctcgtaagagcgaacttgtagttgaagttaagtcagataagctcccagaagagatgggcctcctgcagggcagcagcggtgacaagagggctccgggagaccagggagagaaatacatcgatctgaggcattagccccgaatcacttcagctcccttccctgcctggaccattcccagctccctgctcactcttctctcagccaaagcctccaaagggactagagagaagcctcctgctcccctcgcctgcacaccccctttcagagggccactgggttaggacctgaggacctcacttggccctgcaaggcccgcttttcagggaccagtccaccaccatctccacgttgagtgaagctcatcccaagcaaggagccccagtctcccgagcgggtaggagagtttcttgcagaacgtgttttttctttacacacattatggctgtaaataccctggctcctgccagcagctgagctgggtagcctctctgagctggtttcctgccccaaaggctggcttccaccatccaggtgcaccactgaagtgaggacacaccggagccaggcgcctgctcatgttgaagtgcgctgttcacacccgctccggagagcaccccagcagcatccagaagcagctgcagtgcaagcttgcatgcctgcgtgttgctgccaccaccctcctgtctgcctcttcaaagtctcctgtgacattttttctttggtcagaagccaggaactggtgtcattccttaaaagatacgtgcnnnnnnnnnnnnnnnnnnnnnnnnnnnnnnnnnnnnnnnnnnnnnnnnnnnnnnnnnnnnnnnnnnnnnnnnnnnnnnnnnnnnnnnnnnnnnnnnnnnnnnnnnnnnnnnnnnnnnnnnnnnnnnnnnnnnnnnnnnnnnnnnnnnnnnnnnnnnnnnnnnnnnnnnnnnnnnnnnnnnnnnnnnnnnnnnnnnnnnnnnnnnnnnnnnnnnnnnnnnnnnnnnnnnnagcccgagacccgtgccactgcactccaagccttgggcaacacaagcgagactcccgtctcgaggaaaaaaaaaagaaaagacgcgtgcctgcggtgaggaagctgggcgctgttttcgagttcaggtgaattagcctcaatcccccgtgttcacttggctcccatagccctcttgatggatcacgtaaaactgaaaggcagcggggagcagacaaagatgaggtctacactgtccttcatggggattaaagctatggttatattagcaccaaacttctacaaaccaagctcagggccccaaccctagaagggcccaaatgagagaatggtacttagggatggaaaacgggcctggctagagcttcgggtgtgtgtgtctgtctgtgtgtatgcatacatacagacaaagatgaggtctacactgtccttcatggggattaaagctatggttatattagcaccaaacttctacaaaccaagctcagggccccaaccctagaagggcccaaatgagagaatggtacttagggatgg

SEQ ID NO: 49993 - DNA, 606 bp, Homo sapiens
taaaatcaatcagaaatttatttttcttatgtaagtacaaaacacctcttttcatcagtggaccccactcctaggcaacctggccatggtgccgggatgcaggcagtattcaagagtttcttccaaagtcaccagggtgaaaagccattctactacaacctctacatgaccttttaaagtgtacaacttataggacagtcctttctggagtactgtggagggtgaatcaaagcttccagtgtaagtttattgtctggcgaaaacaccagagccaaaaattccaccaaggccctggaaagactgaagtcccctctgtctcatacagtaatcatccatgagatctcccggagcctgggtgatcattacgcccatgatacctgaggcagcgtggactctgccaggggctcctcagacccaaagtggagctcactttggagagtcggagctcatggccgttagcacctaaggatgtggctgaaaggcacagagcaagaaagggcttcagagaccaggcacaggttaattttagaactggagcacacgtgagagttgtagtttcaccaccaagaagcttattctctctaagcttttgaatttgcagcaact

SEQ ID NO: 49994 - DNA, 318 bp, Homo sapiens
tggcttctgcacctggtgacgcttggcgaaactgaggtctcatggagaagccccggagtattgaggagaccccatcttcagaaccaatggaggaagaggaagatgacgacttggagctgtttggtggctatgatagtttccggagttataacagcagtgtgggcagtgagagcagctcctatctggaggagtcaagtgaagcagaaaatgaggatcgggaagcaggggaactgccgacctccccgctgcatttgctcagccctgggactcctcgctccttggatggcagtggtttctgagcccagctgtctgtgagat

SEQ ID NO: 49995 - DNA, 1268 bp, Homo sapiens
  misc_feature (1)...(1268): n = a,t,c or g
ctggcccagccctaatggctgttgagcaggagttggtaaataaactaatggagcctgaaagactcaatgaaattgtggaaaagtttatcagtcagatgaaagaaatataatacatgctcatttgaacttacctaaaagacttgtatttccattgggatgttttcatttcaaaattgttcaaaattcaaaagacacagaacgataaacagtgaagtctccttccctcctttagaactcattttctcttcccaaaaagtgttatcttttccttaaatatccctctagaggtatttttcctaagtggtattgtacggtgtatactgttcttcagcttgtcttctctgtgtaacatatttttgagattgtcccatgtcgttacatgaagagtttcttgattcttggtctataattgcagatgttattgtatgaatgtaccataatatatttgagcagtccctgctgacatttttttcctaaccttttgctattataaataatgattcattttataaccttttatataggtcacattgcacatgagtgagttactgtaagctggaaatctaaagttagaattactaggttaagatatgtgcatttttacttttgatagatattggcaagttgccatctataaggattgtgccagtttacagtcccacccacaatgcatgagagtgcctattaaatctttgtaagtgttatcaaatgttttgatctttcctaatctcttactttaaaaatggcgttttaatctcagtagaattttgtatattcacttaagaataaggttggggactgggcgtggtggttcacacctataatctcagccctttgaggcgctacacaggaaggaagatcgcttgaggccacgagttcaagatgaggttggcaacatggtaagacctcatcactacaatttttttttttttaaattagtgaagtgtggtacnnnnnnnnnnnnnnnnnnnnnnnnnnnnnnnnnnnnnnnnnnnnnnnnnnnnnnnnnnnnnnnnnnnnnnnnnnnnnnnnnnnnnnnnnnnnnnnnnnnnnnnnagtctaggcaacagagtgagaccttatctctttaaaacaaacaagaatgaagttaggtatctgtttatttgtttgagccatttgtatttccttttttgtagactgtcctgtttaaacgttaaaatcactgctgtggttttgatttatacatctcagctggatggcacaataaattattaagccatgttatgaaaatataactatatttaagt

SEQ ID NO: 49996 - DNA, 712 bp, Homo sapiens
ggtggcacacgccctgtaatccccagctacctcagatggctgaggcaggagaactacttgaacccgggaggtcaaagctgcagtcagcccaagatcttgcccactgtactccagcctgaagagcgagactctgtctcaataatataataatagttattatttaattgcaacatgaagttggaagccattttctgttacttctttaaggagctaaatcttttatatttttgttttctctccccttgcgtttcatattttagcttatgatctaaatatatattttgtatattataatattttaggaatagcttaattaagaactcacagactttgacaaagtggtaactagacttttaattactagattcttcaaattaggcttaatgcctgctagcatgccaatccaatcccatgactgatgttattatacactatggcaaatacaaagttgtagtattatggttcttgatggtgtgatttacttatgtaaattatgtacaaatttaagttcaatgaaacactgatttaatgtactgaaaggtaaatagtaccatagtgaattattttctgtcttgccttaggtttatttttattatcttcaatattagaataaatgctaaattattttcatttaaggatttatgtagttgaatattatcatttagtaatatttaatcatttgaaataaaatttaaagctttaattgaaaaaa

SEQ ID NO: 49997 - DNA, 861 bp, Homo sapiens
gcggccgccatgtatggaggatacgcaggctacatacctcaggccttccctgctgctgcccattcaggtccccatccccgacgtctaccagacatactgagggctggtgaccagcacgaagacagaccacacaaacaccactgaaggaacgcttgactatttatgaagaaggaacatgttggattcacacatgcaacctgaaagtgaagaatgttagcagatttatttctgaattattttatatacatgaagttttcactagttttttaagactattttcaacttagcatgcctacgttcatacatttccaaaagacttgcaatggttcgtgccttcattccatcttttaaaaatttgtatgctgtactacatttgtatagaggtttttgttgttgtttttttaaggatatattttcagtatgaaggttattttcttaacttctgcactccagagatttctattttgtagtaccttcaataatatatcaactatatattaaaaaagcacacttgaggagctagggaactattttgaaaaatatatacaatatttaaagatacaaacagtagtgcttaaaaatactacataaagcattattttaaaggttatactggaaagtgcaattttaaaatgagtaaaacctctgtatttctgctggcattaagggttgatggtgttaccatgtatcatcatggcggtactattttttaaaagaaattaaacactggatctctccttaagccaacattgaaaagacttgccgcacttctgagtccaaacactggaaagctctcctttgccaccgttagccggggctcattctccatgtgccttagccttaaacatgcccccactccgc

SEQ ID NO: 49998 - DNA, 714 bp, Homo sapiens
tctttcttttctttcttcctcttcttcttcttttttgcaaataatttacaggcatatgtaaaatacagtaagaatactgggtcatagtttcatccagtgaaactctgtgacaatccttcactagaaggagagtacttttttcacacagtcaggggatgaggatctgatccgaattacattttgtcgagtcactcattcccacagatttgagtttgaatgcagcttgtggggtacatcatcaggaacattgcacaattattttatgtcatttaaaagaatgatggaaaggaatgttagcggtgcttaaaggcctcagtaggcactcaataattttatagaatagttaaataaatattgcttacacataaaaactcatctcatttcaagatgagggggaaaaaggcatttgggaatctcttaatttaaaacaaaacaaaagtacttgctaagggcatgatcctcttatgaatccacaagaattcagccatcaacaaaaatcccgtgagtggaaaattgtatggatctctaacatgacataaaaacgcaactgcgttttacttgctaccttattgcacacctcacttccttgattgagcctttaaaaaacaattccaagttgatatttttttttaaaaagtagatgacaatcttaacattttactgtattttacattcactctgctaaacaaaagaagaagaggaagaaagaaaaga

SEQ ID NO: 49999 - DNA, 1961 bp, Homo sapiens
actttgtctgctgcacgtgatcatgaggggttgtgaagtgcttgccccatcagtagccatgtgtgcatgtgtaaataccatcctctgtgtgccctggaggctgtctttcagatagcatgtacaggtggcagcatagggcctgtccctactgagagtgcagggaactcagcaccgtcaactccttgaccctgcaggtcagattatccttgtagaggccccctggatggcaccaagatcggccctggcaagcaggtgaccctgacttcagagcccttgcctgagggcctggcctggcagctctgctgttagaagcaggaggtgtgcagggggtggggagcagcccagcctctgtgatcttctccatggcaggatctcccagcaggtagagcagagccggagccaggtgcaggccattggagagaaggtctccttggcccaggccaagattgagaagatcaagggcagcaagaaggccatcaaggtgttctccagtgccaagtaccctgctccagagcgcctgcaggaatatggctccatcttcacgggcgcccagggaccctggcctgcagagacgcccccgccacaggatccagagcaagcaccgccccctgggacgagcgggccctgcaggagaagctgaaggaatttcctgtgtgcgtgacaccaaggccggagcccgaggacgatgcagaagagggacttgggggtcttcccagcaacatcagctctgtcagctccttgctgctcttcaacaccaccgagaacctgtagaagaagtatgtcttcctggaccccctggctggtgctgtaacaaagacccatgtgatgctgggggcagagacagaggagaagctgtttgatgcccccttgtccatcagcaagagagagcagctggaacagcaggtcccagagaactacttctatgtgccagacctgggccagggtgcctgagattgatgttccgtcctacctgcctgacctgcccagcattgccaacgacctcatgtacattgccgacctggggccccggcattgccccctctgcccctggcaccattccagaactgcccaccttccacactgaggtagccgagcctctcaaggcagacctacaagatggggtactaacaccacccccaccgcccccaccaccacccccagctcctgaggtgctggccagtgcacccccactcccaccctcaaccgcggcccctgtaggccaaggcgccaggcaggacgacagcagcagcagcacgtctccttcagtccagggagctcccagggaagtggtcgacccctccggtggctgggccactctgctagagtccatccgccaagctgggggcatcagcaaggccaaggttgcgcagcatgaaggagcgaaagctggagaagaagcagcagaaggagcaggagcaagtgagagccacgagccaaggtggggacttgatgtcggatctcttcaacaagctggtcatgaggcgcaagggcatctctgggaaaggacctggggctggtgaggggcccggaggagcctttgcccgcgtgtcagactccatccctcctctgccgccaccgcagcagccacaggtagatgaggacaaggacgactgggaatcctagggggctccatgacaccttcccccccagacccagacttgggccgttgctctgacatggacacagccaggacaagctgctcagacctgcttccctgggagggggtgacggaaccagcactgtgtggagaccagcttcaaggagcggaaggctggcttgaggccacacagctggggcggggacttctgtctgcctgtgctccatggggggacggctccacccagcctgcgccactgtgttcttctctgaagaggcttccagagaaaacggcacaccaatcaataaagaactgagcagaaaccaacagtgtgcttttaataaaggatctctagctgtgcagg

SEQ ID NO: 50000 - DNA, 460 bp, Homo sapiens
tttttttttttttttttgccagtcacatgcttacctgcatttttaaagacagctttcaggtatttggggactacattattaccaaaccttggctttgggagattatacaggtccgaggaactcgtgtctactgcagacgaatgcaattaccccaccttcctccatacagaattgttaggaaatgtccactcctttgggggtgatttttctcctcaagttgtagccaacattttgtccgtaactgatttcagggcaaacatttctgacatcttcctccagctcagtctgccatgccttggcaatccagtttcctgtcatatgcgagccatccaagttgatgccaagtaagatttgcccagctcaaagtgaaagtgtttgcgtcttggtatccggaatcctcagccccagtagcaaagctttagtcattcaccttcatccaataggacgtttgtgaacgtcc

SEQ ID NO: 50001 - DNA, 4232 bp, Homo sapiens
  misc_feature (1)...(4232): n = a,t,c or g
tttttcacttttgaattctgttttatatcaagctataaaaacctggatcctgttcaacatacatacaaaagcagtactctaaaaaataattattattatattaacaatatcaaacacgctaactcctacacacgtacaaagaccttgggcatcctttataccggccacttcctggccacagctttgtaaggcagtacctgggaaaaggggacagacccaagagagccggccccaaatcctgactcagcactgcagaggcatcagccgggctgagtcatgcctgagatcgaagggccccctctcaggctgagaaggaactttcaggcccagggaggagcagagccttagggggagcacatgccgagcaggaaaacgagctcacattttcctgggggtagagcgaggtgcccggcagggcaggggatgaacggagggtgcggtgggcagaataacggcctcccaaagatgtccacggtgacagtccccagagcctgtgactatgttaggttacacagccagtgggaactaaagttgcagatggaactaaggtggctaatcagctgacctgaaaatagaaagacgacctgggttctctgggtaggcgcaatgtgatcataagcgtccttaaaagcggtagagcannnnnnnnnnnnnnnnnnnnnnnnnnnnnnnnnnnnnnnnnnnnnnnnnnnnnnnnnnnnnnnnnnnnnnnnnnnnnnnnnnnnnnnnnnnnnnnnnnnnnnnnnnnnnnnnnnnnnnnnnnnnnnnnnnnnnnnnnnnnnnnnnnnnnnnnnnnnnnnnnnnnnnnnnnnnnnnnnnnnnnnnnnnnnnnnnnnnnnnnnnnnnnnnnnnnnnnnnnnnnnnnnnnnnnnnnnnnnnnnnnnnnnnnnnnnnnnnnnnnnnnnnnnnnnnnnnnnnnnnnnnnnntggtggagggaggcaggagaggggaggcctcaatgaggtgacgggaaaaagattcaactacccacagctggctctgaagatggaggagcctgaagtcaagaattacggtcagcctctaaaaatgaaaaggccagaaatgnaatcctcccctaaancctccagaaggagtgcaggactgccgacacccagatttgagccccgggtcagccttctgacccgcagaactggaagacctcgttttgatccacgaagtttgtggaaacctgtcacggcaataggaaacaaatacagaggccaaagggtcaacagtgagaggtcaagcttgccctgcccctgcccagacctcagccagacttctgggtggcagggcccacggtggcacccccagggcctgtccctgccttggggaagggggagcctgagaggacccaggaggtcttgggcccttcggtagtagacaccaagccctcgggggaccaccctctagttgaggccttgggggatgaagagggagggctcagggccccattgcagggccagcctgtaggggccgtggggccacctggatgtgacgtctaacgctggcggtgctcacagctcgccacaggaccctaaaagcccctgccagacgagagctcatcttttccttctttctcttccagttctgtcttccattccaccattgctgaatcccgctcacggcggccctgggctgcagagggcagatgggtgaggctcggcccctgtctccagagagctgaagagggccctcggccccacccacgaggaggacagtcatgaggccgactgtggaggggctctggacagaggtgtccggggatccctgagcctggctgcactctccctcctggttctttccttgcgtgcaacacgatcagctatcgtttacaaagagtccttggtgttgcctggttggctgccccaggatgggagctcctgcccccatcggacatgtaaacaaaccaaggtctgtccagttccagctgacagggcctgcacctccgccagggctaggcagaagtagcatcagagcacaggagacccgggaggaaccgagaaccagcgctgctcttaacagctcccagcggggtgtgcccaaggcttgctgggcactcacaggcaggtcaggccacaggaaaagctaaccaacctttataagggaaaataggggccgggagggctcctgcgcccccatgctgacgtccaagatgctccggatgcgcttgacctcactgttggataggttccccttgatggccaggatagcgctcaggtggcctttgctgaagtcagggtagcaggtggcataagtggccacctcaatcttgatcggcactggggtcctgcaggcgaatgatctcggccagcgtagggagagcaggctgcagccaggtcgccggggagccgtgctgggtgcagaagtgctggatggtgtcagcattggccaggatgtacccagccagctgctgctgctgctcggccgtcttgaggaccaggcgccccttgctgagttggatgatgtactccttcaccaggtgcaggtgcaaggcctccatgagatctcccggaaacagccctgcagctctgagaactcaggcagcctcgtgtctacagtggcgatgatgttttccagggtctccacaggggccgcccagcgggtgtgcgtgaacctcttgaacagtggcttcaggtcctcatgcaggttctggagcagggtgtcaaagccgtggctcttgagctcacccagggggcccagcaggaggctcagggtgtcctggggtacctgccaattctgctccatggacatccggaaggacaggcagttgttgatgttggcaataacattggccctgtaattcgtcagctgcttgcctctctccagaaattcattaaaggcgcgctggtagctcctcaggaacgcaggcagctccaccagcagcacccgctttatctgtgagcccaagtccagcgtgatgctctcggccttggcctgggcctgggaggtgatctggatgatgtcgatggccagctcgctgtggcagtggccgtccagcctctggggaggcacatcctcagcccagcgccgtgcctctagctccagagctcggtccatcaactccctcacattggccgcctcactggacaggaatgtggcctccagcagtcggatctgcctggggggcaggaggctcccgagccccataccctgcagctcacccaccagcttggggctgttgatgatgtcattggggtagaggttctccacccagagcagcagcatgtaggtgtcgcgctcgcacagctcgaactgcgccacggcggccaggtgggccgcgaagtgctggtggtagctctcggcgtaggccgccacgacgccgaactcggcggggaacagcggcttcagccgctccaccacggcctccaggtcctccttcatggtgcggcccaagtgcagaaagacgctctcggggacctcggcgcccgcggccggccgctggcccatgcgctcctcggccgcctccgccacgccgcgccgccacagctgcagccagcgccgcgggcgcgtggccgccagccccgaggtccccggccccgccgccgccgcctggcggtcctcgcgctcctgctccgccaccacggccagcgcctggcgcagccgctcgggcggcgcctccagcggccgccgcagcacgcccagcacctggtcgcgcagcagctcgtacagcgcctccaccttgctctggcgccgcaccagctcctcctcgctcacaccgcccgccgccgccgccgccgccagctcccgctccagcgccagcagcggccgcgccgcctccagctgcccgcgctccagcgcgccttcagctcctccactgtggggggcgggccatccagcccctgcctggacccggctgcgtcctcgggctccgctgagctgggctgacccttcttcttcttccctttggtgaagacgcagaacacattggccaggcctttggacttcttcttcttctccttcttcttcttcgccgcctcttcctcctccctatatggggctgccccagcctccaggggtggcaccaggtcctcagaggaggcctccgacatggaggctcgtgactctgcctctgatgtggactgcaacttttgggggcctctaggcaagtcgagggtgcctggcacaggctgatggctctagaggccttggaagaaggtcatcatcttcagcatcaccctggttcaggcctgcaagttcctggctcgcttccccgtcaggttggatgttc

SEQ ID NO: 50002 - DNA, 333 bp, Homo sapiens
ttttggtgttgccaggaaatgaggcccttttttcattggagactgcatcagattatgtgaaagatgacaaagcttctttctatggttttaagtgttttgcaattggatatgaatttagccctggacctgatgagggagtcatccaattggaaaaagaattagccaatcttggtggggtttgtgcagcagctctgatgaagaaggacctatcacttcctattggtaatgaattagaagaagaccttgaaattcttgaggaggctgcattgcaggtgtgcaaaacccattctggaattctttggaaagggtctagctctttctcattcaccaact

SEQ ID NO: 50003 - DNA, 364 bp, Homo sapiens
gagaagcaagatggagccaactatgtcagatttttattcaatgctttttcaggggacatagtttcacccataacaatggccacgaaaggacataagcagaagatactaacacagaacaacaaagacctaaaggtgcctttgcaaaaatcatgacctgtgaatgtgaccttatttggaaatagtctttacagatgtatttagttaagagcaggtaattagggtggaccctaatccagcatgactggggtccttagaagaggaaaatttggaaaaagacacagggagagcatcatgtgatgacagaggcagatcatggagtgatgtggctgcacccaggggaacttccaaagttccaagtgccacc

SEQ ID NO: 50004 - DNA, 466 bp, Homo sapiens
  misc_feature (1)...(466): n = a,t,c or g
ggaatgcagcagacagtttttgcttttattggtcaagaatnnnnnnnnnnnnnnnnnnnnnnnnnnnnnnnnnnnnnnnnnnnnnngatgcctgccctgctgtggtcactctggccctggtgtctcctgggatcaggccctcctggcctctcccaggggaaaccatcctgcagcccctctgggtcagcagtgaaggagcagagagagggaacctccttttctgcttctctgctcaggaacagaggtctgtgccccacctgtcggggagcaagtggaggtgacagagaaacagcatcctcctctttccaccgttgagcccccggagttgccagcctaggcccccaatgtcacagctgccaaggcctggggggtcatctgctgattgaaccttccccatccccattttgcagattgaaacacagcagtccaaagacagcggacgagtcacccaaggtcacggtgctgg

SEQ ID NO: 50005 - DNA, 613 bp, Homo sapiens
tttttcttctaaattgttgcctttaataatttcattaattcttgtcaacaatttttatgggcctgcttattaaaaataaaagatctaagtggaaacgttgattagacaaaggtacctcccctctgagaacacctaacattacaatatgaaaacggtggcttcaagaatctgagttcttttaattacctgtatcagatgagtaaaaagacactccggacataatgaatgctttcttaacacaacagaaccacctacacacatgaacaggactgttcagggagcctggtttggtgtgaactggggctggctcccaggtggagcctgctcttagaacacaccagaaggctggaaggctctagtggggccgcttgcacacgcaacagtacagttttacttttttcctggacagtgcagacagtgccatcagctctagccttgcaggagggcacagtcattcttcagacttgcactcctggctctggtgctgcatcctggaaaggacgcgctcgtagaacagcaggtaggcgctggaggacaggacctcctgcaggctggccttgcggacagtgtcatcggagacccacagccactgattgctagttgagagagggtt

SEQ ID NO: 50006 - DNA, 535 bp, Homo sapiens
atcccattatgtctaggttttgcttcatctcattaaattaattgtcttaattcccaaggaccattatttgtgttttggccatcttttgtgtctggacaatttgctataagtgattttattgtagctcaactcttatttatacaacatgtaagtattgttcttatggccaattttcagagatgcatatgtaatttaatttcattttgttttctacatttctctgtagtactatgccaatcagaatggctcaaataccaagggaagtgttattggttctctaatgagatgaaaagctggagtgacagttatgtgtattgtttggaaagaaaatctcatctactaatcatacatgaccaacttgaaatgtccctcgtccacattttaggcttttatacagaaaaacctaagacaattaaactacgtatggattgggcttaactttacctccttgaaaatgacatggacttgggtggatggttctccaatagattcaaagatattcttcataaagggaccagctaaagaaaacagctgt

SEQ ID NO: 50007 - DNA, 1411 bp, Homo sapiens
  misc_feature (1)...(1411): n = a,t,c or g
tggttacaatggtttacaggtatataagccttcatctcaaagctatggcttatttctgttatagaaaattttatttgcttaatgtttgttacagaaacttaagctaactcagcatttttccatttaagttactgtgaaaaagagaacagagcaggccagagactgctattctttgatcttgcaaggttcatccttggctggagtctgtactttaggttttgggaagtttcccattgttcccagtaatgagaagtagctccgtgtgcctaaattgtcttacgctgaacacctcctgttcttctggaggtctacaattgtggtatgtgctagaaagcaagtccaatataaactctgagcaatgggtgctcaagacgacttcctggaacacatctcacgtgtgttgttttaagtcccagatggagcttcaatgaagcacatcctgtgtgatttcattaagattctcaaagattgtgcctggtttcctctggacttgggtttgagccttttgctgagtttgctctggattctttcggtgtggtaaatcatagccattgagtatgacaaaatgctgagtcctgtgagtcttcctagcaaatcaaatctggaaggggtcttgaggactccagcattcatttattatgatttctaaaattgtgtacgtaggtccataaaagtccatgtagattctcttcgaggtcaaggtacgccatatatggtgccacctatatgcacagctttgtggtaaacgcgctgagggaactgaaaataataataaaaaataccctgctgtgtatggccatttaccaacacacacatatatattgagggtctactacggaacaaaaaggaatgggcagtggccggacgtgggaatgataaaggaaaaagaaatggccacaatgtgtctggtttgagtaacatgacagaaattagggggatacactgatgttcttcaggcatctcaaacacacctaaaacaacatgcatgccttagcccttctctactccttctccgggcccctcggacatatcctcaaacccagacattctccgtcttttctacagtcacaatagcttatgccnggcattaaagagtgaagtcctggtttatcctcatttgccttgaaggaatggcccaagatgtactgtcaaataagaatagtagattataaataaatgagcacagtttgacccattttagtaaaaacaagtgatgacccaggaaacaaagacccaccttatgagaagcaataaagtggttaaggacatggattctgaagccagtgcagtggcttccagtccccaaacccaaatttcataattgtgaaatctttgacaaattccttaatctttctgtacctcagttttctaatcagttaaaggggggaaataacattatggagttgtcata

SEQ ID NO: 50008 - DNA, 160 bp, Homo sapiens
tacattccttttttttatctgaatgttccataataacttggagaaattggctgagatgtaccaaattttgtaggaaattgaaggagctcaaggcagactttaatttcactctgccaccctaattcaaaacagcagccaatgcaaatgtacagatagacat

SEQ ID NO: 50009 - DNA, 413 bp, Homo sapiens
tttttgtggtggtcactgctcagtgtaatgtgcagaatgatttgttttttgtttttttttttttttttggtccttcattgcatcctgccatacccatgagcaaacagtttggcattaattatatatcactgccaccctctgaactttgaaaactgccatcttcagacttggtataatggaagaggctttctctctccaataaaccttttgcttcagggtatactcttcggtttttttccagatgtattatgtatgaactttgtactatgtatagccagagttttatttattttttaaaaaagaaactttttcttgataaaggaataatggtggtctagctagttcttgtaaaagtgatgcctcttgaaaaaaaacagtcctattcactagcttttagtaaaagaatcagatct

SEQ ID NO: 50010 - DNA, 1120 bp, Homo sapiens
  misc_feature (1)...(1120): n = a,t,c or g
tttttttttttagtcaagcaattttttccctttattatttttgttaaataagattccagaaagtatagtgcaaacactcagtagaaaagttgcaattaagaaatgtacattcacatttaacatttcagtccattcactttttttaaaataaaaataggacaaattattcaattacttgtctcaatttaacaatcttgaaaaagactggaaggtaccctacagtgttcagttgacataaaaatagacccgtattgatcatacaaatctatcatgagaagttacccagtgagagtgagttattgtaattctgaatgtactcatcgtgtttctcacttctacagaagcatcctcagtgagttgtattgtgcgagaaaatgacacccttgcccacatcactctccattccatagagggacacaaccctatctagccaaacccagaagaacgcaggcgcttacacaacttttctcggacagtcgagaaaatccaaaagtgggctttgggcttaccttaaataggaatggaatgtaccactacgagatggtcatcataataaggacattgttgtttgagcggggggtgtgcaatcagtataaatgaggatggcggaggaagaggagtggtgactgaagggaggtggtgcataataagtgcacgagctacacaaagctcgagctacacaaagctcaggctccacgggcctcgccttggctcccagggatgctctgcagccagcgggcggatgacctgaggtcggacctgggcctgtccctttgtgcatgcggcgtgatttcaaattcaaactaagttcnacaccattaggagttttcacggcatgcagtccagagtgcaaatggcntgcatatgtgcagtttttacaggtggaaggcaagaccatacattttttccnacactgggctgtgcctncctagtggacaggttgtatgcaagagncggtgatgggctccctcaggatcccccaatgtgggaatggtcccctgagacttgtgctncgtgtgcctggggcccagagttgggtggggggttgctggtgggaggtgagaaacaagttctggctgccgtcgggccagcttccgactgccctcacctgggaggtgga

SEQ ID NO: 50011 - DNA, 1563 bp, Homo sapiens
aaatattttttattgtaaaaacaaagtcaataaaggttgacaatgtaaatgttatctcacaacatttccccttggttcctgaatttgctagattcctatgtaccagcaaatctccattagcatttctcaggtttcatgatccttttcagatatgttggttgattttatgtatatattgccttagaaacaaaaatcccacctgatattaaaacaaaccaaaaaaaatcataaaagcaagcaaatgaacaaaaaaccctagttttgttgtgcttttctttcacatttcctacagggagatttgtatatctcagatactttcaaaatctaataggtaagtaaaattagtgccttaaccaaacagtaagataccaaagaatcctccatcacaagttactgaatcaaacttctcatgacatttgcggtatattcagatttgaagattttttaaatttagaatttaaaacaaactttagactgctgattttccatatttcaaagactgtagttgtttgcagcatataaatggaaagagtagtgcaaaacgcatcaagttttatatgataaatatatactttcaacctaatggctgcctcaaaagtaaagagtgaacaattacttctcaaaataaatctagattgacttaaagttcacaatttagaaatagcaattgctactctatttccatagattgcaaaatgatttcaaatacagattatacatacaattgttttacaaaaatagaaatattgtttgggattttacaaaactttataaaatataacactatatttgcaaattcaagatagtttcacactgaaatagacaatacttccacgatatgaagtctagccaaacttaaagtggtctgccttgaggccattcttacatattatttcttccaaatcttcaagcctaggtaaatctgtgctctaacacagactttgtaaaaaagagactgtttattttcaagggttttataagattttcaatccagaaataatgttaaagcataagaatttatacctaaaaaatatgtcttactaaaggtagaagctaatgcagtatgacaattctgtataactgataaatttcagaccaaattcctaagaatgacaacttttattaatttaaaatatatatttgacaattataatttgggacctatataaaacaaaaatataatcacaactattttatggaaaaatatttattcatatagagtgaaaatacctccaaacttagttatttgtagctgtcagatgagaagtatttcctaattacacccattcataaacactcattttatcacttcaaagagcaccagtgtattttttcaacaaaccagaaagtaagaaggtaggggcttatttcatgtaacagtgctattatgataaggcaccactaggtatatgaaaaagccaaagtatttccaaatcatgtgtttttgttactggtgtcttaaccattagacaggatggttagaaaaaagctgctaacattattaatgaaccacattatagcccctttcccaccattctgtgcttttagttttacttataacag

SEQ ID NO: 50012 - DNA, 1080 bp, Homo sapiens
  misc_feature (1)...(1080): n = a,t,c or g
tttttttttttacaaaaaaaaaatccattacatttattaataatatatcttagattctcatcctgttcttttaaatggcgcccactggtctcatacagaggagctgtgtgactttctggaattatagaaatatccgcatccagccatgtgctgagcagaccaatgtaaaatgttcagcaggttttccaatgtctcttggatatatttaatcatctctgcagaagaactcaaaatctcagagcagctccactccagatccagggcaggaggcagcctccagggagggaggctgcgtttacgagaatctgccttttgtgtgtgcctggctgggaccagcctctgggaaagagaagcaccaagatgtgaacagggctgtgggccgatggctttagcagccacataatccctcctttgatgtccagggtcagttcgagcctggtcccccaggctaggaggagacgaatgaaagaatcttgctgtggtctttcctgcaaaggaaacagcagtaacattgattacccagtcaccgggaggaattcttgtgagcgcgcacctctgtgtgcctttgctctccactttcaagagaggactttaatcacaggacaaggagaagacccaggcccatttcagtctccgggacgggtcacagcgagccgtgtgaacgctggcctgctcacacgtggccatgacaccagcaggctgtaactcaggctttgcgtacacaatagctgctaggagtacccatttcagacacgcacccactctaactattctcagaaagtctcagctcacctcgccgtgggagagctgggccctgcctcccttacacatgggcaaacggccccctgctggcactgtgtccctgccttcaggcctgggagctcttaactttctgccaacagggttttccaagtctacaaacccccacgccgcaggagcacatgcagatgactggcaccgtgctgccgccgggccggggtggacgcagggtggacgcgggcctgtctgccgcgagtgggagccccagctctcctganctcgggcacttacagacacgaaggctttttgctcaagggctcg

SEQ ID NO: 50013 - DNA, 733 bp, Homo sapiens
ggcagaaaggacattccccctcccctccccaggtgacctgctctctttcctgggccctgcccctctccccacatgtatccctcggtctgaattagacattcctgggcacaggctcttgggtgcattgctcagagtcccaggtcctggcctgaccctcaggcccttcacgtgaggtctgtgaggaccaatttgtgggtagttcatcttccctcgattggttaactccttagtttcagaccacagactcaagattggctcttcccagagggcagcagacagtcaccccaaggcaggtgtaggggagcccagggaggccaatcagccccctgaagactctggtcccagtcagcctgtggcttgtggcctgtgacctgtgaccttctgccagaattgtcatgcctctgaggccccctcttaccacactttaccagttaaccactgaagcccccaattcccacagcttttccattaaaatgcaaatggtggtggttcaatctaatctgatattgacatattagaaggcaattagggtgtttccttaaacaactcctttccaaggatcagccctgagagcaggttggtgactttgaggagggcagtcctctgtccagattggggtgggagcaagggacagggagcagggcaggggctgaaaggggcactgattcagaccagggaggcaactacacaccaacctgctggctttagaataaaagcaccaactgaactgaaa

SEQ ID NO: 50014 - DNA, 750 bp, Homo sapiens
ggcacgagctggagaataaattgcctttcctaaattcctctgcttcgctcctttcctggcgttgctctggaaccttgttggtgtctgtgacccaatgactgttagggtcagctagcttcaattgcccctgcactggaagcaaggtttgtcagtaacaccaattaaaatactaccagtgtaagtagaaggtgtgttttgcagatgagaaggtgctaaggatgccttgcttatgttctctgtgttgctgtaataccatgaggggtatgttgtggcaaacctggcctttgagatcaagacgaaccccacctgccctgagaagccgtctgctaccaccacagcctacccgaattggtcctgtcccctaaacccctcacactgagaactgcttgtgtgggagagagctggttgggttgatcttttccgagtgtgacttacctccttcaaggggatgtttaagcttctcgggcagaagtggtgtgtctattcctgacaccaaacaccgtggtatatgtggttgtcacactcagctagtgatgataaaggtgttcttaaatatgttagctttcagttttcctgaggaagcaattttatggatacttccccctccttctcaagtgaggaatagcagagcaaattttatttgggaacttaaaccaatagttataaccaatagttttcaacctcctggcctcaccactggttccttcctgagctctttccccacacctcaaaaagagttacaaagtgatt

SEQ ID NO: 50015 - DNA, 590 bp, Homo sapiens
ttttttttttttttattttgcataacaagtttatttttttaaaaggcatatagacaataaacaaagtaaataatcagatcttaacttctgtcctagacttgttccgttaagttctagtctgtgagcacttgtagttcaataatcgtcatcttcatcagagtccattacttttcttctgttgaatttcactgttgttgtcttttctgtttgttggcttacttttttaaggatttctattaaaccttgttctgataccttctcacttaggttgtccatatcttgccatctgtataaggtaattctctactgctttagttttttcaggctttacaagtgctaagttacttaacctggcccgggccgactgatccagaacttgggctaagatactgtttctcatttctgcttccctgtgctttgcttcctgttgggccgcatcaccaggatccccgtgtttggcctgcagctcggccagcctctgtctcctcagcgcctcaagctcctcgtccgccatggctcggcgtcagcgctggagcagccgcggtcactctcgcagcccttcgtcgcagtcgtttctcttgttttttttg

SEQ ID NO: 50016 - DNA, 6104 bp, Homo sapiens
  misc_feature (1)...(6104): n = a,t,c or g
gaagaatgttacagtgaaagtgaacaggaagatccagaaatagctgcggagacaccaccccctcctcacgcttcccagactcagtctttgactgcacagcaggcatcttcatcctcacccagcctgagtggaacgtcgtattctttctcttccctggaaaatacagtgaagacacccagcagttttccttcctccttatctaaagagagacaatccttgcctgacacagttaacagtttgtctgctgctgaagatgagggacaaccaataacgtttgctgtgcaagttcattcacctgtaccctcagagggcaggcatccacaaggccctggaaaacagttttgtcacatcagaaagtggatttttgaactctttatctagtgatgatacttcttcattgagtagcaatcatgaccatcttactgtcccagataagcctgctggatcaaagatcatggacaaagaagagacaaaagtgtctgaagatgatgaaatggagaagctgtacaaatcattagagcaagctagtctatctcctcttggggaccgacgaccttcgactaaaaaggagttgagaaaatcctttgttaagcggtgtaaaaatccatctataaacgagaaactccacaaaatccgaacattgaatagcacattaaagtgtaaagaacatgatctggccatgattaaccagttgctggatgacccgaagctgacagccaggaaatacagagagtggaaagtcatgaacaccctgctgatccaggacatctatcagcagcagcgggcttcgcctgcccctgatgacactgatgacaccccccaggaactcaagaaatcaccttcttctccctctgttgaaaattccatttgagacaaagtcagggttttctcctcttatattttatcacaagcaactcttcaagatgttgcaaaagcttacatttttccttaaaaggaaaactgaaacccagtccttcaagcatcagcttcccatctaaagatgcacgttagatgaagataatcaccgaatacaccagggctcctcatttcagtcgtaacgcatccattgagattggaatgattgagttcagttgaaaggcgttttttgtgttcctactgggagctcacggtgatgtggggctctaggggggatgtgagaaatgtctcttctgttcattgctctccagagaatgctatggacaagaatcaaattttaccaggagtaattgcccatggaaacattctgtttttcaaaagaagaatgtacatattccacttgactgggaagctgtgtggcccaaatcactgtttgagtggaggaatgttttctagagcagtgactggaaggacaaacgtggtgttgcagaacaaaaattccttgcctttggtatggaatggtggtgccttttccatgtgatgagaaatgcttcatagacagtggcatgtgggagagctgaaggaggaggcgtgttccatattccactcattcaaaggacagcttggtgttttcacactttatgcaggttaggggatctgattaatgtttcctttccttacaacagctagagaaaacatctcatcacaattggagacctctacttcctttgagctttcctactcaatggtaggagataggaatatgttccgcaaagaatgtctactgctcttgtccttggctgtgatccctatacatagtgtgaatttatatccaggtttcccaggatcaatattgacaagacgactttggcatctgaattgttttaatatctttactcaaaaaaacaaaaaaacaaaaacccatggaagcaacaaaagagttaaacatgagggatttatttttgtatgtttatatgtcacttgtgtgctatgtgaatagctatgtttgttatttaaatatatttatagaagttcaaattactagtgtttaaaagatgatatactattatatattgtgcttagtatatatttgatgagtctatactttttgcttgagaaaaatagaaatactattgattcactggtgttatgatgttgcactgtgtctgaggaatgctcaggaaatcttgtgggaaaaaaatggggcatgcattcataatttttcattttcttccccaccccaacccccatgagctcttaaatttagatttctatctcttgtaagtcactcttttaaccagcaaaggactttcatcttagattatcctttctattaaataaactttaagctttgtgccatttatgcctgcaaaccttagaccaaaggcaacacaactaatgtcatcttttcattaaagactaatagaaatttagaaatcattgtgttaaagagagctatagagaaacaatatgaaagtcttcccttactaatcaccatgaatatttctcaccataggaataaccacaacccaccaagtacccatgttggccctgcctacccgtaacaaattgttcacacaacctattttgttttatagcttcaaagtgtggcttgacattcaatggaaggaaccacctgaattatatctgcaaacaaaatggaaatagttgttgaatagttccccaagctttactaagaagccttaatactctgtaaacaaacaaacaaacaaaaaacaaccttagcattaagaaataaaaacaaaaaacaagaagcaagttgtactgctagaaacttctctaagataagaggccaggccagtcagtttggcccagcaaacatgtgggtacttctccacctagggaagccactgaagatgagtttgacctgtggtgacctgacagagagaacattcagatcctcagattgcaccctgatgccctggtttaggaaagcagtgctttaaccttttgcccctggaaattactgattctttctgtgattagcagataccagaagggaaattatttaggattggcaatgtaaagagtattgaaggaacaacaaataacaatagcagaaataacagtgtgacataaagtgcccttccacctatttttctttggtttgcaacaccagcctgtagacttccagtttttcttaaattgaagagctccagacacttttgagcagggtttgtgaatagctttgaatgctttcctttggcttttcgtgaagacatatttccccagcctttcaactgtaaactcctttagtaccattgaaacttaaggcaaaaaagatccctgggattacttagccaaggcttaaatttatttttcaaagtcaagaacattagcctagaagtttttgctttgctagttaaagcttactttgcagagcttcccaaagtgaaagggaaactgaacttcacaattttgcacctggctttctggagccccattgcctgctcattcgtgtttttccccctgtaaattattttgcttttgaccaggttgtgctagaaagtagggctgcttctgtgagttctcagcctaggctgtggccactaagacgtgggtggggggatagacaggagtgagagggagagtgggtgacactttccgtgacacttaatgtaggaagacatgggcttctctctcttggcctcaagccacttttctggtccaaagaatattgggaaaactggattactttcagtatatttcttgagaccgggtcatctctgaaatgcatttggggtagtttcctgggggtccaagggccaattcctatacccagtcctgcagtgtctgtgagctgtgggaatgagagagaaaaccatggctgctcagggaagggaagtgggagaatctcttcagcacacgtagatcccaaatctgtgggcacctgctaaagattaggatttggagaggactcctctttggggttgtgaagaggaccttttccctctgttgttagcctgtagatccagaacggagcctgatgtgatgccttcactggttgatatattgcaaatagacactctgagccctgcattgcaagggcgtcttttgctttaaagaattcttagttttgccacaacagctcaaatctcagaataggatcaaaggcctagaaagactcctaaagtataggattacaaagactccaggaagcgtaagaaagagattgtgtttggagtcagatttcaatgtgaaacccatgccttacatttacacagcactttgtagtttgcaaattggtgtgttttcagccccctcccgctgccccatgctctgagatgattgtggattattacagtgaagtgcctggcccggagcccccagtgatgaagcaggaacttgagtctcaggactcccagcggctctctgcccatttcctcctctccgccccccacctcgcttcacctgttaccttgtgaagttgctgttggcacatagcccactaggaaaccaagaagtttgactgggagcgtgtgtttcattgcactgggcctaagcatacggctggccctggtggctgtttgggcctaaattcccccatttgaaaccctaaagggcccctcctccgtgcttgagcacagtctccctccctagtggccctgcctcaacctgctggcgggctgtctatggattggggtttcacctaatcatgctgtgtttcctttcttttctttctgtacattagactacttgggaggtgctgtgtgatccttggatgaaaaacatatatttaaagaaatggagagtgtttattttgtttgctttttgaggcatgtgctgtcaaatgttagagaccaaacttagtgattagaggttggtcctttgaccttcttctcttaattgcttttcatgtaatcatgataatttactcaggtagcactccagtcacaaacaatgtcacagagatgaaacagattcaaagaaaaaatatttttaagtcttttgaaaagaagtgctattcaaatttaagacatgtttaaattcataggtacattatctcttagtaagaaatannnnnnnnnnnnnnnnnnnnnnnnnnnnnnnnnnnnnnnnnnnnnnnnnnnnnnnnnnnnnnnnnnnnnnnnnnnnnnnnnnnnnnnnnnnnnnnnnnnnnnnnnnnnnnnnnnnnnnnnnnnnnnnnnnnnnnnnnnnnnnnnnnnnnnnnnnnnnnnnnnnnnnnnnnnnnnnnnnnnnnnnnnnnnnnnnnnnnnnnnnnnnnnnnnnnnnnnnnnnnnnnnnnnnnnnnnnnnnnnnnnnnnnnnnnnnnnnnnnnnnnnnnnnnnnnnnnnnnnnnnnnnnnngacagtattttgatatagccacatacatgatttaatgagtaatgttaagtacagaaaagctgccatatccacatagttttagggggcatttcttcttcagtctaacaagaatatgatatccaattgtggttttccaatttatttctcttccaatttcttttgtatacctcacaggagaaattgaatcctagaactgggagatgactgccctgcccagggttttgtaatacataattgaaaataaaagtccctgaaactaaatgtttgcagcctgtatgaaatggactgtggaagggggataatttctctcctcacagaaagccactcgtctccttgaatgaggcattgagcagacacacgtttctctgtgtcgtggggcaggaagcaattcccttgcctcttcagcacatctcagttctttcccacatgaccccagaaccacatagaaaacattgaaaataatggattcttcattgtatttgaattttttttttttaacctttagcccaaaagggaagtgtgcctcgtggaaagagcaaatgccgtaaaatagaaaccaggagttttaatcgccatatattttaatgtgcttgcatgatgggaatgtgacttttagcactgcatggtgtttgggggcaagatattaatgtggaaatcttagcttaagttttactgtgctctcatcctgtgtcagctacccctctaaactgaaaaagaggcatggctcatttctctcctgctttatgtttttgaggttgacttgtaagataaaaataaaaataagaaaaaaatatatctaggcaaatgacatgaaaaaaaagttgaaatatactactggtgttcatttttgtcctgcagtgttgctttctcaaagaaataaacatgtggctggaagtgttt

SEQ ID NO: 50017 - DNA, 688 bp, Homo sapiens
  misc_feature (1)...(688): n = a,t,c or g
attttccctcccgaaattggcaaaaataatacctaatttctccctacctcacagggatgttgtgaggataaatgtgttcgtgtaagaaagaaattatataaaacctcaaggtattatttttgtggtgttgttactaaacaaatataaaaattcaacaaaaatagtgctttggattttgttacatttgttaaaaataactttgggcatttggttaggatatgaattagagtggagttagctcattttgaattatatatgacagtttagttcattgcttatttttaagataaacaaaaggaatttgaccaagaagtcataagttgttttttaaatctgtatgtttactgaaaaatctttcttgagatcttaaaattctgtgttgattttggtatacccgctgtgaatggtttatgcctaatcttaatagaanggggaaggatcagcaaccccccaccccctccaatnagcatggtgccccacaccagcccatggcatggtcctctttgaaacagcacagtcagacagngggatttgcctgcacagctatattaccaacatcacacttgnggcccccgtaatttgagggggcagggacagttgctatagggaanaaattgtgtttaaattganagggncgaatcattntttgaggccacanaaacnnaaaacggtcctttcnatggaaaaa

SEQ ID NO: 50018 - DNA, 252 bp, Homo sapiens
gcaacaggcccctgattatacagttccaaagtaataagatgttaattgtaattcagccagaaagtacatgtctcccattgggaggatttggtgttaaataccaaactgctagccctagtattatggagatgaacatgatgatgtaacttgtaatagcagaatagttaatgaatgaaactaggtcttataatttatctttatttaaaagcttagcctgccttaaaactagagatccaactttctcagctgcca

SEQ ID NO: 50019 - DNA, 1513 bp, Homo sapiens
cctattatgcatactagactttatcatcagtacttatattcttcaaaatgtacctaatacagtcacatgctcattaaaagagttgatacagttttgatggcaggctacagttccctgctgtctttccatgatgcatcagcagaaccattcaaagccacacacaccaaacctattaagaaaaaagcattcataattcccagctgtgtcctctacattttccaaacaatattaatttcacatgtatttatcaatattatatatttagtgggaattaacattaaaatcaacatattgttcttaagtaatccagactaataaaccatgagtcaaacaaatctactctgcgaaaacctcaaatcactctgtgtgataaattattttaataacataaagctataaattttctctatttttatatccaagactaaataccattgactatccttcaaaatgtttatgttccaaaatcctgtagttacacataaacccacaacaaaagacattactttagaatggtagaaaaaaatatttttaaaaattgtcaattcttaaaattggttaagtaattaaaaccattaaatcataacactgacctaacaggacaagaagtttcttttggtaatctttattagtatatgatcatcctcaagggtctcacttgctagccttttaaacaaatttctaaggcaaatttacagttcatttaaaaggtaataaataccacacactcctacaaccttagccactttacaaaacaaaggaaaaatttcttccaaatgttattataattaagagcttttctatattaattcctcttacagtctcccagtgtgtcttagattgccaagtacatcttgattgtgacatgcaaaatggattctgctttagaaatgggttaattggcatgcagatttctgcagagatccataatcccacaaacaagaggggaaatgaacattatagggctgactctgacaacatgtacttggcaggggaaggcggcagggggttggcaacttcacaatggtggatttgggggaaggaaacaggacaagagactgaggtacccagaccctcatcctgccaacagcattcacgtagttactagcttccatgtataataagacacattttcaaaatggaaaggaggttatcagagagacggattcagatcatcagttaccattagactacagtttcattcaatttaatctttaaccattaaaaatttttaaagactatatttcaaggtaatagttcatttcaaatttaacaaattacaaatgcactaatttgtatgtatgtgtatgttctctatgtgtcatcttaaagcattttaaacatttttgataattaaaatgcaacagccatgttgaaattaatgtttacataaactgtcagtgactttattggccaagaaaaggtagctcaaagctttaactttatatgagcttgataaaagcctttcagggcatgtttgagaaatgtgctctactataaaagtaactatttt

SEQ ID NO: 50020 - DNA, 680 bp, Homo sapiens
aacatcttaatattgagtttattagataaagacaagaaaaaatggggcttggggaaattggggcttctggggttttaaggagcatgctgaaagaacgtaagaaacaaaacatgaagggaaatggaaatgttaccctcactcccctcctccctgctgtccagtgtggatgccacctccagcctgcaggacggagccccctcccatcatcacacagtgcacctgggctctgcagccccttgcatccattgcagccgcagcaagaggcctccacttgtccgtcagggacgctccaaggaaggaaaaagccgcccccggacaggggagaccactgtgttctctgtgggcaggtggggcaggtgctccagggaaaggggggctgaggtagggggcccagtgatcaggcacctgatcccaaaagtgggccttggctctttcctcctggactgggagctcctgcagaagtcaggctacacaatgtgccccacaatctgagaaggcctcccctaccttaggccagagggaagtagccaccaaactcaggatgtccctggtcagaggggagggccaagcagcctctgagttgtggtcctaaaccccagtgttccctccccaaccaggttccgggtgacatcacatctgagaagcgctatggactgcacgaacacccctcagtgccgaat

SEQ ID NO: 50021 - DNA, 782 bp, Homo sapiens
tgtagctcagaaaacgcgggctaatttggaagtggacaggggcggagctgtggggccagcacggaatggatcacgtggtctgaagtaacttccttttctcctttcttttctttttggagtaacatctcaacggcacctcggctctgggctgtaagccctgcgatctcaaggcgcaaggctgggcgcaacggcagggttgcggggttacgggattgcggggtccggggagtggaacccgccgactccgggaacgaagcaccggcgccaaggtgtgggaggcggcggggtggagttggacgcctgcctcgcgccgacgcagtgcactcacgggggcggtcccagaggcagctagctgtggttccggttccgtcgcggagacacgtgaaggtcggtgcggagttcgtctctgcaagcatggttgtcctgggatggattcctcctcctcttcctctgcggcgggtttgggtgcagtggacccgcagttgcagcattttcattgaggtagagactcaaaagcagcgcttccagcagctggtgcaccagatgactgaactttgttgggagaagtgcatggacaagcctgggccaaagttggacagtcgggctgaggcctgttttgtgaactgcattgagcgcttcattgatacaagccagttcatcttgaatcgactggaacagacccagaaatccaagccagttttctcagaaagcctttctgactgatctcagcattacctctttggaaaaggaaggtagttcaagaaatgaagagctgttgatgg

SEQ ID NO: 50022 - DNA, 735 bp, Homo sapiens
cggaagggcctgctccggagcctggccagggctgcgcagtcatgatcatcgagaccgcggcggactacaggtccctgcagtgcctgctgctgaggaggccaccgaagctcggggacgcgaggagccggcgtggccgtggaaagacgccccgatccggacgctggtgcagcgcatccaccagctgcaggctgagcgcgcgcagggcttccgccgactggaggaaggccaccgccagtacctgcgcacggccctgactacgacttcgcgcgctaccggagcacagtgcacggggtgacccaggccttcgccgccgcctcgcggaaggtgctggcggtggaagcagagctgggcgggcctcacaggcagccgctgctcgccggccacgtgcgcagcctgcaggagctggagcagacgcggctgggcacggtggccctgctgcagttgatggagacgccagagctggcggggcaggaggacgctgtacggatgcagcagctgaaaatgaaggtaattaaaaccatggaggcgatcagcgaggttctccaggaccttaggtttgatgcggaatctgccgagtgatggcggctccccagggatgcgccgagggagatgggaaacggggcggatggcgcccagcccagccctaactgccagctggctggggttgcgccccactgcgctgctgaccttcctgcagttccagacacctcccacaataaagagctcctcctctgt

SEQ ID NO: 50023 - DNA, 335 bp, Homo sapiens
  misc_feature (1)...(335): n = a,t,c or g
cagaaataaatatttggaatgaaggggaatgtactagaacaccctttttgccacgggtaaaaataacagaaatgtatggtttgttttaccttcatttctgtacaagtaaagcttattagtctaatgttttgttcctttcccacctcacccctacctcttttgttttgttttgtttttgccctttatgtactacattcttattttctaacttttaaacactgtattggaggtttttttttttaatttacagatcatatttattttactatttttgtagaaaattattaattttgattgtatttttgtattttaaaagcttcttcanttgngttccc

SEQ ID NO: 50024 - DNA, 354 bp, Homo sapiens
aagaattctgtatcagaaccttaatgagccaaccacgtggagcttaaccagtgatagaactagaaattgggttcttcaacagaaaatagaaggagaaacaaaagaatcaaactacgctaaattgattgaaatgaatggaggaggaaccggctgtaatcatgaattagaaatgatcagacaaaagcttcaatgtgtagcttcaaaactacaggttctaccccagaaagcctctgagagactacagtttgaaacagcagatgatgaagatttcatttgggttcaggaaaatattgatgaaattattttacaactacagaaattaactggccagcaaggtgaagagcccacttggtg

SEQ ID NO: 50025 - DNA, 134 bp, Homo sapiens
caactagattcagcattggaaatttgtaaggaagaacttgtcttgcatttgaatcaattggaaggaaataaggaaaagtttgaaaaacagttaaagaagaaatctgaagaggtatattgtttacagaaagagct

SEQ ID NO: 50026 - DNA, 590 bp, Homo sapiens
  misc_feature (1)...(590): n = a,t,c or g
atttatttgagctgcataatctaaacatgtcaaacgttcagtgggactatttttatatatgtatatgtgggtgtaggtcataacatttcagtttataatataaattgttatttcagtttataagctatctctcagaggagactagctcttttgagaattcataatttaaagttttagactgaagtaaaatgcaacatagataatagtgtaaatcagatataattgagggctatatggcagtaaaactgctagtgccagttttcttgtttgcctgttatacatttttgatttttgtttttgtattctgaacattttgagagatcatatgtttgttcaattacatttagagttggtttgggaataaatatcttctaaaaagagatttatcttaaaaatggaagtcctanaaattagtttatccagagtttataaagtcaaatattcagtaggcatagactggaatagataaattcatggaaatcatatcctttcagtacaccgtataacttcaatattacacaagtaacattgaggagaatgccatcagctttgttctcccttaaattctttggttttctttttacattttg

SEQ ID NO: 50027 - DNA, 372 bp, Homo sapiens
  misc_feature (1)...(372): n = a,t,c or g
taaatttgcgaccgctcgacgaaaatagtaacaaaagaatatatactggaataattttgagagtaatttgaagaattagatgcaaataaatttgaaaacctttaaaaagaaaccaatggcctaactgacccaagaagggaaagaaaatctaaacagactgataaatacaaaatgaaattcagacacttacagnnnnnnnnnnnnnnnnnnnnnnnnnnnnnnnnnnnnnnnnnnnnnnnnnnnnnnnnnnnnnnnnnnnnnnnnnnnnnnnnnnnnnnnnnnnnnnnnnnnnngctcccatctctaaaagaaaagaaattagctgggcatggtggcatgtgccttagtttcagctactcaggaggctgagac

SEQ ID NO: 50028 - DNA, 468 bp, Homo sapiens
tcaatgaatattttcttctgaaaaactcaactttaaactttgtaattttacagttccattgagattatattgtttatttgttttaagacatatactataactgttttggttttgcttctagaaaaactgattgcttatcaacgagaattccttgctttgaaagaacgtcttcgaatagctgaacacagaatctcacagcgctcttctgaattaaatacgattgtgcaacagttcaagcgtgtaggagcagaaacaaatggaagtaaggatgcgttgaataagttttcagataataccctaaagctgttaaaggagttaacaagcaaaaaatctcttcaagtgccaagtatttattatcatttgcctcatttattgaaaaatgaaggaagtcttcaacctgctgtacagattggcaacggaagaacaggagtttcaatagtcatgggcattcccacagtgaagagagaa

SEQ ID NO: 50029 - DNA, 1537 bp, Homo sapiens
gtctgccgtggctacttggtcaagatgggcggcaagattaaatcatggaagaagcgctggtttgtcttcgaccggctcaagcgcaccctttcctattatgtggacaagcatgagacgaagctgaagggagtcatctatttccaggccattgaggaagtgtactacgaccacctgcgcagtgcagccaagagcccgaacccagccctcaccttctgcgtaaagacccatgaccggctgtactacatggtggccccatctgcagaggccatgcgtatctggatggatgtcattgtcacaggggctgagggctacactcagttcatgaactaactgccgtgggcctcctggcagagcacaactggggcttttgtataagaagactttaatattctgtaaggagcttggtcctgtgagtttctgggctctggcctcctgaagaaccagccagaagaagaaaagtagaggtggctttgctgcctcctggggagcccagaacttgcagtaaccctttaggtccctgccccaggcccagccagggctggaggagctgtcacagagagggcctcagctctgacctgacacctgctctccccagcctgttttctcttttctaaaagacaaattatggtaccataagctgccaaagatcccctcctgcctcagacccctttgccaggggctttgggggctgagcagagccacatccagagtggggtaatagctcaggcggcccgcttcccatttctcaaaccccgctctgccccattgttctcctttcccttatactttttattaccttgctcaagggccagagatctcaagtgtcaaccttgaggtcccagctccatcccctagttgcagactcatcaccatggttaccatagtgactgcttcattgccatggttacatactaattgctgcagctctgtggcccagcccactgcttcagctgtgcgcgagtctgagggtacgtgccatcatctctccagcccaggcccctgggcattctcatgctggggggaagggactgaatacctttttccttccccctgcctgtgtcttcagccctgatgcacaggctgccagccccccagtccagccctctcccttccactggtgccttgcttagagccagaagggatgaagccgggggatctatggaacagaggaggagcgatgcagttgggagaggaagctagaagggttatggttggagttctgtatagtgttgagtttccgacagggaaagaggattcctccaatgctcctagagagaaagcctgagcaggagatgatgcagcagaggggaagggccctgtggtgccgccgcccttccttcagcctccgaagggtgatggaaatggagagtggaggaccaggcctccagctgtctggcctcgcccttcacgccttaacactaagcccacctcccctgctctccttcccagcattgagcccttggttgcctgggcccaggctgggggttttcagtatttgtaagcatttcagcagaacaataaagcctttggactacga

SEQ ID NO: 50030 - DNA, 345 bp, Homo sapiens
ggctcaattctgataagtgatcaaatttcttgaaattctttcaaatcagctgaaaatttggttggggtgaattgatggtttttgagaagtaggccaggtatcctcacaaagaagttttagaatagggtttcttttaagtttttaaatatcatcctttgtctttccatatggttttcataaccaaatacatgactatagcatggttatttttctagtactgccatttgtgatatagccacatcttggcgtgcaagctagacatctcaggtaaatttgtttttttttttttttttagccctagaggtaacatttataactaaaatgcattcctgcaattctgtttgc

SEQ ID NO: 50031 - DNA, 388 bp, Homo sapiens
gataattttctgatccagaaaataccagcagctgccaaactgctagacagaaaaagtcttcaagccattaaaatacacagggatacttttctacaacagaaagctcaatcacttaccaaagatgtacagtcttactacgtctttgtgagctcatggatgatgaaaatggaatctattttgtctaaagagcagagaatggataaatttgctgaagatctcaccaatagatgtaatgtttttatacagggcttcttgtatgcatatagtattagtaccattattaaaaccacaatgaatctctacatgtccatgcaaaagccaatgaccaaaacctcagttaaggcattgtgcaggcttgttgaacttctcaaggcaatagagcatatgt

SEQ ID NO: 50032 - DNA, 869 bp, Homo sapiens
ggcatcgagctgtcttcccaatttatttagatgatgtatatgaaaatgctgttgatgcagccagattacattacatgttcagtgctttgcgcgactgtgtacctgctatgatgcatgcaaggcatttagagtcctatgagatacttctggattgctatgacaaggaaattatggaaattttaaatgagcatttgctggacaaattatgcaaagaaatagagaaagatctgcgactttctgtgcatactcatttaaagctggatgaccgaaaccctttcaaagttggcatgaaagacctggctcttttttttctctctgaatccaattcggtttttcaatcgtttcattgacattcgggcttacgtaactcactacctagacaagactttctacaatctaacaactgtagcccttcatgactgggccacttatagtgagatgagaaacttagctactcagcgttatggactggttatgacagaggcacatcttcccagtcagactttggaacagggccttgatgttttagaaattatgagaaacattcatatatttgtgtcccgatacctctataatctcaacaatcagatttttattgaacgaacaagcaataacaagcatttgaatactattaatattcggcatattgctaattcaattcgaacacatggcacgggaattatgaatacaactgtaagaacttttctttgggggttgagtgggtaatagacccgtttaatagcttggaacgtggttttctcatagaatattgcggtaaacatacactactagtttatattttacatgaatttccattttttttctggttagtaattaaaatgtctggtcctaaaattgtgttggatgtg

SEQ ID NO: 50033 - DNA, 940 bp, Homo sapiens
ttttttttttcttggttttcttcagccgcagtcttgtctgctctgaagaaaattcttgcactgctcagtgagaaatacagcaattcaaattcctgtagatagacatccagtcgcttctgagtgagattcatggtttgtaagagtttttcatcttgactggctgactgtacattctgttgcttagcaactgctcttatctccttcaggtatttctctctaacagactggaaccagtgaagtgaatcaaactcccgatactgatccaaaagctttagaatgtaagccacacccatggcaaagccatcatcagtaaaggcagctccaattttattttttttatttaatttttccttgcaactaatggaatgctctacaaagttgagggtcagagggggaacaattatatagaaatttcggagatgtatattctttggccttcgaaattctggagcaaaaacgtctacaagcattttgaaatattctgtgccttcgcagaatttcgtgtgtgatcactgaggactgaatccaaatgcccttggctgcttttaatgtttcttctgcaagaccttcttcttttactagttcttcaaaatttacaatatcttcaagatcaggaacaaatctaatggcattgctgctacaatgaagaccaccagatcttatcattcgtacatagcccatagcattaccaatctggctgatgagttgcctgaattgatcaaggtagctctgtccctcaggtgttattccaagttttctgatgcctcgattgaatttttctgctctatcaaaaggatacttatgatcattttggtccttaatttccctgaaaaatcgaatatctttaatcaatctggatttgatgtgttcatcatacataaattggctaaatatatagaacttctttttcaaaaacctggtaggtggaattaacagttgg

SEQ ID NO: 50034 - DNA, 612 bp, Homo sapiens
  misc_feature (1)...(612): n = a,t,c or g
ttttttttttgatgctgcatctttttttttttttttttagttttgctttcttaaagcatgtgctgagctgatgaagagagcagtttggcaattaaaaaggcccagcggcttgggcagcagcaggggggtgccaggtgagggtcaggtagtccctctttcctgggccagggagcagcaaagcccgcactaacttcataaaatataaaacaagggaggggcgaagggaagagggagatttgtaaaatacaatatcttaggggattggcaataataaaaaataaggttcattatttacaaacaatttctgttcttggtctctgtacagtgggggtggggtaaggggtgtctgtgagtggggtgcgttgatgtgtctgtttgggtgcaggtgtgggggcagggaggcagtggtcgtgttgggcatatgagagaggaggtgggggtacccagtgagtggtttgtctgagaaggacggatggatgttggtgggaaggagaatgagaacagagtggtcggcccaagggaagagtccaaatgtcaggggcaaggaagggctgggaagtggagccttttctcctggaatgggaagctccaggaggcnagtgcgcgaggcgc

SEQ ID NO: 50035 - DNA, 369 bp, Homo sapiens
  misc_feature (1)...(369): n = a,t,c or g
aaactagaaactactgaaagcctctaggtagctgggtcaggagtaagcctactgagctactgctacccagaaaaacccctcacaccaccccatgtgtcctacaataaatgtttgctaaaaaagtgtgtttgttagtgcagatgggacccccgtatgcatggattcactatctctgtgcttcaaaaagctcttgttagtcctttccagtggccaacacttcagtgcagcatgtgggagcataatagatatgtaataaatatctgtttgaatgaatagtgaatctacagatgggtctgttggggaaaactgaggccatactgtttctttattaggtaccctacccnttctttcacctgttatttnggccaa

SEQ ID NO: 50036 - DNA, 663 bp, Homo sapiens
ttttttcaacagcaacacaggtttattactagcaaaaccctgcggagggggaaaccagcttagtgtcagtgcccactgccgctcacaggctggggtaatcatagcgctgggagggagggctctggacagtatagcttgctgctcagtagaagatgataaggatgttcctgaagtcaggctgttgggcctttgccagcaggatgtgataaggatgtttctgcagtcaggtggttaggaaggatgtttctcatggcccaagttcccatggaacgtttcactgtgatcaaagtctgcaaaatggcactgaccacaatgcaggtcatgaagcataaccagaccctgaaggcacgtccagggccagaccagctggctgggctgccaacatcttagtagagatcccaggagatcagttgagcaattgtttcattttatcacatgaaggctgtgtggcattttgaagtagaattaagaatctacataattacaaattatattcttaaaagaaggtgctcagtgccatgcctgacacatggtggaactccacgatgagatgtgtgagaagccagggtgccatggttacagacaaggactgcaggtacagattgcttgcttcaaacctggaccagcggtgtgaactttggcaactctctgtattgctctttg

SEQ ID NO: 50037 - DNA, 157 bp, Homo sapiens
gaatggacagatcttgaagttagcctaacacaatatcttgtgatttgtctcttaccagtggtaccacccataaataggctagaattttttgtgtctaatactgaattcgacaaccaggaagttttttgggtttttgtggggtgtttttttttttttt

SEQ ID NO: 50038 - DNA, 3667 bp, Homo sapiens
cctctgacccttttggtcgctaggagtcagccgactcagtacacaggactcactgaatggagacacaaggctcctccagggagtggcggctcatggcaatcctagaatggtcaccagccaggctttagagacccacacagagggcgttctgacccaaagttgcactggggaactccaagtttggggattctttgaatttaactctttttctagctacatttcctattatttgtccaattcttaccaaacatctctgttcacattctgaagctgggatctgactggcagagctagtagatgctgactattcagatggagccctgacattggctttctcagcttggctgtgactggcagcaggtttgcgggagaactgtgtgtcccagaacatgactggctacacctgcacctcagcaagattggggcagggcagttatcttcaaaaagctgtgtaggtggggcagtcattactgacaaatccagtgcagacccaggatggcccaaacactggcttatcctttctgaatctcatctcccacagctgtaaagcggggtggtgctcgctacctcacagaggtgttgtaaagattagatgtaatcttgccaagcagccactttgtaaactgtatagtcttatgcagatggaaggaagggcctgtgcctaccttgatcatagcactaaacaaactgtactgtattttcattcctcttagttatctccctaaaaagactctgagttccttgaacacaggaaggtgttttatttgattttgttatcctcagcatgtagcagtgtctgacacacagtaggtgctctatcactgtgagagggatggatggatgggtggagttacagatggatagaaggatagatggagggatgggtggatgatggatggatagatggatggaggggggatgatgaatggagggataatgagtggatgaatgagggaatgggtggatggatggatggagggatggaggaacagatagatagatggagggatgggtgggtgatggatggatagatggatggagggagggatgatgaatggagggataatgaatggatgaatgaggggatgggtggatggatgaatggagggatgatgggtggatgaatgaattgagggatggatggatgaacacatggatggatggatagatggatagatggaggaactggtggattttggatggatgggtggatggatagatgaatgaatgcctggatagacaaagagatgatggatagatgaatagatgaattaagggatgtcggatagatggagggattgatagatgttggatggatgggtggtggatggatagatgagtgaatgcatggatagacaaagagatgatggatggatgaattaagggatgacagatggatggatggatgagtaactggatggacaagtggataaatggatagatggttgaatacctgaatggattgaaggaggatgcatggatgtaagataaggctaatcatcctccactctctttctttgcaaaaccatccacccatttactcaataaacatttattcagttcaaacttggcacaaagcaccatgtgaggcccaagagatacgtgggttaataaaacagagctcctgccctcctgaaaactgcaaagaaaggggcgtggcttcctgagttcaaatcccaactctgccagcgactagctgtacatcagtgatgtttccctactttctctcaattaaatagggataatgtcagtacctatcacattgggaggtcttgcggggattaaatgagttaccaaatgccaagtgtttgggacagggcctggcacccagcaaagtctcttgtgagtgctggctgctattatcctaatggagaagatggcatgaaaaccaggaaataggatgccctttgggaagcaatgcaacaggaacttacacaaagaaaggaaaggaggaagcaattagtggtgtctcaaaggagtatgtcaagaaaaacttttcagagggaaacctttgagcagggccatgaaaacaggagttctctaagagattgtggacttgcctgggaccacctggctataagcacaaaaccatccggttcctttctgtcacttctggcgggtgaggggtctctggcaaaggggcagaaggtgcgtgagaggttgcgaatggcaggactgtcctggccagccggggcacctggtggccaagcttagaaacatgacaggtcctcttgggagggctgaccgcagggagcgttgggtttcaggctgctggcgtcggcttctgtggtgccctttctgtcggctatgagagtccagacagtgcccaacctcctccccttctttccacacgcacaaccaccccaccccctgtggcctgagctgtcctgcctcgccacaatggcacctgccctaaaatagcttcccatgtgagggctagagaaaggaaaagattagaccctccctggatgagagagagaaagtgaaggagggcaggggagggggacagcgagccattgagcgatctttgtcaagcatcccagaaggtataaaaacgcccttgggaccaggcagcctcaaaccccagctgttggggccaggacacccagtgagcccatacttgctctttttgtcttcttcagactgcgccatggggctcagcgacggggaatggcagttggtgctgaacgtctgggggaaggtggaggctgacatcccaggccatgggcaggaagtcctcatcaggctctttaagggtcacccagagactctggagaagtttgacaagttcaagcacctgaagtcagaggacgagatgaaggcatctgaggacttaaagaagcatggtgccactgtgctcaccgccctgggtggcatccttaagaagaaggggcatcatgaggcagagattaagccccctggcacagtcgcatgccaccaagcacaagatccccgtgaagtacctggagttcatctcggaatgcatcatccaggttctgcagagcaagcatcccggggactttggtgctgatgcccagggggccatgaacaaggccctggagctgttccggaaggacatggcctccaactacaaggagctgggcttccagggctaggcccctgccgctcccacccccacccatctgggccccgggttcaagagagagcggggtctgatctcgtgtagccatatagagtttgcttctgagtgtctgctttgtttagtagaggtgggcaggaggagctgagggggctggggctggggtgttgaaagttggctttgcatgcccagcgatgcgccctccctgtgggatgtcatcaccctgggaaccgggagtggcccttggctcactgtgttcctgcatggtttggatctgaattaattgtcctttcttctaaatcccaaccgaacttcttccaacctccaaactggctgtaaccccaaatccaagccattaactacacctgacagtagcaattgtctgattaatcactggccccttgaagacagcagaatgtccctttgcaatgaggaggagatctgggctgggcgggccagctggggaagcatttgactatctggaacttgtgtgtgcctcctcaggtatggcagtgactcacctggttttaataaaacaacctgcaacatctcaaaaaaaaaaaaaaa

SEQ ID NO: 50039 - DNA, 482 bp, Homo sapiens
ctaacttgataatcaaattatgttaacatgggtcctttagcttttaaaatgacttgctttgttttagaaaggtggtattaatccactctctattcttgaaaatttggatgggagaattctgaagttgcctgctgttttcctttagcgctgaggttcttaaggttacttttatattactctggaatcaagtattttaaattgtattttttttttaaatgatctctcagcaataattgtttgaaactatccatatataaggttatcagacctacagttccctaagaggaactgcatgttctcttcaatcagaaatatacagtagaagcaggtatatcttccatgcagtttcagtagtaagcactacttatacctacataagagttaaaatccagatgtggggaccttttgataccatcagtgatatatattttttttaaactgggtacagaggaagtgaaaaggtttaaattctacttctattt

SEQ ID NO: 50040 - DNA, 1279 bp, Homo sapiens
gagaactttgtcgctacctttgcaaacaatctaagagagaaggagaaaaggatcataaggtgcgtttggcaattggaaatggcatacggagtgatgtatggagagaatttttagacagatttggaaatataaaggtgtgtgaactttatgcagctaccgaatcaagcatatctttcatgaactacactgggagaattggagcaattgggagaacaaatttgttttacaaacttctttccacttttgacttaataaagtatgactttcagaaagatgaacccatgagaaatgagcagggttggtgtattcatgtgaaaaaaggagagcctggacttctcatttctcgagtgaatgcaaaaaatcccttctttggctatgctgggccttataagcacacaaaagacaaattgctttgtgatgtttttaagaagggagatgtttaccttaatactggagacttaatagtccaggatcaggacaatttcctttatttttgggaccgtactggagacactttcagatggaaaggagaaaatgtcgcaaccactgaggttgctgatgttattggaatgttggatttcatacaggaagcaaacgtctatggtgtggctatatcaggttatgaaggaagagcaggaatggcttctattattttaaaaccaaatacatctttagatttggaaaaagtttatgaacaagttgtaacatttctaccagcttatgcttgtccacgatttttaagaattcaggaaaaaatggaagcaacaggaacattcaaactattgaagcatcagttggtggaagatggatttaatccactgaaaatttctgaaccactttacttcatggataacttgaaaaagtcttatgttctactgaccagggaactttatgatcaaataatgttaggggaaataaaactttaagatttttatatctagaactttcatatgctttcttaggaagagtgagaggggggtatatgattctttatgaaatggggaaagggagctaacattaattatgcatgtactatatttccttaatatgagagataattttttaattgcataagaattttaatttcttttaattgatataaacagtagttgattattctttttatctatttggagattcagtgcataactaagtattttccttaatactaaagattttaaataataaatagtggctagcggtttggacaatcactaaaaatgtactttctaataagtaaaatttctaattttgaataaaagattaaattttactgaaa

SEQ ID NO: 50041 - DNA, 551 bp, Homo sapiens
  misc_feature (1)...(551): n = a,t,c or g
gacaatgatgtgtgcaaagaaaccacatggcgagagagagaagccaaggaagccagactcttctgaacaacccaccctcttgggaatgaatacattccgtgagagtgagaactcactcccgtgggaaggcattaatctattcatgagagctccacccccatgacccagacacctcccagtaggcccataggcccacctcccaccgnnnnnnnnnnnnnnnnnnnnnnnnnnnnnnnnnnnnnnnnnnnnnngaccaaaccacagcagtggtcttgccagcgtgtacatgataatggcatttccccccctatcctgggaaaggaattactgcacggaccttagaaagcagataaaccactctgtaagaaattaggtattttcttcttagaatcaattcagttcagtgttactgttctcttttatgtgttagaccctgtgttagatactgtggagtgacagcaaagcaatgtaaaacctccctcgactattgaaacagccaccaaagaggtcaacttcctgcctcctgcctctctccattccttctcattttc

SEQ ID NO: 50042 - DNA, 1080 bp, Homo sapiens
  misc_feature (1)...(1080): n = a,t,c or g
ttaagccatagaagaatatttattgacatggaaaatgttaacaatatacttctatatgaaatatgtaggctacaaaacagtatatacagtttaataccatttttatggaaagaaaaataaccatatatacaaaatcatgcataagaaaaaaataatataaggatgtacataccaaatattaataataatggctatctctggatagtggaatcagagggattatgtaattttcctgataaattttcctgtcctccaaacagcatccgcttcatactattatttcttggttgtaattagtttgatataattctcttcagaaaggctctgtttcactatatatacctcaaagcatacttttgatgcagcttctgcaattcccatctaaaaagtagataacacttgctcttatattctggcatatgaagactatttgtaattaacacactataaaatatgtcaaagcaggccaggcatggtgggctcacacctgtaattcccaaaccttnnnnnnnnnnnnnnnnnnnnnnnnnnnnnnnnnnnnnnnnnnnnnnnnnnnnnnnnnnnnnnnnnnnnnnnnnnnaccttaaaattagccaggtgtaatagcacatgcctgtctgtatcccagctacttggcaggctggannnnnnnnnnnnnnnnnnnnnnnnnnnnnnnnnnnnnnnnnnnnnngtaggtgacagagcaagaactcatctctaaaaaaaaatttttaaataaagcaaaatatgccacagcatagatctgattgtagaaaattattatatggagaactgaaaaatctcctaatcaagacaaaaattttaaatagaggaaaaaaatactatctatcattagttcaagtttccattaagagtagagtgtgaagtagctccaagttcagagctggagaattttgcatctctccctcttaccagccaattgactttaggtaaagaatactagagttttttagttagtaaaatatagttaataattctgtataaaggagcaaaagtaagtttctcattgtttcctatctcccttcataggtttgacatgttgaaattgcctgtgccgaa

SEQ ID NO: 50043 - DNA, 340 bp, Homo sapiens
ggcaagtacatcgtgacaggtggggaggacgacttggtgacagtctggtcctttgtagactgccgagtaatagccagaggccacgggcacaagtcctgggtcagtgttgtagcgtttgacccttataccactagtgtagaagaaggtgaccctatggagtttagtggcagcgatgaggacttccaagaccttcttcattttggcagagatcgagcagatagtacacagtgcaggctctccagacggaactctacagacagccgccccgtaagtgtcacgtatcggtttggttccgtggggccaggacacacagctctgtttatgggaccttacagaagat

SEQ ID NO: 50044 - DNA, 378 bp, Homo sapiens
cttcttaagcagtagagtacacccaggggagactccatctagctttgtcttcaatggctttctggacttcatcctccgacctgatgatccccgggcccaaaccctccgtcgcctcttcgtctttaagctgattcccatgttgaaccccgatggtgtggtccggggacactaccgcacagactcacgtggagtgaatctgaaccgtcagtacctgaagcctgatgccgtcctgcacccggccatctatggggccaaagctgtgcttctctaccaccatgtgcactctcgtctgaactcccagagttcctctgagcaccagcccagttcctgtctccctcctgatgctcctgtttctgacctggagaaagccaacaatct

SEQ ID NO: 50045 - DNA, 622 bp, Homo sapiens
  misc_feature (1)...(622): n = a,t,c or g
taattctggttattaatccccttgtcagatgggtagtttgctattttctcccattcatgggttgtctctttactttgttgattgtttcctttgctgtgcagaagcttcttaacttgatgtgatcctatttgtccattttggctttggatgcctgtgctatgtagggtattactcaagaaatctttgctcactccaatgtcctggagagtttctccaacgctttcttttagcagtttcataatttgaggtcttagatttaagtctttaatccatttttacttgatttttgtatatggcaaaagatacgggtcttgtttcattcttctgcatacaggtatctagtttttccagcaccattttttgaagagactgtccttttcccaatgtatgttcttggcacctttgttgaaaatgagctcactgtaatatatggatttgtttctgagttctctattctgttccattggtctatgtatccatntttatggtcacnaccattgctgtttgagtagccatagcntttttttttccncttttcgagactccatntcaaaacaancaaacagggaaccnttatgagggcagggaggtccacttgagggagtttgagacttgccngggg

SEQ ID NO: 50046 - DNA, 413 bp, Homo sapiens
cggacgcgtgggatactacggagggtccaggaggtctcccagccacccatccttggcaaccagatgttactggggccaagctaggatgggagctgagggggaaggaagtaggggaatggaagtggaaggatgcagcccccccagacctgccgagaggcctcatgcatgtgcatgagtgtgcccatgggcagacatgtgcctgtcccagcacagcgggcagaatgagattgtccacactggccccaccctccaagtcgacctctaccccatggtatgtagtggagcatcagggtaggctatcttctctgccttcaatcttcagggactgcagggaagagggaagcacgcacagcacggttcctctctccactgcattgtttcactgggctcacctgcttctgaaaacggttcct

SEQ ID NO: 50047 - DNA, 395 bp, Homo sapiens
ataataccagagtggcttctttcttactgcagcatgatgcagatatcaatgcccaaacaaaaggcctcttgacccccttgcatcttgctgctgggaacagagacagcaaggataccctagaactcctcctgatgaaccgttacgtcaaaccagggctgaaaaacaacttggaagaaactgcatttgatattgccaggaggacaagtatctatcactacctctttgaaattgtggaaggctgtacaaattcttcacctcagtcttaacaattctagtaattttcctaagtttctaaataccagtgcctcctgtgtgtgagatgtattcccataatcaaagttgacgtcaaacatcttactacagaaattcagtggtaaggtagttactattatgtt

SEQ ID NO: 50048 - DNA, 618 bp, Homo sapiens
aatgtgcagtaggtctgccggcgatggagtggtgggctagctcgctcgctcggctgctgttgttcctcctgccctcagcgcagggccgccagaaggagtcaggttcaaaatggaaagtatttattgaccaaattaacaggtctttggagaattacgaaccatgttcaagtcaaaactgcagctgctaccatggtgtcatagaagaggatctaactcctttccgaggaggcatctccaggaagatgatggcagaggtagtcagacggaagctagggacccactatcagatcactaagaacagactgtaccgggaaaatgactgcatgttcccctcaaggtgtagtggtgttgagcactttattttggaagtgatcgggcgtctccctgacatggagatggtgatcaatgtacgagattatcctcaggttcctaaatggatggagcctgccatcccagtcttctccttcagtaagacatcagagtaccatgatatcatgtatcctgcttggacattttgggaagggggacctgctgtttggccaatttatcctacaggtcttggacggtgggacctcttcagagaagatctggtaaggtcagcagcacagtggccatgga

SEQ ID NO: 50049 - DNA, 87 bp, Homo sapiens
aattcttggctcccaagaacattgagacatttactcatttcctcaatcctacaagagtttctgaactgttttgcatatacaactatg

SEQ ID NO: 50050 - DNA, 535 bp, Homo sapiens
acaaatcagggacatttgctctttttacctccacctcaaaaactgatgacaaggggagaagaaagagccaggggggagagtgaggcaggggagtagaaccctgcccaggcacatgggtgcaaattccccgtgtgctgtttggcttctggggtcctgtgtagacgccccagccccgcctgccctcttgggatgcagctgccctgggatgagcagacagccctcggcccgatggagcacgacttatttattacggtccacacagggacagagcgcccctgctccagggaggaggcgtcaccggaccctggggcagagctgagcttgggacaccagcgggaacagggcaccccttctgcactgacttccagatcatggttctcccttcctccctgaggacaccaaattggatgagagcaagtttgagagaagaatgaatcaactgctatccttcccctcacccctcagcccaggagggaaagggcattttctttttcatctttgaaaggcattgtgggtctgtctttaaagtgtttac

SEQ ID NO: 50051 - DNA, 759 bp, Homo sapiens
  misc_feature (1)...(759): n = a,t,c or g
ccacattttgcctggataaggaagcactgaaggatgagtacgatgacctttctgacctcactgctgcccagcaggagactctgagtgactgggagtctcagttcactttcaagtatcatcacgtgggcaaactgctgaaggagggggaggagcccactgtgtactcagatgaggaagaaccaaaagatgagagtgcccggaaaaatgattaaagcattcagtggaagtatatctatttttgtattttgcaaaatcatttgtaacagtccactctgtctttaaaacatagtgattacaatatttagaaagttttgagcacttgctataagttttttaattaacatcactagtgacactaataaaattaacttcttagaatgcatgatgtgtttgtgtgtcacaaatccagaaagtgaactgcagtgctgtaatacacatgttaatactgtttttcttctatctgtagttagtacaggatgaatttaaatgtgtttttcctgagagacaaggaagacttgggtatttcccaaaacaggtaaaaatcttaaatgtgcaccaagagcaaaggatcaacttttagtcatgatgttctgtaaagacaacaaatccctttttttttctcaattgacttaactgcatgatttctgttttatctacctctaaagcaaatctgcagtgttccaaagactttggtatggattaagcgctgtccagtaacaaaatgaaatctcaaaacagagctcagctgcaaaanagcat

SEQ ID NO: 50052 - DNA, 447 bp, Homo sapiens
  misc_feature (1)...(447): n = a,t,c or g
gtaatattccttttaaattttttccaaccattgcttgatatatcactattttatccattgacatgattcttgaagacccaggataaaggacatccggataggtgtgtttatgaaggatggggcctggaaaggcaacttttcctgattaatgtgaaaaataattcctatggacactccgtttgaagtatcaccttctcataactaaaagcagaaaagctaacaaaagcttctcagctgaggacactcaaggcatacatgatgacagtcttttttttttttngganggtnggnctttnaccctttnnttangggtnnnggttttaaaannanggaaanggttttnnnnnaaaaannccccaaanngggnaaaaannncancctngnccnaaaantttttccccnngggggggnacccgctnnnaggganttntgggaaaaaggtcctgg

SEQ ID NO: 50053 - DNA, 922 bp, Homo sapiens
gtaaacgtctctagcctcaagaagtgggattactacatagaagagaccctgtccacaggcccttcctatgactggatgatgctaacccccaagcacttcccctccgaagactctgacctggctggagaagctgggccacggagccagaggagaacagtgtggccatgctatgatgatgtcagctgtactcagcctgatgctctcaccagccttttcagtgaaattgaaaaattggagcacaaattgaaccaagcccctgagaagtggcagcagcttgtgggaaagggtaacccgtggaccttaaagaagaaccaagaacagatcgctcccaaagacacctgtcgagatccccaggaattgtgtctaccaacctaccttcctatcagaagaggtctctgctacatctcccagacagcagcattggggaggaacagaattccagcatctccccatccaatggagtcgagcgaagagcagccacgctctatagccagtatacatccaagaatgatgaaaacaggtcctttgagggaacactttataaaagaggggctttgctgaaaaggttggaagccccgttggtttgttttggatgtaacaaaacatcagctgcgctactatgactcaggtgaggacacaagctgtaaaggccacattgatctggctgaagtagaaatggtcatccctgctggccccagcatggggagccccaaagcacacaagtgacaaggctttctttgatctcaagaccagcaaacgtgtgtataacttctgcgcccaggatggacagagtgcccagcaatggatggacaagatccagagttgtatctctgatgcctgatgcccatggtcaacccacgcagaagaaacagaagaactcatgctgccagatagatagaaaaagaagcatggatccttgagg

SEQ ID NO: 50054 - DNA, 899 bp, Homo sapiens
tgagggatgctttttcttaagaaataaatttaattcaaggtggttagtgaatgtgaggcaatgtaatgccttcacgaaagttaaagtaatccagttacaaaagaagcactgtgtatagtctcaaatagctgaaggtacaatgggctccatattttacaaagtacaaaaaattatttcatatacaaagaaaaatacaaataatgtgcaaaaaccattttcacaggtggcaatttataaaatggaaatgatagaaaagtccttcattcttaattatccccaaatttcttatatattaacacagttctatttcctagtgtgtggacaattttaaatttgaaattctgatttatttttaatctacaaagtatttttattttttaaaagggaaccatttcattattgaaatcttatgaatgcatcagttaatttatattaaattataagcaggctatctgaaaaacaaggatatagaaatcatatatacacatttttgaaatattagtttagtatttaacatattaacatttcaaaacaaatgcaatgatctagctacctatgacgccagctggtgtcagtggttgtagcgaagatgctgtttctgtttaccatgagcaaacagcatttcttgggtcttaagctaaacaatcacaagttatcaaagtaaagaaaatctaaagacagttcttacttttcatgtgtagaagtgtagtttgggtatccagtcatgccacagtgtgactgtggtcaacacagcccttgtcacaggtgcgtatggtcctaaatagctggcctctgtctttccaacatcttcacttcattgggaattcagtgcaagtgtttgttttgtgagttaggtgcattcagctttttttggcatgttatttttggaaaaaggaggc

SEQ ID NO: 50055 - DNA, 619 bp, Homo sapiens
atcaaagaaaatagggactgccttggctgccagggcaaggtgctctaggaggtcttcctggcctccttgaactgtggggtccaggagactccctgaactgctagccctcccttttgtctgtttatctaattctcaggtatgaggctttagtcacttctctttacagatatcaaagctcagctctttgaaacatccagcaagacaggccagagtgtgggtgagtgctgtgctggagcctcacagcaggaacatgcaggggcaccagaggaagctgaatagggcacagagggctgggtcactgggagatcccagggctactggcattgggccctcgctgatcatcatttttcctgccagacgagctcttccagaaagtggcagaggattacgtcagtgtggctgccttccaggtgatgacagaggacaagggcgtggatctgggccagaagccaaacccctacttctacagctgttgtcatcactgagtcagcactcacctggcctgggggaattaaaggaattccccgtaagggttggacccagctcctttctgggcttgggtagtcaaatgtctgagctaccccaggtcctcatgtcagcagagtggcgcctgcctggt

SEQ ID NO: 50056 - DNA, 482 bp, Homo sapiens
cgtcttctctatttccagttttattctgtaccaagtgcacaatcccttcattttacttttgacataaaaaaaggacttcatgaacaagacaaaataacttatgattatatgaaacataactgtgacaaatcacaaaactatacatattaatagaaaaaagtgtacctaattctttaaaagatttatgacaataagcaccagatgtgcctctagagtaaaatcggccccatatccagtatgatatatgcagttcatttctctacgtgagtgtatataactatgtacaagagtctgtgtgatttatggaaaacagatttccacttttttcccccaaagtgctttatgtcagcaacattacacagggatacctttgctgtctgtacaaaataaatctctttttacactcactatttctccaatgagtgcttttttttttttgcttcatcctgttgcaaaaaaaaaaaaaaataaccgcagaaatt

SEQ ID NO: 50057 - DNA, 349 bp, Homo sapiens
ctggcactttaggtgggggcaccttttcctttttaggaactggagcaggaactttcttttctggcacaattttcttaggtgcttcaggaactttagccggtggaggctcctctattttagcaggaatttttggtttcagtacaattttcttctcctgcctctctgtcacttgaaaagattataaaatatgtttgtagaaatgtctagatttcttttcgataaaagtgtaagggatctttttattagacatgatatttatcaatatttgcaatatggatgacaaattagctataaggaaacataaagaaggagacaagctaacatagggataaaactaattaaagagtca

SEQ ID NO: 50058 - DNA, 1053 bp, Homo sapiens
  misc_feature (1)...(1053): n = a,t,c or g
attcggaacgaggggtttttgtatgggacgtataaatacttgattatatacgacagattttaatgtctttaaagacttcctgctgtattaacatattgtaatggagtcttttaaatactaggttgaatttaattgaagtcacacacatcttgaagtggtaactgcatagtaaatactaccaagagtttttttcacgtgggagtatcctaaaactctgccatgggtgtaaatgttttacattaatttcataattggacagaccctgcatttagcgaaaacattttgttttgaaagtgtgttctttttgtcgcactgttactgcgtaacacttctcaacattctgtaagttaaattattttaaaataactatggtgaattcatgtttatttttttactttgaaaattgtagtactcaggtggtatttaatgggaaaggctcctttgggtataaatcataatgtatttnaaggcatgcatctataacattgataactttagccttaaaaaaaaggtctattattccttcctctgcatcccatggtatattagcaaagtagtttacagccctgtacagccttacaaagttgttttacaatttttaatggaaagcccttaacaacaacaacaaaaaattgtatcattttaccaatatccacgaattactgatcacagtttgtaaataatttgtttaatatcagaaggccaaagaaagtcttaaaattttagctattgactctatggtgacttcacaataagatttctgtgcaaaaaggtaaggtgataattgatctaatagactttttttttttttttttttttgctgtccatgagaattagacttcatattagcttcaattaaaaagctcattccattttattaaaatgtttgtaattgcaattttgtgtttaatgtttactttgtctttcctttctttagcatttaggtgactgttcggcagtttgatatatggccattgtcggccttaaactgcactagtaacaagcatggtatttatcttgtattgaaaataaaacaaacttttgataaaaaaa

SEQ ID NO: 50059 - DNA, 826 bp, Homo sapiens
catgacagatggagttagttccggtttccttaacaggtctttgaaacccctttacaagacacctgtgagttatcccttggagctttcagacctgcaggagctgtgggatgatctctgtgaagattatttgccgctccgggtccagcccatgactgaagagttgctgaaacaacaaaagctgaattcacatgagaccactataactcagcagtctgtatctgattcccacttggcagaactccaggaaaaaatccagcaaacagaggccaccaacaagattcttcaagagaaacttaatgaaatgagctatgaactaaagtgtgctcaggagtcgtctcaaaagcaagatggtacaattcagaacctcaaggaaactctgaaaagcagggaacgtgagactgaggagttgtaccaggtaattgaaggtcaaaatgacacaatggcaaagcttcgagaaatgctgcaccaaagccagcttggacaacttcacagctcagagggtacttctccagctcagcaacaggtagctctgctttgatcttcagagtgctttattctgcagccaacttgaaatacagaagctccagagggtggtacgacagaaagagcgccaactggctgatgccaaacaatgtgtgcaatttgtagaggctgcagcacacgagagtgaacagcagaaagaggcttcttggaaacataaccaggaattgcgaaaagccttgcagcagctacaagaagtattgcagaataagagccaacagcttcgtgcctgggaggctgaaaaatacaatgagattcgaacccaggaacaaaacatccagcagtc

SEQ ID NO: 50060 - DNA, 471 bp, Homo sapiens
ttttttttttcaaagtagacctctgtcttggattactatgtacctggacaggtgaactcttgtatgtttctgttttggggatttttaggggttttccatgtacattcatagagcctggtcagcagcgaggagtccttgttgcgtatggacggaaggctccctggcacccagatgtctcccttcgtcctggctgacacagagcatggtggtcatctgctcttcatgtccagcaggctcagaaagaactcggagttcccctcgcacccttgggccaagcttttcaagtccgagtgccaggactggatgagctggggtttgtgtgtctgctggcggcacagtgggtgtgcacaagaccaccatttgggtatctaacaaacacaggctcacaaaagggattttggcatatctgacaaagctttttgtctgagagttggattgagcttcctttcaacttcatcttatcgtaggtgt

SEQ ID NO: 50061 - DNA, 1807 bp, Homo sapiens
actacgaatttaatacgactcactatagggaatttggccctcgaggccaagaattcggcacgagcaaaggcaagagtaacagcagcgccgtcccgtccgacagccaggcccgggagaagttagcactctacgtatatgaatatctgctccatgtaggagctcagaaatcagctcaaacatttttatcagagataagatgggaaaaaaacatcacattgggggaaccaccaggattcttacattcttggtggtgtgtattttgggatctctactgtgcagctccagagagacgtgaaacatgtgaacactcaagtgaagcaaaagccttccatgattacagtgctgcagcagcttcccagtccagtgctagggaaacattcccccagggagatgggcatgccagttaggtcctgttaccaccaggggttcttttcagccttttatgttcaccttcggttaccctgggaggtccaagggcccccattgaggatacctaatcaggcacttggaggtgtcccaggaagtcagccattactccccagtggaatggatccaactcgacaacaaggacatccaaatatgggtgggccaatgcagagaatgactcctccaagaggaatgggtgcccttaggaccacagaactatggaggtgcaatgagacccccactgaatgctttaggtggccctggaatgcctggaatgaacatgggtccaggtggtggtagaccttggccaaacccaacaaatgccaattcaataccatactcctcagcatctcctgggaattatgtaggtcctccaggaggtggagggccaccaggaacacccatcatgcctagtccagcagattcaaccaactctggtgataacatgtatactttaatgaatgcagtacctcctggacctaacagacctaattttccaatgggtcctgggtcagatggtcccatgggtggattaggaggaatggagtcacatcacatgaatggctctttaggctcaggagatatggacagtatttccaagaattctcccaataatatgagcctgagtaatcaaccgggcactccaagggatgatggcgaaatggggggaaatttcttaaatccttttcagagtgagagttactcccctagcatgacaatgagcgtgtgatccattaccaagtctcctcatgaaaaccacagtgagtcagcccttcacagaactactacggaagaaaattattcatcacagtgtacagttaaacaaaggaatctcagtcacaccaaaccaacctttttatttcctgctctctcccctcttttgtgaagaaagcgggtccaaatgtgattcaaacaactgtacggagtggcatattagaattgccctaaactgaactgcaaataattatgtgtgtatgtatatgtgtgggaaagagaatgtactgtatatgtgtatgttatacagacatatacacatacatacattgacccacaggacattgtaaaatattatcacatgacatcttaagtagaaataagtagggacttttattccatcctttttttcacgtttacattttaattattacaagttgctcctgccccctccctgaactattttgtgctgtgtatatcactgctttatataagttattttttaaggtgaactcagatgttatggttttgtaaatgtctgcaatcatggataggaataaaatcgcttatttgagagctttcattaaattgcgtctgatgcaagttatcctgtgaatcacaaagtgtactgtctcaaaaaatagaagaaaatgtgtcttcgtcttta

SEQ ID NO: 50062 - DNA, 610 bp, Homo sapiens
tttttttttttttaaaaaaagacaaaaacatttaataggtatcatgtacaatttcagtacaaattttcacttcaaaaatattacaggattttattaatcactagtcccccaataatctttgcagctttccttcccaatgaaatgacttcattataaagtgaacgctttgatacattactttgtttatacttacacacacatcagggagaattttattatgtgccttgaacttcaacaacgttaaaccgttacaggaattgcttaagctgatgtcctaattcaatcattaaccaaaacatattttaagaataggcaagaagtctgagaagatggtgatgtaaaagggactaggcttggggtcagagagacaatggtgagttgtgaagtacctaaaccagtctgcgtgaactgcaccatgttagagaacagcaggaacaaaataggctacaaggtcacaataagaagccctggatggtagcatcaaagacgaaacatttaaaaaaccacagaatgaaatcccccaagatggcagctgctcattgtcaagattatttaatcaaccctgctgctgacctgggaatcctaccaactagtaagcattgattttaaa

SEQ ID NO: 50063 - DNA, 780 bp, Homo sapiens
ggaccgccagctgcactgctgtcacctggccagtctgcaggagctggtggacccccaggccccccagaagtttgccgcgtccaggattgcattctggtgccaggagaactgcgtggcgctcctgtgcgacggcactcctgtggtctacatcttccagctggacgcccgcagacagcagttggtgtacaggcagcagctggcgttccagcaccaagtgtgggacgtggctttcgaggagacccaggggctgtgggtgctccaggactgccaggaagcccccctggtgctctacaggcctgtgggcgaccagtggcagtctgttcctgagagcaccgtgttaaagaaagtctctggtgttcttcgtgggaactgggccatgctggaaggctctgccggcgcagacgccagcttcagcagtctctacaaggccacgttcgacaacgtgacctcctacctgaagaagaaagaggagagactgcagcagcagctagagaagaagcagcggcgccggagtcccccgcctgggcccgacgggcatgccaagaagatgagaccgggggaggcgacgctaagttgctgatcgtggcggtctgtttctgtcgactgtggaccacttatgtgcgatccgtggaccacttgcgtgcgatctgtcggccgacgatgagcttgttcggatgtagctccatcgtaagtcgaggagcatctgtgatttgtcctctgcttatgggatatgtttttccgctactgagtctgtgtagtaaatttttgactaggaaaaaa

SEQ ID NO: 50064 - DNA, 755 bp, Homo sapiens
aggcttgagccaccgcgcccgccaagatgggttgttgattttaaaacgatgtcaccctggctctccttaggttcctgttcccctaacaccatgaaggctgctggcagttctctggcctccagggaggcctccacacacatttacccatgttcttagacaatcctagggactcaaggcttcaacaaacctaaatgagccagcagaaaaataaacttgaacatgaatgtcaacgttttcccacatgtactaaagggttataataattttgaaatgtttatttcaaagagcgttggtaatttaaacgtcctatttaatccccaaaacagtcctgagggggagataaggcagttatcttcatagtacaggaaaggaaaaaagcgagggtccaaggccgactataccctcagctccattagcccccgaggcctccctgacaggcggggcggacaatcccagtgcagatgctctgtatcgatcgcatgctatcggttctttcaaggaacgtgtattgatcatcaattaagtggtgagtactcctctagatgtcgattcttagcaaactgcggaaactcctacagacaaaaactcaggtgtgggcgcagaagggccggggatgcgctcggtcaagacttgaaaggcccgggcttgggccctgtgtcctcaccgagccccggggaggctccggctccgtccacacccggagcgcgactcagccgcggccggggctcttctggagaacggcgcggtcaggctct

SEQ ID NO: 50065 - DNA, 415 bp, Homo sapiens
aaaaagaggaagtcaaattatcttcactggtgatataattctctacctgggaaacttcaccgaaaaagatttcaccaaaagatttctaagcctaaataatgacttcagcaaagtctcaccatacaaaatcaacatacacaaatgagtagcatttctgtgcaccaataatattcaagctgagaaaaaaagaacatggttctatttacaatagctacaaacaaaaaaatatgtacctagtaatacattaaatcaaggaggtaaaatatctctacaacaagaactacaaaactgctgaaaaaaaatagagacaacgcaaataagtaaaaaggcactccatgctcatgaatttaaagaatcaatataattaaaatgtccgtgctgctaaagcaacttacagattaagtgctatttctct

SEQ ID NO: 50066 - DNA, 1106 bp, Homo sapiens
ttttttttttttttttaatgagcagtgtttttattcaagctatataaagacatttatacgtaagtacatacattcatttaaaatatacgtaaagttcatttagaacaggcaatttgtttgcttatgatctacattcacggaggggggaaaaaaagtacacttattaaaaacaggtaccacacatctatattcaccaaattgcgttggtttaaaaaagtattaacttgacatacgttgcatccatgtttattgtgctacttgcgcaaaggaattgtttactgaattatgtttagctctttattcatttaacaagttcatttaaataagttcaatattccataaatgacaagcagcttaaatacaagtttgataactatcattaaaaaagtaataaaatcaaagtcagtgaaattttcaacaaggcagcgtaacatccatcactaacctgactaaaaggccgcactcgcactgctttcacactgtcaacactttgcgtaggcattttcaccaatttctcattatctgtattatttggtagaaaaataaatgcagaaagcacactgcatatgcttcacattaaaatattaaaagcccacgaaagcagttcgtttctagataatcaattattaatagtccattcattacacactatcgattacctgttataaattattttacaacacttatttattgatgagtgttagagcctacatcaagtaccattgcttaattgcacacagttgtactgtagagaacagggcgtgtgttgtttttctccttttctacatctactcactctctcccaacctcaataatctgtgcctgaggtcctgtgagaatttgccagttttaaaacctgaatattaagggatttctgtggttcaatagcaagctccttcacagcaatattataaaaatttgttcagacatctcatcctatcaatattaggcacatacaagatgcactcaatatccataaacagatttattttacatttccctttgtcaaaccctttgataaggttgcaagtgagcagtgaaccggtcaatctaacctggattagtctttgactaattaagactttaaagagcctttaagcttgccg

SEQ ID NO: 50067 - DNA, 619 bp, Homo sapiens
aggagccgagcgtcctcgggcaccgccctcgcacctcctcgagtgccctgggaccactgggccacagatggtcatcaggggaagccaccagggagtcccgaagcccttctgagatcaggaaatcaggtcccaaggttaggagacgccctgaaaaaaagcgaaggccgagggatgtgctaagggtaacaccttcatgatgacaacactgcctcgcgtttcaatagcgctttatacttttttaagtgttttctatccgttatccatttcacccttggcctatccctctcagataggtggggtaggattttcctggtgaccgagtaaagtgagaggcaggtgagacggttcacccaatcacacgggaaggggcgcgcgctgcccaaccgcgctctccgcctacctccgctgctcgggaagctgctgggcctggccctcctggtctctcttcctttcctggtctctcttcctttccttgctctcacccacggataaaaccagaagcgacaggaggccagctcctggggttcctgggagccgggaacagaattggctaccggaacgccccaggttgtacattcagagggctctttctccatgggagctcctggtgccgcctcgg

SEQ ID NO: 50068 - DNA, 1540 bp, Homo sapiens
tggaggggggcgggaggcatgctcagtggggctgctgaaccttgggaagagtgtgagtgtgaacgtgtgtaaatgtgcgtgtgaaagggagcaccccttcccgacttctagaaacaaaattccttttggggcgctttccctgtgtgtccccagagaggcctctagccaggagccttcagttgggatagtttcatttgtgactttaccaataccctcccagttcttgatagacagctgtaggttgctgggttcaagaatatgggtgggatatggaatgctctttcaatgtctagcttcagttttcattcatcctcctgctcagcactgtcagccaagagcttactcagcagacaccacatactgcagcagttcctagtgagaaaatctgtgccactagaaaatgcttcacttccatttcctcacctgggcagttctctgtttaaaattgtgggctgatttggtcttcctctcctcctcccactgttactgccctgcagcccttgttcaggtgtacagacccttattctggcctctagtgtccttgtctgtcatgacacacccttccgcccaaatacctctgaccccaaggctggaatggggctggtaggagataagtttgcttactcatagtcatgtcctttctcttgggcacctgcttccctgcggtgtcctcaaatggatttctgtgtggcagtggagtgattgcatgaatttttctgtaacacattaactttgtattattattaagggagtttgagaaagctttgcttataatgtcaaggcaaggaggtaaaaactggagcccaaagaaattcccttagggcaagattatgttataatagaaaattgaatttcctgaggcagtggctgccaccccttttcagatgtttagtcctgcaaatagcatctttcttgtagtctgtgacatggatggggatgctagggcccttaggggcaaggggactaaactaaatcaagttgagtttttttccagcaggggttaggggaggtactcgctgttgatatttgacactagaaagtaatcttttttacaaaactgtttttctaggtgggtggaaagtgaaactgccacatccttgttggtttagtccaagagatcatttgcaacaacagtagatgtccgggttttgtttctgtctttttattatgaaaaactatgttaagggggaaaatgtggattatggtaaccagaggaatccctagccttgttttccttagaagacttgtttagtgttttatcagacgtctgttgtagttgtagacaggaaagcttgtgagaaaaacaccacatggagcctgtaaatgtttttgcacaacctgtaaagcattcttggaagtggccagtaaaaaggggttttaccattttaaaaaaaaatgtaactgtgtcattgtttacatctgtaactttttcctccccggttctcattacaccattctggcgaaaatgtaggcaaagtagcttccagttttagaataaataaccatttggattgaaaaaaaaaaaaaaaaaaaaaaaaaa

SEQ ID NO: 50069 - DNA, 366 bp, Homo sapiens; identical to SEQ ID NO: 36462

SEQ ID NO: 50070 - DNA, 3083 bp, Homo sapiens
ggcaggaggacgaggcagggcgggcgggcgctctaagggttctgctctgactccaggttgggacagcgtcttcgctgctgctggatagtcgtgttttcggggatcgaggatactcaccagaaaccgaaaatgccgaaaccaatcaatgtccgagttaccaccatggatgcagagctggagtttgcaatccagccaaatacaactggaaaacagctttttgatcaggtggtaaagactatcggcctccgggaagtgtggtactttggcctccactatgtggataataaaggatttcctacctggctgaagctggataagaaggtgtctgcccaggaggtcaggaaggagaatcccctccagttcaagttccgggccaagttctaccctgaagatgtggctgaggagctcatccaggacatcacccagaaacttttcttcctccaaagtgaaaggaaggaatccttagcgatgagatctactgcccccctgagactgccgtgctcttggggtcctacgctgtgcaggccaagtttggggactacaacaaagaagtgcacaagtctgggtacctcagctctgagcggctgatccctcaaagagtgatggaccagcacaaacttaccagggaccagtgggaggaccggatccaggtgtggcatgcggaacaccgtgggatgctcaaagataatgctatgttggaatacctgaagattgctcaggacctggaaatgtatggaatcaactatttcgagataaaaaacaagaaaggaacagacctttggcttggagttgatgcccttggactgaatatttatgagaaagatgataagttaaccccaaagattggctttccttggagtgaaatcaggaacatctctttcaatgacaaaaagtttgtcattaaacccatcgacaagaaggcacctgactttgtgttttatgccccacgtctgagaatcaacaagcggatcctgcagctctgcatgggcaaccatgagttgtatatgcgccgcaggaagcctgacaccatcgaggtgcagcagatgaaggcccaggcccgggaggagaagcatcagaagcagctggagcggcaacagctggaaacagagaagaaaaggagagaaaccgtggagagagagaaagagcagatgatgcgcgagaaggaggagttgatgctgcggctgcaggactatgaggagaagacaaagaaggcagagagagagctctcggagcagattcagagggccctgcagctggaggaggagaggaagcgggcacaggaggaggccgagcgcctagaggctgaccgtatggctgcactgcgggctaaggaggagctggagagacaggcggtggatcagataaagagccaggagcagctggctgcggagcttgcagaatacactgccaagattgccctcctggaagaggcgcggaggcgcaaggaggatgaagttgaagagtggcagcacagggccaaagaagcccaggatgacctggtgaagaccaaggaggagctgcacctggtgatgacagcacccccgcccccaccaccccccgtgtaacgagccggtgagctaccatgtccaggagagcttgcaggatgagggcgcagagcccacgggctacagcgcggagctgtctagtgagggcatccgggatgaccgcaatgaggagaagcgcatcactgaggcagagaagaacgagcgtgtgcagcggcagctcgtgacgctgagcagcgagctgtcccaggcccgagatgagaataagaggacccacaatgacatcatccacaacgagaacatgaggcaaggccgggacaagtacaagacgctgcggcagatccggcagggcaacaccaagcagcgcatcgacgagttcgaggccctgtaacagccaggccaggaccaagggcagaggggtgctcatagcgggcgctgccagccccgccacgcttgtgtctttagtgctccaagtctaggaactccctcagatcccagttcctttagaaagcagttacccaacagaaacattctgggctgggaaccagggaggcgccctggtttgttttccccagttgtaatagtgccaagcaggcctgattctcgcgattattctcgaatcacctcctgtgttgtgctgggagcaggactgattgaattacggaaaatgcctgtaaagtctgagtaagaaacttcatgctggcctgtgtgatacaagagtcagcatcattaaaggaaacgtggcaggacttccatctgtgccatacttgttctgtattcgaaatgagctcaaattgattttttaatttctatgaaggatccatctttgtatatttacatgcttagaggggtgaaaattattttggaaattgagtctgaagcactctcgcacacacagtgattccctcctcccgtcactccacgcagctggcagagagcacagtgatcaccagcgtgagtggtggaggaggacacttggatatttttttagttttttttttttttggcttaacagttttagaatacattgtacttatacaccttattaatgatcagctatatactatttatatacaagtgataatacagatttgtaacattagttttaaaaagggaaagttttgttctgtatattttgttaccttttacagaataaaagaattacatatgaaaaaccctctaaaccatggcacttgatgtgatgtggcaggagggcagtggtggagctggacctgcctgctgcagctgcagtcacgtgtaaacaggattattattagtgttttatgcatgtaatggactatgcacacttttaattttgtcagattcacacatgccactatgagctttcagactccagctgtgaagagactctgtttgcttgtgtttgtttgtttgcagtctctctctgccatggccttggcaggctgctggaaggcagcttgtggaggccgttggttccgcccactcattccttctcgtgcactgctttctccttcacagctaagatgccatgtgcaggtggattccatgccgcagacatgaaataaaagctttgcaaaggcacgaaaaaaaaaaaaaaaa

SEQ ID NO: 50071 - DNA, 1300 bp, Homo sapiens
gaatacacaagctgtaccacattctctacaacatcaggatacatggaaggatattataccttccattttctttactttaaagacaagatctttaatgttgccattccccgattccatatggcatgtccaacattcagggtgtctatagcccgattggaaatgggtcctgatgaatatgaagagatggaagaagaggaggaggaggaagaggaggaagacgaggatgatgattcagcagatatggatgaatcagatgaagatgatgaagaggagagacggaggagagtctttgatgttcccattcgcagacgccgctgctcacgccttttttagcaagccttctgctgatggaagcactaggatgattctaggctgttaaatagatttctcaataatgtaaataactaaattgttctctgcatatagcaggaaaactagcatgaaatattgtttcaggccctgggttctatgtgacactacattaggaattggattgtttgggtttgctttgtgtttttgaggtagaggaagaaatgggaatcttttttttctcttccaggagtcagtggaagaatagttctctagctaaggaacggacatacctttgttttaaaatattttatacttacaaaaatctagaaatggagagggaactgttttgaataaggatttaaaatacctgcacaaggatagagagaaactatgtgactcattctgtgaaaagacttcttgcagttgtgagttatttagaaatgatcaaaatttgtaattaggctaatccatttagtgattcctaatattttgtactcacagagaactaattgactaaacaacttgaacgctagtggtttgtccttagacaatctgtctttgaatttaaagtctttatcgctaagaccttgactttaaatttttcatcactacaaccttgaatttaatttcaggtcttcaacatgatgaccttggatttaatttaaagtcttcaacactatgcgctttatcatattattcacagatgcatttttgaaatgtagtatgtaaaagtatgtaacgtgctgtttattaacaaaagattgttcacaacatctcatgtagtttaaatttgtaaatactgcttctgttttgtttctcctttatacacttgactgtctttgtgataagtgacatgaattttatgttaggattaagtatgttttcctgaaacttggattttttttgtaattatataattgagagttaagaatgaaatccttcaagtgttaaaaactcacattttaaaagcaaattttggttccaaaaa

SEQ ID NO: 50072 - DNA, 591 bp, Homo sapiens
acagcttgacatgattacgaatttaatacgactcactatagggaatttggccctcgaggccaagaattcggcacgagccgggggatgtggagagctggcagcatgtcggccgagctgggagtcgggtgcgcattgcgggcggtgaacgagcgcgtgcagcaggctgtggcgcggcggccgctggcgatctcccagccatccagccccggctagtggcggtcagcaaaaccaaacctgcagacatggtgatcgaggcctatggacatgggcagcgcacttttggcgagaactacgttcaggaactgctagaaaaagcatcaaatcccaaaattctgtctttgtgtcctgagatcaaatggcacttcattggccacctacagaaacaaaatgtcaacaaattgatgggaaagtctgagttcttaataaaaagagaaaacatcatgccaagaacagaatgaattcaccattttctgggttatatatacttggaaacctacccaacctcatgtttattattatttggtggtctttcagaaaaattataaagaattgtagcccataaatttttttaactagcaaaagagacatttc

SEQ ID NO: 50073 - DNA, 264 bp, Homo sapiens
gagatggaatgctctccaatattgattagctagatgaaaatgagaacagtttactacatggcacatttctaagttcagcattttgaatctgaatagtaacatgactgaattgaaagtgatggagccctgcagttagggacacgatgtctaatcttaggcattttatcttcaacattgtcccagttctcttgtgtagggaaaaggaaaaggcacagcatgacctcttccaagggacctcaaacctggccagtttagttggttata

SEQ ID NO: 50074 - DNA, 1136 bp, Homo sapiens
  misc_feature (1)...(1136): n = a,t,c or g
ggcagatagaccagtttcaccatcttttttattggatacagagccataaattctctgatgcccatgtgagtccttttaaatacatacactcaggtacattcagcaaagggcatcttacgggtgacatggagcaaagtgctgggatggcgatgcctgggtggggcagagaagtgtggccagggaaggccccctgggggctggaggtacaggcaccacttcagaaacaaaaataaaaccaaaaattgctctccacccctctgcctgtgcttggggctggggaagctaccctctcactcaggcccattatagcctagctgtgtaggaaggtaggggcctaagggccagttatggaggttgcccaccagtggtgcccactagaaccaagcctgctgggcatcagccacaaagcaagcctgggtcacctcaggcctctgccctggatacaagacccttgtcagggcagagctgaggctggcaagccaaggccaagcctccctgggccatgctgacagtggcagagnaggnttggcctcacggtggggagcctgcctgattgtcagggcagccttgggactggctgaggtccccaagggtttggggagggagtcgttgccttagctggccctggtattctgatctttacccaatcctaaaccttatcctcaggcaagggctgcagatgaacacacttgtcccaggaatacatacatacacacaatacacagcaatatatacagaaatgcaggccgggcacaaggctgggtgagaaagcatggccactgggttggagagaagggcccaggcccccaggggaaggaagttacactcatcagggactgacaggctgggacaggtcccatgggttcgagttaacttctctgggcatttgggccttacacccactcaccatctcctgtttttaccccaagttccaacaggaactgggactttggcaccaatagtcactctgggaaggcctccttcaacttagcgccttagagggattggggcccgggtgactccccactggtggccccaaagataagagaccaggagtggggaaataggcaggacccaaaggcaagggatggagccaaaccttggagtagcaggccttgggaagnaggacttttttt

SEQ ID NO: 50075 - DNA, 588 bp, Homo sapiens
tctctggagtcgattgccccgagacacatgggccaaggaggggtcagcggcgaattctttcggcctgttggggacccctcgtgtccccacgccagactggacctcccgtatgaacttctcttcgcatcggcggcggcttccgtcacctccgctcccccgatcctattcccagtcgtatgccagcttggagagtcacgtgagagcaagagagtagctttctggttgtcctggtgccctgctcaggcaaactgactgccattctctgaggatggcagctctgtcccccacatttgccacgtccacccaggattccacctgtctccaggactcagaatttcctgtttcttcaaaagaccattcctgtccccagaatttggacctgttcgtgtgcagtggtctggagcctcacacacccagtgttggttcccaggaatcggtgactttccaagatgtcgctgtggactttaccgagaaggagtggcccttgctggattcttcttcagagaaaactgtacaaagatgtaatgctgggagaacttacagcaacctcactttcactggggtattcaggttcggcaaacccagcct

SEQ ID NO: 50076 - DNA, 328 bp, Homo sapiens
tatgagataagtccctaccaagtaggaccaggttcaaatgtttttgaattaatgaacaatctatataggtaaatatcatcccatttacagatatggaaactgaggttcatgggattaaataatgtgtttcaaagtggaagtagttatttttaatttcaaaatcagtttttaagtattcatgggtaacagtagcttcctttcccccactgtattgttagaatgaaacaaaaaaaattttttggagacagggttttaccccaggctagagttcaatgggcataatcgtaggtcactgttgactccaactcctggggcttcaagctatccg

SEQ ID NO: 50077 - DNA, 498 bp, Homo sapiens
cagacgcagccccaccatggtcccttcggcctcagccagttccaattctaccagccacaggggatcccctcctccccctcagccgtggtggtggagatggggtccaagcctgccctcacgggggagcccgccctcacgtgcatcagcaggggcagtgaggcccggattccactccgcggccagctccctcattatggaagacaaagaaatccccatcaagagtgagcctctgccaaaaccgcccgcatctgccccaccatccatcctggtgaaacagaaaactcaagaaatggcatcgaaagcaagtcaaaaccgtgagatttcagaattacagccctcctccaccaaacattacacctccatccacctccggaaagcctgacagcagcaccctcaaggcgtccagctgaagcagcgtcttgggccagagatgacatctatttgccaccgagtgctgcactcggcaagagaagactcgagaagtagctctgcaaggca

SEQ ID NO: 50078 - DNA, 1757 bp, Homo sapiens
agtgccaaggagaacttggtgaaataaattattttaattttttttttatcctttacaaagccatggattttatttggttgatgtgtgctctgtacacaagccatttcaataggatggagctgttaattattttccaaagagtaatagacatgcaaaagtttcaataaaaactgggccattaacaaataaattaataaactaataagcattcccttctaggtttttgccaaactgcctatccaataacaaatttgagaatcgttgaaaaagctagttatatttcagagaaatgattttcattattgaaactgttctccctagcaggccattttccctttttcctgggagtttagcaagtttaggagagaatagtcatgaaaagaaagggaagaaaggggagaagggaagaggttaaaaagtaagtgctcagacctatgaacgtaatccctttgctagaaatatttaagagcagctcagcttggttgaaactgagttttgtcatcttccatatttgcaggaaggtattttctgacttgcaatgcagctagatgtaaaattttattttatcatcctagaaagccttgactagaaaaatgaataaatattgagggtttcctgtccatatctggcttgcatgtgccagaaagcagagaatagaaaatgtaatctccaacatccaagcatccgaaaccccaaggggtaaggcaattctatgtaggttttggacatgaagtttggtgcatcttggtttatgctggctcaactgctattaaacctctctggcttatagtctcttcattctattagacaagcacgtatcgaacacttgcttcgcacaaggctctttagttaacaatttagcagctactgtttgtgttaaacacacttttcaccaaataggttctgaggcaaacgagagcaatgactatttaaagaaaggctttcccagcatcacttacacatcccaaaactaaaaagatcaactcttccaactgagaaaagactcctggctttgaatggaaacttacagcagagagtcacagggccacggcaacaacaacgacaacaacaaacatttggaatattattctcaactcacgttttaataatacatcttattatttttctagtagagaaactacaaatcagcctcttcaacatttatatacagtttaataagcctcttgcaagttacttgttctctcacctgaggtatttttttcctccccaccttgcccctgttcctcccttcctcttctccctttgcaagaggaaatatttaacatatttgggtccaacttcaataatgtaataattaatacattaaaagcatttaacttcctttctagaaaaatgcacaggctaaggcatagacaaaacaaagagaaatgctgagaaatttgccactggagacaagcaatctgaataaatatttgccaaaagttctttttatgtcatatagtgtcaggatttgaaggagctatttttttttaatgttgcaactagcaactcatcttcggaagacacagccaggagaatgaagtagaagtgaaaggtttataaatccatttgtaagcatttatcccatatattttaaattcaagaaaaattgtgtttatctttagaattttgtattcaatactttatgtactatgtgactcatgcttctggataaataaagcaccaaatatgtatctgtaaccacaatcacacatattatattaaatatatatctatataacagcaaaaaaaaaaaa

SEQ ID NO: 50079 - DNA, 1946 bp, Homo sapiens
attttaacatcagatctcaacatatttgttgagaacttgtttagatcatcactatcgagtaaatttatgtcagttctttagagcatttgcttcacacacagttcaaccatttaaccagaaattaaaatatcacccttttcagccctcccatgaagaatttctaggtcataaacatgaataatactcagtatatgtataatatcatatttaattgttgcaacttttcttggcgtgtttaaatcctcatgtctttgagggatcccaccacaggtgaaggaagtaaagaccacttctcccccagtctctgctttctgcagtgctcactcatatcctggcatttagcatggtgtgttgaaattaggtttacttcttgtctctccaagtggctcctctcttaaaagacagaaactagggtttagtcatcatttgtgcttcctgctagaaacccacagccttgaataatggcttcctgcctccttgagtcactttaatatccctgggtgcataggacctggcatgcgtcaggctgctcgggaaatgtgggaactggacacccaggaacactgctgtgctggggctatttggggcctgctgtcaggcagaaagacgttttgaattgggctttctgcccttgttgagttttctcttaagtaaagtccaaagtccaaggggcagatggccagatgcactgcccagtaaggcaggaagccaaagaggcagtgcccagccccacaaaggctgcccgactccctgggacagtagtgtggagtcccagcccaggctgacctcacaccggagcttcctagcttcctttctttgctcaatgcagggcttcttgcaccccctggaaagctaagagatttttttcaaccctaaaagagagtacctttcactgcattggatggatgaacatcagtgccctaactttatccatcatgtaggtcagggaggactgggcactatttggcaggatgtactccagaatataatcaaaaaaaaaaaaaaaaaaagttttctagaataagcaggatgattgtttaatttgaagatggaacaggaaactagagtgcatttaaaatactctgtcttcattttaacatgttgaatggaataactgcatatcaccatgagtttgttttgcttttcatacagacttgtatgtgtcatttgagtggtttccagattggagcgaggttattctgatctaaatgaacagcatttttttccttagcctctgtttgccactctgggtatctctcctatgggcaaagccattagaaatgcataaaacctcgagacatggtttttggcaaaaactccatgactttaaactagctcttttactactgacctttcacagagaaaaaatatttcccttgaaaaaaactgggcttgtcattttttcccttgtagctttaagcagagacataagtgccttgcattacacatagtaaactttctttaaaaaaaaaaaaaaaagattttggagactaccagggtaagattccaacttgtccaaaagctttctggccttacatattttattataaaaattctcaagtctggtaatcttctatgtcagagctagtgatttcaaaaggtttcacaattccccaagacaaaagtgattttcgttcattataataaggttaagtgatatgtgattcataacaattttgatgtgaagaagggaaggacatcattgacttaataatagtatcagtcggtgcaacagttggcaacatgtgccttcacactttaccataaagagacgggtttgagggtttgccttctaaagtctgcaacttcaagaaaaaaaatcgacactgtggattgactttcccggtcactatataaagcaaataaacttaaaacactttgtaaccatgtatttactctgccaggtgcctatattccaataaaatgttcatccttgaaaaaaaaaa

SEQ ID NO: 50080 - DNA, 597 bp, Homo sapiens
gcttaatgcagccagcgttctgggcagcagaacatattcattcttactgtaaattctatttgctgcttccaaaggtgatgattttcaagcagacatgttctatatggtctgtgttttaggatctgggtgcccagcctctatcagagcttgcctacctggcaaagctgcctacccttcaagtgggaaaatataatccactgtttaacaaggctcaccctctccaccctgtcctaacgaccttttgtgaatgtgctgtgatattttcttgctcaatagcaaggtggtagctctgctttcattttaagaaagtggaggctgagggcattgtatcaatactgttgcaactccaagaagttttccttgtaaaattaaaggaaagatcttgttattgattaaccattttcttatgccttgctattgacatattcatgctctttctacgtctagtggctgaaaatgtttgcatttgttcatttgactaatggtgtgatttttgtttctatattattagacctgtaatgttttaaaatgtattttattaaatttggactggatgtatgtctctagcaatacgaggtactttctaaactattaagg

SEQ ID NO: 50081 - DNA, 480 bp, Homo sapiens
aggaggccatgcgggagcgacagcaggtggtgtccctggccgccatgcgggagcccagcctgctgcggttctacgtgtcccgcgagtggctcaacaagttcaacaccttctgcagagccaggccccatcaccaaccagaccttcctctgctcccacggaggcatcccgccccacaaataccactacatcgacgacctggtggtcatcctgccccagaacgtctgggagcacctgtacaacagattcggtggtggccccgccgtgaaccacctgtacgtgtgctccatcttgcaggtggagatcgaggcactggccaagcgcaggaggatcgagatcgacaccttcatcaagttgaacaaggccttccaggccgaggagtcgccgggcgtcatctactgcatcagcatgcagtggttccgggagtgggaggcgttcgtcaaggggaaggacaacgagccccccgggcccattgacaacagc

SEQ ID NO: 50082 - DNA, 145 bp, Homo sapiens
gttacagcacacagattcagccaaattagtaaaattacatattaggtaactgggttgctaagcaatattacatcctcattttacttaattgctgtaattagcatctcccagcagatgccacaatgccgcccaaaaaaaaaaaaaa

SEQ ID NO: 50083 - DNA, 132 bp, Homo sapiens
cggacgcgtgggtttgtaagacatcaactaatcctataagctgttgcttgacttttcattctaccggtgtgaacaaagatggatgcgcacacctgaatgggcctccagtggaggttcgttatatgggttaag

SEQ ID NO: 50084 - DNA, 319 bp, Homo sapiens
tttttttttcccaagagccaatttattttaggcacaattggggaaagccctggtatgccccagcctcttccatgacatccagaaacaaccgcacccaccaccggcaccatgcaaggtgtctgttcacattgctgagctgggcgagatcgtctgtcagtcattacataaaacaggagccagtgacctttgcgaagtacacaaggtacgctggcagggccagtggcaggaagggagggacaagtggacagtggtgtgtctgaattgtagagtgttagattccaggtcattcccatctgctcaattccatcagccgcagagt

SEQ ID NO: 50085 - DNA, 2939 bp, Homo sapiens
  misc_feature (1)...(2939): n = a,t,c or g
cgtctcaatatgtctcaagatggccgccaatgtgggatcgatgtttcaatattggaagcgctttgatttacagcagctgcagagagaactcgatgccaccgcaacggtattggcgaaccggcaggatgaaagtgagcagtccagaaagcggcttatcgaacagagccgggagttcaagaagaacactccagaggatttgcgcaagcaggtagcgccgctgctgaagagtttccaaggagagattgatgcactgagtaaaagaagcaaggaagctgaagcagctttcttgaatgtctacaaaagattgattgacgtcccagatcccgtaccagctttggatctcggacagcaactccagctcaaagtgcagcgcctgcacgatattgaaacagagaaccagaaacttagggaaactctggaagaatacaacaaggaatttgctgaagtgaaaaatcaagaggttacgataaaagcacttaaagagaaaatccgagaatatgaacagacactgaagaaccaagccgaaaccatagctcttgagaaggaacagaagttacagaatgactttgcagaaaaggagagaaagctgcaggagacacagatgtccaccacctcaaagctggaggaagctgagcataaggttcagagcctacaaacagccctggaaaaaactcgaacagaattatttgacctgaaaaccaaatacgatgaagaaactactgcaaaggccgacgagattgaaatgatcatgacggaccttgaaagggcaaaccagagggcagaggtggctcagagagaggcggagaccttaagggaacagctctcatcggccaatcactccctccagctggcctcacagatccagaaggcaccagacgtggagcaggccatagaggtgctgacccgctccagcctagaagttgagttggccgccaaggagcgggagatcgcacagctggtggaggacgtgcagagactccaggccagcctcaccaagctgcgggagaattcggccagccagatctcacagcttgagcagcagctgagcgccaaaaacagcacactcaaacaactggaagaaaaactcaaaggccaggctgactatgaagaggtgaagaaagagctgaacattctgaagtccatggagtttgcaccgtccgagggcgctgggacacaggatgcggccaagcccctggaggtgctgttgctggagaagaaccgctcgctgcagtccgagaacgccgcgctgcgcatctccaacagcgacctgagcggacgctgtgcagagctgcaagtccgtatcactgaggctgtggccacagccactgagcagagagagctgatcgcccgcctggagcaggacctgagcatcattcagtccatccagcggcccgatgccgagggtgccgctgagcaccgcctggagaagatcccagagcccatcaaagaggccactgccctattctacggacctgcagcaccagccagcggtgccctcccagagggccaggtggattcactgctttccatcatctccagccagagggagcgcttccgtgcccggaaccaggagcttgaggccgagaaccgcctggcccagcacaaactccaggccctgcagagtgagctggacagcctgcgcgccgacaacatcaagctctttgagaagatcaagttcctgcagagctaccctggccggggcagcggcagtgatgacacggagctgcggtactcgtcccagtacgaggagcgcctggaccccttctcctccttcagcaagcgggagcggcagaggaagtacctgagcttgagtccctgggacaaggccaccctcagcatggggcgtctggttctctccaacaagatggcgcgcaccatcggcttcttctacacactgttcctgcactgcctggtcttcctggtgctctacaagctggcatggagcgagacgatggagagggactgtgccaccttctgcgccaagaagttcgctgaccacctgcacaagttccacgagaatgacaacggggctgcggctggtgacttgtggcagtgataccccggggcctcccccgtgacagtgacggctgcgctccaccccgactgctcagtgcatctaatcacttagactcccctgaagaatcccccatggaaactgcccttatccgctgtccagcagctgccagaggcccaggtcacctcgggtccccttgaaagaatgtctcggtcacatcaggcccgctaggtccagagagcgagcccccaatgcccggccaggctaagccgcagaggaccctctcagcccccacctcaggttaggggttttgcccgcagccttgacntttaggcctggttggcagaggttccctcagctgcgaggctaattgggtgaccaccgattccagctgcggttaatccagcttgggcctgtctgcactgcgatcctcttgggctctcctaggatccccccatgccccgtaagaggtggaagacgcttccttgcaggacagcaggctttgagtccagcacccccagcctgcctttgccaccagccccaccctgcagagtatatgaggcttgacagagtctgccccctcccccactgcaccccaagagagagagccccagccagcggaacagtttctattaccccctccctgcccccagacccatgtgatttctgctttcttctttagcaagatattctggtttctagataaggaagagtctctaatgagcccccgagccccagtctcttcagactcatggattggtctgaggggtctgaacgtctcctagccaatcagaactggctgtggaccaccctagcacggccacctctcagggccactggcaggccttcctgagttagatttgtagttgcatatttagctttgcacatttgaaataaaccacggttgcagccaaaaaaaaaaaaa

SEQ ID NO: 50086 - DNA, 475 bp, Homo sapiens
caaggcaagagtattactcagatattgaaaatggatctcagctgtgcccctcgccttttctcccacgactcgtcatctgtgatgtttccaccagctttatttgcagagcacagaccacagggagccagtgtcttgggttagggttgtcttcacctgccctcgtctccaggcacgagaggcctgagaggctgctcaggagctaaaacattgtgaatgtccattcttgtaaaggatcaggtaccttagtattcggcagtttacatgattcaaagcacctgtgcatgttttcctctttctctagttacttgcacacttgtctggaaagaccttgtggggtgtagaacacaacagtgttcatagctaggccagtctcagcagtgtcctagcccattcagaggccatctggtgatagacccagcatgttttttttttatggcagcagaaagattgaatagcctttctgctggattctaga

SEQ ID NO: 50087 - DNA, 3180 bp, Homo sapiens
tttttttttcaggggtatgaggctttattcaggaagagctcaagatgggaggggagcccctggggtcccactcttgtggcctcttgataccaaggctcatgggacgctaaaacctaatgactgcaggcatctgagcttccttggagtcatctgtggggggcacaggggcagcctcagagtcacccgtggggggcacagggggggccccggagtcacccgtgggcggcacgggggcggtctcggagtcacccgtgggggtcacggggggggccccggagtcacccgtgggcggcacggggggggcgccggagtcacccgtgggcggcacgggggggggcccggcgtcacccgtgggcggcacggggggggcgccggagtcacccgtgggcggcacggggggggccccggagtcacccgtgggcggcacggggggggccccggagtcacccgtgggcggcacggggggggccccggagtcacccgtgggcggcacggggggggccccggagtcacccgtgggcggcacggggggggccccggagtcacccgtgggcggcacggggggggccccggagtcacccgtgggcggcacgggggcggtctcggagtcacccgtggggggcacgggagtggcctcggagtcccctgtggggggcacaggggtggcctcctggtcggtcactgtgggcagcgccagataggtgagggtccagtagcgcaggaagttggttctcaggctccgcttcatggagctgctgcccatcttcttggtgatctccaggtagccgctgttttccgtagtgtagggttcccagtgtgtgggcacagccgagtcgcccatgttggggtcccctgttttggcaaagttggtccagtaggcgatcatggccttagagactgtcctgtcttggggccggtagcccgtgggggtggcgaagggcttcccgaaaacgtactgaatgtcatctgcatggtcggcccccacccatttggggtagacgggcatccgagagggatgggaaaacaggtaggcgtaggtcttggcactcttggcattggctctgtgctgggctagggcaatctcggtgggcaccaggaagaggacatcggtctcaaagtccaccacagtcttcttcttattctcctgggatgggtcctgggcccaggactcggtgtagacatcaaaggtcgtcttggcgcctctgagccccttggtgattgtgaactcactgaccagcttgtagaagtcctcctccgtgactttcttgttgcccttgttgatggcaggcatgtcgatgctggcgaagatgtggccgtccatgttgttggtgcctgctatatagtcgatgtcggcggcgttggcgtacaggttgatcgggtcagcggggatgaagtctccatcaatgacagggacgaagcccacatagtgcagcatggggtactccaggcctgccagcggcaccttataggccagcgtcagggctcggggatcagtaaccttcagacactgggccatcctggcggcatcacccacagggcaacccaccttctcagccacctttttggcccagaagagtgggtttttctggatgacccagggactcagggccacgccgctctggctgatggctcgccggatgaggcccttgttgtagggggagagggtctgcagagagacgctggcacctccagcagactccccgaagagcgtgatgttgttggggtcccccccgaaggccgcgatattcctcttcacccaagcaatggccatgtgctgatcccgaagaccatagttacctggcagattggcgtccccagtgctgaggaacccaagggggccgacacggtagttgaaggtgaccacgatgacgtttccgcgtgtggcgatctcctcgccgtcatacaggtagttgttgaggaagttggccccatggccggaccccatgaggaaggcgcctccatagatccagatcataacgggcaggtcccgggagacttgcttcctgccctggggcacccaaatgttgaggtacaggcagtcttcatccccgtaggtgctgtcctgggtgatggtggcctgcaggcatctcttcttgaagttcttggccttcagggtcccttgccagccaggatgtggctgaggattttccagggccttggtgggagctgcgaaggggatgcccttgaagatgtccacagagtcacccaggaggccgagcttcttattgacgccttccacgaacccaccttctgtgtacacggcgcccagcttcgcggcactcgccactgcccagcagcaggtgaggcccaacacaaccagttgcaggcgccccatggtgagcatcagcctctgggtggcctactggggatatataatggagagactctggtatttgaggagagcaactggttcataattaacgtgattaaattagtttggcgctatggatttcaatccctccgtatgcacatgtgggtagaggacgtgttagacaagttcatgaggatctaccgctaccagtctcatgactatgccttcagtagtgtcgaaaaattacttcatgctctaggaggagatgacttccttggaatgcttaatcgaacacttcttgaaaccttgcaaaaggccggcttttctgagaagttcctcaatgaaatgattgctcctgttatgagggtcaattatggccaaagcacggacatcaatgcctttgtgggggcggtgtcactgtcctgttctgattctggcctttgggcagtagaaggtggcaataaacttgtttgctcagggcttctgcaggcatccaaaagcaatcttatatctggctcagtaatgtacatcgaggagaaaacaaagaccaagtacacaggaaatccaacaaagatgtatgaagtggtctaccaaattggaactgagactcgttcagacttctatgacatcgtcttggtggccactccgttgaatcgaaaaatgtcgaatattacttttctcaactttgatcctccaattgaggaattccatcaatattatcaacatatagtgacaactttagttaagggggaattgaatacatctatctttagctctagacccatagataaatttggccttaatacagttttaaccactgataattcagatttgatcattaacagtattgggattgtgccctctgtgag

SEQ ID NO: 50088 - DNA, 1025 bp, Homo sapiens
aaaactattttttttttttttttgaaaaataaatgaaaaaaattttattgagtattactttatacatgcaaattgaaagtgaatctatattaagttgactattccacaataaaaacctatgaaatgggaatgatcaaagctaacacaatactaatgtgttcaataaattatccagatgtttttccacaaatatttggattacctgaattagctgattcttcagcaaaagttaaattttagctttaatatggtagcagcaggatgctacttaaatttagaagaaaaacataagaataaaaaccctgaatagcatagccaaatcttccaagaaataagttcaccaaaaaagtagcatacacctatttggtatccagaggaggaaacaaaacacaggcacttaatcaacatccaccaagtgatcatcactaacattctattattaccagagtaactgtcgatatgtgaactgtagattagaacagacttacatatctaaaaacaaaccagtaatcaataatatatacagaaatactaacttgaagtcacatttaaataccatcaacagtttggtgtatctgatataactgaattcatttcatcactgctataaattccttaaaagtgttcttttcctaattaacattatctttaaaaaatggtagatatttcccagtatgcatcagttttttcactccaccattcagtaaatgttgtagcaaattaaatagaacctattaactagatctaaaaacagtggctgaatacttaacacaaagaagtacttttgagtaaactattcagattagacaggctaatgctaagactgcattttgtgctactgacatgcactatatagatcgtacactactagatggaaagttggtccatgtccatttatttaaagattctgtaacacctgtaatagtatttaatacagctcccacatactatattcctctcacatagacatagttatttttagtggggataaggatatgactttaacatgctatgagattctagct

SEQ ID NO: 50089 - DNA, 653 bp, Homo sapiens
aaattttcttcgctcacccacagttccccagtttctgtgtttccctctgcagagacagtcatcctttcttatatatccttctggatgttgtaagtgattgtagagcatctctgtggaaataaatggttaagtcggtttgaagcaaagcccttctggggcagaaaagcctccagaacgccagatgtcgctgtggttccgcggtgagagagggcgtgcgtctctgtggttataaagttgggggtggagtggccgggagatgatggctgatgaagaggaagaagtcaagccgatcttgcagaaattgcaggaactcgtggatcagctctactcatttcgagactgctatttcgagacacatagtgttgaggatgctgggaggaagcaacaggatgtgcggaaggagatggagaaaaccctacagcagatggaagaagtagtgggttctgtccagggcaaggcacaagttctaatgctaactgggaaagcactaaatgtgactcctgactatagccctaaggctgaggagcttctgtcaaaggctgtgaagctggagcccgagctggtggaagcctggaaccagctgggtgaggtgtactggaaaaaaggggatgttgcagctgcccacacctgcttctcaggagccctcacccatt

SEQ ID NO: 50090 - DNA, 955 bp, Homo sapiens
ctcctgggttaactggtctattatgatgatggaactgcagaataaaaaggttgttgggcaccacttgtcttagtccttttgttaatttgtcatttttaccagtaagatcttcaatttgatttcacagttccatgatgaagaaatattttctgcaaagcaaattactgtaaatagggtaatagtaatacatttggccatgatttaaattctgcacacatttcagagagaacaattttacaatgttaagttttaagcaaatgcttatttcatgcagttacaataagtttaggccaagcactttttaaaaaggcaaatatgttcgaattaaatacttagccaaaaaaggatttcattatgcaagactgataatacaatctcaaatactgacagaaattaaccccaccacagcaaattataaattcaaagcttaaattctttcattacactgaaattgctaaaaaaaaaaaaaaaaaaaaaaactttgcataaaatagtcttcaccgagttaagtatttcattttatagttacttgttgaggacataatatactcaataaatattataaattaagtgtaaaatttgaactggaaagaagtttaagcatttcattagagctcaaaaatcaaaccccatgcacctaaaagtaatagcagtttattaggaattcttccctttctcacctgtgtatcaacatattggggatcagtaatttagatgaaagtatactacaaaaggagcaaaggacacagacttagtaggttagaatattctggcttatgctaaaaaacaaaaagccttttttttaaaacagacatgcaaccacaaatttctcaagtattttagacacttggttcatctgtataacaaaaaaaaaaatgcatttgacttaaaaaagaaatagaaaaccctaggtttctgtagtttagtttttcagatttacccatgcaaatcatat

SEQ ID NO: 50091 - DNA, 1349 bp, Homo sapiens
ggcatctctgcacaggtctccgattggtgcacagcacagcctggccttttagggactgttgtcgcgcgtttaaagtgatagggaaagggtccagtggctgcttttatcgaccaatcaaatattttcctgacagatcccaaaatattcctgggccaatggagggaggagcccaagatgcctctgctgctccttggagagacagagcctcttaagttggagcgggactgccggagcccagtggacccctgggctgctgccagccccgacctggcacttgcttgcctgtgtcactgtcaggatttgtctagcggcgcattccctaacaggggtgtgttggggggagtcctctttccaactgtcgaaatggttatcaaagtgtttgttgctacatcttctgggtccatagcgattaggaagaaacagcaagaagtagtgggttttttggaagcgaataaaatcgactttaaggaattagatattgctggagatgaagacaacaggaggtggatgagagagaatgttcctggagagaaaaaacctcaaaatgggattcctttgcctccccagatcttcaatgaggagcagtactgtggggattttgactctttcttctctgcaaaagaagagaatattatttattccttccttggtttggctcctcctccagactcaaagggatcagagaaggctgaagaaggtggagaaactgaggcacaaaaagagggcagtgaagatgtgggcaacctccctgaagcccaggagaagaatgaagaagaaggagagacagccacagaagagacggaagaaatagccatggagggtgcggaaggggaagccgaggaggaggaagaaactgcagaaggagaagaagagcctggagaagacgaagattcctaggccttttcatgcttcatttcttccacttctccagaaaatggaagctatgaagcaacatttcaaatgtctctccacaaaccaaactcaacagaatactttggcttgaagccggcacacccagggttactgaggacttatgctgcctgacctggttagatgtacatggaggtatctcccgaatcatacaaaattaaatgtgaagaccgtttatgcataccttcatgtgcctgacagtcttggcttttgaagatttttttttcttttttgctctgcatagctagaccatcttattaataatactctgaaaaaaatgatttcaaggcatggaagttctctgtgatacaacaatagtatttcttcaaatgcgccttatgctacttatctcagaaacaggttttaaaatgaagtgctttccagagaaccatcatataaataaagattaatagaaaaat

SEQ ID NO: 50092 - DNA, 2396 bp, Homo sapiens
tttttttttccaattatttttacaaagttttattgaaacttgtccatcaaggtgacagtaattcactgttttgaaaagtcacaaaaaaagggtacccccaaactcaggtataccaagtaaatactggaacccagggagctcactcctccctctcccaccaggagcaaagggcataacgggagcttccgctgactcacagcaacctgggctagtgggtacatctgtggcgactcccgggaaactgagctgcgtatacagaagtctgctttggtccaaaggacatcttcctgacccagactcagaaggctgctgtcaagttctacattcctttcagaataagcaacagcaactgctgcagtcttgctaactaggggcagaggtcctgagcaaggtgccacgggaccttgtaaaatcacgctgtgtgattttatagggaagagggcagagtgcctctcaagttttcacggttaacactgtcacctattatgactggaataaaaagctggacaacctgccagctaactggtcagtcctgaggatcatccagctgaatggagaaatccggcagcaggttgaaaagtctgttctgagaacagattattgctgagcagagttcatgtgacttctagacgtggtgacttaaaaaatggccttaaggctgcagagccagccacctctgcttacaaaaaagagtacttagtgcacatgactgtaagaaacaattgtaaaacctcatctagaaatcagaaagcttctaatttctatagaaatgacacctcccctggagccgagagacaatctgttgttgattttgaaggacaggcaagaccaacactgtatttagttccatagccaggcctcaacagggacaagtggctggccttaaaaacacacagatgactggaaatgatgtgtggcctcagtccctgtttcccagaattttactggcaaaggagttagcattcatttttggcttaagaaaaatcgagaatgtaggtttagaactgcacccagcctcatgcaccgcggggccagggctgcagatcctctgccacccctccctcttttcttggacttgatgagtccccgaggctcaaagccatgggggtgctaggaggactgtcacagaccgaggcgctgcaggagctgctctgcctgggacaaaccttcaagcaggaccagggcaggtatgaaatgtcttctgaagagtgtgaaatgagcaatgtacagtccattccctcttggggaaagcatgcacgtgtggagcctggtggtgtgctgtctcctgggccaccatccgcccccagctcttccatatgggcttgtataacaaggtggtgacgtacttcttcttgtaccggtgggttgcgctgagcaccatcactccatccttgatagacagcgcgtataggtggttcagcatgacgtgattgggctcaggaagcaaagctggatcacaggaaatccccgtgtccttgttcaggatgacctggaggagatgtggggggagaatagggggtgcccgaaagcgctcttcgggtttgcagacgtagggctcctgatggtagggtcctgggggagaactggacagctcagacacatcggagcacttttgggaatccaccattaaagcatcaaatacttcaaagtcagttttcttcacttgaatgatgttgttaactgtgccaagctggctggttactatgggctcggaagggtcgtgcgtccactgaccatccacaaagaacttgtactgatgctctccttccggcagatccaggatggctacaaagttattgtggcttctggtgaggggaagtttactccagttgttgaaggacccagataagtaaacttcctttccgccccccgtccatcgaaacaccgttggccgagcctgggcgggagctttatcattcacttccagatcatgctgccaggccaggaattcctccttctctggtgccttgatttcctcggagtggaagaggtcggcgtcttcggggctgtccatcaggatcttgggcctgtccccgtccttggtgccccccgaagctggtcctccggggcgtcttatggcccaccaatccgcttcccaagcggcgcgctcactgctggtattgcccatgatgggggtctgcggggacacagggaaggcggacggcgcctcactgcaggaaagggaccctgagcaagggactcccggaaccgcgggtcccaaggagcctgcggaaggagtcggagcaccaggacaccacgcccctcgggccgggagccggttccggctgagtcggcagggttgccgagctctcgcaatcgcgctttacctgcccaggcaagccgcggcaagaacgcaaggggcgcgaagataaaccgacactttcccaaccgcttcc

SEQ ID NO: 50093 - DNA, 1078 bp, Homo sapiens
  misc_feature (1)...(1078): n = a,t,c or g
ctttcaccaccatcgttgctttaatctgtgagctgcttggtatatatgacgaagggaactttagcttttcaaatgcttggacttatttggttataataaacaacatgtcacagttgtttgccatgtattgtctcctgctcttttataaagtactaaaagaagaactgagcccaatccaacctgttggcaaatttctttgtgtaaagctggtggtttttgtttctttttggcaagcagtagttattgctttgttggtaaaagttggcgttatttctgaaaagcatacgtgggaatggcaaactgtagaagctgtggccaccggactccagggattttattatctgtattgagatgttcctcgctgccattgctcatcattacacattctcatataaaccatatgtccaagaagcagaagaggggctcatgctttgattcctttcttgccatgtgggatgtctcagatattagagatgatatttctgaacaagtaaggcatgttggacggacagtcaggggacatcccaggaaaaaattgtttcccgaggatcaagatcaaaatgaacatacaagtttattatcatcatcatcacaagatgcaatttccattgcttcttctatgccaccttcacccatgggtcactaccaagggtttggacacactgtgactccccagactacacctaccacagctaagatatctgatgaaatccttagtgatactataggagagaaaaaagaaccttcagataaatccgtggattcctgaacagtatggaaaagcaaactgtgcaactactacattatatcattacctggtatcccatggatttngtgcttgggacagaccataaaatgatggaaaatgtcaacacaaaaatagctgaagccaggtacaacttactgcatttatatatgtgaagttttgtatatcaaaaataattggtctaaatttcctagacttagacttgatttcttaacattagggtatcgcatactcaaatggtagacaatgaccccaactaaatcttcctgatgttacactggctttatcaagggggtggactttttttttttg

SEQ ID NO: 50094 - DNA, 438 bp, Homo sapiens
gtattgactgagttgtccattaagcctagccctagcccttttaaggtgcactgtgtggaacggcccaggctccccaaatctaaacttctcactcttcaccatccagttttcaaggcactgtgaagcccctgatgcgaaacagcagttaccgcaggccatggaggagcgggcacagctgaaagcacatctagggcaggtaatggagtcagttagataactacaaacggagagagatacgtatgctgaaaatctgaaaggagggagggccatgtggtgtcagaggaagcaacagatgtcggagcagcagggccctccaaggtggagcagcagctacaagcagaggctgaccacctgcagaaggagctggagagtctggcagctccgagcccaggagcaagacactgagggcttcagtcacccgaccatgagtaggaggag

SEQ ID NO: 50095 - DNA, 348 bp, Homo sapiens
ttttttttttggaagtcattggcatttaataaattgcagaaaaattatacagtaaatacattacaatcattaataataggctctaatgagaagaatttaataaataatcattaaaaatacaggataattttattatgttctcaatatgttgctgcacttcttaccacaaaacataataaaattatatgactataatatagatttcaggagctaaaaaaagccttatattttcaaataaaagaacaatataaattttgcaaaatatgacgagcattactgaagtataaagtaaatatttggaattaaaatatatggtcatttagatacagactaaaaaagaatagaaat

SEQ ID NO: 50096 - DNA, 431 bp, Homo sapiens
ttttttttttttggtggccagtgtttatttatgcagataagcactgtgtcgcactagcatcaggaacagccacaaatctcatgcgcctgccactcagtggctggggtaagtcctagcagagcttctgagcgtggttatttaggaaccatgagtccagctaggatggggcaggcccacctcctgggggctgcaggcagaacctcaggagaggacagagaaaggaggtgggaagcaagtcacgattcagctcacacggtgtagacaggctgggcagaggcggggtggaccacgctgcagaccagcaggatgtggctgtccctggcagtgcccatgctgcctctttctgccttccgggccagcatcaccacacggcccatatggatgatggttactttggcagtcggcccctgctctgggccacactgctgggg

SEQ ID NO: 50097 - DNA, 576 bp, Homo sapiens
acactccagaaagccaggagtcgacagttttggaagcctctctcaggattgagattctaggatgagattggcttactgctatcttgtgtcatgtacccactttttggccagactacactgggaagaaggtagtcctctaaagcaaaatctgagtgccactaaatggggagatggggctgttaagctgtccaaatcaacaagggtcatataaatggccttaaactttggggttgctttctgcaaaaagttgctgtgactcatgccatagacaaggttgagtgcctggacccaaaggcaatactgtaatgtaaagacatttatagtactaggcaaacagcaccccaggtactccaggccctcctggctggagagggctgtggcaatagaaaattagtgccaactgcagtgagtcagcctaggttaaatagagagtgtaagagtgctggacaggaacctccaccctcatgtcacatttcttcaatgtgacccttctggcccctctcctcctgacagcggaacaatgactgccccgataggtggaggctggaggaagaatcagtcctgtccttggcaagg

SEQ ID NO: 50098 - DNA, 3508 bp, Homo sapiens
  misc_feature (1)...(3508): n = a,t,c or g
tagccggtctttgggggtaggcggtagtggcggaagaggttcggcggctgatggcggatcaggatcggaagcctgcgtgaactttctcccttgatccgggagtctttccactggattcacaatgacatcctttcaagaagtcccattgcagacttccaactttgcccatgtcatctttcaaaatgtggccaagagttaccttcctaatgcacacctggaatgtcattacaccttaactccatatattcatccacatccaaaagattgggttggtatattcaaggttggatggagtactgctcgtgattattacacgtttttatggtcccctatgcctgaacattatgtggaaggatcaacagtcaattgtgtactagcattccaaggatattaccttccaaatgatgatggagaattttatcagttctgttacgttacccataagggtgaaattcgtggagcaagtacacctttccagtttcgagcttcttctccagttgaagagctgcttactatggaagatgaaggaaattctgacatgttagtggtgaccacaaaagcaggccttcttgagttgaaaattgagaaaaccatgaaagaaaaagaagaactgttaaagttaattgccgttctggaaaaagaaacagcacaacttcgagaacaagttgggagaatggaaagagaacttaaccatgagaaagaaagatgtgaccaactgcaagcagaacaaaagggtcttactgaagtaacacaaagcttaaaaatggaaaatgaagagtttaagaagaggttcagtgatgctacatccaaagcccatcagcttgaggaagatattgtgtcagtaacacataaagcaattgaaaaagaaaccgaattagacagtttaaaggacaaactcaagaaggcacaacatgaaagagaacaacttgaatgtcagttgaagacagagaaggatgaaaaggaactttataaggtacatttgaagaatacagaaatagaaaataccaagcttatgtcagaggtccagactttaaaaaatttagatgggaacaaagaaagcgtgattactcatttcaaagaagagattggcaggctgcagttatgtttggctgaaaaggaaaatctgcaaagaactttcctgcttacaacctcaagtaaagaagatacttgttttttaaaggagcaacttcgtaaagcagaggaacaggttcaggcaactcggcaagaagttgtctttctggctaaagaactcagtgatgctgtcaacgtacgagacagaacgatggcagacctgcatactgcacgcttggaaaacgagaaagtgaaaaagcagttagctgatgcagtggcagaacttaaactaaatgctatgaaaaaagatcaggacaagactgatacactggaacacgaactaagaagagaagttgaagatctgaaactccgtcttcagatggctgcagaccattataaagaaaaatttaaggaatgccaaaggctccaaaaacaaataaacaaactttcagatcaatcagctaataataataatgtcttcacaaagaaaacggggaatcagcagaaagtgaatgatgcttcagtaaacacagacccagccacttctgcctctactgtagatgtaaagccatcaccttctgcagcagaggcagattttgacatagtaacaaaggggcaagtctgtgaaatgaccaaagaaattgctgacaaaacagaaaagtataataaatgtaaacaactcttgcaggatgagaaagcaaaatgcaataaatatgctgatgaacttgcaaaaatggagctgaaatggaaagaacaagtgaaaattgctgaaaatgtaaaacttgaactagctgaagtacaggacaattataaagaacttaaaaggagtctagaaaatccagcagaaaggaaaatggaagatggagcagatggtgctttttacccagatgaaatacaaaggccacctgtcagagtcccctcttggggactggaagacaatgttgtctgcagccagcctgctcgaaactttagtccggcctgatggcttagaggactctgaggatagcaaagaagatgagaatgtgcctattgctcctgatcctccaagtcaacatttacgtgggcatgggacaggcttttgctttgattccagctttgatgttcacaagaagtgtcccctctgtgagttaatgtttcctcctaactatgatcagagcaaatttgaagaacatgttgaaagtcactggaaggtgtgcccgatgtgcagcgagcagttccctcctgactatgaccagcaggtgtttgaaaggcatgtgcagacccattttgatcagaatgttctaaattttgactagttactttttattatgagttaatatagtttagcagtaaaaaaaaaaaaaaaaaccacacctaaaatagaccactgaggagaccatagagcggatgctttcatgcaccctttactgcactttctgaccaggagctactttgagtttggtgttactaggatcagggtcagtctttggcttatcaataaattttaatctctgttaatcttacctgctttaaaaaaaagttcttgtgtgttcgtatctttatttattccctagtttgcagaactgtctgaataaaggatacaaggattatttcaatgttactgcactgaaaaacgtgtatgtattagtgtgctagattatttagcagaatattcacaagtttctgttgaccttgttgattgagcatgactactaaatattatgtaataaaaagcatttgtcataacagtcttatgaagtagttcttcgaatatagaaagttctataatttagcccatgaaatgataggtttttaattttcagaaatggagctgcatgtagaatgagatcacatgcttttatatgtgaaatattggttttagcaattaacagaaggcatactttgctaattttatggcaaaattttagaataacctgaatgattatttttaaactatcttgaagttgtatgtatatatctaatgggaaaatggaacaagagatgtcagtataattgttttcctattaaatgatctcataacaggggtgtttgtggcataaaaatcatagaatatatatcagtatcttttttacattttcctgatgagaatataaatttgaaatattctcagtaagtgattaaaagtacaatacataaacccaaatcaaagtaatgtgtttcttcagttatgtctgtgctgtatagaactgtcactaacattaaagaaagaggacacatttttcaagatctgtaatttcattgttgtcaaatttatttgtgaaagtttttcattaatctaggcatcttggaacatctttttttggtttgggcctttaaaatacttctgaattgtattccctttcccttttataatgtgcgtgtggaataattaaaggcaccaacttttggattttgcccgcttttgtaggggtatccatccaaaatnggtttaccattt

SEQ ID NO: 50099 - DNA, 548 bp, Homo sapiens
  misc_feature (1)...(548): n = a,t,c or g
cctgcctcagccttccaaagtgctgagattgtgcctggctgtctctgtcttctttggggaaaagcaaggccaatgtagctgaagcagagaggagagaaaggtgagggctgactgcatggagcctctgtggggcattgtgatggctttgaagtcaccttgcttgaggaggctgcctcagggcctttgcatatcctgatccttctgcctggcatacttttccctctgttctttgccatgttaccacatcctttagatctcaaaccaaatattactccttacacaaagccctgcctaacttcatacgctcatggtttataacactccataattacacaggcctttgtgtcataatttgatgactgtctgtcttctcctttgggtatgggaccttcaagggcaggggccagggctgtctgggtccctgctgttctcttctttgtgcacatgggtgggcggtggctaagcacaggggagttctcagcacatatttgtgatngggggctagattcacggactcgactgtgcctagctttgtgctaatccctatg

SEQ ID NO: 50100 - DNA, 654 bp, Homo sapiens
tattttttttacgtaaaagagtattttaattcttgtccttggaagccataaagattatacatgacttggaaatgagactgtaccaaatgatggccaaagaagaatcatcctttctactccttctctttcgtctggtcactcagaaatataatattatctgtaaaaaagccaaaatgtaaatattaatttcagaactctttctccatctcattcaataattctcctctaatacatataactttagtgctgttcattaaaaggattttagccatcttttcaaaatattaaatcacttgctatgctcacgagaggtatatatacagttggcataagtggagctacaagttaggcactggctgcttttcgaacaattcagatcttgttagaagaggtgggatatttcttgtcttccagtcttctcagaaacaatttcctgcaaaagaactggtcacaaaattggatgcttgcaatggtcaggcagattccacgacactaggcagcacatcctcagagaaaaggacaaaagtgtatcacattctacactctgggggtctagaggaaagagtaagagtccatatgtggccctgttagcaatgacaggatttacttacgtttttaactttaaaaattcaaatagaagaaattttattttta

SEQ ID NO: 50101 - DNA, 1905 bp, Homo sapiens
ggaattccggaattccgcggagcaggcctcgtgccgttacggccatcacggccgccgcagtggcgtcctggagccctcctcagtgctgaagctgctgaaagatggcagaagaagtggtggtagtagccaaatttgattatgtggcccaacaagaacaagagttggacatcaagaagaatgagagattatggcttctggatgattctaagtcctggtggcgagttcgaaattccatgaataaaacaggttttgtgccttctaactatgtggaaaggaaaaacagtgctcggaaagcatctattgtgaaaaacctaaaggataccttaggcattggaaaagtgaaaagaaaacctagtgtgccagattctgcatctcctgctgatgatagttttgttgacccaggggaacgtctctatgacctcaacatgcccgcttatgtgaaatttaactacatggctgagagagaggatgaattatcattgataaaggggacaaaggtgatcgtcatggagaaatgcagtgatgggtggtggcgtggtagctacaatggacaagttggatggttcccttcaaactatgtaactgaagaaggtgacagtcctttgggtgaccatgtgggttctctgtcagagaaattagcagcagtcgtcaataacctaaatactgggcaagtgttgcatgtggtacaggctctttacccattcagctcatctaatgatgaagaacttaatttcgagaaaggagatgtaatggatgttattgaaaaacctgaaaatgacccagagtggtggaaatgcaggaagatcaatggtatggttggtctagtaccaaaaaactatgttaccgttatgcagaataatccattaacttcaggtttggaaccatcacctccacagtgtgattacattaggccttcactcactggaaagtttgctggcaatccttggtattatggcaaagtcaccaggcatcaagcagaaatggcattaaatgaaagaggacatgaaggggatttcctcattcgtgatagtgaatcttcgccaaatgatttctcagtatcactaaaagcacaagggaaaaacaagcattttaaagtccaactaaaagagactgtctactgcattgggcagcgtaaattcagcaccatggaagaacttgtagaacattacaaaaaggcaccaatttttacaagtgaacaaggagaaaaattatatcttgtcaagcatttatcatgatactgctgaccagaagtgactgctgtgtagctgtaatttgtcatgtaattgaagactgagaaaatgttgggtccagtcgtgcttgattggaaattgttgtttctaaatctatatgagaattgacaataagtatttttattataactcagcccatacatatatactatgtatgcagtgcatctgcatagaacagttccttatccttggccttctgttttattgtttttttctttgctgttttccctttgcttctaatattacagtttgattttgaaacaaaaatcaaataatgcatatcagaatctttatatggaagaaatcctttattgcctttcctttgtttccttgtaaaggcaccctgttctgttatggtttttcattatataaaattattatatctatatatgacatatgctaaaatttcttggagagtgttaatcttttctgtgactaaatagcaataataagtggaaaattagaaattatttccaggtattatatttgtcacaggccattgtaaataccaagtatattgtgtctgccataatttttaaaaatacattcattgtcttcagtcatacagcaagacacatgagacatagattagaaaacatgttgtacaattttaatttacaactgttggaaataaaaatcacttaatttttttcca

SEQ ID NO: 50102 - DNA, 701 bp, Homo sapiens
ggagacattgacgagagggctatggaattactgattgactttgcgtatacctcccagataacagtagaagagggcaatgttcagactcttctgccagctgcttgcctcctccagctggcagaaatacaggaagcctgactgtgaattcttaaagagacaattagatccttctaactgcctgggcattcgggcttttgctgacacacattcatgtcgtgagttgctaaggatagcagacaagttcacccaacataactttcaagaggtaatggagagtgaagagttcatgttgcttccagccaatcaactcattgatataatatccagtgatgagctaaacgttcgcagtgaagaacaagtgttcaatgcagtgatggcctgggtcaaatacagtattcaggaaagacgtcctcaattaccccaggtgctgcagcatgttcgtttgcctttgcttagtcccaagttcctggtcggcacagtaggctctgatcccctcatcaaaagtgatgaagaatgcagagacttggtagatgaggctaaaaactacctcctattgccgcaagaacgaccactaatgcaaggaccaaggacgagaccacggaaacctatccgatgtggggaagtactctttgcagttggtggttggtgcagtggagatgccatttccagtgttgaacgatatgatccacagaccaatgaat

SEQ ID NO: 50103 - DNA, 684 bp, Homo sapiens
ttttttttttttttttttgagggttcttaggtttattgagtgatctctgagaaaagggccggccccaggagcaggagggggtggggaggatccagagaagcagaggaccaggaagagagcaccccaccgtgggctcctggaccagagcaactgggggacttacacttgccagcacagcacactcctctggtcttgggcagaaatccagccactgccccatgctgccagacctgatcgcagacagccactgttcccattccttgccagcagcaggacggagagtgctctaccccacctccctagtcattcacaatattccaggggggccagccctcctggatgacctggttgtcagcctcacaccctccttctaggagtgagagcatgagctcactttgcagtgggcactaagcaaagactggggagctgtgccagtcggagtacaccagaaatccggagaaggtgctgtctgtcttgatgatggcatagatgccaatgtagtcacccacacccacctgcacccacacttggtcctcaggctccagcctcaccatggccccccccgagagcgaggctggcttgggccaccccccgaaaaactggaagaaagaggcaatggattcgccattcttcaccagatcaaactgcaggctggcccggtagacggtggcatggacggcgaag

SEQ ID NO: 50104 - DNA, 416 bp, Homo sapiens
gcctgctcagttattggtgtgggctctgatattggtggtagcattcgaatgcctgctttcttcaatggtatatttggacacaagccttctccaggtgtggttcccaacaaaggtcagtttcccttggctgtgggagcccaggagttgtttctgtgcactggtcctatgtgccgctatgctgaagacctggcccccatgttgaaggtcatggcaggacctgggatcaaaaggttaaaactagacacaaaggtacatttaaaagacttaaaattttactggatggaacatgatggaggctcatttttaatgtccaaagtggaccaagatctcattatgactcagaaaaagggtgtggttcaccttgaaactattctaggagcctcagttcaacatgttaaactgaagaaaatgaagta

SEQ ID NO: 50105 - DNA, 726 bp, Homo sapiens
caaatcagtttttttggtgtctttgcagggaatgaaagaagataatgagcagataatcagcagccatttcctttcagttacggtatatgattctgcctgagaaagcaggatttatgggaaggaaaacttgtctaaggctcatcaagatggcctgacccagagtcacctaagagaactcttccaacttaaatgactagggtgtgtaatcagttgcttcttattctgtgtctcagatttcctagtccatgacatttaatagtgagtatagagtaggatattctatacattttagtatttggcccttggaaacaaagttaaataccatgtcactcagaagactctcaaagtttgtgtataaatggcgaagtatgcactatgagagattctaatccattcacatcattcttgagttgtgcaaatacacttggctttgatttcacttggtgatctaaatttgtttatttaagctgcaagaaagttacattaatttggaatgtgtcatcacttggacccagtatatcagatttttattgagtaaaatgttaaaaataataagtgtaactcagattctggatgttcgagtttacaatacattgcctgtaataaaagctgattctgaagtgcatttttcttgacttactttggcagaaatatacttatatcttaatttatagtttgtaagtttatactgttttctaaaagtaataaatcatttcatgaaaaata

SEQ ID NO: 50106 - DNA, 1170 bp, Homo sapiens
tttttggagggggaggctggattttcttttcacttaactgcaggttatatccctgctcggcaccaattttaagtgtacgctggagagaagagacctgaataaaggatgccaactgtgattccagacctttacaaactgctggtaagattttttttttcatttttttttaaattagcaaatctgttgttaaattacttaaagaaaatttaacaatggcataggcaccttgtcaactaaatgattttcataaacaccaaaaagtagttaaaacttttgtatacataaccaaaaaaaaaaaaaaagaaaactgtacatttacagtatttgctgctgttcattccccaaaatacaattaggacataattggctattaaaaatttataaaatttaataaaaaactttgctatgaatgtagtgttacccacttttgcattaaattcaccttcataaatcaaaacatcatgactctcattcttaaattaaatgacccaaaattagaagttccaaaaaagttctgagaacaattatggtttaaaacaacaaacctaaatttttaaaatggacggcaatttttcctgtttcctcctttggcattcttgtattgggacaagcaaatacgccaatgctgaattatctgttaaacataagggccacaattactacaaaattatttcttctaaattccaaatatacccattatgaacagtcacctaattagagaaaactgtacgtattaattttagtttaattcttcacaatatgctcggtctaataattgacatttgctaccttaaagtgtaaaattttaaacaaaattccaatttcctataagtttcagaacaggcatttggctatactcagcaaaactctaaatgttttaaagttgctttccttccattcagcaggcagttcacaaagcctcttcggatggggacagatcctacgaaatgctcttgaaagcactccactgtaacataatactgtatgcctttctgtactccatttcctactatcttcaaaaaccatactttaaaaatattacttaacatcaaataagatataaaataatttgcaagaaaatttgaaacgtgcaccacaatgaataaaaatccacgttaagccattctttcctcaaggggaatcaattttctctttcaagttgttcacgtc

SEQ ID NO: 50107 - DNA, 305 bp, Homo sapiens
  misc_feature (1)...(305): n = a,t,c or g
gatgacagtgggcttattttttccctcctgatatatggaaggggattttgagaatagcagtatttgagtaaaatttagagaggaggcctctttttaaagtgacctgtctatattccctgggtggaactgactgccttaggcttctgatacattggtgacagacctgggagatgaataatatgcatcctcatttttattgtatacttgtgactcaggtgttctcaaaggttattaatttcatggaaactcctggaagggtgttggaaccanaagggggggagggnaaggaggagtttntttgncct

SEQ ID NO: 50108 - DNA, 582 bp, Homo sapiens
tgctgagttttgcaatttatttattgaaaccttatacatacattgtttggctgtagaattctaaaatcatgttttccaaaatgtttttatcccaaatcacagaatgattatagcaaaggaatacataagtcattcaatttgcttctcaatgtgttaaccacagagaattatttgctcatttggtaaacattacctcatccgcttcttcaccttcttcatcataatcatcatcatcatcttcaatagcttctccagtaaaatataacactgatcttgggattatacgctcacgtaaaaagtgaccaatttcgaagtctgcagcaaggatagcttcagcatcatcatccagatctccactctcaggaacttcaggaggggcaaaaaagttaaagaaagagtcattggaaactgttttagtcacagtacgaactgtcccacgtcccttgtgtttctgcttcttcttaatagttttcaaagtgacattctttccttttttccaatctatctggcaccctgtacaacccataatttctggtccatcaaaagaaaagggatcagaatcatctggttctgacctcatcc

SEQ ID NO: 50109 - DNA, 3566 bp, Homo sapiens
tgctcgcggcgccgcctcctgctcctcccgctgctgctgccgctgccgccctgagtcactgcctgcgcacgtccaggccgcctggctccccatactagtcgccgatatttggagttcttacaacatggcagacattgacaacaaagaacagtctgaacttgatcaagatttggatgatgttgaagaagtagaagaagaggaaactggtgaagaaacaaaactcaaagcacgtcagctaactgttcagatgatgcaaaatcctcagattcttgcagcccttcaagaaagacttgatggtctggtagaaacaccaacaggatacattgaaagcctgcctagggtagttaaaagacgagtgaatgctctcaaaaacctgcaagttaaatgtgcacagatagaagccaaattctatgaggaagttcatgatcttgaaaggaagtatgctgttctctatcagcctctatttgataagcgatttgaaattattaatgcaatttatgaacctacggaagaagaatgtgaatggaaaccagatgaagaagatgagatttcggaggaattgaaagaaaaggccaagattgaagatgagaaaaaggatgaagaaaaagaagaccccaaaggaattcctgaattttggttaactgtttttaagaatgttgacttgctcagtgatatggttcaggaacacgatgaacctattctgaagcacttgaaagatattaaagtgaagttctcagatgctggccagcctatgagttttgtcttagaatttcactttgaacccaatgaatattttacaaatgaagtgctgacaaagacatacaggatgaggtcagaaccagatgattctgatcccttttcttttgatggaccagaaattatgggttgtacagggtgccagatagattggaaaaaaggaaagaatgtcactttgaaaactattaagaagaagcagaaacacaagggacgtgggacagttcgtactgtgactaaaaccagtttccaatgactctttctttaacttttttgcccctcctgaagttcctgagagtggagatctggatgatgatgctgaagctatccttgctgcagacttcgaaattggtcactttttacgtgagcgtataatcccaagatcagtgttatattttactggagaagctattgaagatgatgatgatgattatgatgaagaaggtgaagaagcggatgaggaaggggaagaagaaggagatgaggaaaatgatccagactatgacccaaagaaggatcaaaacccagcagagtgcaagcagcagtgaagcaggatgtatgtggccttgaggataacctgcactgtaatagcctaaacacaactcttatttacttacagccttatgtttttgtattttcttggtagactaggtaatttttttttaaaggacaggaaactgatattttaaagaccaatttgttctacctagcattttaactagtttttctgccagctatgttgaatgcacaaattctgtcacgcatgttcattcattgctacataatttggttcttctggaatatttttatgtagctcttggagtacagctatgaaaattaacaactgttaaaggaaatacctttttttttttttgtaattttttccttgaagaaccaaagtattttttcagctggttgttgaatagggttaagtccgcttggattagctgtgcctttcattactttgttacagaaatgcagtgacttatactaagacaatttattgtttaaaaaaaaaattggcaagacaactatatggttaagaatttccagtatgaccacacccaataactgttattagagtgttaatggattattgtgttttaggtgacatagttaactgtaaagtaacctgactcagtatagttactggtaccacagtgaggtgaataaaacgggattttcagaagttagcctgaatttaactgtatttttaaatttaacctccattaactaagcatcttttctttgtggtagggtctaccttctgcttccctggaaaggatgaatttacatcatttgacaagcctattttcaagttatttgttgtttgtttgcttgtttttgtttttgcagctaaaataaaaatttcaaatacaattttagttcttacaagataatgtcttaattttgtaccaattcaggtagaagtagaggcctaccttgaattaagggttatactcagtttttaacacattgttgaagaaaaggtaccagctttggaacgagatgctatactaataagcaagtgtaaaaaaaaaaaaaaaagaggaagaaaatcttaagtgattgatgctgttttcttttaaaaaaaaaaaaataaaattcattttctttgggttagagctagagagaaggccccaagcttctatggtttcttctaattcttattgcttaaagtatgagtatgtcacttacccgtgcttctgtttactgtgtaattaaaatgggtagtactgtttacctaactacctcatggatgtgttaaggcatattgagttaaatctcatataatgtttctcaatcttgttaaaagctcaaaattttgggcctatttgtaatgccagtgtgacactaagcattttgttcacaccacgctttgataactaaactggaaaacaaaggtgttaagtacctctgttctggatctgggcagtcagcactctttttagatctttgtgtggctcctatttttatagaagtagagggatgcactatttcacaaggtccaagatttgttttcagatatttttgatgactgtattgtaaatactacagggatagcactatagtattgtagtcatgagacttaaagtggaaataagactatttttgacaaaagatgccattaaatttcagactgtagagccacatttacaatacctcaggctaattactgttaattttggggttgaacttttttttgacagtgagggtggattattggattgtcattagaggaaggtctagatttcctgctcttaataaaattacattgaattgatttttagaggtaatgaaaacttcctttctgagaagttagtgttaaggtcttggaatgtgaacacattgtttgtagtgctatccattcctctcctgagattttaacttactactggaaatccttaaccaattataatagctttttttctttattttcaaaatgatttcctttgctttgattagacactatgtgctttttttttttaaccatagttcatcgaaatgcagctttttctgaacttcaaagatagaatcccatttttaatgaactgaagtagcaaaatcatctttttcattctttaggaaatagctattgccaaagtgaaggtgtagataatacctagtcttgttacataaaggggatgtggtttgcagaagaattttctttataaaattgaagttttaagggacgtcagtgtttatgccatttttccagttccaaaatgattccattccattctagaaatttgaagtatgtaacctgaaatccttaataaaatttggatttaattttataaaatgtaaaaaaa

SEQ ID NO: 50110 - DNA, 559 bp, Homo sapiens
aagatgtcaagaactcaaggtctacagattccattcgtctcttagctctactttctcttggagaagttgggcatcatattgacttaagtggacagttggaactaaaatctgtaatactagaagctttctcatctcctagtgaagaagtcaaatcagctgcatcctatgcattaggcagcattagtgtgggcaaccttcctgaatatctgccgtttgtcctgcaagaaataactagtcaacccaaaaggcagtatcttttacttcattccttgaaggaaattattagctctgcatcagtggtgggccttaaaccatatgttgaaaacatctgggccttattactaaagcactgtgagtgtgcagaggaaggaaccagaaatgttgttgctgaatgtctaggaaaactcactctaattgatccagaaactctccttccacggcttaaggggtacttgatatcaggctcatcatatgcccgaagctcagtggttacggctgtgaaatttacaatttctgaccatccacaacctattgatccactggtaaagaactgcatagg

SEQ ID NO: 50111 - DNA, 242 bp, Homo sapiens
aaaagataaaggaaatacattcaggacataggccatgacaaagatttcattttaaagactccaaaagcaattgtgacaaaaacaaaaattgacaaacaggacctaattctacacagcaaaagacactatcaacagagtaaacagacaacatacagaattggagaaaatatttgcaaactagacatccaacaaagatctgacatccagaatcaataaggaatgtaaacaaattaacaagcaaa

SEQ ID NO: 50112 - DNA, 1562 bp, Homo sapiens
caggagcagcagatgcagaagctgctgctggaatacaaggcccgactggaggacagcgaggagcgtctccgaagacaagcaaggaagaaaaagatagccagatgaaaagcatcatcagcaggctaatggctgtgggaagaggaactgaagaaggatcattgcttgagattgcaagcagttattgatgcaaagcagaaaataattgatgcacaggaaaaacggatcgtgtccctggattcagccaacaccagactgatgagcgcgctgacccaagtgaaggagcggtacagcatgcaggtccgcaatggcatctcccccaccaaccccaccaagctttccattcacggagaatggtgaattcaaaaacagcagctgctgacgggctttgtctgtggaaggagacagaaggaaattgacccactctcctatctccagacctttacctagcccctccccggtttacagaatgttgcctacttcacaatggcgatgtggtgagaaactcctgaatgaagaaaggaaccttgtctttcagggcataaggcggcgacttccaaggtcaatgcttttcccccacatctctatgtacatagggaacttagttctgggccatgtacagaaaatatcactgtaatataccaaaaggaagttaataatgtagattacctttttgattattgctatttttattattgttttcctcttgttgaaagcactgcagttgttacaggaagtaaagtaggaactgttgtgtgagcgagacatgagcctgtaggttcagtaggtagagaccaagcatctatctgatagaagcacatggagtgcaataggacattgtgagaaggaatttttcagggattcatctactagtttaaaaaccccactctggccctcttgtcctttcagaaaacatgcaaataccaagatccatacaaaacaataatttattccactgatcaaccaagactggttctggttggacagctaatctgatttggggattcactgtttcagaggacacagacaaaagctgttgcatcaaaactggactttaggagtaatttctattgaactcctgtcaatatgtttatttcctctgtctacagcagatgggagtcttctcttttagacaggggctttttgtttttaaccccaattgtaataaagggtgttctttttcctctttagagtttacaaaactataaatatttgtgtctccacataccatcttcatcttcacacattcactgtgctttcctccccatagtgggagctgtcatcaccaacagggtttactctcccctggagaggttatttaaatagctgtccataagccatccagatcaacaccctttcttccatacagaaaagggctaaccataccacagctggaatctctgaatatttcctattaaaaattttttctatgtgttgttataatttttgtttgggataaagactctatccattgtactagcaaatctatggggggtaattttatctccatctttaacttttaaagtacttcttccccttatcccctcaataaagaaaggaaatcc

SEQ ID NO: 50113 - DNA, 809 bp, Homo sapiens
  misc_feature (1)...(809): n = a,t,c or g
tttacagattgactgtgttcctgtctttaataaatttgccaagagtggttataagaacttacacctgatgaggcaccaggctcctgatgctgtgtaatgtcacaaaatacccctcactctcgatctgtgcaagagaacagctggttgcgctccaatcatgttacataacctacggcaaggtatcgacaggatcatactcctgtaaaatagaactttgttgatcacatcctgtgtacttgtttcatggacatgaggagcaattacaacaggtcgtacaattatggcaaaataatggccttattttgtttttagcttcagcgagaacccagacctttcccaaagctcaggattcttcgaaaagttgagaaaattgatgacttcaaagctgaagactttcagattgaagggtacaatccgcatccaactattaaaatggaaatggctgtttagggtgctttcaaaggagctcgaaggatattgtcagtctttaggggttgggctggatgccgaggtaaaagttctttttgctttagctgattcctgagggtggtatgacttctagctgaactcatcttgatcggtaggattttttaaatccatttttgtaaaactatttccaagaaattttaagccctttcacttcagaaagaaaaaagttgttggggctgagcacttaattttcttgagcaggaaggagtttcttccaaacttcaccatctggatactggtgtttctttacagattcctccttcatttctgttgagtagccggnatccttgggaggcatgtaggaagcccgctnggatcac

SEQ ID NO: 50114 - DNA, 297 bp, Homo sapiens
gacagttgtaaggcagcacatagtgaaaaagagtcctagcctgggaaagtccaaaaccttaggtctggtttcagttcactcacctatctctgtgacatagcaaagtctgttaatttctctaatgttctgatcagtattataagggcacgattgagataaaaactggccctgattactcatagattcatttactgattactctttttgtgacctgaataccgagtacaacatctctcaaaaggtggcaatatgatgtttcaggaaattagagaagttaagagactttgctgtatttac

SEQ ID NO: 50115 - DNA, 500 bp, Homo sapiens
  misc_feature (1)...(500): n = a,t,c or g
atgatatcaagtttagtaagatgatgacagttgtcatgtaatactccatctggaagattgtatgcttctcagcttccctaacttttcttaatctaccttaagcttcctttctgaaaggtttctgtctttcctaacagtctcttctttccgccagctacctcttgtgtttaagaattaaaggaagatgagctaggaatcaagaaatacgcagaactgattcctgtcactggcgccaccctgccacttgcccagagctgtggtataaatttttttaataggctgaaataaaaatatgaatagcattttggtgttaagcattaaattgataaaggctatgagatacacctgctcttcaaccatgttaattttttattattgggtattaataaaattattacttactaacatatttaacaagaattgcattgaggaaacaaggctccacagggccaatcttctggattttcaantgtttatattatgcgtgtattctaggaagg

SEQ ID NO: 50116 - DNA, 448 bp, Homo sapiens
ttttttttttcagactgacacagaacaagctgttttattcctcagatatacatgtctctacaatgaaactgcacacaaggtcctacttattgcttgccccagagagtactgttaaatgtacagagactgggaatatatctaaatgtggagacactggtgcctgtcattgcttttggggaagaggcacagattaccccattgggcaccaataagactggagcacttcagaattagacagctgggatggaactatagagcctaccaaactgagaatcaaccttgtgtaccataaatgtgcttttcttcagaaggccaatcccacagggactaggacacagaccccatcagcaatggtagtggctgcattactaataaaaatacacatgattcagggatacatggtatcaggtgcaactgaccacaaccatctcatggtaaatacctaagc

SEQ ID NO: 50117 - DNA, 83 bp, Homo sapiens
gaagaaagcctgttgctattctgatgcaccgcctcccccggcccccccctcctccccacacacacacacttaaatttttaatc

SEQ ID NO: 50118 - DNA, 2484 bp, Homo sapiens
  misc_feature (1)...(2484): n = a,t,c or g
tgaagaacaagtggagctctccacaattgaggaactgatcaaggatgccatagtcagcacccagccagccatgatggtcaacctcagggcttgctctgccccaggaggcctggtacccagtgagaagccacccatgatgccccaggctcagccagccatccccagacctaaccggttattcctacggcagcttcgggcatctcacttgggaaatgagctggaaggcaccgaggaactgtgctgtgtagctgaactcgacaaccccatgcagcagaagtggaccaagcccgcgatgggaatcccgaggtggagtggacagaagacctggcactggatctgggcccccagagccgggagctgaccctcaaagtgctgaggagcagcagctgtggagacaccgaactcctaggccaggccacactgcctgtgggctccccctccagaccactgtctcgaagacagttgtgcccactcaccccagggccagggaaagccctgggaccagcagccaccatggcagtggagcttcactatgaggagggctctccccggaacctgggtactcccacctcctccactccacgccccagcatcacacctaccaagaagattgagcttgaccggaccatcatgcccgatggcaccattgtcaccacagtcaccactgtccagtcccggccccgtatagacggcaaattagactccccctcccgctccccgtccaaggtggaggtgaccgagaagacgacaactgtgctgagtgagagcagtggccccagcaatacctcccatagcagcagccgggacagccacctttccaacggcttggaccctgtagcagagacagcgatttcgccagctgacagagcccagtgcgggntggccaagaagacacccaccaagcgcagcactctcatcatctctggtgtttccaaggtgcccattgctcaggacgagttggcgctatccctgggctatgcggcatccctggaagcctcagtgcaggatgatgcagggaccagcggaggccctcttcacctccctcagacccaccagccatgtctccaggaccgctagatgccctctctagtcccacaagtgtccaggaagcagacgagacaacccgttcggatatttctgagaggccatctgtggatgatattgagtcggaaacggggtccactggtgccctggagacccgcagcctcaaggatcacaaagtgagtttcctgcgcagcggcactaagctcatcttccgccggaggcctaggcagaaggaagctggcctgagccaatcacacgatgacctctccaacgcaacggccacgcccagtgtccgaaagaaggccggcagcttttctcgccgccttatcaagcgcttttccttcaaatccaaacccaaggccaatggtaaccccagcccccagctctgaggacccagctctgaaagggcacgagttctctcagcccattccccacctccccttccataccccttcctggatctccagtgcctgggccaggaaagccctctgggttccgggaagccccgtccaccctgggccatggggccggttggaaggatacttggaacgggaagcacatgagaggtgggcacccggtgccgaggacatggacgagggactggtggctgggagggagaggagggccctgtccggcatgtgtgggtattccccagaagcatttgcctcctgctgagcctggtccctgagcggagtcccagggtgctcagctcttcagctgacccttcttcccttatttattctcttttctatttatatgtgtggcttaggaccctccgtgaaacagatgatagagggcatctctcccaggtgacccttcttttctgtcccaggagggtgggtaaattccctttgggatggggctcccacacctccctcaggtccccactcagaccagcaccagtgtctgcctctgagaatgttggcagctcacagagagcagggccggcccgggatggggggcaggtactccccaccttcctgcctcccctcctgctcctcatccctccctccccctttattaccgttttttgtacttgatgccttctctgtgagcagtggctctgtgggaaggagggagccgggagcctggtgggaagccttccccagagagatggctttaggggctttatttaaagactgtgatgatggagccacgcaaggctgcacctctgtgtgttgggagacgatgatgatgtccattgctgtgtgatggcttggaatttaatttattaaagtcaaattggagtttataaactggacaactggttatcctttgaaaggcagtaggcagccaggctgtgacatggatggtgtgggaggatgagacaggggcccggataatgaggttgggtagatgacacacattgtggatctgctaagaagttcctgcaggaaagaaggggtgtgcagagaaaggatggaagagacaggaggctct

SEQ ID NO: 50119 - DNA, 381 bp, Homo sapiens
gaaagaggaatcaaagcaagtgccccactgtcgccctcattactttcctgttgctacagatagatgatagctgcactcacacagcaaagcagatggctgagcaaactgaagcccagacttcagagtaagtagtcatcttcaaggttatcatcaccagacatggaagcagcttctgataagctgaggcaggacagggtatgtgttatctctccagagctctttttggtctcagtgagcaacgtgctgagagaggcatctgtttctgtggccatgtccttcaacatgtctgggacagctctgttttcttctatgtcttcaggaagctcaattgcgtatcctttgtgtactaattctagcccaatatcaagtttcttcccattg

SEQ ID NO: 50120 - DNA, 788 bp, Homo sapiens
agctcatgatctcaggatgtatggaaaaataatctttgtattactattgtcaggaaactttgagcattcagctgaggggccaagttggctgcctctgagaagaagcccttccacctccactccactgcacttgggtgccattcccctcatttgaatgtctccaagagatgagcaaagaaattgtgagcatatcagcattaagtaccactgaggtggcaatgcacacttcaacctcttcttcagtcacaaagagttacatctcatcacagacaaatggagaaacgggacaacttgtccatcgttttcactgtaccagctcctgtagtgataatacttcattatttttgtgtgtgatggctggtattattggaacgatcctcttaatttcttacagtattcgccgactgataaaggcatgaggatgtggcctgcatgctgcctgtattgcctgcatgctgcctgatcttgcctagaaccggctgcacctgctgttctcttgtttatgcaaactggctgcacctgctattcctttgcttatgcccctacccctggctatcctaattccctgttctcctgcctcactattactgtattctctacttctaaataaaaataaaacaaaatacaaaccgttttcatgtattatagtcatgatttgttatttcaagctatgtttaaaatgtaaagcccattacagtaggatagatgagaagaaagaagggtctgaacaaagccaacagcgagaacatgcagaaggggaatgaagacttcagcctggactctcatta

SEQ ID NO: 50121 - DNA, 1337 bp, Homo sapiens
agtttctaaatttgtgggctcatgaaaacatccggcctactctctttctgctggccaaattggcaagtgttctcattagaggcatgggtggccagcaggaaaaaagtgtcactggcctgaggaattctaggagctggacagggctctgtgataacacctttccatccaaacttgtctttgcccacgtctggtctcttaggcattgggcctgggacttgtattaatttgcaaggctgttctagaactgtcaagaagaacccacagatggatggttttgatacaggggagaggggaatgtgtaatacacagataggagagggacataatactgcatggcatgggattggcacttcaaaaaacaacagtgatcaacagcttgagtttgaggacctgctgtgaagatttctcctccaaaatacatctcatgggcaggattcttcctgctccatatctgtttcaattttaagaaagcaccacatacaagacacattcagaagtcattcctgagcattgctggtgtttgcacacttgccacctgcattaccaattctgtaaatttcaattcctggtggaaagtgaccactttgaccatggatttcccaaagaagagttcctttgcagaccataggtggaaaagtcaatgagcatctccttccttgccaaagcatgtcccaacatgtaacaaactctagggatacaaaaggtttatattcagcatctgatgtcagatgtacagttcctcccctcccatatataaaccccggtgtagaatctgcagcgccctgctcttcggaaaccaaggaacaagccacctgctcacacaccttgttcaacttttcagctcctaaggaaccccacccccatgcaatttgactgtgcttgagaggtgaatacagttaccttcgagaaacagagggagctcctcaccccgtccttccagtccttttggctaaaatgcttaactatcactcacaaacaaatgtggagataccaggagctcatttgattcataccccaactttgtgttctgaaaaacatcagagggattttacattgcccagtttctccaccaacaagccttagggtggacccaaccctttccgcaagtggtaggaacgaatgcatcttagcaattacctgatttccaaagtccttttgtagcaaatgtcacctcattcgtggtctttttacctatcctaagcttatgatgatgagttatgaatgccaaatatttatctggaaggagtttctcctcattgtgaatgtgtatgtaaaatatggaaggacaaggaaaggggtgctttcatctgagggatccaggggtgaggggtatccca

SEQ ID NO: 50122 - DNA, 410 bp, Homo sapiens
gaaggccgctgtcgactacttcttcgtggagctgcacctggaggcgcactatgaggcactgcggcacttcctgctgatggaggacggcgagttcgcccagtccctcagcgacctgctctttgagaagcttggagctgggcaaacgcccggagagctgctcaacccgctggtgctgaactctgtgctgagcaaggccctgcagtgcagcctgcatggggacaccccgcacgcctccaacctctccctcgctctcaagtacctgcccgaggtgtttgcccccaacgccccggatgtgctgagctggcctgggagcttcaggtacaaggtgggactggcctcttcaacattgtcatcaccgagggctgcctgaagcaagttacagcggcgtcttctccttcctgctgcagctg

SEQ ID NO: 50123 - DNA, 375 bp, Homo sapiens
  misc_feature (1)...(375): n = a,t,c or g
gtggtgagactccatctctgccgnnnnnnnnnnnnnnnnnnnnnnnnnnnnnnnnnnnnnnnnnnnnnnnnnnnnnnnnnnnnnnnnnnnnnnnnnnnnnnnnnnnnnnnnnnnnnnnnnnnnnnnnnnnnnnnnnnnnnnnnnnnnnnnnnnnnnnnnnnnnnnnnnnnnnnnnnnnnnnnnnnnnnnnnnnnnnnnnnnnnnnngtttatgtacttttattggtacatatgagatgtacatatttttgggttacacatggtaatttgagacattcatataatcaagtcagggtaattgggatatttatcactttatttttttctttatgctaggaatgtgtaaattactctcttttagctgttttgaaatgtg

SEQ ID NO: 50124 - DNA, 397 bp, Homo sapiens
cattcctgcatttgatgaatccagggaaccctctctccaacacccttggcctctctgcaactttctaacatcaggcagagtcagaggcaccatccccaggtgggtgtgttctgaggggccactggattttgacgtatggattctgccacggaacaatcaaattgcctgtacttggcaaagttttgggagagcagaatgcatcactttctgttggaatctgaggtcacagaaacagaggtgcttactaaataaataaataaagggcttaatgaaaaaaattaaactccaagatcagtgtaccttgctgtgtggggagaagagcctatttcttgcatcctgagaatgagtgtgtcagggccccttggcaggttatttggcgcaagtgtgttgaactcac

SEQ ID NO: 50125 - DNA, 1484 bp, Homo sapiens
ggaggagacaaagcaagcctcatcaggcccattgcttgctctgctctcccttgtacttaccagtgcttgacaatatacagttatttactagcttggttattgacttcctacccagcactcagttttattcactgctgtatcctcagtgcctaggacgatgcttggaacgtggtaagtgctcctattggcgggaagaataaatccggaagagcaggaccagtggacttgctacataatctgtagtcttgggagccgcacagggttggtgggtaccctcgaggcacaccagacttgcaggaaaaaggcatactccagagggaaggcttgagggcattgcctggcttcgaggagccagctgttccatgtgcaattttcctctgatagtttctggtcgctgttgccacggtgataatgactgggctatgtcattatctatccgccaacagtaagagaagctttgcagtcgagatattgtttagcagatggagtgttttctgttgaacactaagtactgccacaagttacttttttttttttaaactttggagtatttttttacaatgttgctggaggtgatctgtttatgctttgagagtgttcgaatttaaaatcagaaaatcatgtcagtgagtgagtctttcaaataatacttcggcatgaaacctgagcctagtaaactatgaaagtaaactcggcacattacccgaaagtctcaatgtcatattttcacccccatcaatattattgatgattgctcattttctaatgtgggacctgaaatttaccaggtgcttaaagaacctttttgtttttcagattcattgattccaggtaaatcagaggaacaagcaacatgaacagaaatatgtagaaaaagctattatgcagaagcataattgttgtttcagaagtccagcatctggtgcacttaacaatagagaatatattaaactctttccaaaataacctgttgttcctacctgtgttgtaagtgttttgtttgtttttaagtaaatattggtgatttgttgccaaaaacctaaactgtttgttgctgtcaacttaaataacgaacagagagaggttctctagaagaaaatggcatttattcaggaatagagcactgcaatgagaaaatgcatgcgatagttaactgtgtgtattcagggaggtaaaggaagacaaaggtctttaaaggaaaagcgagcaggatcacagtggttttgagataattctccttggctacaaacatcaataacaaaggtcattccagtctgaggttggacaggcaattgctgggcagttgtccttgcagaaatattttttgtgtaagggtgtgatggcctttgtgcaaggttgtggttttggcagtcttttgtgctaattctttatatcaggcaattattagtgagaactttcccatcacggctttccctgactccattctctgacagctttcacaatctagagacagaatcccggag

SEQ ID NO: 50126 - DNA, 1171 bp, Homo sapiens
caaggttggggctttggcatctctcgttcgatccgtggcctccttctccatctacagtcctcacacaggtattcaggaataccaggatggcgtgcccaagattccaacagcctgtattacggtggaagatgcagaaatgatgtcaagaatggcttctcatgggatcaaaattgtcattcagctaaagatgggggcaaagacctacccagatactgattccttcaacactgtagcagagatcactgggagcaaatatccagaacaggttgtactggtcagtggacatctggacagctgggatgttgggcagggtgccatggatgatggcggtggagcctttatatcatgggaagcactctcacttattaaagatcttgggctgcgtccaaagaggactctgaggctggtgctctggactgcagaagaacaaggtggagttggtgccttccagtattatcagttacacaaggtaaatatttccaactacagtctggtgatggagtctgacgcaggaaccttcttacccactgggctgcaattcactggcagtgaaaaggccagggccatcatggaggaggttatgagcctgctgcagcccctcaatatcactcaggtcctgagccatggagaagggacagacatcaacttttggatccaagctggaagtgcctggagccagtctacttgatgacttatacaagtatttcttcttccatcactcccacggagacaccatgactgtcatggatccaaagcagatgaatgttgctgctgctgtttgggctgttgtttcttatgttgttgcagacatggaagaaatgctgcctaggtcctagaaacagtaagaaagaaacgttttcatgcttctggccaggaatcctgggtctgcaactttggaaaactcctcttcacataacaatttcatcccaattcatcttcaaagcacaactctatttcatgctttctgttattatctttcttgatactttccaaattctctgattctagaaaaaggaatcattctcccctccctcccaccacatagaatcaacatatggtagggattacagtgggggcatttctttatatcacctcttaaaaacattgtttccactttaaaagtaaacacttaataaatttttggaagatctctgaaaaaaaaaaaaaaaaa

SEQ ID NO: 50127 - DNA, 523 bp, Homo sapiens
gcaattattcgtagtatttatcttcagaaatcaggattgagttggttggtctgcattcatataatgctttgaatgtagataaatggtcaataaatacatgaatgaattgatattgtgaaatagaattctcagtcataactgaagtatttagaaataaaaggaatgtaatttcttgcttattggtaataactttgtaagtggagtaaaaagaatgaaaaaattgaaattttaattctcttcaaatggggaagggaaaatagaaatgtattttatattctaaatcttaagagtcattaggttgatgtttgcaattttttatagttaatgcaaggcatgttaaaatataatttgtcttggttttaacattctgagccactgtgtagcagaatttatctgtattacttgacattgcccaattcttcctatattctgtgggataatgttttagctttacttgttcaattggaatatagtttgtacttttttagtttagttattttacccaggaggcagctgttagtta

SEQ ID NO: 50128 - DNA, 3598 bp, Homo sapiens
actaagaaaactgatccaacaaacatttagacaatttgccaaccttaatagagaagaaagtattctgaaattctttgagatcctgtctccagtctacagatttgataaggaatgcttcaagtgtgctcttggttcaagctggattatttcagtggaactggcaatcggcccagaagaaggaatcagttacctaacggacaagggctgcaatcccacacatcttgctgacttcactcaagtgcaaaccattcagtattcaaacagtgaagacaaggacagaaaaggaatgctacaactaaaaatagcaggtgcacccgagcctctgacagtgacggcaccatccctaaccattgcggagaatatggctgacctaatagatgggtactgccgggctggtgaatggaacctcgcagtcatttatcatcagacctcagaaagaaggtgaacgggctttgccatcaataccaaagttggccaacagcgaaaagcaaggcatgcggacacacgccgtctctgtgtcagaaacagatgattatgctgagattatagatgaagaagatacttacaccatgccctcaaccagggattatgagattcaaagagaaagaatagaacttggacgatgtattggagaaggccaatttggagatgtacatcaaggcatttatatgagtccagagaatccagctttggcggttgcaattaaaacatgtaaaaactgtacttcggacagcgtgagagagaaatttcttcaagaagccttaacaatgcgtcagtttgaccatcctcatattgtgaagctgattggagtcatcacagagaatcctgtctggataatcatggagctgtgcacacttggagagctgaggtcatttttgcaagtaaggaaatacagtttggatctagcatctttgatcctgtatgcctatcagcttagtacagctcttgcatatctagagagcaaaagatttgtacacagggacattgctgctcggaatgttctggtgtcctcaaatgattgtgtaaaattaggagactttggattatcccgatatatggaagatagtacttactacaaagcttccaaaggaaaattgcctattaaatggatggctccagagtcaatcaattttcgacgttttacctcagctagtgacgtatggatgtttggtgtgtgtatgtgggagatactgatgcatggtgtgaagccttttcaaggagtgaagaacaatgatgtaatcggtcgaattgaaaatggggaaagattaccaatgcctccaaattgtcctcctaccctctacagccttatgacgaaatgctgggcctatgaccccagcaggcggcccaggtttactgaacttaaagctcagctcagcacaatcctggaggaagagaaggctcagcaagaagagcgcatgaggatggagtccagaagacaggccacagtgtcctgggactccggagggtctgatgaagcaccgcccaagcccagcagaccgggttatcccagtccgaggtccagcgaaggattttatcccagcccacagcacatggtacaaaccaatcattaccaggtttctggctaccctggttcacatggaatcacagccatggctggcagcatctatccaggtcaggcatctcttttggaccaaacagattcatggaatcatagacctcaggagatagcaatgtggcagcccaatgtggaggactctacagtattggacctgcgagggattgggcaagtgttgccaacccatctgatggaagagcgtctaatccgacagcaacaggaaatggaagaagatcagcgctggctggaaaaagaggaaagatttctgaaacctgatgtgagactctctcgaggcagtattgacagggaggatggaagtcttcagggtccgattggaaaccaacatatatatcagcctgtgggtaaaccagatcctgcagctccaccaaagaaaccgcctcgcccctggagctcccggtcatctgggaagccttgccagcctcagcagccctgctgacagctacaacgagggtgtcaagccatggaggcttcagccccaggaaatcagcccccctcctactgccaacctggaccggtcgaatgataaggtgtacgagaatgtgacgggcctggtgaaagctgtcatcgagatgtccagtaaaatccagccagccccaccagaggagtatgtccctatggtgaaggaagtcggcttggccctgaggacattattggccactgtggatgagaccattcccctcctaccagccagcacccaccgagagattgagatggcacagaagctattgaactctgacctgggtgagctcatcaacaagatgaaactggcccagcagtatgtcatgaccagcctccagcaagagtacaaaaagcaaatgctgactgctgctcacgccctggctgtggatgccaaaaacttactcgatgtcattgaccaagcaagactgaaaatgcttgggcagacgagaccacactgagcctcccctaggagcacgtcttgctaccctcttttgaagatgttctctagccttccaccagcagcgaggaattaaccctgtgtcctcagtcgccagcacttacagctccaacttttttgaatgaccatctggttgaaaaatctttctcatataagtttaaccacactttgatttgggttcattttttgttttgtttttttcaatcatgatattcagaaaaatccaggatccaaaatgtggcgtttttctaagaatgaaaattatatgtaagcttttaagcatcatgaagaacaatttatgttcacattaagatacgttctaaagggggatggccaaggggtgacatcttaattcctaaactaccttagctgcatagtggaagaggagagcatgaagcaaagaattccaggaaacccaagaggctgagaattcttttgtctaccatagaattattatccagactggaatttttgtttgttagaacacccttcagttgcaatatgctaatcccactttacaaagaatataaaagctatattttgaagacttgagttatttcagaaaaaactacagccctttttgtcttacctgccttttactttcgtgtggatatgtgaagcattgggtcgggaactagctgtagaacacaactaaaaactcatgtcttttttcacagaataatgtgccagttttttgtagcaatgttatttctcttggaagcagaaatgctttgtaccagagcacctcccaaactgcattgaggagaagttccagaaccatcccctttttccatttttatataatttataaagaaagattaaagccatgttgactattttacagccactggagttaactaacccttccttgtatctgtcttcccaggagagaatgaagcaaaacaggaatttggttttcttttgatgtccagttacaccatccattctgttaattttgaaaaaatataccctccctttagtttgttgggggatataaattattctcaggaagaatataatgaactgtacagttactttgacctattaaaaaggtgttaccagtaaaaaaaaaaaaaaaaaaagat

SEQ ID NO: 50129 - DNA, 452 bp, Homo sapiens
gcaacagtgagaccagcaagaatgacttctccctctccctcaagagcagccagggattcatgcacatgaagctgtcccgaaccaaggaacacaaatatgtgctgggccagaacagcccgcccttcagcagcgtccctgaaattgtgcaccactatgccagccgcaagctacccattaagggagccgaacacatgtccctgctctaccctgtggccatccggactctttagatgtgaagccagggcactgtgatagacctgtacccagccctgtgcccatcacctggctgagggctgtggctcttgccagggacgtgatctttcaaacctttcttctcctgggatccagtagaagctggagattccttaatttattctaaagggaaagggctcctggggccttggagtaaggggttgtctggagctggggaaagaagaatccctggagagaaa

SEQ ID NO: 50130 - DNA, 94 bp, Homo sapiens
  misc_feature (1)...(94): n = a,t,c or g
caagatctgggtcatttgatagcagagacaggcttcaagaacgagatcgatatggancacgacagagagcgcgagagagagaggagagatacga

SEQ ID NO: 50131 - DNA, 2109 bp, Homo sapiens
ggaccctggagcggtgtctgacggaagtcggcaaagccacgggtcggcccgagtgcttcctcacgattcaagagggattggcatcaaagttcacttctttaacaaaagtgctttatgactttaataaaatattagagaatggtaggatccatggaagccccttgcaaaaacttgtgatagaaaattttgatgatgagcagatttggcaacaactggaattgcaaaatgaaccaattttacaatactttcagaatgcagttagtgaaacaattaatgatgaagatatcagtcttctcccagagagtgaagaacaggaacgtgaagaggatggttcagagatagaggctgatgacaaggaggacctagaagatttagaggaggaggaagtgtccgacatgggtaatgatgatcctgaaatgggtgagagagctgaaaactcaagcaaatctgatctgaggaaaagccccgttttcagtgatgaggattctgaccttgactttgatatcagcaaattggaacagcagagcaaggtgcaaaacaaaggacagggaaaaccaagagaaaagtccatagtagatgataaattcttcaaactctctgaaatggaggcctatttagaaaacagagaaaaagaagaggaacgaaaagatgataatgatgatgaggaggaggaagatattgatttttttgaagatattgattctgatgaagatgaagggggactgtttggaagtaaaaaacttaagtcaggtaaaagttccagaaatctgaaatacaaagatttttttgatccagttgaaagtgatgaagacataacaaatgttcatgatgatgagctggattcaaacaaagaagatgatgaaattgctgaagaagaagcagaagaactaagtatttcggaaacggatgaagatgatgaccttcaagaaaatgaagacaataaacaacataaagaaagcttgaaaagagtgacctttgctttaccagatgatgcggaaactgaagatacaggtgttttaaatgtaaagaaaaattctgatgaagttaaatcctcctttgaaaaaagacaggaaaagatgaatgaaaaaattgcatctttagaaaaagagttgttagaaaaaaagccgtggcagcttcagggggaagtgacagcacagaagaggccagagaacagcctcctggaggagaccctacactttgaccatgctgtccggatggcacctgtgattacagaggaaaccacccttcaactggaagatatcattaaacagaggataagagatcaggcttgggatgatgtagtacgtaaagaaaaacctaaagaggatgcatatgaatataaaaagcgtttaaccttagaccatgagaagagtaaattgagccttgctgaaatttatgaacaggagtacatcaaactcaaccagcaaaaaacagcagaagaagaaaatccagaacatgtagaaattcagaagatgatggattccctcttcttaaaattggatgccctctcaaacttccactttatccctaaaccgcctgtaccagagattaaagttgtgtcaaatctgccagccataaccatggaggaagtagccccagtgagtgttagtgatgcagctctcctggccccagaggagatcaaggagaaaaataaagctggagatataaaaacagctgctgaaaaaacagctacagacaagaaacgagagcgaaggaaaaagaaatatcaaaagcgtatgaaaataaaagagaaggagaagcggagaaaactgcttgaaaagagcagtgtagatcaagcagggaaatacagcaaaacagtagcttcggagaagttaaaacagctgaccaaaactggcaaagcttccttcataaaggatgaaggtaaagacaaggccttaaagtcctctcaagcattcttttctaaattacaagatcaagtaaaaatgcaaatcaatgatgcaaagaaaacagaaaagaaaaagaagaaaagacaggatatttctgttcataaattaaagctgtaatatattttgaatataatgtaaatattaatgtgtaagcttatattgtgtcattgttctgttttataataaaattcttgagaacctt

SEQ ID NO: 50132 - DNA, 2192 bp, Homo sapiens
cagccccaagcccctcgccctgcccggggcgcatgtggtggttacaggaggttccagtggcatcgggaagtgcattgctatcgagtgctataaacaaggagcttttataactctggttgcacgaaatgaggataagctgctgcaggcaaagaaagaaattgaaatgcactctattaatgacaaacaggtggtgctttgcatatcagttgatgtatctcaagactataaccaagtagagaatgtcataaaacaagcacaggagaaactgggtccagtggacatgctggtaaattgtgcaggaatggcagtgtcaggaaaatttgaagatcttgaagttagtacctttgaaaggttaatgagcatcaattacctgggcagcgtgtaccccagccgggccgtgatcaccaccatgaaggagcgccgggtgggcaggatcgtgtttgtgtcctcccaggcaggacagttgggattattcggtttcacagcctactctgcatccaagtttgccataaggggattggcagaagctttgcagatggaggtgaagccatataatgtctacatcacagttgcttacccaccagacacagacacacctgggctttgccgaaggaaaacagaacaaagcctttggagactcgacttatttcagagaccacatctgtgtggcaaaccagaacaggtggccaaacaaattgttaaagatgccatacaaggaaatttcaacagttcccttggctcagatgggtacatgctctcggccctgacctgtgggatggctccagtaacttctattactgaggggctccagcaggtggtcaccatgggccttttccgcactattgctttgttttaccttggaagttttgacagcatagttcgtcgctgcatgatgcagagagaaaaatctgaaaatgcagacaaaactgcctaatcttcttaccccttggaagaagactgtttccaaataatttgaacagcttgctgctaaatgggacccaatttttggcctatagacacttatgtattgttttcgaatacgtcagattggaccagtgctcttcaggaatgtggctgcaagcaaggggctagaagttcacctcctgacagtattattaatactatgcaaatatggaataggagaccatttgattttctaggctttgtggtagagaggtgaaggtatgagaattaatagcgtgtgaacaaagtaaagaacaggattccagaatgatcattaaatttgtttctatttattcttttttgcccccctagagattaagtccagaaatgtactttctggcacataaagaaatcttgaggactttgtttaaaccttccataaaaaaacaattttcggtttctcgggttctccctctctgtctctctgtctctctgtctctctgtctctctgtctctctctctctctctctttctttctttgtgtattttattcaagatgagttggacccattgccagtgagtctgaatgtcactgacagccctgtgttgtgctcaggactcactctgccgctggtggaaactcatggcttctctctctctttgatcccataaagctacgagggggacgggagagggcagtgcaatgggaagtaaagagatattttccagtaggaaaagcaatgctttcttgtctttagactcaaatgcttagggaacgtttcatttctcattcatggggaaaggcagcctccttaaatgttttctgaagagcggtaaaatctagaagcttaagaatttacagttccttcaataaccatgatgacctgaagttcacctatcccattttagcatctacttgtttttcccatctcttcctttccaattttgcttatactgctgtaatatttttgtaaaaaaaaaaaaaaaggaaaaaaaagaccagctaaaattttcgacttgactttttaacttaactcatgaattaattaaagcaaatgaaaaaattaaaaagtgtgactttttctcggagcatatatgtagcttttaggaaaggctgatgatggtataaagtttgctcattaagaaaaaaagacaaggctgattttgaagagagttgcttttgaaataaaatgatcacctgttctttatgtgactctcccactgaacctgcagacattatttttataccacatgctaaggaagcccactcatctaactctgtagccctg

SEQ ID NO: 50133 - DNA, 1154 bp, Homo sapiens
attcggcacagggatcacttgacctcaagtgatcacttgcttggggagaaaaccacttgtgtgtcggctgctgtgtctgatgagtctgtggctggagacagtggggtctatgaagctttcgtgaaacaacctagtgaaatggaagatgtcacatacagtgaagaggatgtagccattgtagagaccgcccaggttcagataggactcagatacaatgcaaaaagttcaagtttcatgggtgattatagcacagctccgaaaccttgcatggccttcttgataccctcatacttcaaaagtatattttagggttgccgttcttccttcctcaactgatgtcagcttgtctgttttcgcacaaaagttcatccgccccacagaatccattttattcaatgatgtgttcagagttcgccatttcccaaacagccttacaacagaagacactgagggtggacctttgctctgtcagtaaacaccgaagggaagaatgcctggctggaactcagatcagcctggcagatttaccattttccagtgaggttttcactctatggtataacttgcttccttccaagcaaatgccttgcaaaaagaatgaagaaaatgaggactctgtatttcaaccaaaccagccgttagtagattctatagacttggatgcagtgtcagccttacttgcaagaacatcagctgagttgttagctgtggaacaagaattagcacaagaagaagaagaagaatcaggacaagaagagccaaggggcccagatggagactggctaacaatgctaagagaggcctctgatgaaattgtggctgaaaaagaggctgaagttaaattgccagaggacagtagctgtacagaagatttaagttcatgcactagtgtgcctgagatgaatgaagacgggaacaggaaagaaagcaactgtgccaaagacctcagaagtcagccacctactagaataccaacactggttgacaaagagacaaacactgatgaagccgctaatgacaatatggcagttcgccccaaagagccgcagcagcctgagctctagacagcatccgtttgtgaggagcagtgtgatagtgcgctcacagaccttttctccaggagagcggaaccagtacatctgcaggttaaatcg

SEQ ID NO: 50134 - DNA, 761 bp, Homo sapiens
gcgaggtaatacaaaaagtttcagacaagtattaaagaataaaatctgtctcaggctggtagttagcagttgtgaccaagatgcttttggttgttgtatttcacaaaatttcctcatttctaacatgagagatgaacttattttaatataatcctttttctacactttaaaagtcagcaatagtgttatgtatttataggcagcttttaataatcttgtcatatttgtactaacccaaatgattcacagtgacaaaacattttaataacttgatcacaaaaccatatggacaaatatgaattttaatattataaatactatttttaaaaggtagaatttattcgcacagggtaaaaagaatgtaatatttagttctcaagtttgaattatcagtatattattacaattttgtatatcagaatcttaagtgttacaggtacaaaaagaatattgctagccaaatgaacaaagtttagctaaatctctgtagcatgcaaatcaaataaattaaaattttttgctattgctttatctatattgtcttaaatatcaaaagctcaggactgaacttaatatttaatcaggttaaattctgaacatgtttctgttttaatttgtcttgtttgtaaacgtatgcaaatacatcacatagattaactggtttctgcactttccatgtgtttgtgggtggaaaaaaattcagtggttttttttaaaaaaaaaagcaaaaacaaagctacatattgcctaataaaaaaaaa

SEQ ID NO: 50135 - DNA, 416 bp, Homo sapiens
tcagactattttatgagaaaaaaatcaattcaaggccttagtgagaatattatattctctgtttctgaaagcaaaagacattgaaaaacccctttgctcctctggagtttgtgatttccacataaccaacaaaaccagcacacagattgacttcctacttaacagtaggtattgttttgttactttgggacagcagctgaaacactatctaaacttgaaaagggtgggtgggtggaagtccagcacagaagagggtcgaggctgaggacagcagaatggaagctttctgagcagtggagtaagaacagccaaacccctaggatcctacctcatggcaggcttgtttggggtggaagacagaacatctgcaatctgcactaatttcttaaggatggatacaagtgtcaaccaaaaat

SEQ ID NO: 50136 - DNA, 452 bp, Homo sapiens
acaactccgctgagcagctcttccatctcaacttcagaggactgtctttctcttttcagttagactcatggactgaggctccaaagtatgagcccaattttgcccatggcctggcttctctccagataccccatggagcaactgtaaaacgaatgtacatctacagtggcaacagcctgcaggataccaaggctcccatgatgcctctgagctgtttcctgggcaatgtctatgctgagagtgtagatgttcttcgagatggaactggacctgcaggtttacgacttcgcctacttgctgcaggttgtggacctggcctattagcagatgccaagatgcgggtatttgaacgttcagtgtattttggtgattcctgccaagatgttcttagcatgcttggctctccacacaaagtcttctataaatcagaagacaagatgaaaattcattct

SEQ ID NO: 50137 - DNA, 1203 bp, Homo sapiens
  misc_feature (1)...(1203): n = a,t,c or g
gattcctggacccaggagctctcaactaacaaggaggcaggagaggtcaacccttgtcccatgcacattgggaagacttggggctctttctgtgactgaggacacaggcacccaggataaggacaaggtcctgcctttggtccacattgccacatgacccttaaggcaagcaggtagcgtgtccatagtacttggttgcgacatttgcactacatccactttagttacttgatgagctggctgtggcagggtggccacctgcccttccctgttcctttcttgcacgcgctccctgcctgggcacaccaaactggttgaaacacagctttctaccatccaggtacatgcccaggcctggttctcacccctgttggagtcagctttcaagattgcctgtgcccctgctctgccccatcatggctggcagggctgcatgtttccatcctgtttgcctcttttatttaatgccaaagttttagccaaagacatcttcctacttttgttgtgtttcagcattctgttctgcactgtgggctggctctctgccccaaccctgggcactggcccatggctgggcatcttcatgntcaaagcctctgggggctcaaggaaggctgggctgctcagtcccttcatgggtcttgctaatggaaagtagcatatatgtgctttaaaaatattaatccttttgaaaagaactgagaagaaaaatgtataattttatcccatttttaatattttggtctagcaacttgtgatacatagatgacaattttgtgagtttttcaaatgtgtgtacagatttttgtaaatatgactcttttgtaattaactcatgtacagcctcatcctgtatagtttaatgatgaatgtgcaggggacctgtctcaggctcctatatggttcctgggccttatagccaggtttgtgtggcgctcccgacttttgtgactgactggtgtcttcccatttggactgtggcctggccagagccccttgcatatccccactgtcaggggcagccaggactgttcccatcctcctggaatgggggaaccttccttatcccctgcccacatcccctctccaataaagcacctgtgccctcagcaatggcctgccatgtgctgttgctgggatgtttgtattaaggtaagtgtgggtattggttttttgagcaagggggtggttgaagcatatggg

SEQ ID NO: 50138 - DNA, 1233 bp, Homo sapiens
tctgttctgtggacaactgttactgttcttccgtggccaaccatggcggccaccagccctacccccgctccggccactttccctggacagtgccctcgcaggagtactcacacccgctcccgcccacaccctccgtcccccagtcccttcccagcctggcggtcagagactggcttgacgcctcccagcagcccggccaccaggatttctacagggtgtatgggcagccgtccaccaaacactacgtgacgagctaacgccacgcagggcggcaagggcgctggggaatcttcctccccagcccccgggctcgggagttatgcatccagagacctgcccttctaccttcctcgcctcccctcttcctcattccattgccccaggtcttttccttttggattttgttttggttttggctttgtttttgatttttttttattatgaatctcctggacgcagaggtgacagtgggagctggcctgggccaggacggcaggtggccctggagatgggaaagtgtctgtgtcgaggcgctgagctctctctctgtttctccttttttcctctactccttccccttcacacccccgtggctggaaggaacctcggcttccctgaaagcttgggggtcccacccttcttaccccacccgggaggaacgcccagggccccgggcttgtttctcctcttgttttccttttgggcagtttgatcactgatcgagtaaggaatgacctttagattgtgcgacttttgtttttgtttttttaaatttttttaaaccaagaatgatttctcctgcttccttctcctcaccatcttcccagacggagttcaaaggccacttctcaagcagcttttggcaccttcagcctcagagtggaatcttttaaagacaggacccctatgtccaggaaaggggaaaaggaactttgccaatgatagtgaccacagcaaaagcaaataataataatattaataataataaagagaaataaaataataaaataaaaaacaatagcacagcccttgttgaggtcagcagggaggaggggctgcccggagttgggtccttgcctggattttgacacagcaacttcctgtagtgagcactttgtatgaatcgtggacttcctgttctcaaggcgcaggtatttattctgtatctgtctagagcacacaccaaaatccaaccttctaataaacatgatggcgcagtcccacaaaaaaaaa

SEQ ID NO: 50139 - DNA, 839 bp, Homo sapiens
tttttatttttttttttgttttttcagataatttattgttaaatgaagacatcacaaagcaaaatggagtggggcaggtgtcaaaggtaaactgaaaacgtcgtgtctgccaaacgctattctggtttcctaaggttagaaacaggaaaagtgtcaaatgaaaaggtactcgctcaaattaagtttttttaaaaggtctgtaatttgaaaggaaaacaatttttcactaaaaatatccttattacatgaaagccataatttaaaagacagagaaaaaagctttttaattaacaaataaacagcatctctcagagacacttgggaatgtttgtttttaatcagtgggtcctaaaaatcactgcttccacctggcaaacgaacacgaatccactgtggatggcgtcctctgacccaccctgaagggttctgtttctctccacacacttccttttctgcaactttcagcaaagcaggtttggaagaaagaggattacaaagaactacgactggctccctagtgaataacttaacacggtaaaacccggttttccatttacattacacattcacaatcgctcactgctacttacttcactgacgtatttcacactctctacacacccagcatgatttgtctgaacttaacacagtccccctaagacaaaaaaaaatatctcctaaggacctctgagaacacagcggtgtgcaaaggccacgtcctcgcacacaacacccagacctgccacgcagccggtactgtttcctgagctcatccgagcaagcgtctccacggggcaaagcaaggccttgaggatcccgctaacataacttacaaatta

SEQ ID NO: 50140 - DNA, 344 bp, Homo sapiens
ggcttcaataccctgtctagaccgctttccccagatagctggcatgaccatcccttacttccttaataccgttgcttaatgtcaccttctctctaaggctttctgtggccatcctattaatactgcccctttcccccatggttctcagcttcttataacatcttccatcacttacttctgcttattgctcactgtctcagccccagtggagtgtcagccccacaagggcaaggatgtttgttttgtttgtagctccatactcggtaccccaggatgcttgcctggccatataagtaggggtcttgatattaaagtgatttactccatacggttcccctagcatg

SEQ ID NO: 50141 - DNA, 5458 bp, Homo sapiens
attgcattaaaaaactttatttcttttaaaaggtccaatataagccaaattaaccccaaaatttacagctacacttagagatctcctgaactaaatggcattgtttgagatgagtgtcttgttaaaggaggtcatttgctattaccaccatttcacccaaagtagttctagagcagaagctggtattataatacacatcagatatttcagatgtcatcttttatgtataagttaaataaagcaaacaggcttttctactctgtgtgaggataagaaacactacagaacagggcctgaatgctttagacatacaaggtgtaaccataaaggaaatttctacggtgctgtgttcattcattcaagtaattaatgtacttattccaacaatactggcgtagttcaaataccatttgagacagtactttggggtttcccttcattgggtgcagaccaaaggaagtggttaagctggggggcagactctcacagatggattacaaaagtaatgaaatagttttcttagtggggtggcattcgcaagaactaccttaatgtttttggtaacagcatcatttacatataagtgatgcaggatagaagttctggtgtatgtgataaattaaaaacagcttgtcactttatagctacaccttggatttcattagatgtggtaaatctaatagtgtgtcaaatgagtccttctggaaatcacttcagcagagaagtcaaacagcctgtaaaagagaagacatggcagaatgtgcgagattcatccttccaacattctcagggttcctcttggaggacagacccaggcccaaagacagaagttaccgggagggaggcttcaactccatctaaggaagacctttctaacagttagagctgctcaacaactgaatggactgcttggtgaggtagagtcacttggaagtgttcaaggtggaaagatcacccttgtagaagggactcctgcatttgttaagaggttagagactggatgaacctcaggtctctttcaattctgagattctagaaaattccctcagggaattcagaagagaattcctttaaaactcttcctcctaatgccatcagatctcttaacattggctcactgtgggatctttcctcttaggttgaatttctacgtgaatatcaaagtgcctttttcctgaaaaagcacagtttgaagctttactgtgagaactccctcctcctcagcctctcagtaggtctcagaatcggagtcgttgagctcatccacgtcagtgtataagtactcctgttcccctccaatgttattgaaactgcaataggagctaggttcattcctcatgatgggcaaagcttcaaagctgactgtttttgaggtgttggtataacggttaatggcattgaatgttaaggatgataaaggactacttgatgagacaggcatcatggtggccaaaatgagagccaggcaatcagccacatccttattgggagcacaggccaaagctggggtatagccattttcatctactgcaagcacacttgctccttttcccaaaagttcctgaaccaccattgttagcccatttcgggcagcaacatgcagaggtctaggggaaaaaacatgatacatgtacacatatgtgcatgtgcatgcacatacacatacacacctggctgtcaaagagcatttttgtcaacttgtgaagaccaagaggtacaaactcgagaaacctagtcctaataacaaagatgggggcagggagagcagaacctctgtgcagtgcactgtcacaccttgtcaacgtgtagctcggcatcaagctcagccataggtcccatcgacaggtccctaccttcacccaatccttttgttacttttcttttcaatgtttaaaaacattttaccattgaaattgcattcctccgttgttaaggaatgaggctggtaaagatacagactatacattaaaaactgtaaactgcagtagcataaattctaataggctttgaaaacagcttacaagcatcatgactaatttttggaccttcaagggatctgactaatcccagaacgggcaacaatattctaagatttttatctttactaaacctcaaaatggaatagcaagggacaatgagagacactgatgtaagatctctgtcagtctatctggaggttggctgctcacattattaaaaattttgattctttaagaaaccttattggcttacagacacacataaagcttcttacctcatttattgttagtttcaagtaacatattattacagttgatttccacagaatacacaaaatagtactactttccttcagaaaattaggtaggtggattaaggaaaaaaatacattattgtcaatgttataataaaatttcagttcaaaagcattttaaataatatggcttttagttgtgatcattttagaaatgagttttgacagttgtaaaactattaaaattgcttctatgactaatgaaacctattccaatagtcacatgtttaaaaaaatccatttatcatttttataattataggtcacaaagtttatactagatactgacagtactcacgtttgcaaggctgcgttggttgcattgatgaggtttctatctgttatcttttccagtattaacaaggcactagtttcatgacccttgctacaagccaaatggagggcagtatttttactgttatcttgtaaagtcagttctgcactagcactgctaaccagcatctctgggaggaaaaagtgcatcaattcttatgtttatgaacatgtttcttagattaccaataactcacaactgtatttgtttgtccattttctgcagccatcataagaggtgttttccctgtagagtccacagaattgacttgagcattatggctgagcagcagctgtaaacactctacatggtctgtgaaggcggctgcatggagaggagttcttccttttgaatctgtggcgttcacaatgctggcacctaatgtatcaattaacatctcagcagcaccttcgttgtcatttatcacggcacaatgcaatggactaaaagcatttccttccgttttctggaaaacttcctgttctaaaagcagttctacacatgtctcgtgaccattgtagcaagcccagtgaagtgccgtatatccatgattgtctgctgtggctggatttgcatccatagatgctgctgactgcaaaagggctccaagaacaccaatgtgtccacaggcagcagacaggtgtataggcgtccggcccctgctatcccgaagtaagcacttagcaccatgttgaagtaatgcatctacacattcttcatggcctgtaactgcccctctatgcaacgctgtccttccccacttatctttggcatctacatttgctcctttgttcagcaatgagtaaacacagtctgtgtgcccgttgagaacagatagcatcagaggcgtctgtccatttccatcttgaatatccactgcattctgtggttctgcatttcctattaatagccgtaagcattctgaatgaccatttgttgctgctgcatgaataggtgtcctcttcaaaatgtaatcttttactaagattgaggctccctgattaatgagtacatccacacattcaacatggcccttaaaagctgcaagatctaggggtgttcttccactactatttctgacatcaagatctaacaaagactgtaccaacacttccagtgcttgatggtgaccatgataggcagccaagtgtaaagggcttattgttgctctattatctgaatcactcagcatgtctgttcctgaggtttccattaaaacatctagaggagtttcacttgcaatcagctgaagacatagacggtgaccataagcagctgaataatgaactgcgttgtatccttgcttatcacggatccctggatttgcatcgtttcttaataagtattccaggcacttgccatctgtgtctgatgtagctgcatagtgcaggggtgtgcagcctctttcatcaaggtcattcacacttgctcctgatcccacaagagcaaacaggcactggtaattgcagttggcagcagcgtagtgcagtggagatctcccaaatttgtcctttttattaaagtctgcaccagtattcagcagaaggtttaggcactccaaattccctccagctgcagctgcatgtagacaagtcctgccaaaatcatctggggtatctatatcaaatcctgaagaaagaagttttctgcagcaatctgaaaagccgcttaaggctgccaaatggagggggaacattccatgtatgccacgctttgcagtgtcagcaccacttgtaataagagtgttgatcagcagctcatggccataccgtgctgctatgtgcaaaggggtatttccattcttatcctcacagtcgattacagctccactctggataatggtttgtgatcgggagaatctaccgtggagagcagtcatgtgtagtggggttttcccatctttactcttcatattgacatcggccccattgccaactagaagctctaaacacaatgctccatgtgttgatgcagcagcaaagtgcaaaggagtaaatcctttttcattcttttgattcacaatagcaccacagtctataagttcattcactacaacatcttgtccattatagcaggctacatgaagaggtgtatttccataggcatttggttcattcatatcaactccaagatctagaaggtacttgactacgctgatcattccactagaggctgctgcatgaagaggtgtataagactttttatccttgcatgtcacttcagctccatgcgacacaagcaatttcactacttcaatgtgacccatatatgctgcccaatggatagcacgcctatctttcttgtcaaaagcattaatattggcacctctagacaagagtagtttgaccatctcaccatgtccactgaaagctgcatgatgtaatgcagtcctccctgctcgatcagatacgtttacattactcagaagaggtaccaaagcttcagcacactttacagctttattagcagcagctatatgtaaaggggtttgccaatttttgtctcgagcattaacatctgcagaatgcttcaaaagtacctgaactgcttcctcactacaagatgcaactgctctgtgtaaaggtgtcaaccatttgctgtctttggcattaactctagctccagataaaataagaagttcaatgatttctgcatctccaaggtaagctgcggcgtgcaatggggttcgcttttcattgtcctgaaagttaacatcttctttcttaaatattagtgctcgaacttcatcaggatctccgttaaatatagcttgcaccagtgatggctggtcacggagtttgaggaacgccatggcggtcgcctccgcgccc

SEQ ID NO: 50142 - DNA, 594 bp, Homo sapiens
cagagaaagacgtagagagatgaaggcttgtggaggaaaagatggtgagagacttgggcagaaaatgagtagtcctcaggaagaaatcttggttatgtgtttagagcatgaaggacagagccatatagtgtggcagtgaatatacctgctatctccatctcagaggtcgtctctacttttcccttttgccctttcagtatagatgtgatttctgattctcttacagattgtttgctttgcgagatctgatgttatgttgcagtctcttggtaaatgatgcctagttggtgttttattttcatttaatttttacagtctgttctgtgttgagggaattcaggaaagagacaaacatatgttagcattttaatcagggaattaagtttgagtcagcctagctgaacttcctttgctaaagaaagaagaaaacttttctggcagccccgttcatggcacagcttaggatacatcacgagcctgacaggtgagtgccagaaaccaacagttgtcccgacttgtgaggttatctgaagtaaggcagccggtggctggattagtaactgcctatttccccggggcccgtgaccttgaacg

SEQ ID NO: 50143 - DNA, 651 bp, Homo sapiens
  misc_feature (1)...(651): n = a,t,c or g
ggaggatacgaagcgttttcggcttcctgcccggagctgtgcagcaaacagtcgacccccatggggctcagccttcccctgagtactagcgtccctgacagcgcggaatctgggtgcagttcctgcagtaccccactctacgatcaggttagtaggtgtccctgccacagggaagaagtaagaactggcaaaggcatggaagagtagtgccagggagaatatagaaagtgacctgcagcattatttataacggaggggacacagggatatgatttattccacagttaagtggtctgacggagccgagtctccaattgtaggctctacggaaatgaacttgctggtcctgcccaggcaaatgggcttagttccctatttatttatcctccagcaacagaactgagttcactcggtatctgaaattgacttttccagcagaaagtttttgtgggtatgggcactggccttggctttgagcaagcttgatgaatgttggatatttctggatttcagggtggcccggtggaaatcctgccctttctgtacctgggcagtgcgtatcacgcttcccgcaaggacatgctggatgccttgggatanactgccttgatcaacgtctcagccaattgtccccaaccattttgagggtca

SEQ ID NO: 50144 - DNA, 557 bp, Homo sapiens
gccgggccgagcagtgggctgatgctgccgacgtctctgggcctgacgacgagccagccaagttatattctgtgcatggctacgcgtccaccatctccgccggcagtgctgcggaaggcagcatgggcgatctcagtgagatatcctctcattccagtggttctcaccattcaggaagcccttcagctcactgttcaaaaagtagtgggtctctggattcatccaaagtctacatcgtgtctcacagcagcggacaacaggttcccgggtccatgtccaagccctaccacagacaaggggcagtgaacaaatatgtcatcggctggaagaaatcggagggcagcccaccgcccgaggagcctgaagtgactgaatgtcccgggatgtatagtgagatggatgtcatgtccacagcaactcagcatcagacagtggtgggagatgctgttgcagagactcaacatgttctgtctaaagaagattttctgaaattgatgcttcctgacagccccttagtggaggaggggcgaagaaagttttcgttctatgggaacctg

SEQ ID NO: 50145 - DNA, 1164 bp, Homo sapiens
ttttttatgtggacttcttttaaacatttattaaaaaagcaaaatgtatgttcatctcaaatctaacagttaaaaaatggtaaagcaatacaaacaatgtgttactagcagcatccagtcgttagaatctctcaccctgcttctcggtctgatctgtgcaagctcagtctcttctgagcctgcagctacctccatccctcatcgtagtgcaggccaaaccaaattttataaaattaacaatttaaggttaaataagcttaaataagggtgttaaatacaagacacttcatcaaagcttctgtacaaagataaacaaatctggcattgtacaagtggttccgctggctcacagcacacagggaagttctagtgagtaagcagattcactctcatttctttccagcagagcaactatacaaaagtgaactaagagttgaagtgactactgaccactcggtgagccatttacaaggcatatgtatcttttttttgtttttaatcagaacactgttaatattcaggcaccatttgttcctgcaaataaataagtctctaaggtaactgcatctgaactagtgttaaacacaacagtgcttttttttttttttaatccccccacaaagcttttccaactatgtactatgcctcctttcttattgctatggtaatgtggctgtggaaataaaactactgtacatccaaaaaaatagagcacctttaacattaaagtatatgtctgattatttgttctcatgtttattttacaatactaaagcccaaactatggtaaattgctttacatctctaccaggtcacctgatatacaggaaataaaactcaactatcttccctcttgaggtaagcccaagccagagcactgttttagcagagtctaaaagaaaaaggtctcaactgtcgccagggtttacattcatcttcacaccaggagttacattcattcatcttcacatcggcgctgctctctgccgtggttaccgagaaagagtcgaggctccctatcctgctgtggtgaatggtgctacacagaatggaacagcaaaaacatctacgattggttgaaagcacacagaaaaaccacatgtttgtgacttcaaagggacaaggggcatttcccagtggtcccttgatgaggtgcggattggc

SEQ ID NO: 50146 - DNA, 1784 bp, Homo sapiens
ttttttttttgttttcataataaactttattgtgacaggcggggctgatccctcccatgttgggagacaccatgtggcaagtgacaaagctctgagcccgcccctcttggggccacagtggtagggatgggggaaggggatggaccccatggctggggtagtaccatgactggaggcgggggaggcaaccagaggcctgctgctttggggaggtgcattcccccaaccatgtcccgacacctctggagttcaggcaaggaccttccagtcctacttgtcctgcatcttctcaaggataggcacaatcatgtcaaatttgggtcgctttgcagggtcttcattcatgcagatcttcatgagcttacacacatgaggggaaatacctggtgggatggtaggccgactgtccaatgccaccttcattccaatctccatattggagaggtcagcaaagggtacctcccgtgtcaccagttcccacagaagcactgcaaaactccacatgtctgctgagcgtctgtttgtgtcttcaggcttcttctgcagagcttcgggggctacccaggcaggtgcatacatgcgaccaggacattggaaagagaacttgacatcagccatgctaattcgggcagtcatgtcctcatcaatcattacactacggctattgagtgcatgtcgtgggatgaggggctctagtgtgtgtaggaaggcccatgccccttgccatgtccaaagcaaacttcacagccctggctctggtccacgacgaaattggtgccttcatgtagtacattgtagagggatccatacggcatccagtgtgtgatgagagtaggatgaggagcaggtggagactggcaggcacctagcactgggagcacatttggatgcgagaaaatcctgagccggggacactcttcattgaagtccctgctcttccttgtactccagtctcgaaccttcagcaccttcacgacaatgtcattgccctgccagcggcccttccatagctctccagagtgattctcgttgagcttcgtcaggaagttaagctgtttgaagtcaatgccagagtgtttgttcagggttccatttcggggccgagtgcgggtggtccccttccagaatgtgtccttgtatggaatacggttgagattctggcccatcttctctgcccgctctcggagaagctctctcaggggtgccttggctttgtccacaggcatctctccatacttgttacagatgctgacaagggccccatttgccaccaggtcctctgccacttgatcttggccccaaaaacaggcatagtgcaggggcacattcccgtgttcattcactgcattgatgtctgccttgtactgcaatagcttctgtacaatatcacggtgtccatgactggctgccagatgcaggggggtgtcatccccacggttcattacattgatccgtgccccccgcatgatcaacatctcaaccacagcagagcggccctctcggcaggcccagtgcaagggggagaagccatgatcgtccccctggttgaggtcgttctccgtgttgtccagccacaggcgaacggcgactgcgttgccctcccggcactgagtgaaaatgtcgtccatagcagcgtcccggcgccgagtcccctggattggggaagcctgaggactgtggagtgatccagggaaggaggatgaaccccaagctttatcctcgggactcgggctgcaggatccttctccggggaactcccgtggtagcagtcgacagatgaattc

SEQ ID NO: 50147 - DNA, 522 bp, Homo sapiens
ttctttacaaggctgaacttctgtattcaataagttgcaaacactctcttctacaacactgaccaattgatttcttctgttagaagtccttgttattctaccaactttaggagaggatattttctcatggttatttgaagaactaaaggtatcagtgcctgaaagggtctcagagattgatgatttattaggagaactgagaacggcaaatgatacttgaagtggttctatgttttcaagattctcccccttgtcatcaaaatctggttgaggtaatggctcaggaacaggtgactgctcaagcagcagggaactgagaccactgaagtcttttttacaaacaggtgttcctcctttacgcaatggagtatttgctggcaaagattcatcaaacacttccgggcttaagtcctctccaaaagtaactctcttcctcttcctcatatttagaaaggcaggtgcttcaaaattttcttcatcttctgcttctttctctttgcaacagtttgggagatttgagat

SEQ ID NO: 50148 - DNA, 639 bp, Homo sapiens
cgtccgaggagagccaggccatgcaggccacgtgtctattatcctcccagtccacaacgctgaaccatggctggacgaatgtttgaggtctgttttgcaacaggactttgaaggtaccatggagctgtctgttttcaatgatgccagtaaggacaagtctggggctatcattgaaaaatggagagtgaagctggaagattctggtgtccacgtgatcattggggggcacgattctccctctcctagaggcgtcggatacgctaaaaatcaagcagttgccccagagctcagggtcgtacctttgctttttggattcggatgacgtcatgatgccccagcgggtgaggctgcaacacgaggctgccgtttcagcacccgtcgagcatcattggttgcagagtgagggagagatccccctaactccaccgaacgatacacacgttggatcaaccagctgacgccggagcagctcctaacccaggttttcacctcaaatggccccacggtgatcatgcccacctggttctgctcgcgagcgtggttctcccacgtgggcccctttaacgagggaggtcagggcgtcccggaggacctgctgttcttctacgagcacctcaggaagggcggcggcgtcatccg

SEQ ID NO: 50149 - DNA, 93 bp, Homo sapiens
cagaacaaatggaaaatcattaattccatgttcatggataggaagaattaatattgtgaaaatggcatactgccaaaagcactttatagattc

SEQ ID NO: 50150 - DNA, 108 bp, Homo sapiens
acagctaacgagatgtgaaggacctcttcaaaatacaccacactactcaaggaaataagacaggacacaaagggaaaaacatttcatcctcatggatagtaagaatca

SEQ ID NO: 50151 - DNA, 552 bp, Homo sapiens
tcgcagacctgaagtaaatgttacttttttacgatatttgaaggatagatttattttataaattaatagtttaaataagattttgcccagcatttgaaatgatatttatttctgtgtatcaatattaccacaaacttacacagcttaaaacaacatacactctttatctcatgatctcacaatttctgtgggtcaggaatcaggtcatgggcttaggtgggttttctgcttaaggatctcacaaggctgcattcaagatgtggtgcctgaagttgcagtttcatctgaaattctgttggggaagtatttgcttccaagttcacatggttgttggtagcattcagttccttaagggatgttggactgagaatctctgtatcttgttggcttttggcctggctccttgccacgtaggtcttcccaataaggctgcttgcttcctcaaagctaggcaggtgagagtgagtccttaggcaagatgcccttacagtcttaggtaacataatcacgtacacaaaaatcatatatatcctggcacctttgttgtgtctt

SEQ ID NO: 50152 - DNA, 673 bp, Homo sapiens
tttttttttcgtgtgtcccagccccactttattttcgaatttaaaactcagggtcaattcctggggttcccaggcaaccctccctcgagcccactcactaggggccagccctagatcttgaaggccaaggtgagtccatcgcccaggggcaggaggctgatgtagaccctgacgtcccgccggatgcgttcgtttaggtttcgcacacactcggccgccacgtcccctttcggaggttgcagcaccttcccgcgccacaggactctgaggacggcgaggatgcctccgggtcgcagcagctgcaggcagcgctcgtagtaggcggagcaagttctccttgtccgcatccaccacggccacgtcgaaggtgccggcctcgcccgccgccagcagctcgtccagggtctccaaggcgggcttcagccggaggtccgatcttgtgctccgcctcggcctgcctccacaggggccgtcccagctccgggggctgcgcgtccacctcgcaggtcaccacgcgcccgtccgcggaggcccaggggccagggccagggcggagtagcccgtgaaggtgcccaggtccagcgccttcttggcctggatgagccgcgccaggttggccaagagctgggcctgctcgcaggtcactcatagaactccccctgcggctgctcca

SEQ ID NO: 50153 - DNA, 1340 bp, Homo sapiens
  misc_feature (1)...(1340): n = a,t,c or g
tttttcttttttttttcataaattaaattttttattcatttttttgcatcaaaatagtgcttaaaattggaatttatactcacaagacatagctaacatccaaagtagacaattaaaaaatattatttgaaaattatgtacttagtactgaagacttcctaaatttgcacattagctagattgccattagcaccattagagagttgatctttggctaatgattattcaggaaaatttcaaccattacaatcagtgagtataattttatatttcagcaacgatagtggtcatgttcagcaacagcttcacttacaaattaaagtaagctcacttcagtgttgcactctgatgctgtttttttaccccttctcttgcaaataaccagtgaaataaaaattgcttctaactggcaatcgaaacaagggaggaattatggctagccaactagttgctaatgtttgtgttttttttatttaagaaacattttaaataatagagatggggtctcacccatggtggcccaggctggtttaaactcctaggctcaggcaatcctcccactcggcctcccaacatgctgggatcacaggcttcagccaccatgcccggactgctaatgtttgtgaaaggcaaattgtaaacttctatggtttaacttcaccagaagggtaaagggctccccacctgccaccttgttctataaaaaaagtatactctgattactagaatggatttttaaaattcaattcaaagattcaataactatcaacatttctaaacactgatttttctttttctctttttcaaatgttttttaatatcctgcaggtaataacactgatttttctaatactcagaaacatctacttagcagttgtgatactaatttgcaaaatgtaataatgttatacaaatataagatactactaaatacatagtagaaataattgcatgattcctgatatttatattcaaggtataaacatgactgatttcgctgatactacagaataaaaaaaataaagctgctatgtaaaaaattaaagaatatctcaattagatatttttgttcccaatctctttcagacagatctatgaaataatatagaatatactatcaatatgttctttcatatgaagtgaaaaaaatgggatttaagtaggtgagataatttctattttttactttttttaaaaaattggncggggtctgccctgttgccccaggngggctccaatccccgggggtcccgtgtgcttcccgcctcggcnccccagggncggggtttggggctgngccctgtgccggggccttgggggtcccttcntttgggtttttt

SEQ ID NO: 50154 - DNA, 1229 bp, Homo sapiens
ttttttttttttttttgacaatggaaatgtttattgctggtggttgggtctgtcatttcctagaggacatagctggccagcagattttcatttcttttttacaaaataaacaaatgcctactttattatttatacacagaaaattatatagaaacaccacacaaactgcttgaaatacaaatattctttggtttacttatcaaagtaaaaaataacaaaaatcttatcagttaaataaaaaagtgacattctttatcaagccttcttaaacactgaaacgcacgcatttttatgctcatgttctttagcagtatttctccccttttgcccctcattcccctaaattgtttcaatgagttcatctgtagaatgaagattgttacctttcttaatgctacttactttttattatctcaatatcaagaccaatctagacttttttgtctcttacatgtgaaatggatgtaaaaaatggaaaattcaccagcactttttaagataacataaaagaagccctaagcaagcatttcaaggcaatgacacaccattacatttctgagaaatttaagtatcattggtacttaaaaggagaactcaattccagaagcatattcttatactggacattattcataatagctaatatagttcatttccacagtactgatttcagataagccatttttttttcctgagggttgactacctcagacttaaatcctgaatgtcgatgactcaatcttaacaaaacagtcagctgtagacatgaaaattgaattgtttcaaaaggagcaatgatagcaagagaaagttcttggcattttaagaaaagtacatatacatagcaagaaatgaaagtaaatcaaaatacatagctttgtacatgttagaaatatccaatgtgccaccaacacaacaaccgccctattaaaaagtcctcaggtctggagacatctgtatttttctttgtataactacattcgcattacccaaccacatatctctcccatggtctgttacccattaggaagcttttaaccagaatttttggcaatatgcttttcttcaaataaaacaagccttcaaataaatcattatgtctgacaactgaattgggtaaagtctttctgaaatatgtgtaatctttagaaaattcttcttttttccttcataaatcagcagtgctccatcttcaaataaatcatgatcagtcacaatcttaactcatg

SEQ ID NO: 50155 - DNA, 513 bp, Homo sapiens
ttttttttttttttttttgctattcagctggagtttaatttaagattattctgggttatcttggccaatgtaattgcaagggtactttagatgtggaaggcagggactccatgtcagattgaagcagcatagaaagtctacactggtcatcgttggctttgaagatggaaggaagccaagatccaagaaatacaggctgtctccagaaccagatgatatcccatttcctctattcaaggtcattattccagcaattttcttctttctctcttctgtcatagaaatttccctctcaatttctgttgtccggttctgcatgaagcttggaagtcaccactctatcccttctctttagctgatgttggaaaattccatagccatcaacttgattaagtgtgtgctccacagggcatttgagacacagaattatttccaaagggtctggtccaattgtattttgatgatctccaacactgagagtagtacccacccacgcgtccgcccacgcgtccg

SEQ ID NO: 50156 - DNA, 555 bp, Homo sapiens
tcgccattaaccaaaagaatctatttcggcatttacagaatattccacacagtaacagcagaatacacatattttttttgagtgctgacgaaacacatggcaagatagagctgtcctaggccctaaaactcgccacaacaaatttaaaagagatagtaatcatccagagcagatgaaaaccagaaatcattgtagggaatccaattggaaatcagcataagaaagatatgaaaatccctaaacatttggaaatttaaaaacacacttcacaataatctatcagtcaaagaagtctcaaggaaaaatttaaaaatacattgaactggataaacatgaaactgtgacatatcaaagtactgatagaagtttttccttgtcaggtgactcctcagtcaaaaaggagcccagtagagaaatgggctggtgagagcatctgatgggctctagcaagggagacagagctgcgggggacagttcctcagccctggactctgtctgagtcccgggaatctgagtcacgagatatgaggcacctggaaacagcccacgcgtccg

SEQ ID NO: 50157 - DNA, 791 bp, Homo sapiens
ctgttccacaagaagcaatgaggactgcccagtggaggaggggcgatgtggctggggagctagggagagactctggaggtggtgggtctctggggagacccctaaatgaaggaaagtttgaggtaatgcttaacattgttgcttgtgagaatttactgccctgtttttcccagagccattttggctcaattcaagtctattcaattcaagttaactctagcccagcccagatcaactcctcctacaaatattattggatgataggccctagaacccaataaaggagctccaaatgtcgttgggtggggaagcaaaatgtagagaaacatttaaagcacactgtaataataaatgcaattataaactatatggaggagggtgcagaggagcgaatgtgtctggtgtgtgatgtgtgtgtgtgcagtgggggtatcacagagagtatgacatctgagttgagggtagcaggtgcctggagtctcaggtggctgctcacccatctgtgcaggtgtctctggggctgctggtctcacctgtggtctgcagtagacacaattggctgagcaggatatgtgatactgtgtggttggtgtggagttttgaagaaggggctgtgtttgggccacgtaggctctactcagagacctgaaaccacttcagaatggtgcatatgtcgaaagagctggctgggggccttgcccaaaccaactgaggtcttaaagtccggggaaaaaaagtctgtgttccaactagaattctagatatatttctagaacacacagagagggaat

SEQ ID NO: 50158 - DNA, 354 bp, Homo sapiens
taggataactttctgattcctctctgccagccgttttgcgtctcttggaaagccaaacggtgaccatgcttcttaatttatgccttcagggtctggcttctcctttctcccttcctttcctgtcacaccatgcatacatacatacaaatacacatccttcaaccatttattccatggcttatgagacctgcaaatgagttccacagtacggaaggcatagaccactaggcttcttaattgatgtcaaggcagatcttggtgagcaggtaaaaacctgctattgtccaccaagtttaatttaggtcctccaagttggagggttaagaacccaggcaaagctgctgctgaatctat

SEQ ID NO: 50159 - DNA, 637 bp, Homo sapiens
tgctttttttttttttttttttgtattccaaatggtttaatttaacaagtcaacaccttatcattaagcacttgagatcttgatacatattcaagttacacatctaaaaggtttccactttgcaagcaaacatggtaatgcagagacctcctatttatgaaatcatgtaaaatggttcttcagacacctctatgtcccactgatgctcaagaatcaacatttttcaagggggtattcaagcaaatgacaaccatcttatacatgcagttaaacatttttgcttttccaatgatttgcaggtaaatatgtgtgtgaggctgatggattctggacgagcctccaaaggagaaaaatcactcccagtctgtgagcctggtaatggatacatttatacaagagactggtaattgatggaaaggaggactgggtaggagacagtgaggagagctttagctgtggtaggcagaaatgtaacttcagcacttggctcttaggctgttattatttccaaatagtatgttctcattacccccttcccatatacagaggttgttaggtgctgactgcatcagtcatttgattctctttgaccttataactaggcaagcataaaaaattaaatgatttttaggccagg

SEQ ID NO: 50160 - DNA, 612 bp, Homo sapiens
  misc_feature (1)...(612): n = a,t,c or g
tgctgctctaaggaagactttttcgtgccttggggactgctgctctgaagaagactctttcatgcttcctccttagcttctgatggctcctggcagtccttnnnnnnnnnnnnnnnnnnnnnnnnnnnnnnnnnnnnnnnnnnnnnnnnnnnnngtgtctgtgtctcgcatggccttcttccctgtgtctgtgtctttccatggcctacttataaggaccccagtaattggatttagggcctgccctaatccagtctggattnnnnnnnnnnnnnnnnnnnnnnnnnnnnnnnnnnnnnnnnnnnnnnnnnnnnnnnnnnnnttcaaggtagacatgaagttttgggggacaccactcaacccattgcagaacccattagcagtcacttcccgttcctcaacgccccctaccccagggcaatcagtaatctaatttctgtctgtttgnnnnnnnnnnnnnnnnnnnnnnnnnnnnnnnnnnnnnnnnnnnnnnnnnnngtctttttgtgattgggttctttcaattaacatgttttcaagatttatgttgtagcatgaatcagtactttattactatttatggaataaaaatcagttgtatggatataaaaa

SEQ ID NO: 50161 - DNA, 1462 bp, Homo sapiens
tttttttttccaaaaaatcggctttcctctttaataccaacccaccccagggagacagctgtccacccccagttgggtaaggggccacactgcccccacctccttgttccagggaacactcatttccctacaggtgatcttggggagagactgttcccaggcaaccctgggagtctggctcagcgcacaaatctgtccagggcagatggccgggcccccgtgggcttggccttcgcctccttatgatgctgctgctgaaggctctgccggaccttgtcctgggggaccggagacggggaggacacaggcacagagtgaggaagtgggcaggctgacaagggcagagggcacaagcaggagggtgcagcctgtggaaggcccggcccatgccaatgctcatttaccctgtgttcctcatccatgaccttcctcttcctcttcaccaggcttgccgtggagctgcggcccttctgctttggctttggctggaagggagccttagcctgcgggtcatagcccagcctctctatctgctccttctttccctgctccagggagatgacatccacctcggccagggctcgtgggtccagacaaataagctctgcaggtaccttctctagcagggccttcaactcccaatcctggcgctgcttccggcttctgtatggattactctcccaggccatcgaagttgggctcaccggccccagggaccagcatgctggtgatgcccccagtgtgccccacccccagcacatcttcaaaggggcagaactgaaggccatgcacagggcctgagagccggtgggtgaggtagggctgttcaagggagggtgggctggccttgccctgccctgcccagatgttgacaacgtcacccattcccgccaccagcagtcccctctgggagaaggccaggtgccctgctccatggggcagggtccgagtgcctcagaggctggtacgtccctcgcaagtcaaagatcttcagctggtggtctaggccagaggtggcccatgtacgtgcctgtagaatctactgccacagcccggaccccaccacgatgacagagaatctttgccagtggctccttcatagctggactccataaagacacagtaccattgctgtgtccgagatggatgacggcattgtaagggttctgactcataacatcgagccgcccagctcgagcattcagagctgccacaatcttccccactgacacatccaggtaggttagaaaccctgtttctgaagctgtagccaggaggaagtggaagggcaggaactcaagccgtgttactcggtcacagcggcggatacagtggagctcaatgccctgattgtcatagatgtggagccagcggttctgagcaacagcaagcagtgcctcagaatggagaaaccggatgtcccgcaccgcctccatgacgttgatctcgcacataagcttct

SEQ ID NO: 50162 - DNA, 797 bp, Homo sapiens
ttttttttttttttcaccagcttctccattttatttgaaaataatacttttaaaatgattttgacattttcatatataaatttatttttttcccaactataattttggttttatgtacaagtacacaagtaccaccttatttttaatgtttacccttgaagggtagaaaacaaaatcatgttttataaatgtggtataaaattacacatcttctcatgatgtcatgtcaataatccactacactaaaccaactgtaacaaggtagtacatgctttaaacatccaattaagaataaatctgagccaacaccttgatgatgacaagggaatgtgctgatatcgtgttaaactgatgtggcagtaaaccaagggactaagcacatgattattcaaattaaaacataaaaaggacaaaaggtgtggattttctgggctacatcacataatatttgtctggcgaaaccataatacagatttgggtaaaggagatttttaatagataacaagtaattctttatagggatttgagaaagtacgagaacatatgggaaaagcttagtaatttaagatttacttttgtaaaaccatgtggacaaatattaaatgttatgcttgcattttgaacattataaatataaaacataaaacatccaatgttaaatactgatatcccatgcctgacctggatttagatattgagtatttcccattttaaagaaagaaactttcaaagttttgtcaatacttaaactatatactattattcctcaccaaaatcttcatgaaatttaaaaggct

SEQ ID NO: 50163 - DNA, 517 bp, Homo sapiens
  misc_feature (1)...(517): n = a,t,c or g
gggaaacatcatctacatgtacatgcagccaggagccagttcttcccaggaccagggcaagttcctcacgctcttctacaacattgtcacccccctcctcaatcctctcatctacaccctcagaaacagagaggtgaagggggcactgggaaggttgcttctggggaagagagagctaggaaaggagtaaaggcatctccacctgacttcacctccatccagggccactggcagcatctggaacggctgaattccagctgatattagcccacgactcccaacttgcctttttctggacttttgtgaggctgtttcagttctgacattatgtgtttttgttgttgctcttaaanttgagacggggtctcactctntcacctagggtggaagtgcagtggtgccaccatagctccntcgactattgggcttaagcgatcctcccccacctcagccttccaagtaactggggactacaggtgtggcatcactgggcagtggggaattgtgggttttctgt

SEQ ID NO: 50164 - DNA, 3939 bp, Homo sapiens
ttttaaaagcctttacttttttcttttattatattttctcaaataaacttccccaaaggaagatattttaagagcattttcaaacatctttggcatcacataaaaaagaaatctcgtgtaaaaaacgaaatgtcatctgagcttttataatacaaaggcgcaatccaatatgaacatataaaatatatacaaatatagtgcatggtcagtcacttaatacagctctctctacaaaaagtaacttcttagaaattaaaaaaacacaaagtaaccacttaatcaaaaaagtcctcttctctcccagtattcaagttcctgtttagagtccggagggaagagaggtgggttggggagtttaggaggaggggtggcctgagccccctcagttccgccacggcctccacatggagtccgccgtaagcgaggggccgctggaaggtgacactgcgttggggcccacggaggtgccgctgttgctggtgtagacggggatgacagggccgctgtgcgcgaaggccccgttgggaatgaggaaagcaaactggccatcgggagccggtaccacctggaagcctccaaacaccttagccgcctctccagcctggctgcccagcttgcagggggcgccgccgggagggggcgccgcgcccccggggatgggcacgagtggcggcggcggcgcgaacggcgcgtgctgggggccgccgggtcccggtgggggcggtggcggcgcctgcaaggcggggtgcggctgcccggggtaggtcatggcattgatctgggtcatgcagttggccaggtggccgagcagccgagtgcgcacctcggtattaacgccctcgcacgtggacaggaagcgggtcacctcgttcatgcactcgctgaagccggctcggtacttccccagcacacttgggtctgtgctcagcgcagctgcgggccagaaagagacagacgggtcactgaacggccctggccccgtggccactgcctccgccctgggaggtccctgtgcgcgcctccctgaccatgggcccgtgaaactgcctccggcagggagggtgagatgggtttagaaaaaaccagccacctctccacactagcgttgctgccaaaagccgagccactccttcccgattccctgtagctgcatttaaacctatctcagccccacatctgtcacccccacccccgcgcgcgatgtgaccttggacaatgcctcccaatccatcatccaagcctcatttccccttctgcaacgggaaggagtgctaaaccagtgacccccaggctccacgcagttccaaaccgccacagtcctaagtcctttcgccccgacccggcgcccgccaccctcgcggctgcaacctctttccctccctttccggaacagtaacaacttggagttgtggctataaataagccccagaccgtgggaacgcgagagtgagccaaggcagtaaaatgtagctgaatgcctctcacaaccacgggcggaagtctggaagaaatcaccgcgaggcgagcggacgcccgcacagggggacgcggcgagccgccctcacccgtcatctgcgcccgctgcaggttccggaggtgcttcactgtcatttccagaatgtccgccttctccagcttggaatgccgcgagctctgcatagagtaggcaagaaaggaaagtgagccccgtgtcagctgcttcagagtgctgggggtccctcctcccggccacggagcgcaagcattatctctggaccccagcgaataaggccgggccctcccgcctgggagaacgcagtaccagcgagtgccagaccccgcagggcggggggtttcactcttagtagctgagaaagtgtttgttttttaattaaaagagcgagcagcatttccccacttacatctttcttcagagcatccaaaatcagtgttttcagctggctcagactttcatttattcttgctcttcgtcttttctccataataggctttgatgactgcaaataaaaaaaagagttctgtgttcccatggaatctgccatcccggggtttcaagacagaaagaagccccccaacccctacttaattttgaggggctgcaaagagatacaggtaccgcccttacctttctgtgctcagatgctgtctttggtttatccggtgtcgtgttgacactggctggggtagcagccaccggggacgaggaatttttctccattatatcagctggcattttcctttttttttttttttttttatctctagagaattttatttttggagttcttcacgaaaaagaattttttgtttgtgtctcttttacttgagactttcacaaaactactgagcaagtgctgagggtttattatattttgtggctacttggtgatcagtagcgctgttccaggaccaaggagagaggtagacgggggattccgctgttatcagcaccagctccggatcctgtgtgatccctaggccctggcggcctctatatatatctgggactgcacgcgaacggctcgtgtgaaacttcccaaactttctttcccacagtaactttcagccaatgggaggaggagacacgcggcaccgctcgtggaccccgcccccccattggccgccaggcacaaggtctggcggccaatggcgcgcctgagcccagggcaccggaggctacaacgtcaatcaaaaggattttaaccctttgctactctccctctgggctttggtttagaggattttttttttctttccgctttggtcttgatcttgtctatttcttttggagccagggtctttgctctttatgccctctctcatatgtaacagagctgctttgactgtagtaagttcatttgaaacatattttttttaaaggtataaacaataaagaaaaaaacagcagtggttaaaagggggcggggggagggggggacgggtgtaagaatgtgagttaccgacacatctaaagttcccgctcagactttacattcaggagggtgaaagtagatggtaaaggaaaagggccaaaaaaattttcctgtttccatgcagaaaaaggaaaaattgccttctacctcacaaatgcaggtttttcggagcaaggtagttcttgaatcccacccccaccccgtctttcagaaattcctcgtttggatttggggccttagaccccgggcttccccaggaaacaatcagaataatttccaactgggtggaaggaaacggtatttcaaatgaaaaaatgaacaaggggggctccgagggcaatgactcaggactcgcgccctccttcaccaccctttcccttttcatccgtaggctttaggttctgcggcgcgttgaggtggcgggcaaggaagcagcctctccctcgccccgcgggcggcctcggcccccggcgcccgcgggccctttaagagctacaccagccgagctgcagtttgacatcagcccggccgcgtgggcgcgcctggagccggagcacgtgccaggatgttttattgccgcgcggctgcggccgggccgggaggatgtgtgtgtgcgtgcgtgtgtgagtgagtgtgtgtgcgcgcgccccgggggcagggaggcggggggcggcgacgggcggcggagagcgggggccggttcctggtccccgggagaagccaagaaggtaaatagcagctgtcgtcgtcgagcctggaaaacccccccctgcgcctggcccgggctcattggcgcgctgcgtgtggggggtgtgtgtgtgtgtgtgtgtccggggccccctcctcgcccgccgggccaggaatccgagggggcggcgggctgggagccgagccccggcgcttaccctctctccccgcccccgcctccccaggccaaggtcagctcttcccggcggggagcgcacacccggggtggagagtggggaattacgtagtctatgattgg

SEQ ID NO: 50165 - DNA, 565 bp, Homo sapiens
  misc_feature (1)...(565): n = a,t,c or g
tnnnntnttnnntttgaaanccttttnatgacncnaatttaatacgactcctatagggaatttggccctcgaggccaagaattcggcacgagcatttttactaatatgagcaagtcatgtaaacattgaagaacttggtaacatattagtaaatggatattaccaaatgttttcatcgttaattactttgcgttccaccaaaatatctttactaaaatgtgcttggtgtagtttgtttattgtctaaattagtaccagtcatcttatttctgcaaaatgagtatcaatgtgaaaaagacacgtgaagattaagcatgtttgaaaataaaatggtcaattacatttcaatttacataggccaacaactgttccatactttgtttgtaaacatttaatttctctactggacaaaattaatatttggctttacattgaattttgagctgtgaagaataaattatgtatcattttagcatattaaacagtagtaagtctagcacatagtctcagcccttaaaacaaaagtttttttgnttgttgnttgttggttttttganatggagct

SEQ ID NO: 50166 - DNA, 494 bp, Homo sapiens
gcctctactcaaccaggttctactcctttagcgtcattcaagatactatccctggaggagacagaaagtcatggtagctattcctctggaaatgacataggaccttttggagagcgagacgatcaacaggtgtttatccagaaagttgttcccatcaccaacaaactatttgtaagactctcatcgactggaaaaagaatatgtgagatccaggctgttgactgtactacaatatcctcatttacagtgagggaatgtgagggatccagtaggatgggctcaagaccaaggcgctacttgttcacaggccatacaaatggcagtattcaaatgtgggatctgaccactgctatggatatggttaacaaaagtgaagataaggatgtaagtgggtccaacccgaagaagagctactcaaattactcgatcaatgtgatttgagcacatctcgctgtgctactcctaacatcagtccagcaacttccgtagttcag

SEQ ID NO: 50167 - DNA, 382 bp, Homo sapiens
  misc_feature (1)...(382): n = a,t,c or g
gtcactttgcctggcctctttcctgagatgcatggtgcttatgataagcacacattatgtctaggtccctgcttcaagtgtggcactttggacacatgcttcccacattccgattttgtgccaaaacctatgagatgatcgcaatgtgggaatcatggatggctgtggaaaatcctaacacattcgtagtagacaggcagaatcatggaatgaaaaggcatggcgttcagactgagggagatgtgactatgaatccctgttgtgcccccctttctttctctccacagaaatggcacagggtgaagcccagtggtttcaagaggcaaagaatctgaatgagcagctgagagcagcttataccagcgccagtttncgccacatg

SEQ ID NO: 50168 - DNA, 369 bp, Homo sapiens
ttcctccacacacttccttctgtgggaaggtgaccagcacaaacccgctctgaaaagtcttggggaccaaatctctgtctgagaggaaggtaggtgcagttcatccactaagtttatccacctgttctgtgactcctcttcaccattctcccagcaacgactgagcctcatgacttgggggctgggggatgaggtggaggtgggggatataatataggagatggtacagtgcaggggcagaggctggtgtgttctccaggacaagtggcaccacccactgaaagacttttcaagataaacacaactttgtctcttcagcctggcaagagctgaggcactgaaaacttcttttttcccctagaaaatgac

SEQ ID NO: 50169 - DNA, 1488 bp, Homo sapiens
ttttttttttttgtcatatgaaattctaataaatccattttatttgtggcaccacaatattatcattaagctctctttttacacagtctgcaatttgtatcagctgcccccgtgtgactctgcccttactttaggaacaaccttttgctgggtggcgtcctagaaggtctgggcctgggcagcagcccactgggaagcccacctgtgctttcccccatctgggtggggcggcagcagagaccctgagaatcagcggttatgggagctgtgtgttagctgtgtgttattggctttggcttcagcatgtcctgcctaggagtctccagcagctgtggtttccttggactggaggctttttctcctgatgacaatcgtgacaggtccatcaggcagtgccttgatgatgttccaggcttcaaaccgtgtgaggccctgcatggcagtgccacccagctgcaagatttcatctccaggctggactgtctcactttgttctgaggctgctcctttgaaaatcctgttaatggtgagaggcttgtctccgtgtagggagcccttccctccttccaggctgaagcccagccctgccgacatcttctccagtgtcaccgtgcagactgtggcctctgctgtagattctacagaaacatcactggctgcagaggctgaggctgcagagtcagtggaggagttgaggtcaggcatggcctctggagtcagcttccttgtgacaatcacagcttgcctgggctctcgagcttggcggaggattgccaaggcatcatggtgcgtggtccccttgagagacttgccgttgatggaaagaacctcattgcccttctgaatagtcccttcctgggaggccagcccatttggaaacactctgtgaaccgtaatcaccttgttttctagatctgctcctcctgccaagctgaacccaagaccagcaccttcctccttgtgtaagatggtgacatggatgccgtctaattgctttaatgttgcttcatccagaaccttcacctcctcgatgagtttttttaattcttctgagctcagcagggagataacggactgaccagactgaagggaactgtggtccccatcatcgtcttccttggcttccgtgagaccctctgtatattctctcagctctgaaaggttgagcgagaaccctgtgtccaaggcagatgtttcagcagaaccatttgcagctgagtcttcgttggatgatgatgttggagatgccccttccttggggatgcagggagtctgggcacaggagatagaagatggaaggcacagcaaggatttcatgacagccgatgacacttggctgctgatagaatagagtttgctggtcttttcgtcaagtagcttcgtctcacaggactgggacctggtcagggggaagctccgtgctcgctggctaggcatcttgagcactgggccttgagattcctcagcctgtgttgacagctctcgagg

SEQ ID NO: 50170 - DNA, 432 bp, Homo sapiens
ggcaattcaatcgggaaatgaagcggaagcaggcggagtccgagaggcccatcttgccagccaatcagaagctcattactttatcagtgcaagatgcacccacaaagaaagagtttgttattaaccccaacgggaaatccgaggtctgcatcctgcacgagtacatgcagcgtgtcctcaaggtccgccctgtctataatttctttgaatgtgagaacccaagtgagccttttggtgcctcggtgaccattgatggtgtgacttacggatctggaactgcaagcagcaaaaaacttgcgaagaataaagctgcccgagctacactggaaatcctcatccctgactttgttaaacagacctctgaagagaagcccaaagacagtgaagaactcgagtattttaaccacatcagcatcgaggactcgcgggtct

SEQ ID NO: 50171 - DNA, 1205 bp, Homo sapiens
ctgattcgtagcacgcttgcttgcatcctggaatattctcaaccagaagactctgtacctacacctgatgaagtaagcatgctaacagcaattgcactcttcctgtggtctgctagtaatgaaataataggagtccagtcattacagaatggctgcatgaacagatttaaaaatgcattaaattcatgcgacccatggggttcaagccaaatgttaccagcttctcctctcagtcttccagcattccaatcgtgccctttcaactccttatattcattcattagctccaatagtggttgaaaagctaaaagctgttgaaagaaacagaccagccagtaacatagagcttttagcggttcaagaaggaataaaagttcttgaaacactggttgctcttggtgaagaacaaaacagagtccagctacttgctcttttagttcccactttgatatcttacctgctggatgaaaattcttttgcctcagcaagttcagcttccaaagatcttcatgagtttgcactccagaatttaatgcatattggacctctgtatccacatgctttcaagacagtaatgggggctgctcctgagttgaaagtgcgtctagaaactgccgttcgagcaagccaagcgagcaaagctaaagcggctgccagacaaccagcccccgccatacattctgcaccaacaattaaagctaaaaaacaaagttttttttaatttgtaatttcatttatttgtatttatgttgtcaactagcccctaattagtgatggcccactgtatcattccaggctacctatgggttctgttttatttgtatattggtattatagtgcttcccaagtaggttaagtgaaataatgctcacaccacttattgatttttaaggagtgattttttttatcatgtggtgaatatgttttcattttcctcctaataatgtttctcttttgttaacttatttatttttcaaacactgagccatagtcttaaatttaaatgctaaaaacaattgtatcatgtagtcgggcagcctattgatactgtcaggggaaaaaaatgggtcagaactcagcatctgtcatgaaaaaaatcaattgaaaaacaagcagattttaaattttgaagtaatcaaaataatggaaagtgtctgttttgtggtgtatatactatgaataaaatcacagcattttctaagcaa

SEQ ID NO: 50172 - DNA, 1126 bp, Homo sapiens
ttttttttttttttcaagcaagcagggggtttaatttctcacacacagagtctggggagcccagtgaggttgcaatggcagctagatgtgtcctccagctctgtcatccttgtcttgagggttctgtgttcacggcccctccaggcatggtttcttcatttaggtaggaacaaaaggccaaaagaacatacaagcccagctctctagaggctccaatcagaactggaccctttaactacaaaggaatcttggatgaattatttttagcggggcttcaggagcaggtagcagagccaaagtgcacactcaggccatcttcctcccaatgtcctccccggggggcatttcctttagggaaatggggagtcagtcctcacaaacacagaaagcagctcaaggccaccacacaggtcgccaaaatccacatcctggtcactgcttcttagctgccgagacaagctggggtccccaacatccctggggagctaggaggagcagaggaccaacacatgaggctgagaggcattctgcttggtgaatttttgaggcagaggctgcccccaccacacaactcactgtcaggggaccttatcctgctcagagagctgctctagaacttaatttacatgactcgttcaggcagacagagttcactgtcttgtattccacagtgtgacagtggtggccccatccctggcaactgagggccgtggcgggtcggggggaggccatcttaaggaagagcaggcagctagcgttccagctttgggaactctggctggaaaaggtggttcacagacgagttctggggcctcaggcggcccgtcatatagacctttccacaggggagggcagaagcaacaggcgggtcccaggagaccccagcaggtcctccaccgtccagccttcacagcaccgggcagaatttacacagagaggatcagtctccaagccaaagtcaggtggaggcatggtggtggtggtagagaaacgctgggctggcttccagctagaagccaggctggaggcaggaaggctcagtcgtctgtttcctgcttgatgttctcgacggagacaggcagctctggacttgaagccttgtcgggcgaggcacgtctagatgctc

SEQ ID NO: 50173 - DNA, 404 bp, Homo sapiens
  misc_feature (1)...(404): n = a,t,c or g
cttcaagcctggtggcggcttccaagctaaggaacggtttggggcagtgtccttcccggaggtcggccgccgttacccgctcaccagctacgcggcgcgtcaggtccgcggaggcgcgggctcggggcgcctgcgggacggacactgcccatctctaaaataagaacctggaaaggggactctgttggccattggaaattgcagaataatgtctcaggtgacatttagtgatgtggctatagacttctctcatgaagagtgggcatgcctagattctgctcagagggacttatacaaggatgtgatggtccataattatgagaacctggtctctgtagcaagtctttccgtaactaanccatatgtgatcatgttattggaggatggaaaanaccctggattat

SEQ ID NO: 50174 - DNA, 589 bp, Homo sapiens
ttttgacagaagaaacatttttaattgttctggtcctgccccatcaccaggggagtcccggcactgctcaggctcactgctcttgctttcccctgggatgtcgaggacactttgacctcatctatgtcatagcccatgtgtttctcagatgccaccgccataagatctagtgccccctggtgccattgggcaaggcaggccagagaggccaggggcagctgggtgtgcaccaggccacagggctgtggggcatgcagccgatggtgcagcttcaggtggatgtgctgggtgaagcgactccggcagacactgcactggaagggccgggccccggagtgcaggcgcaggtgggtcttgaggttactggagctgctgaagcgcttgtggcacacctctctttccctccaggcctggaagcttttccagtgatttcttcctggaacccacggtatcgagcacttgtggggccgctccccagtgtgcaccaggtggtgcttctgcaggtgggcaagttgagtgaagctcttctggcacaaggcacactggaatggacgctctccacttgagattggagagctgcccaaagctc

SEQ ID NO: 50175 - DNA, 3991 bp, Homo sapiens
ctgggtcctgtgtgtgccacaggggtggggtgtccagcgagcggtctcctcctcctgctagtgctgctgcggcgtcccgcggcctccccgagtcgggcgggaggggagagcgggtgtggatttgtcttgacggtaattgttgcgtttccacgtctcggaggcctgcgcgctgggttgctccttcttcgggagcgagctgttctcagcgatcccactcccagccggggctccccacacacactgggctgcgtgcgtgtggagtgggacccgcgcacacgcgtgtctctggacagctacggcgccgaaagaactaaaattccagatggcaaactcaatgaatggcagaaaccctggtggtcgaggaggaaatccccgaaaaggtcgaattttgggtattattgatgctattcaggatgcagttggaccccctaagcaagctgccgcagatcgcaggaccgtggagaagacttggaagctcatggacaaagtggtaagactgtgccaaaatcccaaacttcagttgaaaaatagcccaccatatatacttgatattttgcctgatacatatcagcatttacgacttatattgagtaaatatgatgacaaccagaaacttgcccaactcagtgagaatgagtactttaaaatctacattgatagccttatgaaaaagtcaaaacgggcaataagactctttaaagaaggcaaggagagaatgtatgaagaacagtcacaggacagacgaaatctcacaaaactgtcccttatcttcagtcacatgctggcagaaatcaaagcaatctttcccaatggtcaattccagggagataactttcgtatcacaaaagcagatgctgctgaattctggagaaagttttttggagacaaaactatcgtaccatggaaagtattcagacagtgccttcatgaggtccaccagattagctctagcctggaagcaatggctctaaaatcaacaattgatttaacttgcaatgattacatttcagtttttgaatttgatatttttaccaggctgtttcagccttggggctctattttgcggaattggaatttcttagctgtgacacatccaggttacatggcatttctcacatatgatgaagttaaagcacgactacagaaatatagcaccaaacccggaagctatattttccggttaagttgcactcgattgggacagtgggccattggctatgtgactggggatgggaatatcttacagaccatacctcataacaagcccttatttcaagccctgattgatggcagcagggaaggattttatctttatcctgatgggaggagttataatcctgatttaactggattatgtgaacctacacctcatgaccatataaaagttacacaggaacaatatgaattatattgtgaaatgggctccacttttcagctctgtaagatttgtgcagagaatgacaaagatgtcaagattgagccttgtgggcatttgatgtgcacctcttgccttacggcatggcaggagtcggatggtcagggctgccctttctgtcgttgtgaaataaaaggaactgagcccataatcgtggacccctttgatccaagagatgaaggctccaggtgttgcagcatcattgacccctttggcatgccgatgctagacttggacgacgatgatgatcgtgaggagtccttgatgatgaatcggttggcaaacgtccgaaagtgcactgacaggcagaactcaccagtcacatcaccaggatcctctccccttgcccagagaagaaagccacagcctgacccactccagatcccacatctaagcctgccacccgtgcctcctcgcctggatctaattcagaaaggcatagttagatctccctgtggcagcccaacaggttcaccaaagtcttctccttgcatggtgagaaaacaagataaaccactcccagcaccacctcctcccttaagagatcctcctccaccgccacctgaaagacctccaccaatcccaccagacaatagactgagtagacacatccatcatgtggaaagcgtgccttccagagacccgccaatgcctcttgaagcatggtgccctcgggatgtgtttgggactaatcagcttgtgggatgtcgactcctaggggagggctctccaaaacctggaatcacagcgagttcaaatgtcaatggaaggcacagtagagtgggctctgacccagtgcttatgcggaaacacagacgccatgatttgcctttagaaggagctaaggtcttttccaatggtcaccttggaagtgaagaatatgatgttcctccccggctttctcctcctcctccagttaccaccctcctccctagcataaagtgtactggtccgttagcaaattctctttcagagaaaacaagagacccagtagaggaagatgatgatgaatacaagattccttcatcccaccctgtttccctgaattcacaaccatctcattgtcataatgtaaaacctcctgttcggtcctgtgataatggtcactgtatgctgaatggaacacatggtccatcttcagagaagaaatcaaacatccctgacttaagcatatatttaaagggagatgtttttgattcagcctctgatcccgtgccattaccacctgccaggcctccaactcgggacaatccaaagcatggttcttcactcaacaggacgccctctgattatgatcttctcatccctccattaggtgaagatgcttttgatgccctccctccatctctcccacctcccccacctcctgcaaggcatagtctcattgaacattcaaaacctcctggctccagtagccggccatcctcaggacaggatctttttcttcttccttcagatccctttgttgatctagcaagtggccaagttcctttgcctcctgctagaaggttaccaggtgaaaatgtcaaaactaacagaacatcacaggactatgatcagcttccttcatgttcagatggttcacaggcaccagccagaccccctaaaccacgaccgcgcaggactgcaccagaaattcaccacagaaaaccccatgggcctgaggcggcattggaaaatgtcgatgcaaaaattgcaaaactcatgggagagggttatgcctttgaagaggtgaagagagccttagagatagcccagaataatgtcgaagttgcccggagcatcctccgagaatttgccttccctcctccagtatccccacgtctaaatctatagcagccagaactgtagacaccaaaatggaaagcaatcgatgtattccaagagtgtggaaataaagagaactgagatggaattcaagagagaagtgtctcctcctcgtgtagcagcttgagaagaggcttgggagtgcagcttctcaaaggagaccgatgcttgctcaggatgtcgacagctgtggcttccttgtttttgcctagccatatttttaaatcagggttgaactgacaaaaataatttaaagacgtttacttcccttgaactttgaacctgtgaaatgctttaccttgtttacagtttggcaaagttgcagtttgttcttgtttttagtttagttttgttttggtgttttgatacctgtactgtgttcttcacagaccctttgtagcgtggtcaggtctgctgtaacatttcccaccaactctcttgctgtccacatcaacagctaaatcatttattcatatggatctctaccatccccatgccttgcccaggtccagttccatttctctcattcacaagatgctttgaaggttctgattttcaactgatcaaactaatgcaaaaaaaaaaaagtatgtattcttcactactgagtttcttctttggaaaccatcactattgagagatgggaaaaacctgaatgtataaagcatttatttgtcaataaactgccttttgtaaggggttttcacataacataaaaaaaaaaaaaaa

SEQ ID NO: 50176 - DNA, 450 bp, Homo sapiens
ttcttaactggccatgtcaagtacagccactgttgatgccaccaaggacgttctgatgttgccttgcttctgtgaggaggcagagctatgttgtcctcagtggctctgcctgccgtgtcagccacccggaaggtttggagttatgcaacgagtcttcagttttccgtgtttctcctatcttgtctcttgttttgtgtacttaagcctcttgagcttgtccttgtagaatagtgtgggaccactgactaaaggaacagaacgttctggatatctccttcctccagctttagccacagggctgtgcacagctctgttgatttccagccaggcgtgccagcggcactggacagtcatctgcagcccttcatatatcgtaccttggagttgttttccttggaccctcctaccttccaatatcagcttttcaataaatgaaaatggaatccttcc

SEQ ID NO: 50177 - DNA, 1375 bp, Homo sapiens
ccttccccgcatttatttaattttcccatggtggttaacagtaaatccctaaaagactgatttagttcattcatttattccagcaacaaatatttgagaacacactgtgtcccagacactgttctaaggactggcagcgaagtccaagacaaacagtccctaccttcagcaagtttgcagtcaagcaggatgcggatgctgagcattacaagggaaatgattattctgagagaggaagtatggggtgctatgggaacatacaaccagggacctaattttatgggaaagggaccagcccagatccaacacttgctctcccagtttacctccagtaggttctttttaacttgaactaatcttgtttggtggggtacacagtgaggaaaaagaagagctagtgacaaaatctaactcccttctcagtcttaagcaaggtgaaggcaagggagtagaagatatcaagggagtgagtggtggtagccaccaaaggagatagcagactgaggccctaaaaaaagaaaggaaatctaaatctatccaagcaggaccagagaaagagtgctgagggtgattagatggaatccccctgcatgtactctcccggcattctgaaaagaagccaaaacaaggaagaaaccgggttatctagttaagacctcacaaatcactcatccattcctctgacatgttcataaactttttataggtggttacgaaccaaaagcttggcatttcttggcacttttccaataccctttaccagctcacattatctggctcccacccaggctacagatagcctggctgttagcacttcacagaagggatatagactggcccagattcaagagctgcccttctaatttacctacagtgggtttttaactttgagttcccacatagagatggggcagccaaatatcaagcccaaatccctcacttcacctactcaacaaaatgacccccaaaatgtaaagtttctgtgcctttaatgcttcccggtccctaaaagcccaacttttcctcgaagctgggcacctgacctttagccaggtttcttaatcttttcatgcttttcataatagcaaattccactaggtctcttagaaactctaaaaccaaggcttaagcactttaaataaataagtcctcatgtcaccactgattttgaacttttagtttttaaaataaggctagctcaacttttgagtcattttgaaaagttggagatggcctggtttaaaggtaccagactagacatgggcttccttactatgtcccgacacagacagataggcatcactattcaagaggactggggcttgcaaccacagattagcatcttatttgccatttaggtcccagattgcttgag

SEQ ID NO: 50178 - DNA, 426 bp, Homo sapiens
gtgaagagaggcgcggcgtgactgagctacggttctggctgcgtcctagaggcatccggggcagtaaaaccgctgcgatcgcggaggcggcggccaggccgagaggcaggccgggcaggggtgtcggacgcagggcgctgggccgggtttcggcttcggccacagctttttttctcaaggtgcaatgaaagccttccacactttctgtgttgtccttctggtgtttgggagtgtctctgaagccaagtttgatgattttgaggatgaggaggacatagtagagtatgatgataatgacttcgctgaatttgaggatgtcatggaagactctgttactgaatctcctcaacgggtcataatcactgaagatgatgaagatgagaccactgtggagttggaagggcaggatgaaaaccaagaaggaga

SEQ ID NO: 50179 - DNA, 2669 bp, Homo sapiens
gaggtgaccagggccactgcaggcatggtgctagagctgtacgtctctgaccgagagggaagcgatgccacgggagatggaaccaaggagaaaccatttaaaacaggtctaaaggctttgatgacagtagggaaagaaccatttcctaccatttacgtagattcacaaaaagaaaatgagaggtggaatgttatttctaaatcacagttgaagaacattaaaaagatgtggcatagggaacaaatgaagagtgaatcccgggaaaagaaagaggcagaagatagtttacgaagagaaaagaacctggaagaagcaaagaagattaccattaaaaatgatccaagtctcccagagccaaaatgtgtgaagattggtgcgttagaaggatatagaggccaaagagtaaaggtgtttggctgggtccacaggctgcgcaggcaaggaaagaatttaatgtttctggtgttgcgagatggtacaggttatcttcagtgtgtcttggcggatgagttgtgtcagtgctacaatggagttctcttgtccacggagagcagtgttgcagtgtatggaatgctaaatcttaccccaaagggcaagcaggctccaggtggccatgagctgagttgtgacttctgggaactaattgggttggcccctgctggaggagctgacaacctgatcaatgaggagtctgacgttgatgtccagctcaacaacagacacatgatgatccgaggagaaaacatgtccaaaatcctaaaagcacgatccatggtcaccaggtgctttagagatcacttctttgatagggggtactatgaagttactcctccaacattagtgcaaacacaagtagaaggtggtgccacactcttcaagcttgactattttggggaagaggcatttttgactcaatcctctcagttgtacttggagacctgcctccccagccctgggagatgttttttgtattgctcagtcataccgggcagagcagtccagaacacgaaggcacctggctgagtacactcacgtggaagctgagtgtcctttcctgacttttgacgacctcctgaaccggttggaggacttggtttgtgatgtggtagatcgaatattgaagtcacctgcagggagcatagtggcatgagctcaacccgaacttttcagccccccaaacggcctttgcaaacggatgaactattcagatgctatcgtttggctaaaagaacatgatgtaaagaaagaagatggaactttctatgaatttggagaagatatcccagaagctcctgagagactgatgacagacaccattaatgaaccaatcttgctgtgtcgatttcctgtggagatcaagtccttctacatgcagcgatgtcctgaggattcccgtcttactgaatctgtcgacgtgttgatgcccaatgttggtgagattgtgggaggctcaatgcgtatctttgatagtgaagaaatactggcaggttataaaagggaagggattgaccccactccctattactggtatacggatcagagaaaatacggtacatgtccccatggaggatatggcttgggcttggaacgattcttaacgtggattctgaataggtatcacatccgagacgtgtgcttataccctcgatttgtccagcgttgcacgccataaccattttctccagaagcgtggaggaaagattatgaaaggaacaggctctttaaaaaagaaaacaaaaagccagaatcttcctttttttgtttcattggggtttctctttctgtttttctttctactaccataaaaactatctcaaatcacctgaacatcaagtgatattaaggttgtcatcttaagaaaaaatatccatttttttcttaagttcgggaaacaaagttcggggaaaatacctggcatgaaactgtagttagggatacatttcagcattttactcactttatccaagttattcattttattcaagttatatgtatgtataattcaacaattttagattatggtgtaagatactccagtaacttatctttctgtccttttaagtgtacctggaattctttgatttattttattgcatcaatgaattaaaacaaaaatcttgggggaagaaattggcaatatcgtataaaaatctgctcatattagaacacagtataattcagcagtaaacactagaatcaaatgaatagccttttgtatcagttattaatcttttctaactctgcttagctgctaataatcctgaggcatagaaattgaagaatttgtaaaaatagaattgccttaaaggatttgaagtaagaacataattttggggagagttttttagtgattcacagtatccctcttagcattaatttaaggtaaagaggcagattgattttccctctttcctggtaattcctaagtaattaagaataaataagttccaaaagaaattgtagctggaatcttaataacaattgtgagtggctgtttgagttgcccccaccatgtccttagatctaatctgtgctaccttattaactcacagcaggcttactgaatggcttcatttcagatttagttgatttctccaccaaatgcatgtcatgtattctcaataggctgtattcccagcagtcaataaatgaacacccgtaaaaactca

SEQ ID NO: 50180 - DNA, 1065 bp, Homo sapiens
cagctacccaagctccaggagcttccggtatgtgttttccctctgttctcgattaccttggcaacggctgaggcgggagaccggttggtctgcaccgtcctggagggagatatgagtggctggactctcagccagccactgggatgtgttcgggctttggaccttgaggccggagagagctcccgagaggaggcggcgccacgttcgttcttctgaggggacggtagatttgggggtttttcctctaggattctcgcgccgtttcctctgaagaaacagaaccagagagggaaggtgacctgaaagtcacagaataaatttttttagagctgaacaagaatccaagcctgcaactgcaactgcagagacgagagatctttctgctgtctatactcttggaaagcacatcctaagatctttgcagattatcctgtggaaggaaaatgcctaaagtcaaaagaagccggaaagcacccccagatggctgggagttgattgagccaacactggatgaattagatcaaaagatgagagaagctgaaacagaaccgcatgagggaaagaggaaagtggaatctctgtggcccatcttcaggatccaccaccagaaaacccgctacatcttcgacctcttttacaagcggaaagccatcagcagagaactctatgaatattgtattaaagaaggctatgcagacaaaaacctgattgcaaaatggaaaaagcaaggatatgagaacttgtgctgcctgcggtgcattcagacacgggacaccaacttcgggacgaacttgcatctgccgcgtgcccaaaagcaagctggaagtgggccgcatcatcgagtgcacacactgtggctgtcgtggctgctctggctgaggctggcgcgctccaccctggactctggacttcgcaggttcctgcctgtcacgccacccccttcctgggagcagcgagcagtgccccaggcccgagttggagcacggtctctatggggaaggcttcgctgtctatcagctgtgatttgtaaaaataaaatctttaaatctctcgaaaaaaaaaaaa

SEQ ID NO: 50181 - DNA, 483 bp, Homo sapiens
  misc_feature (1)...(483): n = a,t,c or g
aaaaagctaaagtccaccaggcacagtggctcatgcgtgtgatcccaaaagtgcggggattacaggcgtgagccaccatgccttgccaacagttaggtgtgttaggtttagtccatataggggctagaacttcccttacacttaaatcttaaaaggaaaatattttcttaagatttctttttttaaacattaagtggtgcattaatcttttttctatagcctaatatgcaaatctgcctactttgagtaaggctaaatagcttcaggcttcttctgtagggcgtgagttgaacttcagttgagtgtttggaagatgtttgtcatcagtcactagggggtgacccggtcagtacaaaagcattccctactagaaaaatagctgtgtccacagccttctggtgaggggttggttgcctggcttcagtctatttcaaaagtcagtgcatataaattgaatattaagtcatatggtgnatatggcac

SEQ ID NO: 50182 - DNA, 986 bp, Homo sapiens
tttttgccattggtttaatcttttatttggaacaaaggaaaaaaggactgacaccagtttagcctttgagtgtgcagagctctgccctccctcccacccctcagccccaaatccaagatttcatagccctaacacccacccaagcagcttccctcacacatgccctttgttttcttcctctcttctatggttccttagggaaaggagccttctttagggatgaaaagctaactacagcccagtctggcctccagcagcccagggtcagctcagcctccactggaggcgagggaggagggcaaagggcatgggagaggtagggctgccctccaggagccttccccttccctaggagccagtcaggattggggaggaaggcagaggggtcctagccagctgtcacatagaggaataggggctgggagtggggatgacaagaagtacaaagaaagagaaagtttggggagatggataacaagctcagctgtgtcagtgatgtggaggggaggtatggtgggggaccagccatggccctatccaaccccaggctccacaggccccaaattggctttgcaaatccaaacattttaaggaagtggtttagggatggaagagaaacacggtagaggtctgtgctgtggattttcatctagggtggtgggaacaccagagatgtctcctctgccattgttttagttggctcctggacctcatcccagcagagggagggtgactgtcagcaggtcagtcccaccgccactgtccccctcgcagtgggcctctgtgtctcaggcctggccaggctccctgcccctcagagctcctcgtggacccgctcctcgtcctcatctgacttcagcttgagctcgtcgactgtgatcttgccgtcctggttgcggtcctggttctggaacatgtctcctatggttttctcagggtcctgcccaggcatgaggcgtcctttgccctcactcacttgagccttg

SEQ ID NO: 50183 - DNA, 87 bp, Homo sapiens
aagtgtgtctatctactgtgtcccaggcttctttatttaagaaaaaagtgatacatgatatggggattaaaatcaagagcatccccg

SEQ ID NO: 50184 - DNA, 518 bp, Homo sapiens
gagcattctgggtgctagccttttactgcaacaaggaggtatacaataaggagaatcttttcaacagcctgaactatgatgttgcagccaagaagagaaagaaggacatgctgaatagcaaaaccaaaactcagtatttccaccaagaaaaatggatctatgttcacaaaggaagtactaaagagcgccatggatattgcaccctgggggaagctttcaacagactggacttctcaactgccattctggattccagaagatttaactacgtggtccggctgttggagctgatagcaaagtcacagctcacatccctgagtggcatcgcccaaaagaacttcatgaatattttggaaaaagtggtactgaaagtccttgaagaccagcaaaacattagactaataagggaactaactccagaccctctacacatccttatgtacactggtcaaaagagtcggcaagtctgtgctggtcgggaacattaacatgtgggtgtatcggatggagacgattct

SEQ ID NO: 50185 - DNA, 440 bp, Homo sapiens
attccatgcatgtgttttgtgtttgtgacggtgtggtggtatttagtctatagaagaacatgtggagcaggtcaaccaaaactgcatagcagaagattgccacatcaaggttgaagctgatctgggctatccaggtggaaaggcgaaagtcatccataaggaatctgatatgatcatggcattttctgttaataaggcaaattgtaatgaaattgttttggcttcaacacatgatgttcaagaacttgatgttacttctctactggcctgtcagtcatacatatggatcggagaagaatatgacagagaatccaaaagttcagatgatgttgattatcgtggttccactacaactctttatcaacccagtgcaacatcctattcagcaagtcaggtgcatccaccttcatctctgccatggctgggcactggacagacta

SEQ ID NO: 50186 - DNA, 598 bp, Homo sapiens
actaatacaggaattctttccaaagcaatgtctaaaaactctttttttaaaagtaacagtttggtatgtttattgtagataaattatttttgaggccttcattttagctaagtttagaatttatattaggcaactatgatttgagtggttattcattgagtaattttccactataaagaattttattgaacatttattaaaaaataatgtaatgcatggtcaaaaaatatgtaattcatggtctggacactgacgttgtttagggatttagtcatcaaggacagccctctgttgtttctaatgccatactaatcaagactgtatggacacttgcatcttaagtactaaggaattactagtgattgttttattttatccatgtactcttttagtatttaataattaaatacctattcttagtgtttgacactccatatttcttttttttggaaatgaaacaaatatgcagtccaaaattcaggaactactagagtgaaatgatattaagtggaaaccagagataaatgctgttaatttaacaagtagattcttctccaaagaatgatgagtgattcttgggaagataaatgttaatgtt

SEQ ID NO: 50187 - DNA, 849 bp, Homo sapiens
ttttttttttgcaggttttcaattactttattttagaaaaacaaaggtttacaatttgtgccataggagaatatcatgaattcaacaagttagtaatgcagactttcaaaaacctctatagattagtccaaagtagaaaattattttttgcccactcttggactcagacacattcagaaaaaatatatatttataaaaataaaatgtcaagcctaatcccaccaattgatagtcttaatatcctacactggtttatttgatcatttaatgcataaggagtgttgaatgatttttccctgtcctaactccatgtcgtatgaagcaatgatgaaaatatgttactttttgcaacaccaaaataaaaaggtcccaaagcaaaacacacacaaaaagtcactaacaatatccactaaacaaaaacagtactgctaattcacctgctcatatagacccttccttcaatcccccagatacttggcatttaaatgttatttctaaatcagatacccaggaagcaactatgtgagaaagaaaatgaaaattctaggtctaatacatgttaaacaagtttcaggtaatagtagctgagaaaaatattgatgcacataatgaaacaaaaagaattgccagatataatgtggtgcacagggtactcgataaaaacatgcactttgtctcgctgaaatgtccttaaatattgtctgagcaccaaattctgcaaaagcaaggatctagaattccgaattttagaagttataaagagaacttcactgcaattaaaagagaaggcaaaaattccaacttcctgaaggaccccattattcatatagaatcatgacaaaatttacc

SEQ ID NO: 50188 - DNA, 2366 bp, Homo sapiens
ttcggcagaggccgaacctggcttcgctaacgccctcccagctccctcgggtctgacttccggtttcctcgcgcgtccctggcgcgacccgcggacagcggagccccgttttccggctgagagctcatccacacttccaatcactttccggagtgcttcccctccctccggcccgtgctggtcccgacggcgggcctgggtctcgcgcgcgtattgctgggtaacgggccttctctcgcgtcggcccggcccctcctgcctcggctcgtccctccttccagaacgtcccgggctcctgccgagtcagaagaaatgggactccctccgcgacgtgcccggagcagctcccttcgctgtggaagcggcggtgtcttcgaagaaaccggaagcccgtggtgacccctggcgacccggtttgttttcggtccgtttccaaacactaaggaatcgaaactcggcggccttgggggcggccctacgtagcctggcttctggttgtcatggatgcactggtagaagatgatatctgtattctgaatcatgaaaaagcccataagagagatacagtgactccagtttcaatatattcaggagatgaatctgttgcttcccattttgctcttgtcactgcatatgaagacatcaaaaaacgacttaaggattcagagaaagagaactctttgttaaagaagagaataagatttttggaagaaaagctaatagctccgatttgaagaagaaacaagttccgtgggacgagaacaagtaaataaggcctatcatgcatatcgagaggtttgcattgatagagataatttgaagagcaaactggacaaaatgaataaagacaactctgaatctttgaaagttattgaatgagcagctacaatctaaagaagtagaactcctccagctgaggacagaggtggaaactcagcaggtgatgaggaatttaaatccaccttcatcaaactgggaggtggaaaagttgagctgtgacctgaagatccatggtttggaacaagagctggaactgatgaggaaagaatgtagcgatctcaaaatagaactacagaaagccaaacaaacggatccatatcaggaagacaatctgaagagcagagatctccaaaaactaagcatttcaagtgataatatgcagcatgcatactgggaactgaagagagaaatgtctaatttacatctggtgactcaagtacaagctgaactactaagaaaactgaaaacctcaactgcaatcaagaaagcctgtgcccctgtaggatgcagtgaagaccttggaagagacagcacaaaactgcacttgatgaattttactgcaacatacacaagacatccccctctcttaccaaatggcaaagctctttgtcataccacatcttcccctttaccaggagatgtaaaggttttatcagagaaagcaatcctccaatcatggacagacaatgagagatccattcctaatgatggtacatgctttcaggaacacagttcttatggcagaaattctctggaagacaattcctgggtatttccaagtcctcctaaatcaagtgagacagcatttggggaaactaaaactaaaactttgcctttacccaaccttccaccactgcattacttggatcaacataatcagaactgcctttataagaattaatttggaagagattcacgatttcaccatgaggacacttatctctttcagtggtcctcccaagaaattatttaacaaactgaaaggagattttgattaaaattttgcagaggtcttcagtatctatatttgaacacactgtacaatagtacaaaaaccaacatagttggttttctagtatgaaagagcaccctctagctccatattctaagaatctgaaatatgctactatactaattaataagtaaacttaaggtgtttaaaaaactctgccttctatattaattgtaaaattttgcctctcagaagaatggaattggagattgtagacgtggttttacaaaaatgtgaaatgtctaaatatctgttcataaaaataaaaggaaaacatgtttcttcaaattgcataatggaacaaatggcaatgtgagtaggttacatttctgttgttataatgcgtaaagatattgaaaatataatgaaataaaagcatcttaggttataccatctttatatgctattgcgtttcaatatttaagatttaaagtgattttttggtcacagtgttttgttgataaaatttttttagaattgaagtttgaattctaagacttgaaacaacctgatcactgaagccaactttgtcccagcacattccttaagtcctaattgggaaaaaaaaaaaaaa

SEQ ID NO: 50189 - DNA, 357 bp, Homo sapiens
gctaaaaaaagccgttcctttattctgccccaggcaggctgcagtcacagacacacggggaatccactgatggcgtcggtgctctgcatgatcatgtctgccagcagaaagcagaagcccgcgagaattgagaagggtaaggccagccacccagaaaaataggaccaagagaagaagacgttgttcttccacgcattcttcacggtgtagcctatcaaggcggtcagcagcagcagtccgccgaggaagaggaaggcgctcgtggtctggccccgcagcgactcgccctcgtcgcaccgaatccgcagtcccatcaccatgcccaccacgccgacacccaccgccagcaccatgcac

SEQ ID NO: 50190 - DNA, 2204 bp, Homo sapiens
aggatcagatgaaaaaaagagtgtgaagacagttaatcaactggcccatgcccttcacatggacaaagatttgaaagctggctgtcttgtacgtgtgttttggccaaaagcaaaatgtgccctcttgagagatgacctggtgttagtagacagtccaggcacagatgtcactacagagctggatagctggattgataagttttgcctagatgctgatgtctttgttttggtcgcaaactctgaatcaacactaatgaatacggaaaaacacttttttcacaaggtgaatgagcggctttccaagcctaatattttcattctcaataatcgttgggatgcctctgcatcagagccagaatatatggaagacgtacgcagacagcacatggaaagatgcctgcatttcttggtggaggagctcaaagttgtaaatgctttagaagcacagaatcgtatcttctttgtttcagcaaaggaagttcttagtgctagaaagcaaaaagcacaggggatgccagaaagtggtgtggcacttgctgaaggatttcatgcaagattacaggaatttcagaattttgaacaaatctttgaggagtgtatctcgcagtcagcagtgaaaacaaagttcgaacagcacactatcagagctaaacagatactagctactgtgaaaaacataatggattcagtaaacctggcagctgaagataaaaggcattattcagtggaagagagggaagaccaaattgatagactggactttattcgaaaccagatgaaccttttaacactggatgttaagaaaaaaatcaaggaggttaccgaggaggtggcaaacaaagtttcatgtgcaatgacagatgaaatttgtcgactgtctgttttggttgatgaattttgttcagagtttcatcctaatccagatgtattaaaaatatataaaagtctccctagatctttagcttctactcccactgctcctaccactccagcaacgccagataatgcatcacaggaagaactcatgattacattagtaacaggattggcgtccgttacatctagaacttctatgggcatcattattgttggaggagtgatttggaaaactataggctggaaactcctatctgtttcattaactatgtatggagctttgtatctttatgaaagactgagctggaccacccatgccaaggagcgagcctttaaacagcagtttgtaaactatgcaactgaaaaactgaggatgattgttagctccacgagtgcaaactgcagtcaccaagtaaaacaacaaatagctaccacttttgctcgcctgtgccaacaagttgatattactcagaaacagctggaagaagaaattgctagattacccaaagaaatagatcagttggagaaaatccaaaacaattcaaagctcttaagaaataaagctgttcaacttgaaaatgagctggagaattttactaagcagtttctaccttcaagcaatgaagaatcctaacaatagagattgctttggtgaccatgataggaggaaacgaaacttgtaagattggaacagttgttatttttatgaaattactttaaatatgaattgtactatctgtacctaaatagcaaagccctgtgtagattctggtaatgatctgtctcagggtatgtgtatttttgaagagtgttatgtccttagttttaattttgagtaaagaaaaggctaaaatcatgaattagttacaagcaacagtaccaacttatgtgacccctgaggggtggggctgtgagctcttaatttgtttttgattctgaaaaactctgcttcctggcatccaggagttagagattgagcctttcatcttctttctcaacactagtttttgatgctttctttcatgggaatagtcacttttttatttagtaaaatcgcattgctggaaccacccgccgcatctcttcttcacggcgcctgcgctcttcctcctgcctgagctccagttgctttcgtttttgcacctcttggttgtgcggctcttccatcctccgaagttcttcttggcgcctcatcaaatcctgtctcattagcatgacctggtgctcatggcgtgcagcttccatctccatctccagcttctcacgagcctagcagaagggggtggtgtctccaaccccccagcactgaggaagagcggggctcttct

SEQ ID NO: 50191 - DNA, 392 bp, Homo sapiens
gttctttataataagccatttcctggaacacgcaggcgatgggcaggggggttactacaaccttatagaaataaaatttctttaactctgcctatatttcagggtatagtcctcaggtaaagcttcacattgtcaagaagaacttgaaaataccttttttccataaaaacacaatgaaactaatactatgtaacggaatattccaaagcactagttcttataaataactattggccaaaatacaaataactgacccaattcaaaattctctaagatttcattaagatccttttgtaggttcataagcctgatgcatggggtgttcacgccgcatgtgtgagatggtggcctccctccaaaccttggttatggcgccagcccattaccggtct
